United States Patent Application Publication US 2005/0228172 A9 - sequence listing, part 133

SEQ ID NO: 625623 - DNA, 641 bp, Homo sapiens
atatgtaattgaagttgctatcagcttaaaatagactgttataactataagatatacatttaacccccctggtaacaacagaggaaaaaaacctctagcagataaataaaatagaatgagaacagaacaaagtatactgctagaaaatattaacaaactacaaataaaaagaacaagaactcattttttatggctgcatagtattccatggagtatatgtaccatattttctttatccagtctatcattgatgggcatttaggttgattccatgtctttgttattgtgaatagtgctgcgatgaacataaatatacgtgtgtctttataatagaatgatttatattcccttggggtatatacccagtaatgggattkctgggttgagtggcatttctgtctctagatccttgaggaaacatggatggagctggaggccatcatccttagcaaactaatgcaggaacagaaaaccaaataccatgtgttcttatttataagttggagctaaatgataagaacacttagacacatagaggagaacaatatacactggggcctaccagagggcagagggttggaggaaggagaatatcaggaaaaataactaatggatactaggcttaacacctggccgatgaa

SEQ ID NO: 625624 - DNA, 541 bp, Homo sapiens
caaagtcaaaaaaacagtggatgttggtgagactacagagaaagggaatgtttaaacactcttggtaggaatgtaaattagtccagccactgtggaaagcagtttggagatttctccaataacttaaaacagaactatcctttgatccagcaatctcattacctgagtacttatccaaaagaaaataaaccattctaccaaaaagacacatgtacttccytgttcactgcagcatattaataacaacaaagacatgaaatcaacccagatacccatcaacaatggattggacaaggaaaatgggtacatatataccgtggaatactacagtcataaaaagaatgaaatcatgtcctttgcagcaacatggaagcagctggaggccattatcctaaatgaattaacacacgaacagaaaaccaaacactgcatgttctcacaagtgggaactaaacattaggtactcatggacataaagactgcaacagtcaacattgggtactactaaagtagggagaaaaaagggaagtaagagttgaaa

SEQ ID NO: 625625 - DNA, 582 bp, Homo sapiens
caataaacaaaacctgtgtgaggactaatagatagtcaaaaaattattatatcttgagttagagaagtgacttgctaaagttacacagatttccagctgtaatcaaaatgatagcagatgctcagttggctcactgaatggactgtctcagtctctgaacttggattacttgagtctttgaagtaatattgctaacatgttttggatttcttgtttggaaaaatgtaacctttcattttcttctgttttgtgagtgagtgtgtgggtatgtcttagaaagagtgagagagaacatacatatggccatatgaatctaacaaacataaggataagagcaaaaagcacgtatcatctgattccatctatrtaaagccaaaaatagacaaattatattatttaggaatgtataagaaatagtaaactacaagaaaagcaaataaatgatgatcatgaaattctagacagtgattactttagcaaagaagtaactgtttagtatcctattgtacgactatgtcattatttgtcttctctacttttcaaaaacgttagattgttttaaatttttggctattacaaatg

SEQ ID NO: 625626 - DNA, 585 bp, Homo sapiens
agtttatggggaggggaaagagaagttcatgatgatgtttatgtttatggactaaataactatgtctaatcaaatggttgtgccagccactggcaaaagaaacagaagtcatggaatgagtttggaagactgatgattaatttatttctggacataggtgagatctccagatgaaagtgtcctgtgtcatgttgacgttggatacatgggtctggaatccagaggaaacatcaggattaaaaacatacgtttgaaagacaatctacaggcaagggtaagaatggctaaagaaagagttctaacaagaagggcagagagccaaagagccaaggctaaaatcttaaatccatactgaaaaggatgggaggaaggttatgaaccaacaaaggagactaagaggcatgtggaaaactgttgtgcatttctcaaaatcagcaatcagaatgttttgtagtaacwaaaaagcaataggaaaatgaaacatcttctgtgctatgtgttttaaaagattgtagcaactaatagtcacaagcacaaaaacactcaggaaatgacattgccttttgcttttacccctcacaccaa

SEQ ID NO: 625627 - DNA, 552 bp, Homo sapiens
tgaaccaaccttgcatcccaggaataaatcttaattgataggatgaattagcttattgatgtgctgctggatttgatttgctcattttttttttttttttgttaaggatttttgtgtctaagttcatcaagggtattggcctggagttttctttgtttcttgtgtctttgccagattttggtatcagaatgatgctggttttgtagaatgaattagggaggagtctcctctccttgattttttggaatagtttcagtaagattggtaccagctcttctttatacayctggtagaatttggctctgagtttgtctgctacagggctttttttggttggtacattttttgttactggctctatttcagaattcattattggcctgttcagtgtttcagtttcttcctgattaaatcttgggagactatgaatttacccatttcctctagattttttagtttgtttagatagatgtattcatagttgtctctgaggatcttttgtatttctatgggattggttgtaatgtcaccattgtcgttggcattgtgctc

SEQ ID NO: 625628 - DNA, 609 bp, Homo sapiens
ttatcttcatttattgtagctctttaagcacaagttgttcaaaagttaacactaaacaggaaatttaatgtactaaccaggtagaaggtgaaacaagaggtacagcaaaaggagccaagtattgtgcaagtgcagccccagtgtggggaataacaaagccatggtctttgcatattcctacaggtactcagcactatgttaggcacatgttaggaacttaattaagcattgggtggttgattaactgagtgataaaagayttatgaatagtaaagagctttgtaaaatggaacaattaaaatcagagagaaaggccaaaactaattgtgtgaaagtggcagatggtcgataaagctgtgaagtcccgaagtctgtaaacttgcagaagcattgcattttagaggaacactgtcagcaatcaagggaccacagcctagtggaaaagaaagaggctgcacagacgattatcttcttgagaacccaaaggctgtcaaatagacaggccaacttaattaagaaacttattttagatgtaccaagtgtgtcctagtcaatctactagagagtaaagaccatgggtagtggcagcccctacatggattcctccag

SEQ ID NO: 625629 - DNA, 436 bp, Homo sapiens
tcgcgtcacgcgcacgttctgctcctcgtggtcctgcccggcccgcgccaccaccggccctgctctgcggggccacccgtgcgccccttcgccgtccgctgactccgccctcccgcctgccgacccggccgccraccttcccccggctctgtcgctcccaaggctttctgcagccctccgtgctccaggccgcacacctgagggtgggacccccggaggccgagccggtgtcggatcaaactcggagaccgagcagggcccaaaccgggaccggagtggggacgggcggaggaagccaagaggctcgagaccgaggctcgcccacccctcggcgccgccggaccctgcgccactgggggaatttccttcccgacttccccgcgcggccacagccccagctccgtccagcccccgctcccggccccctgggcgggag

SEQ ID NO: 625630 - DNA, 494 bp, Homo sapiens
ggaacataaacaacttaaaaacgaatccaacaacctctaatgaaataatagatttagtcaatgatagtaaatggctgcaaaaccatgaaatggaaagctagtggagggaaaaaaagctgaaaggaattttataatggatagatcaggttgacagcaactgaacccactgattagtcttatgttctcaaaaaaaagatagcaagaaattatgtggttctgacatgatgcaataggaagttcacactacctataaaatattcttgccaaaaaaaaaaaaaaaaatygccgggtgcggtggctcatgtctgtaattccagcactttgggaggccgaggcgggtggatcacaaggtcgggagattgagactatcctggctaacatggtgaaaccccgtctttactaaaaatacaaaaaattagccaggcatgggggcgggtgcctatagtcccagctactcgggaggctgaggcaggagaatggcgtgaacccaggag

SEQ ID NO: 625631 - DNA, 494 bp, Homo sapiens
ggaacataaacaacttaaaaacgaatccaacaacctctaatgaaataatagatttagtcaatgatagtaaatggctgcaaaaccatgaaatggaaagctagtggagggaaaaaaagctgaaaggaattttataatggatagatcaggttgacagcaactgaacccactgattagtcttatgttctcaaaaaaaagatagcaagaaattatgtggttctgacatgatgcaataggaagttcacactacctataaaatattcttgccaaaaaaaaaaaaaaaaatcgccgggtgcggtggctcatgtctgtaattccagcactttgggaggccraggcgggtggatcacaaggtcgggagattgagactatcctggctaacatggtgaaaccccgtctttactaaaaatacaaaaaattagccaggcatgggggcgggtgcctatagtcccagctactcgggaggctgaggcaggagaatggcgtgaacccaggag

SEQ ID NO: 625632 - DNA, 494 bp, Homo sapiens
ggaacataaacaacttaaaaacgaatccaacaacctctaatgaaataatagatttagtcaatgatagtaaatggctgcaaaaccatgaaatggaaagctagtggagggaaaaaaagctgaaaggaattttataatggatagatcaggttgacagcaactgaacccactgattagtcttatgttctcaaaaaaaagatagcaagaaattatgtggttctgacatgatgcaataggaagttcacactacctataaaatattcttgccaaaaaaaaaaaaaaaaatcgccgggtgcggtggctcatgtctgtaattccagcactttgggaggccgaggcgggtggatcacaaggtcgggagattgagactatcctggctaacatggtgaaaccccgtctttactaaaaatrcaaaaaattagccaggcatgggggcgggtgcctatagtcccagctactcgggaggctgaggcaggagaatggcgtgaacccaggag

SEQ ID NO: 625633 - DNA, 599 bp, Homo sapiens
accaaaactagaaaaggacataacaaaaaaggaaactatagaccctgatgaatatagatgcaaaaatccctaacaaaatactagctaagtaaatccaacagcatatcaaaaagataatccaccatgatcaagtgggtttcataccagggatgcagggatggtttaacatatgcaagtcaataaatgggaattaaagcaaaaatcacatgatcatctcaatagacacagaaaaagcatttgacaaaatccagcatccctttatgattaaacctctcagcaaaatcagcatagaagggacataccttaatgtaagaaaagccatctatgacaaacccacagccaacataatactgaatggggaaaagttgaaagcattccccctgagaaatggaacawgacaatggtgtccactctcaccacttctattcaatatagtactgaaagtcctagccagagcaattggacaagataaagaaataaagggcgtccaaattgataaagaggaagtcaaactgttgctgtttgctgataatatgatcatatacctagaaaaccctaaagcctcctccaaaaagctcctagaactgataaatgaattc

SEQ ID NO: 625634 - DNA, 430 bp, Homo sapiens
acctgggtgacggtccttcagagtgttcaaatgtgcaactgtcctttcagtagcaataggagtactacaaggaatctggggtgcacactctctgggaaagaaaaaaagaacatgttataaaaatcctcaatcatattctstcacacatgataaatctgctgaagcttaaatcttttggggcttggggtgggtgtggggggatacttacttatttctcttaagtttccatggggaggactttggctagattaaacatttctagccactctccacctctcactcactcctcaggatggaactaactgttgagcctgggagaaataactgagtatccttggtacactcctccctctgtcctctttaggagcaggatgcagacatcccatgctccttggtgccccaagttgcattgagaagacctatgcagagg

SEQ ID NO: 625635 - DNA, 591 bp, Homo sapiens
cttctggaaggctctgattgatataaacataaaaaacctccagaaggatgtatattacttgttaatagctggtatctctaacagtgagaatatgaagctttttaactttctatattaaaggttttttcaagattttacttttttcatratgagtacgttacttagtaattaatgtttttaaagtaaagataaatttaaattattcaagacataagagtgaacagtcaaacacagctgagaaataaagtataatattaagaaacgaccattagatttaccaatggaacgattttatgtaggacaagatggagttttttcctaacatcttgtagttcaagctggcagacactacctataaaggatctgattccacagactgcttcaggacagtggaaacccttcttttaatcgtgttctctggcatagtgattctaactgctattttttcaccaggtcctgcctgggctttcttcctaccagctcccagccctgtttgatttctttgaaagatcattctagctgctctggagagaccaggtggccagaaatagctgtgagcagaccagttgggaagccagggcagcagctgtc

SEQ ID NO: 625636 - DNA, 544 bp, Homo sapiens
acctaacatgctccacaaggtcttgcaggggtagcggccggggtttggggagggacgtctctgtaggtttactttattcctggcttctgtcttccaagatccctcacaccttaacaacaacaataatattggcaaacacctaaatagcgcggactccggctagcgctctcgcaagcgctttccatgcattaattcatagaatcccagaatcacccttagaaggtgccacccagggtcacgcggcaaagagtggccgagctgaggctttccccgggtctgtttccacggcccatgctcttaaccatcacgctgtatttcagaagcgagaatcttaaattatttttccccaaagcgcaatggagacgcaatcgagtttgagtggtttgtgtgagactggggggtggggtggggtgtgaaacccgtggtgtcaaaaaatcaaaagcggagaacaaagccttctgaagaccagaagccacttttaggacccagtttcccaaatatcaaccccaaagctgtaaaacgaastttgctcagtgagcagtta

SEQ ID NO: 625637 - DNA, 522 bp, Homo sapiens
tgtctctcttttcagttctatcagtttttgttcacatattttgcctacctattctttggtacagatacgtttaggattatcatgtctcattagtgaattcactcttgtcattatgtaatgttccctctgtgactggtacttttctttgttctgtattctactctatctcacattaatatagttgctcctcctttactttaactgatatttgcatgatctaccttttttcatccatttactttttttttgagagggaatctcactctgtcacccaggctggagagcagtggtgtgatcttggctcactgcaaagtccacctcccaggtttaagtgattctcctgcctcagcctcccaagtagctgggactacaggcgtaagccaccacgcctggctaagttttgtatttttagtagagacagggtttcaccatgttggccaggctggtcttgaactcttgacctygggtgatccacccgcctcagcctcccaaagtgctgggattacaggcatgagccactgt

SEQ ID NO: 625638 - DNA, 426 bp, Homo sapiens
gattctttttgacctaatattcatctatttttagttgaatatgctacaaatatactgtcacatatccacagaggctttcaatatagtrctctgtgacagtaaaatacagaaaaacatcttaaccatccaacaaaatacggtgctttcatataatggaatactacaagattatctaaaagaaagaaagattcatatgtattgatataaaacatctcaggatgtattaattgaaaagagcaaggtgtcaatccatgtgtatcatgtggtatagcttgttctaaaaatggaaatacgcacatgtaacagcatgtctatcaccaatatgccacaacaccctttggcgaaaatctcaaggtggtgtggtccagtatcagccatgtcacatcctgtggaagggtaaatgtgcccttccacatcacactgccc

SEQ ID NO: 625639 - DNA, 599 bp, Homo sapiens
acacagcatcacaaattctaatctatgaaattattatttgatgttaatatgtaagtactaatcatatatgtaaaaactgggttggagattcactacccatgtttattatttctattaatagtcagcctacccagagaaaaggttgttggttggagttcaaaaaacataattctattgagttacagtctaatctctgcttgattattgctatataacttcctccccagtcaagctctctcgatttcccttttttcatcwtctctcttatacactagctactttcctgaattactctcacatctctgagactgaattcagctaaaagttattcctgttcaggaaataggggccagtttaaatattcagaattctagagagtatcttttaattacagtaaaaaaaaaatatgaaatctacactattaacatattttaagtgtacagtacagttaactatatgcccattgtacagtagatctcagaacttgttcatcttgtattattgaaactctatatccattgtatagtaactctagagagtatttcaatcacaaaagtgaattaattattttctaagtgataaattttaaaaagtaaatg

SEQ ID NO: 625640 - DNA, 585 bp, Homo sapiens
tgatagatgattccctcactcccaaactaaattcagtattgacttgatgattcttttttcccccaatttgagaaaccttcaaattgaaatagatatctttctggttatatttcaaaagcccatacaggcatctgtctctctctgtctctgtctttgtctgtctctgcctccgtctctgcctccgtctctgcctgcctctgcctctgtctggctctgtctgtgtctctctgactcatacacattttaaatctctgatgtgccattcatatatattaatgcatgraagaaatgctcataaaaatggaaatgaggcataattttccatggagcaagtagaatcatttgtaaataagaacttcacttggacttaaaacgtttgtgaatccaagtgtttagtttccaatgttgatgaatcctttgacagctttctaattatcattgagttagtgcatggtacccttcaggaactaaattgaagccataagttcatctcttcatatatcacctctaaagcttttagttgataatcgctttgtccttcttggtctgaacttggggtttttattaccaaaaaggaaaggctct

SEQ ID NO: 625641 - DNA, 513 bp, Homo sapiens
ttagcaaccttcggtaaaaagtcccgtcaaacttaatgatagtaaaaactattactcctgctgtaagcaaaacaaccttgacgaaatctttcctgtaactacttatcctgctctaagtataatgaggcaaaatattacagcaattagaattttacaaccagaattccacatcgtgggtgtcatagtgtatagttctattgcaaatagtagcgtgactataacaattcccatgagagtgacgtagtaaataatttccatttaaaactttacttgccaagacaacatttcyctttgggaagctacaaagttacaaatgcaatcccatgtataattaaattctccctgcaaatatgtgttaaaaagaagttctaatatttggtggcaaattttgagagggaagggcagaaataataaaaagtctggtgaggtagcagtgggactgagtaagatgagcagcccttccccagttacttatctttcatgattttcagcctaaggtcttctatttctcca

SEQ ID NO: 625642 - DNA, 553 bp, Homo sapiens
atgtgcaggtttgttacaaaggtatattgtgtgatgctgaaatttgggataggactgaacccatcacccagggagcacatacccaataggttgttttcaacccttgcctccctttctttctccccactctgtaattcccagtgtctgctgttaccaactttatgtccaggtgtacccaatgtttagctcccactcataagtgagattatgtagtattttgctttctatttctgcatagttcacttaggataatggactccagctgcatccatgtggctgcaaaggacattcatttgttctttttttatgactgcatagtactccatggtgtacatacgccacattttctttattcaatccrctgttgatgggccccagggttgattccacgtctttgctattctgaacagtgctgcaatgaacatgcaagtgcgtgtctttttggtagaatgacttgttttcttttgaatatatatccagtaatgggattgctgggtcaaatgatagttctaagttctttgaggaatctccaaactgctttccacaatggctg

SEQ ID NO: 625643 - DNA, 553 bp, Homo sapiens
atgtgcaggtttgttacaaaggtatattgtgtgatgctgaaatttgggataggactgaacccatcacccagggagcacatacccaataggttgttttcaacccttgcctccctttctttctccccactctgtaattcccagtgtctgctgttaccaactttatgtccaggtgtacccaatgtttagctcccactcataagtgagattatgtagtattttgctttctatttctgcatagttcacttaggataatggactccagctgcatccatgtggctgcaaaggacattcatttgttctttttttatgactgcatagtactccatggtgtacatacgccacattttctttattcaatccgctgttgatgggccccagggttgattccacgtctttgctattctgaacagtgctgcaatgaacatgcaagtgcrtgtctttttggtagaatgacttgttttcttttgaatatatatccagtaatgggattgctgggtcaaatgatagttctaagttctttgaggaatctccaaactgctttccacaatggctg

SEQ ID NO: 625644 - DNA, 570 bp, Homo sapiens
atacccttggcaatatgattttgaagctcttcccgtcaagagagggagtctgttttccctcaccctgtgacttgctttgtccagtagaatgtggtgaaagtagtggtgtgcttgctccaagcctaggcctcaagaggctttcatacttctctcgttcttgggtccctgctcctaccatgagaactagcccaagttatcctgcttggggatgagagaccatatgcaagatagcctgttggctctaccaagatcaacctacaccagcctacagctagttgactccmaacacgtaaagaaagtccagcccaaatcagaagagatggccatcagaaacataactgacttcaggcatgggagtgatttcagctaaactagaataatctctcagctagtcgatacattttttaagaataataaatgattgttatgcaagccactaagttttagagtaatttgttacctagcaactaaactaactgatatagcaactaagaaccctgcctggtataatggctcttcatacctcttcatcttttttgatatgttgctgaagcttaaagaagtaagggg

SEQ ID NO: 625645 - DNA, 647 bp, Homo sapiens
ggggtttcaccacactggccaggctcgtcttgaactcctgacctcaagtgatctgcccacctttgcctcccaaagtcctgtgattacaggcatgagcctagcccacaactttgttcttagtctgtagcctggcttccacctctgaaatcttattctttccttctgtccatttttttttaggaacaagatattcatattatttggggggtctttgaaccccaaagtaatgtactttktctacaaaaattatgctacatcttgatgagttcaccctgattttttaggttggtaggtaggttggttggttttccagtaacttggaagaagctgctctgggtcgctcccttcttccatctgatggtctttaccacatgttccctcttccctaaccatgaccagttgtacacatctcccaggtggcttcctggtataagtggccaagaactagagtcattttaacttgaatgaatcatggataataatacaagtcctggcatcagacctcccagactttacatcttggctccattgtttacttgctgaatgacttaagccaagttagctaaccagccttcacctgaaaatgggaccagtaacagcaattatctcccaagggtatgttggggattaaatgagaaaaatccata

SEQ ID NO: 625646 - DNA, 564 bp, Homo sapiens
tttcttgtacttttcatgataaactaaaaatattaagtcataggaccactcacatgcaatttctaggtcaaagaataaygcatatacattatttcccagcttttctgttttacttttctttgaagaaacaactctcagtgcctcttgactggcttatactactaagatcttttttcctactatgtatagtccctagatcactgttccctaattttgtggacacaagttagaaatttccatcagacctcatggccaagaatggctctgcttttcttaagaattagtgtgtttcttatattaggaacatggtaattcttaatgactgatgatgtttctctctttgccttggccaccagaccacgttagttcctcttacccctaccagacaatttttttctaccttcatttctcctcttattttaattatcttcaattttatctcctaagttgcacaactttttaccttaatatttttatagaaaaatatagtcacttttttgttttatcttaaaactatcatataaaattattttaaattccctcccctcccatcaacttagagca

SEQ ID NO: 625647 - DNA, 564 bp, Homo sapiens
tttcttgtacttttcatgataaactaaaaatattaagtcataggaccactcacatgcaatttctaggtcaaagaataacgcatatacattatttcccagcttttctgttttacttttctttgaagaaacaactctcagtgcctcttgactggcttatactactaagatcttttttcctactatgtatagtccctagatcactgttccctaattttgtggacacaagttagaaatttccatcagacctcatggccaagaatggctctgcttttcttaagaattagtgtgtttcttatattaggaacatggtaattcttaatgactgatgatgtttctctctttgccttggcyaccagaccacgttagttcctcttacccctaccagacaatttttttctaccttcatttctcctcttattttaattatcttcaattttatctcctaagttgcacaactttttaccttaatatttttatagaaaaatatagtcacttttttgttttatcttaaaactatcatataaaattattttaaattccctcccctcccatcaacttagagca

SEQ ID NO: 625648 - DNA, 662 bp, Homo sapiens
aaaccccctgtgttgagcctaaagatcagagaagaatagttccatgtgtggtggaggtaggggaggcggtgaattaaggatttgcctattgctgcatgacaaactcctccaacatagcagctcagtaaacatttattatcttatagtttctgtgggtcaggaattttggactggctttgctggctggctgtggttctgggtgtctcatgatgttatagtcacattgtcagctggggctgccattgttggaaggctggaccagggctgaagaatctacttccaagttggcacactcacatggctatgggcaggaggcttctcgtccatattggtgtttggcaggaggccttatttcctcattacacgggcctcttctcagggtggcttgagtgtcctcacaacatggcttccggtttcctccacctcttaaaggaagtagtattaaagaagctatggacatattttaaaactactacaccatttccctgtctgtttgctcctttaaaaaaatttctgtgagcaaattgataccaggagaagaaaccmagatcatttggatacagaatgcaaatgatcgaccagacttatatctagaaattttcatttttatttaatctacttaaagccttaattaaataaaattacttaatagtaattgaagt

SEQ ID NO: 625649 - DNA, 417 bp, Homo sapiens
ttgaaaaactaactcttgggtactgtgctcattacctgggtgatcagatcacttgtaccccatacctcagcatcatgcagtatacccatgtaaaaaacctgcacatgcatgccctgmatctaaaatagaagttgaaattattttttaaaaaagaatctatggttctgtgatgctgactgatcttacacaaaagcatgtgacacgttcacagctacatgggataccaaactcaggacatctgcaactgctgtgtgcccttttctggtgtgacccagcctttttgtcctggtccctgctttgctgatggccttgaagcagcctcccaagcacatgaatggaatttgtagccagagtcagatgattttttttttttgacactgggcaacttggatgcccaaggtctccaggagagactcc

SEQ ID NO: 625650 - DNA, 468 bp, Homo sapiens
tttgcagagggacttcagcaggcagaactgccctctggagttcaggagccctcctgctctgcaaccctatgtaccctcctttgccaagtgagtggcctggttgtatcttaaacaaatatcagatattagtctcagccctgctcatgtgtcctgggaatgaattaagccttggtgtttcccagtgaggtaggtacatactattagcctcatccacatttgcagatgctgaagctcaagagytgaaccaatcatcctagcactgcccaacaaccacttgtcagaatttaaaagaaagcccaggagtctgggctttacattttctcagaacatgatcagagattattctgtcccacccctgcccagtgattcaaccccaaagagagcaagaatgcaagagagaacaccatcagccacacagaatttctttccagatctgaaagacactctgaaaacagaatgaaccccagc

SEQ ID NO: 625651 - DNA, 468 bp, Homo sapiens
tttgcagagggacttcagcaggcagaactgccctctggagttcaggagccctcctgctctgcaaccctatgtaccctcctttgccaagtgagtggcctggttgtatcttaaacaaatatcagatattagtctcagccctgctcatgtgtcctgggaatgaattaagccttggtgtttcccagtgaggtaggtacatactattagcctcatccacatttgcagatgctgaagctcaagagctgaaccaatcatcctagcactgcccarcaaccacttgtcagaatttaaaagaaagcccaggagtctgggctttacattttctcagaacatgatcagagattattctgtcccacccctgcccagtgattcaaccccaaagagagcaagaatgcaagagagaacaccatcagccacacagaatttctttccagatctgaaagacactctgaaaacagaatgaaccccagc

SEQ ID NO: 625652 - DNA, 552 bp, Homo sapiens
gtttcataagggtttgacagttccttcttcaaaagctcacactctctcctgccgccttgggaagaaggtgcctgcttccccttctgccacgattgtaattttcctgaggcctccccagccatgtggaactgtaagtcaattaaacctcctttgtttatgaatgacccagtctcagatggtatctttatagcagtgtgagaacagacggacacaaataattacaatcacattcatcctrtttcatacaatttgttatccctcattccaacaaccccaaatttgatttcccatgtcacatgtgcaatatattttcagtctgcatataaaatgcttatatgattgattggcagaggatgcaatttaattgccactcaaatattgtcaatttagaaaacagaaaaaaaatagattttaaaattgaaaaatgaaatgcaagacttaaaactgatataatcagcactttttaggaaataattaaaattcaacataaatattcaccaattatatacaagtttttatttaccgtaatctcatacatttgtaatgtgttga

SEQ ID NO: 625653 - DNA, 602 bp, Homo sapiens
ttcacttaacttacaaaaagtttggaattttcatgtctctttattttattattaacgcaatagaatatggttttctaatgactgacaaaccagatcttttatcctgtgtaagaaaagcaagctgagagactaaatcaatgacaggacaattttgggaaagaataaagtggctttatgctgccycctatgtaatttagttcattcaataaactgttctgtgtgcatgagccaagtaggccacagagagtgtcatggtccttctgttacaagcagaaggttaccagcatgtttcatggagttcttttaactccctcagggtggagttcccttgggaatgatggtgttatttgaagacactctgtatcctgctaattaaaacacttatttttaaaaacagatgttcaaaatctcactattcctcctaataggaactgagcatgaaatatgtgaaaacgagcttttcgcataaactatactgtatttgatattcactgattaatttttgcctaggtataatgaataaaataatttgttagtataagattattcagattgtcgctttctaattgaaaacaaattaagaacaccaattttaggttttg

SEQ ID NO: 625654 - DNA, 602 bp, Homo sapiens
ttcacttaacttacaaaaagtttggaattttcatgtctctttattttattattaacgcaatagaatatggttttctaatgactgacaaaccagatcttttatcctgtgtaagaaaagcaagctgagagactaaatcaatgacaggacaattttgggaaagaataaagtggctttatgctgccccctatgtaatttagttcattcaataaactgttctgtgtgcatgagccaagtaggccacagagagtgtcatggtccttctgttacaagcagaaggttaccagcatgtttcatggagttcttttaactccctcagggtggagttcccttgggaatgatggtgttatttgaagacactctgtatcctgctaattaaaacacttatttttaaaaacagatgttcaaaatctcactattcctcctaataggaactgagcatgaaatatgtgaaaaygagcttttcgcataaactatactgtatttgatattcactgattaatttttgcctaggtataatgaataaaataatttgttagtataagattattcagattgtcgctttctaattgaaaacaaattaagaacaccaattttaggttttg

SEQ ID NO: 625655 - DNA, 544 bp, Homo sapiens
ttatttcatctgccaggtactgagcccagtatccaatagttatcttttctgttcctctctcttctctcaccctccaccctcaattaggccctagtgtctgtttttcccttctttgcattcatgttttctcatcatttagctcccacttataagtgagaacatgtgctatttggttttctgttcttgkgttattttgcaaaggatagtggcctccagctccatcagtccctgcaaagaacatgatctcactatttttatgacttcataatattccacggtgtacatgtaccacattttgtttatccagtctgtcattgatgagcatttagactgattccatgtctttgctattgtgaataatagtgctggaatgaacattcacatgcatgtgtttttatggtagaatgatttctattcctctgggtatatacccagtaatgggattgctggatgaatgctagttctgcttttaactctttgaggaatttccatactgccttccacaatggttgaaccaaaattcactcccactaacagtgtacaa

SEQ ID NO: 625656 - DNA, 555 bp, Homo sapiens
ctccatagctcgggcaatccgcctgtctcggccttctaaagggctgggattacaagcgtgagccaccacgcccagctcaggtttttgttttgatgctcaaattgtcccaggcttttattggctcttccagttggcttaagggagaacggtgttaaaacctaccatatagttagrttgattttttttaatttgttgttttcttaatcagagcataactttaaacctagtaatcaaaacttagatttataaaaaaactggcaaactctgtcccatcaaagtggctatactatttccaactgcccccatcaaatggtactgacttccctaggcttttgtttgactgaacttcttaacttttcctttacttctaagaataaaagttcactggaaataggacataaagcctaaagatttctgtccacacttttctttcttgcattgtttccaatgaaattttcactgtaattcctctgcatgtacccctatagataaggtgtttttgtttgttaactctggctttgatccagattttctctttatatttaattttctgca

SEQ ID NO: 625657 - DNA, 505 bp, Homo sapiens
aaattgctaccaaatgtatagggtcattatgtatgccattgggctttgggagaaggaactgtgacactaatattcttctttccatagcaaaaattatttgcaaagtagcataaatcacatgaatttttatattttagaatcaaccatttttccaaaacaggaataagtactgtgacaaaactatataaatcatggcaaaaattataaaaccccaacaatataaatgtttacacattcagattactgcatttttatagttatgaatttgattacccacatagcacatattgttgrgaatttatgaaataattttcttttcaaaaaatctctcatttttaaattagtaggtgagaatatacattcctaagtctatagaggaaatattaaaattcattatgaattatcattttattacaaagaaatttatatgtcaaattctatgaaatttgtttttctgtactgccttctcagcatacattttagcagctaaacttacctgattaca

SEQ ID NO: 625658 - DNA, 450 bp, Homo sapiens
aactgaaatgaaactaataaaaaaatataacaactctttcacaatttatatatatatatatatatatatatatatatatatatatatatatgacattttgattatgaacatgattgctttgccatggaattgtttatattctagaggagtgattcttayctggcatatcatggcacccctcagagacacagctgccacttgacacatcataaacttgtatgggatccaaataaaatttaaaatcatgcaaacaaatgttatgaactagacaaattagcagaggaaactttcaaattccatttgggcataaaacaaacttcacataatattattcaacatagtaactcaacaggcaagtgctagcactactagtgatgctatgtacattttacaatattagcatagctatattgctttaggagaaaatgaacttgaaagattgacaaaatt

SEQ ID NO: 625659 - DNA, 488 bp, Homo sapiens
taccatactttttgattcaacatgtatgcaaactctggcatccaaaaaggtatacttaactcagtgaacacagctatggttttcctaaagtgacctggccctaggaaaatttaggttactcaggttggtgaactgaaggcttaaagaggaggttattactagctggggtcagtgtttcttatatatggcataaatttrggtttgcttgctatgctgtggtggcatacaagactatatctattacatttttaagttaatgaagcctttttagttgtacatctatgaatatattgtatttgtgcctgttagataaacttgaataaatgaagaaagatgacatttacagcaagatgtgtcttatcaatctgtttgttgggatgcatttgtgtaaagaatgtcttctaataagcatatctataagaatatattttctgtttatttcaagagatatatccataaaatcttctctggatatcctagtcaccaat

SEQ ID NO: 625660 - DNA, 551 bp, Homo sapiens
tgctgttgtgacctatttgttgatgtcactcactaagggctaaaaaaaaaaatactagctgagagagagacaaagtccaaataaatgcaggacttgacggcccctacatttattccccagcaaacattatacacatagaagtaggtgatgggagcttttgaaggagtgtaagccctggagaaacctgtgtccattacatgttagagaggctgctcttgcaggagtctggaggggtctttgaagttgacaaaaacgggttgtcactgagcataatttttcaccttaattctcactctttttaggcaattaagcagatcacttaagggagataatttatttggctcagtctagacaaactagaattttatataaacttacattttaagatatatataagaaaaatacttacaaagcttaactaaatgtttctaaaatttctcaccaatagtctattttcttcactcagtagtgttaactgaaaatgcatatttcttggtttcatcagattacttcaagtataaaayttctgaggtttcctttatacaggtttc

SEQ ID NO: 625661 - DNA, 386 bp, Homo sapiens
tgtgctgctaagttaatatcctcaaagcaatgagagaagcatttgtactcagtccagatkggagtaggtgcattaagcacttctgaatgacagttttcgaacaaaatctggtccactaactgttattaaagatatggaacaacttagtaacacttcaagagaaaacaatgaaattgaaaaaattagataattattaaatacaacaaactaaaaagtacacaaaagggaatgtggtatattatggtgttagaagagaatggtactagtattctctactagtagagaatactagtactactattctctactagccactgggtgcagtggcttacaacttaatcccaacactttgggagggggaggggaatcacttgagcccaggaatt

SEQ ID NO: 625662 - DNA, 306 bp, Homo sapiens
aaactaatacaaccagtatgttaattagttatacaataccaaggggaaaaaggcaacgtaagcgctagcattaacaactgytaaatgaatgtgtatgaccagaaggaagagcaggaatgacaggcaggcatattaagtacaaaaaggttcatgcagagttaggttgagggactgactcacaggacattgagcccaatttgctcagggactctgggttacttttcagttactaagccagtcagattcctcctaagtaagccaatttgggttaggtctaaatcatcggggggaaaaaaaaaaggctcc

SEQ ID NO: 625663 - DNA, 449 bp, Homo sapiens
tattagttaggaaactaatacaaccagtatgttaattagttatacaataccaaggggaaaaaggcaacgtaagcgctagcattaacaactgctaaatgaatgtgtatgaccagaaggaagagcaggaatgacaggcaggcatattaagtacaaaaaggttcatgcagagttaggttgagggactgactcacaggacattgagcccaatttgctcagggactctgggttacttttcagttactaagccagtcagattcctcctaagtaagccaatttgggttaggtctaaatcatcgggggraaaaaaaaaaggctcctcactaaaccaggataaagaagactccatcagaaagttctctgggataagatatactattaattgaaattcccaataggaggtaacatataaacatacccccacataaaactgtacgtattttgacatgctt

SEQ ID NO: 625664 - DNA, 568 bp, Homo sapiens
tgggctggcggtgccctctttatgccaggcagcgaatgctgagccctggggccctgctcaggacccagtttgggaatctggctcagccacttccactccaacctccttagctcctgccacctgcagtgtgtcactgtgtcctgctgctggctccccttgtcccagccttctgggatatggtaccagcaaaatggctccaacccagccactgtagctttctcttgaccccagaaaactcacaccaaacagagaagacagcccccagccgctctcagcgctggtgtctacccagttatctggctctctgtgtccctctgtctgtctgtccctctgtctgtctgtcagtctctctctctctcagagtttgaaatgcatcacagagtacacagaaaagtgacagaaaccctcaggactctcccttgtcacggtcactgagcttgcgcaactagcaactcagcccgtcttgtttctcccgtgcccccacgtgctcccctctcktgtaatgttgaagccaacccagacagcacgttgttgcatctgtaaatgttcccgtcggagctttcggaat

SEQ ID NO: 625665 - DNA, 579 bp, Homo sapiens
aatgcccttcctccaacttttcttttcataaatccctaattcattctcaaagcacaaatcaaaactttttccttctgcaatgccttttatttktctcaagacagaattcatcacttcctcttttgagttgctaagacattttgtacagatctgtattacatatttcacattgtgttttgcttggttttatatatatatctgttccatcacaagaatgcacaaaagccatatcttgtttatatcagtactaggcatgtagcaagcactcaataatgtttatgaccttaaagcgaacatataaacagatgagaatggaggggcaacagaaaggaaccaaaagattaaaagagtgcctttgataaaagataaagaggaaggaagagactgagaagaccctcaaagacagcattcagaagaccctagaggcagagtgtgatgaaggctggagttagagtggctgacctctaattaaagaggagaatgtgagaggcagaaccacatgcagtgagctgcaggcctgagaaagagaaaggctgttggatgtgaccacgaagagatcctaatggttttaggaagcat

SEQ ID NO: 625666 - DNA, 579 bp, Homo sapiens
aatgcccttcctccaacttttcttttcataaatccctaattcattctcaaagcacaaatcaaaactttttccttctgcaatgccttttatttttctcaagacagaattcatcacttcctcttttgagttgctaagacattttgtacagatctgtattacatatttcacattgtgttttgcttggttttatatatrtatctgttccatcacaagaatgcacaaaagccatatcttgtttatatcagtactaggcatgtagcaagcactcaataatgtttatgaccttaaagcgaacatataaacagatgagaatggaggggcaacagaaaggaaccaaaagattaaaagagtgcctttgataaaagataaagaggaaggaagagactgagaagaccctcaaagacagcattcagaagaccctagaggcagagtgtgatgaaggctggagttagagtggctgacctctaattaaagaggagaatgtgagaggcagaaccacatgcagtgagctgcaggcctgagaaagagaaaggctgttggatgtgaccacgaagagatcctaatggttttaggaagcat

SEQ ID NO: 625667 - DNA, 579 bp, Homo sapiens
aatgcccttcctccaacttttcttttcataaatccctaattcattctcaaagcacaaatcaaaactttttccttctgcaatgccttttatttttctcaagacagaattcatcacttcctcttttgagttgctaagacattttgtacagatctgtattacatatttcacattgtgttttgcttggttttatatatatatctgttccatcacaagaatgcacaaaagccatatcttgtttatatcagtactaggcatrtagcaagcactcaataatgtttatgaccttaaagcgaacatataaacagatgagaatggaggggcaacagaaaggaaccaaaagattaaaagagtgcctttgataaaagataaagaggaaggaagagactgagaagaccctcaaagacagcattcagaagaccctagaggcagagtgtgatgaaggctggagttagagtggctgacctctaattaaagaggagaatgtgagaggcagaaccacatgcagtgagctgcaggcctgagaaagagaaaggctgttggatgtgaccacgaagagatcctaatggttttaggaagcat

SEQ ID NO: 625668 - DNA, 504 bp, Homo sapiens
ctagcatctatttctgtgatctgcttctgctgtgtcctgaatcagtctgctgtggtctgataggttgcacattctcaatgggagtgagaattgatcttgggggataaaaaacaacttaattttttaaatgtacaaagtgcagatatacatacaatgcataaactgatatcacaatatatctgcgtgtattagggctctccagagaaacagaactgatagcrtatattatatatagatacacagaaatagatttattacgagagattggctcatgcaattatggaacctgtgaagtcccatgatcagctgtctgcaaattggaagcccaggaaagttagtggtgtattatgactccagtccaagccagaaggcctgagaactaggagagccaatcctgtaagtcccagtccaagtccaaaggccccaaaaccagaaacactactgatatccaagggcaggaggagatggatgtcccagctccagaagagagagtgaacttgtgct

SEQ ID NO: 625669 - DNA, 578 bp, Homo sapiens
ccttaggaaggcaataatgaaaagaaaagggttgagaaatattgtgataggtgatgaggctgcaattcctgtaacagaaggaacataaggagactggattgtgaggaaatggaggtagtcacagttatttgactgagaagtagactacagagagaattccgatgaagcaaacaaattatgagcrcttattatgtgccatgaactgtgtgaaaccctttcacatttgttagcaaagagcttctcctttagtagtaatgtacatattccttgcagaaaaaacagtgacattttccatgagacagtagcgcacctatctctcctctgcttcagcagcctttatgctaattactgttttggaagtaactcctcattcactttttgcaacataagataatgagaaatacagcccagattttgtttgtagaagctcctttcatggcagcctttcaacaggttgggtaatttaaaagatgcagttgtaatcgtgactaactcattaagatgcttgatgagcatcttaatgagttaaaaaacctggacatttttaacgcacttttggaaagaggcaagaaaaatat

SEQ ID NO: 625670 - DNA, 578 bp, Homo sapiens
ccttaggaaggcaataatgaaaagaaaagggttgagaaatattgtgataggtgatgaggctgcaattcctgtaacagaaggaacataaggagactggattgtgaggaaatggaggtagtcacagttatttgactgagaagtagactacagagagaattccgatgaagcaaacaaattatgagcgcttattatgtgccatgaactgtgtgaaaccctttcacatttgttagcaaagagcttctcctttagtagtaatgtacatattccttgcagaaaaaacagtgacattttccatgagacagtagcgcacctatctctcctctgcttcagcagcctttatgctaattactgttttggaagtaactcctcattcactttttgcaacataagataatgagaaatacagcccagattttgtttgtagaagctcctttcatggcagcctttcaacagkttgggtaatttaaaagatgcagttgtaatcgtgactaactcattaagatgcttgatgagcatcttaatgagttaaaaaacctggacatttttaacgcacttttggaaagaggcaagaaaaatat

SEQ ID NO: 625671 - DNA, 344 bp, Homo sapiens
ttgtttgtagaagctcctttcatggcagcctttcaacaggttgggtaatttaaaagatgcagttgtaatcgtgactaactcattaagatgcttgatgagcatcttaatgagttaaaaaacctggacatttttaacgcacttttggaaagaggcaagaaaaatataagagtgggaataatccaaggaaaacatttyaagtctttgaacaatagaccctagaatttcctcagcttgagataggttaggacaagaaaacagaatgttgcttaaaagaagcccagtgatcatttgtgtctacttgcacttctggaatatgacttttgtttgttagttggttcattttg

SEQ ID NO: 625672 - DNA, 344 bp, Homo sapiens
ttgtttgtagaagctcctttcatggcagcctttcaacaggttgggtaatttaaaagatgcagttgtaatcgtgactaactcattaagatgcttgatgagcatcttaatgagttaaaaaacctggacatttttaacgcacttttggaaagaggcaagaaaaatataagagtgggaataatccaaggaaaacattttaagtctttgaacaatagaccctagaatttcctyagcttgagataggttaggacaagaaaacagaatgttgcttaaaagaagcccagtgatcatttgtgtctacttgcacttctggaatatgacttttgtttgttagttggttcattttg

SEQ ID NO: 625673 - DNA, 536 bp, Homo sapiens
acatggtgaaaccccgcctctattaaaaatacaaaaaattagccaggtgtgttgacrggcgcctgtagtcccagctactcgggaggctgaggcaggagaatggcatgaacctgggaggcggagcttgcagtgagccgagattgctccactgcactccaacctgggcgacagggggagactctgtctcagaaaacaacaacaacaacaacaacaaaacccacaacatttttctttgttctctctcagtactcattaagaatttactactgcgtctttagattttatctcaggcagatcaatgctatgtatttgtcccctgtacttgatccctgtgctttccttctctcctactttcctactcttgtcatgagtgctgaggcagggatgatgttggggtggaaagctgaagggcgaagatgaatgagccacagtgtccacttagaatctacagccaactcttggcagcttatccgtggtaattcttgtttcagcttcttgttgactttatcacccactcaatgtgcttaactctatga

SEQ ID NO: 625674 - DNA, 538 bp, Homo sapiens
acatggtgaaaccccgcctctactaaaaatacaaaaaattagccaggtgtgttgacgggcgcctgtagtcccagctactcgggaggctgaggcaggagaatggcatgaacctgggaggcggagcttgcagtgagccgagattgctccactgcactccaacctgggcgacagggggagactctgtctcaraaaacaacaacaacaacaacaacaaaacccacaacatttttctttgttctctctcagtactcattaagaatttactactgcgtctttagattttatctcaggcagatcaatgctatgtatttgtcccctgtacttgatccctgtgctttccttctctcctactttcctactcttgtcatgagtgctgaggcagggatgatgttggggtggaaagctgaagggcgaagatgaatgagccacagtgtccacttagaatctacagccaactcttggcagcttatccgtggtaattcttgtttcagcttcttgttgactttatcacccactcaatgtgcttaactctatgatg

SEQ ID NO: 625675 - DNA, 503 bp, Homo sapiens
ctctccagtccacagagctaacaaatcactgtgtcatcaaagaagagggaatcatgggaaatagcctgtggttcactctctaaggcagggagtcaggaggctgtgaggtggcacatttgattcttgctcattaacatagtttctctttgtgtcctcctcctcctctttgcctgcttgcctgttccactgggtaagcagcaagtgcctactcaaatcattatttatcaaatgtgtactatgttcccaacattcattcaatacacctatattgaaagccttttatgagaataacaaaaataacaagatagattcagagtaagattcagagactgaagcaagtccccatatagtaatcacatgttcaactagttgttaagtggtatatataatacatagaaaccaaccgtggaggacctcagggaaaggagccaggaagctgaggaaggctttggagagaagatgacattggagstaggccttcacccaaaattccacaggtgttg

SEQ ID NO: 625676 - DNA, 471 bp, Homo sapiens
tggaggggacacacatccaaaccatatatcactatgggtccactacatcactatggatccaggggagkatgggataggggaggggaggcagcaagggcattataggcaaagggaagtgcgcatatgaaggtgaagaggacatgagcccgcagcatgtctggggactggctggtagcttgatgtgcctggaacaaaggctatgcaatcctgggcagcagcagggggagaggtaaatgtggtcggaatgccaacgattttccatgccatctgtccagtttgggctgtaactgtagagaatggggagccattggtgagttttaagtatgaagtgatgggtttatacttgtattttggacaatcctgtgggcttcagagtactgaatggactaaaagagaggctaaaagctgggagacagttaagagctcactgaaattgccaatgatgtcaaatgctgcaaactcatcaaggaa

SEQ ID NO: 625677 - DNA, 471 bp, Homo sapiens
tggaggggacacacatccaaaccatatatcactatgggtccactacatcactatggatccaggggagtatgggataggggaggggaggcagcaagggcattataggcaaagggaagtgcrcatatgaaggtgaagaggacatgagcccgcagcatgtctggggactggctggtagcttgatgtgcctggaacaaaggctatgcaatcctgggcagcagcagggggagaggtaaatgtggtcggaatgccaacgattttccatgccatctgtccagtttgggctgtaactgtagagaatggggagccattggtgagttttaagtatgaagtgatgggtttatacttgtattttggacaatcctgtgggcttcagagtactgaatggactaaaagagaggctaaaagctgggagacagttaagagctcactgaaattgccaatgatgtcaaatgctgcaaactcatcaaggaa

SEQ ID NO: 625678 - DNA, 471 bp, Homo sapiens
tggaggggacacacatccaaaccatatatcactatgggtccactacatcactatggatccaggggagtatgggataggggaggggaggcagcaagggcattataggcaaagggaagtgcgcatatgaaggtgaagaggacatgagcccrcagcatgtctggggactggctggtagcttgatgtgcctggaacaaaggctatgcaatcctgggcagcagcagggggagaggtaaatgtggtcggaatgccaacgattttccatgccatctgtccagtttgggctgtaactgtagagaatggggagccattggtgagttttaagtatgaagtgatgggtttatacttgtattttggacaatcctgtgggcttcagagtactgaatggactaaaagagaggctaaaagctgggagacagttaagagctcactgaaattgccaatgatgtcaaatgctgcaaactcatcaaggaa

SEQ ID NO: 625679 - DNA, 471 bp, Homo sapiens
tggaggggacacacatccaaaccatatatcactatgggtccactacatcactatggatccaggggagtatgggataggggaggggaggcagcaagggcattataggcaaagggaagtgcgcatatgaaggtgaagaggacatgagcccgcagcatgtctggggactggctggtagcttgatgtgcctggaacaaaggctatgcaatcctgggcagcagcagggggagaggtaaatgtggtcggaatgccaacgattttccatgccatctgtccagtttgggctktaactgtagagaatggggagccattggtgagttttaagtatgaagtgatgggtttatacttgtattttggacaatcctgtgggcttcagagtactgaatggactaaaagagaggctaaaagctgggagacagttaagagctcactgaaattgccaatgatgtcaaatgctgcaaactcatcaaggaa

SEQ ID NO: 625680 - DNA, 546 bp, Homo sapiens
catcaccatgcccagttagttttttaattttttgtagagacagggtctcactttgtggcccaggctggtcttgaactcctgggctcaagccatccttctgccttggactcccaaagtgttgggattacaggtgtgggccactgtgtccttccttaacatcaataaaattgagataatcacattcataaaagggcaaaactatgtcaacaagcccactgtattagtctgtcttcacagtgctgtaaagaactgcccaagactgggtaatttataaaggaaacaggttaactgactcacagtttagcatggctgggaaggcctcaggaaacttaacaatcatggcagaaggcaaaggggaagcaaggtaccttcttcataaggcagcatgaaggaaaattaatgcaggaggaactgccaaacacataaaaccatcagatctcrtgaactcactcattatcaggagaacagcatgggagaaaccgcccccatgattcaattacctccacctggtctctcccttgacacatggggattacaattcaaaat

SEQ ID NO: 625681 - DNA, 499 bp, Homo sapiens
tgcctggcatgcagtcagtattcagaaaatgataactattattaactataaaaacaataacaatttaccctctctaactaggatagctgaaatccagaagggttttcaaggttaaaagcaataatcttacatcaaagtctaaccttyttgcaccttctttctgtagaaaaatcatcatatagcttatcacatttattcattctccattactaaatattcatgtgtaaattgttaaattcttttatagcatcagtagattccaaattaactgcatttgcttattttatcaccaagtcttcttggctctttgtcaagatatctaaggaaatttatgtactcaagaaaggggagatgggaagaaagcacttctctttcttcatgcctccaaaggagtgttcgcccatctaactcaagaaaaagtttcaatgatgaagctgaaattaaacttctattaggtatttcttccttctccccaggactggagtacatgaatagtctc

SEQ ID NO: 625682 - DNA, 373 bp, Homo sapiens
agcacaatgaacggaatggtacctcacatcccaatactaacattgaatgtaaatggccgaaatgcgccacttaaaagatacggaattgcagaatggataagaattaaccgaccaactatctgctgcctttaagagactcacctaacacataagagacttatctgacacataaggactcacataaacttaaggtaaaggggtggaaaaagacatttcatgcaaatggacaccaaaagcaaaagcaagcagaagtaactattgtttttttggtttttttgagatggagtttcactcttgtagtccaggctggagtgcaatggcgcgatcttggcwcactgcaacctccacctcccaggttcaagcaattctcctg

SEQ ID NO: 625683 - DNA, 589 bp, Homo sapiens
ctttctactcctctactgttgttgactggcactaaccctttkcagacctcaaaaaacaagggccgacatattgatacataatttgagtactgagcatagtggaaaaatcacttgactaaaagtcaagagattggattctggccccaaccctgacccagctctaggtacttgggccagtcactttgcttctttggttttctctctttaaaacaaggatggattagatgggtggttccccacacaagatcccaaaatctccaggagcccctgaggttgtaataaaagacaatgggatatttttattatttcaaaatgtctaacagagatagttcattaactgctttaaggctaattaaaacaccaagtattttggcttcacattagtactctgcatggtgacactggatggcatgtgattatgtttgtcatatcataggaaatttggaaacaagagtgttagacctgatactgttctcaaagctgtacctcagaaaatcacaatatctttattaaacataacatccaatcacaaatgtgtggttaataaaaaatgggaaaatgatttaacacctatcaatgcaatttgcat

SEQ ID NO: 625684 - DNA, 589 bp, Homo sapiens
ctttctactcctctactgttgttgactggcactaaccctttgcagacctcaaaaaacaagggccgacatattgatacataatttgagtactgagcatagtggaaaaatcacttgactaaaagtcaagagattggattctggccccaaccctgacccagctctaggtacttgggccagtcactttgcttctttggttttctctctttaaaacaaggatggattagatgggtggttccccacacaagatcccaaaatctccaggagcccctgaggttgtaataaaagacaatgggatatttttattatttcaaaatgtctaacagagatagttcattaactgctttaaggctaattaaaacaccaagtattttggcttcacattagtactctgcatggtgacactggatggcatgtgattatgtttgtcatatcataggaaatttggaaacaagagtgttagacctgatactgttctcaaagctgtacctcagaaaatcacaatatctttaytaaacataacatccaatcacaaatgtgtggttaataaaaaatgggaaaatgatttaacacctatcaatgcaatttgcat

SEQ ID NO: 625685 - DNA, 523 bp, Homo sapiens
cgggaaccaccctttacttccttaacttctcacataaatgttttctttgggcagcagctatagaactggaaactaagtaaaaccttactttggaatataaaaactatattaatttttctayagataaattgttgcataggaaacttgctaaatatttttaaattatctgtaacacctaacataatctgacatttatccccaaattcagctttcaattctggattgaaacatactttgatctgttctctaaaaaggacaaagccagtcactggtgttttgcaaagtctgggaccatttttcctacacagaatctcacacaataaacagacaagatattagaaactaagttctaatatctagcagtcactccttccctggaagcctggctgtgtcctgaagccaggtcctatgatcaggcaactcttctgaagctctgcttccactagggacagcacttaccctgtagactctacagatgtaccatccaggatggcaggcatgagccacatgtggctactgaacc

SEQ ID NO: 625686 - DNA, 523 bp, Homo sapiens
cgggaaccaccctttacttccttaacttctcacataaatgttttctttgggcagcagctatagaactggaaactaagtaaaaccttactttggaatataaaaactatattaatttttctacagataaattgttgcataggaaacttgctaaatatttttaaattatctgtaacayctaacataatctgacatttatccccaaattcagctttcaattctggattgaaacatactttgatctgttctctaaaaaggacaaagccagtcactggtgttttgcaaagtctgggaccatttttcctacacagaatctcacacaataaacagacaagatattagaaactaagttctaatatctagcagtcactccttccctggaagcctggctgtgtcctgaagccaggtcctatgatcaggcaactcttctgaagctctgcttccactagggacagcacttaccctgtagactctacagatgtaccatccaggatggcaggcatgagccacatgtggctactgaacc

SEQ ID NO: 625687 - DNA, 523 bp, Homo sapiens
cgggaaccaccctttacttccttaacttctcacataaatgttttctttgggcagcagctatagaactggaaactaagtaaaaccttactttggaatataaaaactatattaatttttctacagataaattgttgcataggaaacttgctaaatatttttaaattatctgtaacacctaacataatctgacatttatccccaaattcagctttcaattctggattgaaacatactttgatctgttctctaaaaaggacaaagccagtcactggtgttttgcaaagtctgggaccatttttcctacacagaatctcacacaataaacagacaagatattagaaactaagttctaatatctagcagtcactccttccctggaagcctggctgtgtcctgaagccaggtcctatgatcaggcaactcttctgaagctctgcttccactagrgacagcacttaccctgtagactctacagatgtaccatccaggatggcaggcatgagccacatgtggctactgaacc

SEQ ID NO: 625688 - DNA, 507 bp, Homo sapiens
tatgttcagaaatgtttgatgccagccgttttagttacaaatarctttttcttgactgtacagttgtgttcttatggtaccattctgaaagtgatgtaagagaccatgtaaaatgattggaatgcctcagcatctgaacaatgcacatagccaattattaaaattacccagtactaatctgtcttggcttaggaactatggaattaactgtgggtagcatttctacacatatcattacagaacaagcataaagacaagcttgtttttttccttttctgtggatttgttttttcttattaccatatcttttgttactgaaaactggtggtcatctgtactaatagataagagaagtgtgtttgacaccaatacctaatcttagattatccctgctattttaaaacaccgtccttcacctgcatgctcagacatgtgggttctttcaaacatactggacttcctccttaggttttagttgtgttagtcaatagttgaatgttgaaggag

SEQ ID NO: 625689 - DNA, 507 bp, Homo sapiens
tatgttcagaaatgtttgatgccagccgttttagttacaaatagctttttcttgactgtacagttgtgttcttatggtaccattctgaaagtgatgtaagagaccatgtaaaatgattggaatgcctcagcatctgaacaatgcacatagccaattattaaaattacccagtactaayctgtcttggcttaggaactatggaattaactgtgggtagcatttctacacatatcattacagaacaagcataaagacaagcttgtttttttccttttctgtggatttgttttttcttattaccatatcttttgttactgaaaactggtggtcatctgtactaatagataagagaagtgtgtttgacaccaatacctaatcttagattatccctgctattttaaaacaccgtccttcacctgcatgctcagacatgtgggttctttcaaacatactggacttcctccttaggttttagttgtgttagtcaatagttgaatgttgaaggag

SEQ ID NO: 625690 - DNA, 507 bp, Homo sapiens
tatgttcagaaatgtttgatgccagccgttttagttacaaatagctttttcttgactgtacagttgtgttcttatggtaccattctgaaagtgatgtaagagaccatgtaaaatgattggaatgcctcagcatctgaacaatgcacatagccaattattaaaattacccagtactaatctgtcttggcttaggaactatggaattaactgtgggtagcatttctacacatatcattacagaacaagcataaagacaagcttgtttttttccttttctgtggatttgttttttcttattaccatatcttttgttactgaaaactggtggtcatctgtactaatagataagagaagtgtgtttgacaccaatacctaatcttagattatccctgctattttaaaacaccgtccttcacctgcatgctcagacatgtgggttctttcaaacatactggacttcctccttaggttttagttgtgttagtyaatagttgaatgttgaaggag

SEQ ID NO: 625691 - DNA, 515 bp, Homo sapiens
gcgtacaacataggctgcttctaagtgtatttttatttcctagctcttagcatttctcaccttatcattataactttaaatttaaacagaatacaaattgtgtacacagatgggtgtgtcactattgcactgtcacttatgtaagtgcagtttagcatttcttctttccttttaatcaaaatgaggaaatagaaaatgttttgttatggtagttttacacatacacccacaaggaaatgtgtatctagagtctgtgggaactgtgactgatacatttcagggaataaaatgtatgatggctaaaattttaactctgccaaatgttcacggggaaagaaaaattaacaaactcacattttacactttattttagcctagtctctgccttgtttacatctatatgataatgaagctrtacttgtctttccacaacagtgtattttataagttgtaccttttgtttaagggagccttcttaacaaactttctttcagttgtccagtgtacagaagctt

SEQ ID NO: 625692 - DNA, 422 bp, Homo sapiens
tgggtgacagagcaagatcctgtctccaaaaaaaaaaaaaaaaaaaaaamaaaaaaaagtggtattgggcctgtctaattgcaaagccacattctttactgcacgctttagtccattgttttttaaactgcagatcatgaccacgaatgggtcatgaaaccaatttggtaggtctccaacagcactttgggggaaaaaagggtagaatagagagtatcacatagtatggacaagcattgtttcttgaaatttttgtttttgctatgcacgtatatatgtgaatattgaggtctggtccaagatatatttctcactgtaggtcacagtaaaacatgttggtaagctactattttcttggctatgggactatatgtcatctaatcactttttaaaaacagattacaaactgtaggccttagaaa

SEQ ID NO: 625693 - DNA, 422 bp, Homo sapiens
tgggtgacagagcaagatcctgtctccaaaaaaaaaaaaaaaaaaaaaacaaaaaaaagtggtattgggcctgtctaattgcaaagccacattctttactgcaygctttagtccattgttttttaaactgcagatcatgaccacgaatgggtcatgaaaccaatttggtaggtctccaacagcactttgggggaaaaaagggtagaatagagagtatcacatagtatggacaagcattgtttcttgaaatttttgtttttgctatgcacgtatatatgtgaatattgaggtctggtccaagatatatttctcactgtaggtcacagtaaaacatgttggtaagctactattttcttggctatgggactatatgtcatctaatcactttttaaaaacagattacaaactgtaggccttagaaa

SEQ ID NO: 625694 - DNA, 422 bp, Homo sapiens
tgggtgacagagcaagatcctgtctccaaaaaaaaaaaaaaaaaaaaaacaaaaaaaagtggtattgggcctgtctaattgcaaagccacattctttactgcacgctttagtccattgttttttaaactgcagatcatgaccacgaatgggtcatgaaaccaatttggtaggtctccaacagcactttgggggaaaaaagggtagaatagagagtatcacatagtatggacaagcattgtttcttgaaatttttgtttttgctatgcacgtatatatgtgaatattgaggtctggtmcaagatatatttctcactgtaggtcacagtaaaacatgttggtaagctactattttcttggctatgggactatatgtcatctaatcactttttaaaaacagattacaaactgtaggccttagaaa

SEQ ID NO: 625695 - DNA, 501 bp, Homo sapiens
ggtactcaatactcaataagatattcaataaactaaatatctataattaagacaaaacctatgaataaacccaaccttcagcttgcatgtttatgtgtggaatttcactttgtgtaacaaattagaaaagtaaaataagaaagaacaaaatgctgcaaatttccaggcctttaacaaggatgaaaagttgagaaagtagaattgtacttttctaatctttgcaaaactraaacagttttgaaagttcctttcttaccatttgtttgaatgaagatacactctccactcttagcctcctataaatcttaagccatgtgtattatggtaaaaactagctgaaataggttgaatggaagccaaaataatttacatctaaatgaaaaacagaaaacagagtaataaaaaaattccaactgaatgggaaaattcattgtatagtattatcttcccccatgagtaggttcactaatacacatcggcagaacaataagcaccaacgag

SEQ ID NO: 625696 - DNA, 501 bp, Homo sapiens
ggtactcaatactcaataagatattcaataaactaaatatctataattaagacaaaacctatgaataaacccaaccttcagcttgcatgtttatgtgtggaatttcactttgtgtaacaaattagaaaagtaaaataagaaagaamaaaatgctgcaaatttccaggcctttaacaaggatgaaaagttgagaaagtagaattgtacttttctaatctttgcaaaactgaaacagttttgaaagttcctttcttaccatttgtttgaatgaagatacactctccactcttagcctcctataaatcttaagccatgtgtattatggtaaaaactagctgaaataggttgaatggaagccaaaataatttacatctaaatgaaaaacagaaaacagagtaataaaaaaattccaactgaatgggaaaattcattgtatagtattatcttcccccatgagtaggttcactaatacacatcggcagaacaataagcaccaacgag

SEQ ID NO: 625697 - DNA, 586 bp, Homo sapiens
ccatcatatatgctctttattaaatgcttcagaaacaacggctctgcttcatcactacaaagcctcctggtccacttctgaaattcttagtgacctagacgtgtacgaaatttgaactttccaagaagtatctagttggtgctgaacaacccagtactattttcgggtgataaataaccttgttctctttttaaacatctgcgattgacatgtcgactgactgttaacaatgaacaaagaccatatttttctgaagctcatcatcttcctaaccttttctttgaaaacagatrtagttcatgtactagttttttggtgaaggtaaaaatctttattcagattaggctcagaaaaagaaggggctcctttccgttcaacaaatatgcacaagacagcatcccactgggagcatcaatctcagaagcagtaaaacacagcctcggccctgaaaggactttctgaacacctttggagtgtcatccgtttaatatacattattttagttaatcctattagctggataatttcattcccattttattggtgagttcatatagcagagctggatttgaatccaggattacag

SEQ ID NO: 625698 - DNA, 586 bp, Homo sapiens
ccatcatatatgctctttattaaatgcttcagaaacaacggctctgcttcatcactacaaagcctcctggtccacttctgaaattcttagtgacctagacgtgtacgaaatttgaactttccaagaagtatctagttggtgctgaacaacccagtactattttcgggtgataaataaccttgttctctttttaaacatctgcgattgacatgtcgactgactgttaacaatgaacaaagaccatatttttctgaagctcatcatcttcctaaccttttctttgaaaacagatatagttcatgtactagttttttggtgaaggtaaaaatctttattcagattaggctcagaaaaagaaggggctsctttccgttcaacaaatatgcacaagacagcatcccactgggagcatcaatctcagaagcagtaaaacacagcctcggccctgaaaggactttctgaacacctttggagtgtcatccgtttaatatacattattttagttaatcctattagctggataatttcattcccattttattggtgagttcatatagcagagctggatttgaatccaggattacag

SEQ ID NO: 625699 - DNA, 586 bp, Homo sapiens
ccatcatatatgctctttattaaatgcttcagaaacaacggctctgcttcatcactacaaagcctcctggtccacttctgaaattcttagtgacctagacgtgtacgaaatttgaactttccaagaagtatctagttggtgctgaacaacccagtactattttcgggtgataaataaccttgttctctttttaaacatctgcgattgacatgtcgactgactgttaacaatgaacaaagaccatatttttctgaagctcatcatcttcctaaccttttctttgaaaacagatatagttcatgtactagttttttggtgaaggtaaaaatctttattcagattaggctcagaaaaagaaggggctcctttccgttcaacaaatatgcacaagacagcatcccactgggagcatcaatctcagaagcagtaaaacacagcctcggccctgaaaggactttctgaacacctttggagtgtcatccgtttaatatacattattttarttaatcctattagctggataatttcattcccattttattggtgagttcatatagcagagctggatttgaatccaggattacag

SEQ ID NO: 625700 - DNA, 211 bp, Homo sapiens
gaaagcttcatcttattgatcttcaaggatcaataaaacagcrgaaactgaaaagggccaattatgtactagctcttaaaaatgtctgcgttcttcccagaagtgaccacatgagacttcctctcacgtttcagccaacgaaacaagttacatttcactgttcaaaagtcataactaagttaaaatgggatgaggaagaataaagttacca

SEQ ID NO: 625701 - DNA, 211 bp, Homo sapiens
gaaagcttcatcttattgatcttcaaggatcaataaaacagcagaaactgaaaagggccaattatgtactagctcttaaaaatgtctgcgttcttcccagaagtgaccacatgagacttcctctcacgtttcagccaacgaaacaagttacatttcactgttcaaaagtcatarctaagttaaaatgggatgaggaagaataaagttacca

SEQ ID NO: 625702 - DNA, 459 bp, Homo sapiens
ttaagaatgaatttattttccacttcataatgtggtatattatcattcataatgtagaataacatgctgtggatttacagtgtcttttaaatcattacgcctaacccaaaggatgtagacttccaatttttaactattataaataatacttgataaatgtctaggtgcataaagcatcttcttccacagcattattttttgaatgagagatgttcagaagtagaataactacgtcaacatwtccagttcttgaaagtacattgcaaattacttaaagttatagtcccataagaaggatattgcattcaatttaaatatctttttcaagacctgaatccctgtattgtaaaggggaaaactgaggcacactgacattaaagtggcataacctaggtgaatcaatagcaacatttccaacttttacccttctctggggtaaaatgcttcactgttgctgtt

SEQ ID NO: 625703 - DNA, 570 bp, Homo sapiens
tcagcacagccatcttttgtagctcatctttcttccagattttccacccttaggatccttaatgctgaaattatacttcttgaccacaggtcaagtcccccacttcctcrttctttctgaatgttgtttactgcgtcatgtattccagttcctcaactctctgtatcttccaggccatctgctgtttattcacctccatactgaacctagacgtcagagtcagctctttgaatcgtgttctcaacgctgctttagaatctctaactgccttaaccatctcccggcttggtaacccttagtcaattttattttaaaatcctagaggattctatgagtgttgttttagtatgttataaaaccgcactgagaagaaagactctagattcattcttgctaatcctcaacaggtctataatgctgctgagaaattctcctcctcctcccacctgcctctttctcctgctcctccttccctgactctttctcttcctctaaaaatatattcctcacaacctttgatttccgtagtgtaaataaaagcaagatgcagaactgttatattcaatatta

SEQ ID NO: 625704 - DNA, 576 bp, Homo sapiens
tcttttgtagctcatctttcttccagattttccacccttaggatccttaatgctgaaattatacttcttgaccacaggtcaagtcccccacttcctcgttctttctgaatgttgtttactgcgtcatgtattccagttcctcaactctctgtatcttccaggccatctgctgtttattcacctccatactgaacctagacgtcagagtcagctctttgaatcgtgttctcaacgctgctttagaatctctaactgccttaaccatctcccggcttggtaacccttagtcaattttattttaaaatcctagaggattctatgagtgttgttttagtatgttataaaaccgcactgagaagaragactctagattcattcttgctaatcctcaacaggtctataatgctgctgagaaattctcctcctcctcccacctgcctctttctcctgctcctccttccctgactctttctcttcctctaaaaatatattcctcacaacctttgatttccgtagtgtaaataaaagcaagatgcagaactgttatattcaatattatttccatttgcagaattc

SEQ ID NO: 625705 - DNA, 436 bp, Homo sapiens
aatcctcaacaggtctataatgctgctgagaaattctcctcctcctcccacctgcctctttctcctgctcctccttccctgactctttctcttcctctaaaaatatattcctcacaacctttgatttccgtagtgtaaataaaagcaagatgcagaactgttayattcaatattatttccatttgcagaattcacacaggcaaataaactgaagaacaactaaatacataaaaatctttatcaatgttgccttcaggtggtagaattttaaaaattatttttatgtttctctgtacacttttctcttttccaaaatttctacgaggcatgtacttcttttaaaatcatcaaaaatagacattgtaaagaaaagaaactgaaagattatgtgaatataaaagtaggtggaaaggggaaaaaatcacctgtttcttaa

SEQ ID NO: 625706 - DNA, 395 bp, Homo sapiens
tcctcctcccacctgcctctttctcctgctcctccttccctgactctttctcttcctctaaaaatatattcctcacaacctttgatttccgtagtgtaaataaaagcaagatgcagaactgttatattcaatattatttccatttgcagaattcacacaggcaaataaactgaagaacaactaaatacatamaaatctttatcaatgttgccttcaggtggtagaattttaaaaattatttttatgtttctctgtacacttttctcttttccaaaatttctacgaggcatgtacttcttttaaaatcatcaaaaatagacattgtaaagaaaagaaactgaaagattatgtgaatataaaagtaggtggaaaggggaaaaaatcacctgtttctt

SEQ ID NO: 625707 - DNA, 436 bp, Homo sapiens
aatcctcaacaggtctataatgctgctgagaaattctcctcctcctcccacctgcctctttctcctgctcctccttccctgactctttctcttcctctaaaaatatattcctcacaacctttgatttccgtagtgtaaataaaagcaagatgcagaactgttatattcaatattatttccatttgcagaattcacacaggcaaataaactgaagaacaactaaatacataaaaatctttatcaatgttgccttcaggtggtagaattttaaarattatttttatgtttctctgtacacttttctcttttccaaaatttctacgaggcatgtacttcttttaaaatcatcaaaaatagacattgtaaagaaaagaaactgaaagattatgtgaatataaaagtaggtggaaaggggaaaaaatcacctgtttcttaa

SEQ ID NO: 625708 - DNA, 589 bp, Homo sapiens
gggttttatttccaactgaaaagagtatttattaccatggatataactagaagaatcatataaatatatgtaattccattagaaaatatttttcttaaaatttgaaatgacaagaacttaatgaatcttaaatatctcttgttttattttgaaaaattgttttcataagatacaattgagcaattgagatttgttctcccagtatctgaagatttttttggtcttgttttgttttttgggtttttggccctaaaattaggtgaattcagctttgggtctatttcatccattctggaaggttccttgggtcactgatctgaggcattcttgatgtggttaggacttcccagcattattttttttagatcctgtttatttaaaatgaaaaggattagcatgagggatggtaacattcctttttgatrtctgtagcagcaagttttcttatgattcattattcttcttcttacagctttaaatcatctaggaacttcatataaaatttaattccagtttcaactagttgtggagcatttgatccaaaataaaatgaaagtcctctctgaagctgtagaggaggctcaagaat

SEQ ID NO: 625709 - DNA, 596 bp, Homo sapiens
ttcatctttctattcaccaatgtctttccagtcctttttttcttttcttcttttttctttttccagtttttccaacttcccctttccctgcatcagactttcttttatcccagaatacagcaatagcctttatatctataatcttaaaakcctttctttcctcaagtctgtatattatctgcagcagtaattcttcatttctttcatttctctcagttttcttacatcatcgccaatgaattagccaagatgttctcctgtgctcttttggtgaaattttcagaacaaaacaagaaaaaggagatccctttggtacattagaatcctggaacttctttcttctctctctttctttctctctctcgtttccttgtagacagaatatagatttttgtttctttcttataatgggcctgttcaccttcaccctgtcttcaaattttttctttctctttagcagaaatgaatttccatcttttctgaacataaaaaaaagaagaattctaagaagttgactgaagcatctgggtgctttttcttgggctccttctggcaagttggcagaacgaaggaaagaaggcagggaaggagggaga

SEQ ID NO: 625710 - DNA, 596 bp, Homo sapiens
ttcatctttctattcaccaatgtctttccagtcctttttttcttttcttcttttttctttttccagtttttccaacttcccctttccctgcatcagactttcttttatcccagaatacagcaatagcctttatatctataatcttaaaatcctttctttcctcaagkctgtatattatctgcagcagtaattcttcatttctttcatttctctcagttttcttacatcatcgccaatgaattagccaagatgttctcctgtgctcttttggtgaaattttcagaacaaaacaagaaaaaggagatccctttggtacattagaatcctggaacttctttcttctctctctttctttctctctctcgtttccttgtagacagaatatagatttttgtttctttcttataatgggcctgttcaccttcaccctgtcttcaaattttttctttctctttagcagaaatgaatttccatcttttctgaacataaaaaaaagaagaattctaagaagttgactgaagcatctgggtgctttttcttgggctccttctggcaagttggcagaacgaaggaaagaaggcagggaaggagggaga

SEQ ID NO: 625711 - DNA, 596 bp, Homo sapiens
ttcatctttctattcaccaatgtctttccagtcctttttttcttttcttcttttttctttttccagtttttccaacttcccctttccctgcatcagactttcttttatcccagaatacagcaatagcctttatatctataatcttaaaatcctttctttcctcaagtctgtatattatctgcagcagtaattcttcatttctttcatttctctcagttttcttacatcatcgccaatgaattagccaagatgttctcctgtgctcttttggtgaaattttcagaacaaaacaagaaaaaggagatccctttggtacattagaatcctggaacttctttcttctctctctttctttctctctctcgtttccttgtagacagaatatagatttttgtttctttcttataatgggcctgttcaccttcaccctgtcttcmaattttttctttctctttagcagaaatgaatttccatcttttctgaacataaaaaaaagaagaattctaagaagttgactgaagcatctgggtgctttttcttgggctccttctggcaagttggcagaacgaaggaaagaaggcagggaaggagggaga

SEQ ID NO: 625712 - DNA, 481 bp, Homo sapiens
caaccatttgtttctcaacaagaatctgataatgttgcttgaacctcctgaaccagtgctgcatgctctgcttcttcatatgtttgtccttagatttgaccaaaaacaataactgataayataatacagattccccagctccctgtgagctgggttgagcccaggaagtctgtacaagagagcatgtctactgggatttaaatagcccagaaacaggcagccggaatttcttacactcttgtgctctaaaaaaaaaaaaaaaggaagaaagaaatagctctttggtgccccctcagggatacccagcaagcaggtcccacataaataatgtgtaaatagtctgtgagatactggggtttctctcattctggaattggaattgataacttttgacagaaaaaaaaaataaaattctaatctcaaaaaattttgtgttgacatgggtttaccccatcttccctcaatttgtaagtagaaatat

SEQ ID NO: 625713 - DNA, 481 bp, Homo sapiens
caaccatttgtttctcaacaagaatctgataatgttgcttgaacctcctgaaccagtgctgcatgctctgcttcttcatatgtttgtccttagatttgaccaaaaacaataactgataacrtaatacagattccccagctccctgtgagctgggttgagcccaggaagtctgtacaagagagcatgtctactgggatttaaatagcccagaaacaggcagccggaatttcttacactcttgtgctctaaaaaaaaaaaaaaaggaagaaagaaatagctctttggtgccccctcagggatacccagcaagcaggtcccacataaataatgtgtaaatagtctgtgagatactggggtttctctcattctggaattggaattgataacttttgacagaaaaaaaaaataaaattctaatctcaaaaaattttgtgttgacatgggtttaccccatcttccctcaatttgtaagtagaaatat

SEQ ID NO: 625714 - DNA, 585 bp, Homo sapiens
tggaaccttcagggatgtcgatgaaacctgaaaagggaagttgaatctcagcctgctctgagtaggtgaaaattctgccttggatcccccaaagtctgcagataaagatgtgacatttctcgtgttctgctgtgcttgaaggaaagagggtaataatcttaacagtgccaagctgtaagcatgttgcatatattaacttgtttaattactaattattttgatacagcggccatgcctgggatatgaactcagctgttttgagtgagaaggggcatcctaccagtgtgagttaacacttctctgtactctccccggttcctcattttgttcctgctgagttcagagcgatgttcctcatagcctrgcttacctgtggatgttctcagcctcattttcttttgctagatcatatatcttcattaggtgggtgattttggtttctgttactttttccttaatattagtatattgctgatttggatcaggggccaggctgtagattttcagcatggtgaggtgataatacatgttggtcccccatgcagaatgctgcctctagcactttagccaaaggagctctacagt

SEQ ID NO: 625715 - DNA, 573 bp, Homo sapiens
tttatttatagagtatattatttattatagacttattatagtttaaaactttattttaatttatctcccatttcaagatccacrtttgctatatgtgtcagataataaaaatgccataaggaaaacagaggagtgatcttttttaatatgtcattattttctatagttctttagtggtatggacatggaataaggtggcattttgtgggacagtataccaaacttagtgataaaatttatacttttaattttggaggacaaaagtcttgtattctcagccttgtggataagacagtgctctgagctgtctgaggtttcctaaattgggattcaacatcatgaagggtatgtgtctggatagtttatttgttggtttgggaaggtgagtttttgtcttttttccccctctgagttgatttctttagttggagagaagcagaccagatgaagaaaatactttatctcttatggcatttttggtttaccacattagttatgacccgtcttctctgagcagcaggccatgcttctctgttcagtagttcagttttcactaacttaactgcagatgtg

SEQ ID NO: 625716 - DNA, 573 bp, Homo sapiens
tttatttatagagtatattatttattatagacttattatagtttaaaactttattttaatttatctcccatttcaagatccacatttgctatatgtgtcagataataaaaatgccataaggaaaacagaggagtgatcttttttaatatgtcattattttctatagttctttagtggtatggacatggaataaggtggcattttgtgggacagtataccaaacttagtgataaaatttatacttttaattttggaggacaaaagtcttgtattctcagccttgtggataagacagtgctctgagctgtctgaggtttcctaaattgggattcaacatcatgaagggtatgtgtctggatagtttatttgttggtttgggaaggtgagtttttgtcttttttccccctctgagttgatttctttagttggagagaagcagaccagatgaagaaaatactttatctcttatggcatttttggtttaccacattagtkatgacccgtcttctctgagcagcaggccatgcttctctgttcagtagttcagttttcactaacttaactgcagatgtg

SEQ ID NO: 625717 - DNA, 495 bp, Homo sapiens
  misc_feature 237, 244: n = A,T,C or G
cattggatctgtattctatgttcaggatagctatatttgtgaactatgaaatttagcctattcactgacaattttattttttcataacactatccactgtttatgtcagaaaacagactcacattcagttaatagagcttaaataaatcacatgtcttctaaggaacccataataaattactgctcctaagaaagaattaagcaaaaagtattcattgtttgatttttttataaagnaaaattnttattgccttatacaaattacttttatagacataattacttttttaaaaaagcatatctatgggatgttaattattttatcaaatactttgaaattttatttaaagcttagaacaaaaaaattaatctgaatgtgtatttataattscaaggctccttaatcactttacgcgcacggggtgaattcttcttatctggaaagcagcattaatcctgcagaatttaaaatgaattatgactccttatcacaag

SEQ ID NO: 625718 - DNA, 495 bp, Homo sapiens
  misc_feature 237, 244: n = A,T,C or G
cattggatctgtattctatgttcaggatagctatatttgtgaactatgaaatttagcctattcactgacaattttattttttcataacactatccactgtttatgtcagaaaacagactcacattcagttaatagagcttaaataaatcacatgtcttctaaggaacccataataaattactgctcctaagaaagaattaagcaaaaagtattcattgtttgatttttttataaagnaaaattnttattgccttatacaaattacttttatagacataattacttttttaaaaaagcatatctatgggatgttaattattttatcaaatactttgaaattttatttaaagcttagaacaaaaaaattaatctgaatgtgtatttataattgcaaggctccttaatcactttacgcrcacggggtgaattcttcttatctggaaagcagcattaatcctgcagaatttaaaatgaattatgactccttatcacaag

SEQ ID NO: 625719 - DNA, 557 bp, Homo sapiens
caatgggataatatctttctaagggaacagttaaatcaacttcatttggtcttccatggacatgagtttcaagtggctttctggcctttcttctgttggcctcttcgctattatgtgaagacttcatttatactcaatctaattcagctaccatgggccatatcaccagtgcccattgtgttctatgcatcctaatattttcattaatctgaaggggagagggttttaactttgaaggatactcaagaggactttcttatgaactcagatggaaagtgtcctgaaatttgtccttttaaaaatatctgtgcatttttttgtgctatgacattcttacatgtatcattctgtgatcaaatctccagcttactataaatgatacctacattctaaagagccaattctagttgtaccagcatggccttagagaaaagtaagggaatacaatttktatttatcttctatttggttggagttaagtatttaaaacagtaaggtagatctcagatccaccaccattaaaaataaataaataaataaataaataaaatagtaaa

SEQ ID NO: 625720 - DNA, 557 bp, Homo sapiens
caatgggataatatctttctaagggaacagttaaatcaacttcatttggtcttccatggacatgagtttcaagtggctttctggcctttcttctgttggcctcttcgctattatgtgaagacttcatttatactcaatctaattcagctaccatgggccatatcaccagtgcccattgtgttctatgcatcctaatattttcattaatctgaaggggagagggttttaactttgaaggatactcaagaggactttcttatgaactcagatggaaagtgtcctgaaatttgtccttttaaaaatatctgtgcatttttttgtgctatgacattcttacatgtatcattctgtgatcaaatctccagcttactataaatgatacctacattctaaagagccaattctagttgtaccagcatggccttagagaaaagtaagggaatacaatttttatttatcttctatttggtyggagttaagtatttaaaacagtaaggtagatctcagatccaccaccattaaaaataaataaataaataaataaataaaatagtaaa

SEQ ID NO: 625721 - DNA, 459 bp, Homo sapiens
ataaattatcccataaatattcattctgaaaatccagttcttatatcctacatatgtccttgaaaacagagactagtttgcttttgtatccagcaaagcaaaatgtttctgcaacactattgcatatagcataagttcagcaggggagggggagcaakgtttgtctttgtagttgggcactgtggatctcaaggttcataggcaacagctattattgttgactgactgaatgcagacaaagctgaattcatctcagctcatccttccaaatctgttgctcagttctgtgttttaaccccagccctatctacccagctgctcaatccccaatcctagaatttgtcagggacctatttctcttttacccatctcatccagtcattaattctacttttttactctctccctctctctctctctctatagatagatagatagatagatagatagatagataga

SEQ ID NO: 625722 - DNA, 568 bp, Homo sapiens
tgaatgcagacaaagctgaattcatctcagctcatccttccaaatctgttgctcagttctgtgttttaaccccagccctatctacccagctgctcaatccccaawcctagaatttgtcagggacctatttctcttttacccatctcatccagtcattaattctacttttttactctctccctctctctctctctctatagatagatagatagatagatagatagatagatagatagatagatttttttttttgagatggattctcactctatcacccagcaggctggagtgcagtggcacgatcttggcctactgcaagctctgcctcctgggttcaagcgattctcctgcctcaatctcctgagcagctcggattacaggcacctgccaccacgcctggctaatttttgtatttttagtagagatggggtttcgccatgttggccaggctggtctcgaactgctgacctcaagtgatcctcccgtctcagcctcccaaattgctaggattacaggcgtgagccactcacctggcccattctttcttttaagcctcctaacttaagct

SEQ ID NO: 625723 - DNA, 474 bp, Homo sapiens
ttcagcatccaacagaagttggacttcaagccttgataaggtacctagatacccagggttttcagttgagatctcagcacatccttggagtaagagcaatataatactgaaataaaatagatctaacaaagcttgaaaccaagccttttcaggatcaaagttatctgccactattctttctactttccaggagtagaaagtagaaactctatggaggtaggtaacattatccagagtctacaattttgtcttatacaatatctgggatccaatacaaaataattatgagccatgcaaaagatcaaatccaaatgactaaacactaagagagcttgagcatacaccaaaaaatttagatataaagtgaygggaaatttgaagccattgtagaagatacgaattggagatggaactacccaaaattaccttctataaggatcttctagattaaatgcaagctaacttattcttaaa

SEQ ID NO: 625724 - DNA, 629 bp, Homo sapiens
ctgacccattttcacagagcccctggggaggagcaactagtgcaagccaggtgcagtcggagaagctgcctcaaaggttagctgagaagaaaggctgttgtggacacttagaaagtcttttctgaaagggagccatctggtgcttagtaccaagcaagcttctttctgttttcccaggcttctgggcactggtggctgatgcacagtccccctgggctttgtgagggtggagggactggtgctggcttcctgggctgtaaaaggctgcatctcatgcctgaggtcccagcctctgcacttctgcagagtgtggtccccatggtgagctgatgagctgacagctgtctytttagaggccccccgggtcttcactgcctccgtgagcatgtcctcttgcgggaaccatggaatgtttttaatcctggccagtcacatctgggaaaaacaacccaaatgttaatccatctggagagagaactaatccatatcttctgatgtctgtatcttttgtttttcatctctggatctttaaatctaattatgaagccagaacgagccccctacaagcctgtctcttacccttcaggcggcctttaaacgttcctttgtgcatggtctccttatgctcc

SEQ ID NO: 625725 - DNA, 612 bp, Homo sapiens
atcataacttgctttcaccctggctgagagaagatgaaggaatgggccgccacttggttaaggagtcccagctactatggccctcttaaaacaacaagagcactagctatatcctgcccttgtgtattttcctagaagtggactcaggttcaagaaggaactttgtatatttcttcctaaatgggctcctcctcctgtaccctgtgtttagaaaaatgatatcaaccaatcacccaagcttggatatttccactctctttagcggtggagacttaattgatgtttcaatgatcatgcctcttctgccytttctgtctctctgatactctggggtaccctgctatcctggattactaccacggcttgccctctttagtctctgtttttattgtatgttcctcctaatctaccctccgtgctgctatcagactaatctctctaaaagacaaacttagttaagttatgcctctgcttaaaatccttctcctataggataagatggaaactccttagcctgacataaaagctccaggctctacctgtgcaatctcacctgtcacctatacctctgtatactctctataaccagcgttttggaactacttcctgttt

SEQ ID NO: 625726 - DNA, 612 bp, Homo sapiens
atcataacttgctttcaccctggctgagagaagatgaaggaatgggccgccacttggttaaggagtcccagctactatggccctcttaaaacaacaagagcactagctatatcctgcccttgtgtattttcctagaagtggactcaggttcaagaaggaactttgtatatttcttcctaaatgggctcctcctcctgtaccctgtgtttagaaaaatgatatcaaccaatcacccaagcttggatatttccactctctttagcggtggagacttaattgatgtttcaatgatcatgcctcttctgccttttctgtctctctgatactctggggtaccctgctatcctggattactaccacggcttgccctcttyagtctctgtttttattgtatgttcctcctaatctaccctccgtgctgctatcagactaatctctctaaaagacaaacttagttaagttatgcctctgcttaaaatccttctcctataggataagatggaaactccttagcctgacataaaagctccaggctctacctgtgcaatctcacctgtcacctatacctctgtatactctctataaccagcgttttggaactacttcctgttt

SEQ ID NO: 625727 - DNA, 582 bp, Homo sapiens
atcgtttagtttgatgagggtgcctggtggcatggggaagaagtgctgcagctggaaggatgattttgttgatactgactctcgtggttatcttggcttttggtttgcagagggagaagcctagggtcaagatcactatattagtccgtttttgcattgctggaaagaaatacctgagactgggtaatttataagaaaagagatttaattggctcacggttctgcaggctgtacaggaagcgtgatgctggcatctgctcagcttctggaacggcctcaggaagcttacaatcatggtggaaggcaaagggggagtggctacggcactcatatggtaaaagtgggagcaagagagggggaggtgccacacacttttaaatggtcagatctcaggagaactcactattgcaaagacagcaccaagaggatggtgcttaaccatttatgagaaatccacttacctgccaccaggcccyacctgtaacattggagattacatttcaacatgagatttgggcaaggacatacatccaaactaaatcaatcacatgagtcagtagtagattccagaggaacaaaagg

SEQ ID NO: 625728 - DNA, 585 bp, Homo sapiens
tatgatctgtttcttgtaaaatctcgccagtcacccatttatagctctgtatttcaaccaattctaattaccttttagaatatacttctcccagcccttgaagaatattgtaaaccctgaaccatgcaatcaagcatacttcttggttagaaagctgattgtgacctaatatacacacaaatctccacaaacaccccctcccgtttcccaagagccacataatcatctatagggctctccagggctccagagagctggtgtcatttggttacttaatgttggaagaggacatttcatggagaatgttttgtgtcagaaaactaatgaggaagagcaaaacactctkgtgtctcttgctatcattttctgtatctccctggggaagccctctccttccttccctttactaagcattgtctgaagttagtgtccatcttcttcctccacctctggagagtgaggtgaatcagatcagagtccatggcggaacttgaattatggggttcttgcatcagtcttgctttgttcctacaaaatagtcacagacttaaaaagctatctctgttgccttataaagtcaagagc

SEQ ID NO: 625729 - DNA, 542 bp, Homo sapiens
aaattaaaaaaaaacaaccctatgcttagagagaccattaggaacgatttgacatttattgaacaacagatggcgattaaaaacataaaagctagattgccttgctagaaacaaagggtagttctactgaggaagtctaacgtttcaattaaaacacstctcagtgtcaattaaatcatatgaagataagcctgaaaatggtttctagctgcactataatcaatagtgcagttaaaatccccatcaagaagcacccaagtttttagtttgacagtttgctaaaagattagccagagcttcaagaaaccatttccttcagtgtagggttcaaaaggtaaacatttaaccaggagtgcttcatatgtattaaacagatttatttccatgatgagaagaaagcctcactggctttgctttgtttcaaatctcatccgcttttcagtatggattaggcattagtgaggggtggaaaaataaccccattatttccacaacaaggatcttgttttaatgacgcttatattcttttgggaagcagtgag

SEQ ID NO: 625730 - DNA, 527 bp, Homo sapiens
aacaattactaaatgataaactttagtttgaataaaaaagtattctgaaggaagaagtgagatgcaagaagcaaagggaataaatggtggtaaatctaaacagacattaaaatcaatgagaatartagcaatattgctcataatatgcttcaaacaggaagaaatcaaaatatcaaaacaaacaaacaaacaaaaaacccaccatagcacaataacagaagagttagttgagggatttctgaggagagtttatgcagaagtcctaatttagtttggaagaaagacagttatatgtactaactgaccctctgagagaaaatactcaaatttctctctctctctctctctctctctctctctctctctatatatatatatatatatatatatatacacacacacatatatatgtatatatatgtatatatgtgtgtgtgtttgtgtgtatgtgtgtgtatacacatatatacatatatatgaaaaattaggtattattgttgaagaaacaaatacagaccctttaactt

SEQ ID NO: 625731 - DNA, 658 bp, Homo sapiens
gtagaaaatttactgctcatagtaatattaatggattgctgtcatcaaaacaattactaaatgataaactttagtttgaataaaaaagtattctgaaggaagaagtgagatgcaagaagcaaagggaataaatggtggtaaatctaaacagacattaaaatcaatgagaatagtagcaatattgctcataatatgcttcaaacaggaagaaatcaaaatatcaaaacaaacaaacaaacaaaaaacccaccatagcacaataacagaagagttagttgagggatttctgaggagagtttatgcagaagtcctaatttagtttggaagaaagacagttatatgtactaactgaccctctgagagaaaatactcaaatttctctctctctctctctctctctctctctctctctctmtatatatatatatatatatatatatacacacacacatatatatgtatatatatgtatatatgtgtgtgtgtttgtgtgtatgtgtgtgtatacacatatatacatatatatgaaaaattaggtattattgttgaagaaacaaatacagaccctttaactttaaatgggtgaaggaaaataaagaatatgaagaaaatgtgattgattaacagaaaccaggagaagggaataaatgaagcatag

SEQ ID NO: 625732 - DNA, 583 bp, Homo sapiens
ctggctctggcaccagatatagcccatgagcagagcctatgagttgattttttaatgaatgaatgaatgaatccttccaaagaaaccaggtatcatctctccctccttaacaccttatctcattttgtttgtatctttttatgggccctcccttattttgccttcactggagtcatttgttaatgtgtctacttgtctttctgtactctccattctcgttattctaaaatttttgaaggctgagactrttttatatctgacttccccataactcaaagcatgctaccttggatataaagggtgctcaataagtacttgttaattgtaattcaattcaagtaaaaattatgtaatcttcactagaaaaatgtgctggccatgagaccattgtttaccagtgaacctgctagaactttcatgtatcaatttatttgactttgctgcctatgaataaaaaagatattttacactgtcatatattttaaactttggaggagaaaaagcgtcattggattatgtacttactttaggaaaaattgtgctaagagtaaatgggaattaaggtcacaatccatactcctga

SEQ ID NO: 625733 - DNA, 468 bp, Homo sapiens
gcatgacccattttattttcagagttctttttattcattaattattcatttatttaatgcagtttttaattgtatgcttattccatcttgcaaaggtggaattattcagaggaacatttaaaagaaattagcagtatgacagagcttataattgtgctttaatcttaaattaatattcctcctgttttcatgttaccagaacaattatcccaaacggtaccagaagcaggaaattatgtattgtcctatatayggcattccctcccagagagcacactatttatcatggctttttagtctcctccgtgtgcaatggaagataaaaaatctcaacaatatttcggtgtttggagaagattaaagcacccgcaaacattcgtgtttgtctcatccactccctctgctgcatctaactgggtcagagttttaggtgggttcagcaatgtggctttttatttggagtttctg

SEQ ID NO: 625734 - DNA, 576 bp, Homo sapiens
ccactgttttctgagttggcagaatttttcagagaactctgagaatggcccaaccctgtttgtgcagctaattaaactccccttgttaaaatgcaatgcaagattttttttttgctagactgttattataataagctatttcttcaaaagtccttgatatgtcggtcttttctgtaaaagccttggcatgcttgagttggagtctttctatctttggagaaatgagtaaagctggtttcaagggaagctggcctctctgataggttcctggtgtatcttaccgagtctttattcatctctggcaaagacccttcccctattcaaaccctgctgtccacccctatgttcgacataaatctgcttgtttctcctccctactcctgaactgtttcccacgtagggatgtgattggaaaagaaaattgagaccaaggtaataarttttgactaaacacataaaaaatatgattggatacacacacatattttttttttctgctcatcttgaaacttaaattaaattaaaaacaacttagatgcaaaagccttgattggccccgaggccagtgataaaata

SEQ ID NO: 625735 - DNA, 612 bp, Homo sapiens
ataaatcccagaaggatctgtagatgaggcacctgctttttcttttctctcattgtccaccttactaaaagtcagtagaatcttctacctcataacttccttccaaaggcagctcagaagattagaaccagacttactaaccaattccaccccccaccaacccccttctactgcctactttaaaaaaattaatagttttctatggaactgatctaagattagaaaaattaattttctttaatttcattatgracttttatttacatgactctaagactataagaaaatctgatggcagtgacaaagtgctagcatttattgttatctaataaagaccttggagcatatgtgcaacttatgagtgtatcagttgttgcatgtaatttttgcctttgtttaagcctggaacttgtaagaaaatgaaaatttaatttttttttctaggacgagctatagaaaagctattgagagtatctagttaatcagtgcagtagttggaaaccttgctggtgtatgtgatgtgcttctgtgcttttgaatgactttatcatctagtctttgtctatttttcctttgatgttcaagtcctagtctataggattggcagtttaa

SEQ ID NO: 625736 - DNA, 530 bp, Homo sapiens
ccaccccggctgggcgcagtggctcatgcctgtaatcccagcactttgggaggccacggcaggtggatcacctgaagtcaggaatttgagaccagcctgaccaacaggagaaaccctgtctctactaaaaatacaaaaaaaattgctgggcgtggttgcgcwtgcctgtaatcccagctactcccaaggctgaggcaggagaatcgcttgaacccaggaggcagaggttgcggtgagcagagattgagccattgcactccagcctgggcaacaagagtgaaactccatctcaaaaatgaataaataaataaaataaaataaaataaaataaaataaaataaaataatccccaacccccttccagggcaaagtaattcccttgcttcaggaaagattgctttcggagtctaaaggaaaatagcaaggtgagaggattatgctaagcgtgagatgaggtttggtggaagaatctagatcaagagaaggatcctcaagataggaaaagtcagctgttctcagatcttagtgca

SEQ ID NO: 625737 - DNA, 572 bp, Homo sapiens
cataggaatttaagatgagattgagtggggactcagccaaaccatatcaaatatgtaattaacattaattgaatttgcacatttaaatcctaaaacacaagtgtggtggtatttccctaaagccaaagtataaggacatttgggtttaaaaaaattaaaatataagcacaattacaaataatcttgaaatgttgtgataaatatataaagtgaggtattagctgtgtcccaacaaatcaagtaatttcaaaacaaaaattctgagtcagagggtataaatggacatttttcaaaataagaagctggctgggtgaggtggctcatgcctgtaatcccagcactttgggatgctgaggcaggcrgatcacctgaggtcaggagttcgagaccagcctgaccaacatggagaaaccctgtctctactacaaatacaaaaaattagccaggtgtggtggtgcacacctgtaatcccagctacttgggaggctgaggcaggagaatcacttgaacccaggaggtggaggtagcagtgagccgagactgtgccatcgcactccagcctgggcaacaag

SEQ ID NO: 625738 - DNA, 530 bp, Homo sapiens
cctcattacctgtctaaatttgtgacttctatatactgttttttgtttttgcaaaatctgagtttgttgaaacaataatgcaagtatccattgaagaggagggggagtgtagatagaagtgctttagagaaaaggaaaaagagaaagatgtctgatttacaaatgagaagaactctgaaagttgwaattaggggttgaattgtgtgccctagagtgacatattgaagttctaatccccagtatctgtaaatatgacctaatttggaaatagagtctttgcagatgtaatcatattaagaaaaggtcattagggttagcccgtaatccaatatcagcccaatccaccatccatgatttctgtctttagtagaagaggagaagaagcataggtaaagaagaccgtgtgaaaatggagacaagattggaatgatgtatctacaagccaaggaacagcagggattggcaactgtcaccagatgctaagagagggatggaacagattctgaacattcagaaggaaccaaacattc

SEQ ID NO: 625739 - DNA, 448 bp, Homo sapiens
ctgacagtaaataagaatatatacaccaaaaacaatctgttacaaacacaattcagtctaaactaacccctggaagaaaagcaccttgacatttacaactatagaacaaaagctaatctagaatttaagctattagttttaagttttgtgtctgtagtttcaaaacatttcttatcaatttcccacctttcagaattttgtgaaaatgaaatgtgtaaatcccacaacatatttcacaagtgcaaggcccttccctcctgactccctaagcaattcttaaacactgggaaattgctgcactgtggcccgcatgggagatgaccaagtccttcagggcccagccctgtcccttcacatcaccttacaaggctggaagccagagctggatrcatagcatacaaaatgacttctcagggtaacttcccaaaaaacacaatgactgaacaat

SEQ ID NO: 625740 - DNA, 448 bp, Homo sapiens
ctgacagtaaataagaatatatacaccaaaaacaatctgttacaaacacaattcagtctaaactaacccctggaagaaaagcaccttgacatttacaactatagaacaaaagctaatctagaatttaagctattagttttaagttttgtgtctgtagtttcaaaacatttcttatcaatttcccacctttcagaattttgtgaaaatgaaatgtgtaaatcccacaacatatttcacaagtgcaaggcccttccctcctgactccctaagcaattcttaaacactgggaaattgctgcactgtggcccgcatgggagatgaccaagtccttcagggcccagccctgtcccttcacatcaccttacaaggctggaagccagagctggatgcatagcatacamaatgacttctcagggtaacttcccaaaaaacacaatgactgaacaat

SEQ ID NO: 625741 - DNA, 633 bp, Homo sapiens
tgcaaattacaggattattttttaaagttatatttatggaagatggaaggacaggcaatccattcatttctgtaaaatctatttatgtgatatgttgaattaagctagaccactggaaaaaaatcatgttggatcttactatctagtcccacacagaattacactttgatttcattttgtaagctttcatcaaaagctactacaacaaagagttgtatgaaacctactattacaggtgccatataaatgacgctgaggactatgtagaactaatatggggaatttcttatagaataggactatkattatctcaccttgagaaaagataagagacatgctgagcattttcatttagatgttaagaacattttgaataactcatatagtggattgcagataacttcgtactgttactgaaacctggccaccagaacattttgcattttgccaccgctaaacttgctttccctaagcaagataaatcagatgcatcaataataaataatcaagtagacctcagtgatcatagtgggtattaggaatgagtagtccaaggcccacttcagcagttacagccttgagggaggtggaccttgaactgacggatagacaggaagggatgggataagcaga

SEQ ID NO: 625742 - DNA, 560 bp, Homo sapiens
tagatttggacctacaaaatctcaacagagagttatacatctcctagggaagtcagtaactttttgtccccatgttacagttatttggaatcttatttgattgatggacacttctggtatcataaaaaaggtatgtgaggtcacwtcataaagtcactttaaagactgggcagttattaaactatatataacaaactagaattgagacagaaacagaagctatgtgcaaaggctttttactttggcttattatttacttaaagatcaaggtttcataagatttctgatgtctatatttcaatagctgtagtagcaacaacaaaaaggttaaatctatgattgttgttaatgaacatattttagagagccttttttatttacagaaagctttaatatcacaggaggtacatggatagaggggatgagtaaacacactctttagtattatatttaattcaatccagagtaaacacactctttagtattatatttaattcaatccacattagtcttcattctgtaaacactctgatggagcctgttgcatcctccctgccagc

SEQ ID NO: 625743 - DNA, 584 bp, Homo sapiens
atatagaagccctaaaaaagtccagctaactaaatggtagaccttgtataaagtaactcctctaatttctagaggaatcaatgccaaaggcttctgctattctaaactgctgccgtggagacaaatcttatgcataagctgggtgaytttctttctttcttttaaaccaagcatcgaaatgcttgttcctcaaaatatttagataatgaaaatataaaacctatttcatagtaaatagcaattcaagtagattctgggggaaaagtcaagagtcagagaatgttaaagtttaatggggacatattttgaagaggaggttatcatcggtgcctagagagacctttgcaagattccatcaccagttacagacaaaacttaactaagacccacgtctcctgattcatagtctaattctattttcactgcttcctggtgtggtgtctgattcatttgtgccacattgagaggaaaagggggtgtcattagtcatcttttgcccaaggtccactcaagcttgatataataaaaacagtacaggagaggaatgtgtcactgttatgatgcccatatgaccaccaagacca

SEQ ID NO: 625744 - DNA, 542 bp, Homo sapiens
aggtaatgggaaccagtagtgttttgtttcattgcattkttaagacaggatagtgacatggattttcatttttgaatgatcatttcaaaaattaaagatgtagagatatgtattaagatgaaagagaatagagataagaaaaagtaggtgtaagtaatgtgatggaagggaagagaatggagatgataaagaccagacagaacattgtcacaatggtctgggaggaaaatgttgggattgtgaatcaggacaaagacagtggagatagaagacaggtcaattttaaaagactttttggggctgggcgcagtggctcatgcctgtaatcccaccactctgggaggcctaggtgagtgggttatctgagctcagaagtttgagaccagcctgggcaatatgacaaaaccccatctctgctaaaaaatacaaaatattagccgggcaatggtggcacgtgcctgtaatcccagccactggggaagctgaggcatgagaatcccttgagccagggaggcagaggctgcagtgagccgagatggcgc

SEQ ID NO: 625745 - DNA, 523 bp, Homo sapiens
aagattcaactcaccaaggcatttcataataggaaatgcctgataactacttttctacactaattacttagcacattagtaatataattaaagcaagctattataatttcccacrggcatgttagtttcattgaaaacattttcaagttgaaccaaacaatggaagaaaatatactctctgaagaattaattatctgttcatttatccccattggagtgaccagtaggccaggtaatgaacttatcactttctagcttaagcccaaatgggcagagaaattctgtggcagctctttacttgtggcgttaatggatgacaggggttttaggcaaccctagagaactctatccccatctctgaaaatgttctatcacaattaccaccaactagcactgaagccacttctgctcatggctctcagagccagctggtacaaagtaggcaaaaataaactttccctttcttctctcatgtctccagtctttctatcccctacaagcagcatgattataataagcacct

SEQ ID NO: 625746 - DNA, 523 bp, Homo sapiens
aagattcaactcaccaaggcatttcataataggaaatgcctgataactacttttctacactaattacttagcacattagtaatataattaaagcaagctattataatttcccacgggcatgttagtttcattgaaaacattttcaagttgaacyaaacaatggaagaaaatatactctctgaagaattaattatctgttcatttatccccattggagtgaccagtaggccaggtaatgaacttatcactttctagcttaagcccaaatgggcagagaaattctgtggcagctctttacttgtggcgttaatggatgacaggggttttaggcaaccctagagaactctatccccatctctgaaaatgttctatcacaattaccaccaactagcactgaagccacttctgctcatggctctcagagccagctggtacaaagtaggcaaaaataaactttccctttcttctctcatgtctccagtctttctatcccctacaagcagcatgattataataagcacct

SEQ ID NO: 625747 - DNA, 423 bp, Homo sapiens
tgcaatatgtactctctgtgtctagcttctttgattctgcatgttttggagatgtctatacctttttgcaaacattaatarttgatttcatttaatttctaagtagaaatccatttccatggtgactaacaatttgtggccatcttctttatactcattggccttttatataccttcttcaatgaaatattgatagaaatatattttccatttatttatttggggtgattgttttcttcttattgaattgtaagagtccttcccatattcttggtacaagtcctttattagatatgtgttttggaaatattttctcaaaatctgttgctcatctttattttcttaagaattttttgaaaaaacaaacagttctgtagactggccatctgggtggttttccaactggtcttacacgagattact

SEQ ID NO: 625748 - DNA, 562 bp, Homo sapiens
tactgccttttgccccaagagaaaaacacggttcctgtttccactatcatataatagtttcatctattttaaaacttcatataattcaaatcatgcaatatgtactctctgtgtctagcttctttgattctgcatgttttggagatgtctatacctttttgcaaacattaatagttgatttcatttaatttctaagtagaaatccatttccatggtgactaacaatttgtggccatcttcyttatactcattggccttttatataccttcttcaatgaaatattgatagaaatatattttccatttatttatttggggtgattgttttcttcttattgaattgtaagagtccttcccatattcttggtacaagtcctttattagatatgtgttttggaaatattttctcaaaatctgttgctcatctttattttcttaagaattttttgaaaaaacaaacagttctgtagactggccatctgggtggttttccaactggtcttacacgagattactcatacagttacagatatcttacagcttgactgaaactaaaaggccc

SEQ ID NO: 625749 - DNA, 423 bp, Homo sapiens
tgcaatatgtactctctgtgtctagcttctttgattctgcatgttttggagatgtctatacctttttgcaaacattaatagttgatttcatttaatttctaagtagaaatccatttccatggtgactaacaatttgtggccatcttctttatactcattggccttttatataccttcttcaatgaartattgatagaaatatattttccatttatttatttggggtgattgttttcttcttattgaattgtaagagtccttcccatattcttggtacaagtcctttattagatatgtgttttggaaatattttctcaaaatctgttgctcatctttattttcttaagaattttttgaaaaaacaaacagttctgtagactggccatctgggtggttttccaactggtcttacacgagattact

SEQ ID NO: 625750 - DNA, 553 bp, Homo sapiens
ctgtgacattttattggctggattataccacatgctcatttctaaaccagtcactagsaaagcaaatgtaattactgtgattagcttagaataatgatttctctttttgagatgggatggggtagtggaataatgaatatctaaataagcttgtgtttctgcagcaagaaagaataatgtctttgcataggaagccagcaatgttttctgtagggattcattggaaaagtttaagcaagggagtcacaagattagatttgagtatcagggcatactggtcatggtataaggcagagattggcaaacttttcttgtaaagtgccagataggaaatacgttaggctgccggacatggtggctcacgcctgttatcccagcactttgggaggccaaggcacgtggagcatgaggtcaggagttcaagaacagcctggccaacatggtgaaaccctgtctctactaaaaatacaaaaattagccaggtgtggtggcatgcacctgaaatcccagctactcaggaggctgaggcaggaggattgcttgaacccaggag

SEQ ID NO: 625751 - DNA, 597 bp, Homo sapiens
tttgataactgtaaaatttcaagttgacrgttgggcatggtggctcacgcctataatcccagcactttgggaggctgaggcgggcagctcacgaggtcaggagatcgagaccatcctggctggcacagtgaaaccctgcctctactaaaaatacgaaagaaaaaattagctgagcatggtggcgggcccctgtagtcccagctgctcaggaggctgagggaggagaatggcatgaacccaggaggcagagcttgcaatgagctgacatcacaccactgcactccagcctgggtgacagagtgagactccatctcaaaaaaaaaaaaaaaaattcaagttgacagttattttctttttctttttgtttgtctgtttgcttgtttttgtttcgagacagggtctcactctatcagccaggctggagtgcagtggcacaaacgtgtatatacttttaggatttttgctgcaggatttaactgcagcctcggcctctcaggctcgagtgattcttccacctcggtctcctgagtagctgggactacaggcatatgccaccacatttggctaatttttaaaattttttgtagagacagagtc

SEQ ID NO: 625752 - DNA, 597 bp, Homo sapiens
tttgataactgtaaaatttcaagttgacggttgggcatggtggctcacgcctataatcccagcactttgggaggctgaggcgggcagctcacgaggtcaggagatcgagaccatcctggctggcacaktgaaaccctgcctctactaaaaatacgaaagaaaaaattagctgagcatggtggcgggcccctgtagtcccagctgctcaggaggctgagggaggagaatggcatgaacccaggaggcagagcttgcaatgagctgacatcacaccactgcactccagcctgggtgacagagtgagactccatctcaaaaaaaaaaaaaaaaattcaagttgacagttattttctttttctttttgtttgtctgtttgcttgtttttgtttcgagacagggtctcactctatcagccaggctggagtgcagtggcacaaacgtgtatatacttttaggatttttgctgcaggatttaactgcagcctcggcctctcaggctcgagtgattcttccacctcggtctcctgagtagctgggactacaggcatatgccaccacatttggctaatttttaaaattttttgtagagacagagtc

SEQ ID NO: 625753 - DNA, 597 bp, Homo sapiens
tttgataactgtaaaatttcaagttgacggttgggcatggtggctcacgcctataatcccagcactttgggaggctgaggcgggcagctcacgaggtcaggagatcgagaccatcctggctggcacagtgaaaccctgcctctactaaaaatacraaagaaaaaattagctgagcatggtggcgggcccctgtagtcccagctgctcaggaggctgagggaggagaatggcatgaacccaggaggcagagcttgcaatgagctgacatcacaccactgcactccagcctgggtgacagagtgagactccatctcaaaaaaaaaaaaaaaaattcaagttgacagttattttctttttctttttgtttgtctgtttgcttgtttttgtttcgagacagggtctcactctatcagccaggctggagtgcagtggcacaaacgtgtatatacttttaggatttttgctgcaggatttaactgcagcctcggcctctcaggctcgagtgattcttccacctcggtctcctgagtagctgggactacaggcatatgccaccacatttggctaatttttaaaattttttgtagagacagagtc

SEQ ID NO: 625754 - DNA, 613 bp, Homo sapiens
ttttttttttttttgagatggagtcttgctctgttgcccaggctggaatgcagtggcacgatctcagttcactgcaacctctgcctcccaggttcaagcaatcctcctgcttaatattctaaggaatacaacctaycctttgagggtaggacagtatgagttaggagattagaccctggaaatcaacctggatttaaatcttagcttcaccacttgctatgtgacaatggccaacttacttacaccctcagttttcccacctagaaaatggggctaataataaatgttagctcttaattattttcctttaaaatgctatcattttgcaaaactaggctaggtaagtagttcatatggaatacttttctgagagaaaggtattagcttgagagcaggaataaggtattttacaggcactctatacagcagtgcctgtacagatttaatgtaccttacccaagtgttaacttaggtcatttgcacctgtcaaatatcaaactcaagtttgatcattctgaattcaacattgttatattgattggacagcattagaagttaatggcagtgtaatactgagtatatggaagtgagagtaaatgtttctaaacagtct

SEQ ID NO: 625755 - DNA, 591 bp, Homo sapiens
ctgtgagaacattgtgatcacagtgtgcttaaggtgccaggtaggatttcacagaggaggtgacaatttgaacatgaggtgaaatggaaagccaggagtgcccaggtaacaagtatcttatgagcaagaaaacgtcaccataggttgtttttgtttgttagtttgagatagagtcttgctctgtcgcccaggctggagtgcagtggcatgatcttggctcattgcaacctccacctcctgggttcaaacgattctcctgcctcagcctcccaagtagctgggactacaggcacatgccaccacacccaactaatttttgtatttttagtagagacggggtttcaccatgttggccaggctggtcttgaactcctgacctcaggtgatccgcctgccttggcttcctgaagtgctgggattacaggcatgagccaccgcgcccagcccaccataggttttttacacaaggcagtggcatgtttcaacttatgtgttaaaactggagtctaaggtggcaaagagagcagttaggaggtcagtataagcagcttgttaaagttactcargaaaaataaaattcatgatagcaat

SEQ ID NO: 625756 - DNA, 559 bp, Homo sapiens
ggagtcatgttgaggtgaagggaacagctagtagagcaggtgtaaatgtttagcaggcaattactactagtagtggtagaagcccagattgcgacattactgagaagtgatgattgaaacctttgtggtagataagatcactaaggaagaatatttagagagtactyagccaagggcagagctctgagcaaggcatgtaattagtggactagataaaataaagaaaatgggaaggcgcagcatgcagagccacagagccaaagctgcagagtgtttatgacaaagagggaccgatggccttaatacagctcgtcaagaactgctgaatctactttcttatagagacaatttcatatggtgacaagaacatgggtttggaaatcagacaggacattctcctgagtttcctcatctgcaaaatgcagaaccatatgtaatatacatggtccaagtaaacttcttaaagtcttaataagagcatcttgagacactgtttacagaggatggcatatttattcctggttttcttggtcctttcccctcccctcccctcctatct

SEQ ID NO: 625757 - DNA, 559 bp, Homo sapiens
ggagtcatgttgaggtgaagggaacagctagtagagcaggtgtaaatgtttagcaggcaattactactagtagtggtagaagcccagattgcgacattactgagaagtgatgattgaaacctttgtggtagataagatcactaaggaagaatatttagagagtactcagccaagggcagagctctgagcaaggcatgtaattagtggactagataaaataaagaaaatgggaaggcgcagcatgcagagccacagagccaaagctgcagagtgtttatgacaaagagggaccgatggccttaatacagctcgtcaagaactgctgaatctactttcttatagagacaatttcatatsgtgacaagaacatgggtttggaaatcagacaggacattctcctgagtttcctcatctgcaaaatgcagaaccatatgtaatatacatggtccaagtaaacttcttaaagtcttaataagagcatcttgagacactgtttacagaggatggcatatttattcctggttttcttggtcctttcccctcccctcccctcctatct

SEQ ID NO: 625758 - DNA, 586 bp, Homo sapiens
gtttctaggggctcccactggccaaatttaggacaatgtaggcagccaaagcaaatatagtaacaggttttttttgttgtttttttctttttttttcatggagatgggtcctcattatgttgcccaggttggtcttcaactcctggcctcacacaatcctcccacattagcctcccaaagtgctgggattacaggtgttaagctgctatgcccagcctatagtaacagattttaacccactgtataaaaatgagaatacatgattccacagtataataaataaatgaatgaataaataagagggaaagaaatgaaagatctaccttggagtgataactaataaatacagaaggaataatgtagtcagaaaatcagttattttgcaaycatatgatagttttattatcaattaataattaccaactaaaattagagcgatcttacagtttgaaaggacttcagaattacttgtattcccattttgaaaagttagaaaaattaccaaacatccaaaatagtaaaaaatgtagatgcattaaaaatacatacttaaggacagtgacctaagtctaaaacagaaagtgaa

SEQ ID NO: 625759 - DNA, 551 bp, Homo sapiens
atcaattgttttatctgatggtcttgatctttgtttggtgataaatatgccagaaaaaaatgtatttcattttgcactgacattcatcaaattattaagaatgtatccaaaaacatcctcatatcgggcattacaaagtatgttgtttcatgtaatctcattttcttttttaattctgaaagcatttcgtctgcttctcctgattttgattttgccgttgaaatctattaaatatattgcttttatttcagattttagatccgtttcttatttcatgttggaatgttccacaacagcattcactttctctctttgcattttttctgttaaatatttacaaagcactgaagcttgtaacaaataatcagtgaaaaatgccagaaaatattattggatagtattcaaataacctaacatttagatttctgagcatggttaacagcattacacagagttgtgtgttgaaactgccaatttaaggacttacttagcctccaaacttgttatttcttggaactcaactyataggatttatatgaagtataatatac

SEQ ID NO: 625760 - DNA, 630 bp, Homo sapiens
ggactgctatacagcagttcaatgtactggatttataggtatcaacattaataggtcttaagaggcataaaaagtataaaattatataaaggtataaaattgtataaaaagaaagttacaaaaggatatgtacattatactatttatgaaaaaatatgtgaaatattgtgaaaatactctgtgaagcttttatgaaaacaatagtatttacrtgttatagatgcatatatacatatcctagatgtatattcaggaggaaagacacatatcaacttcaggacagctcagggagggagtggctatagggacaggaagttagagctttaattgtagatgtggccatatatgtatatatccttaaagagaaaaaaagggagatttgaaagcaatctagcaataatatctagatgatgtatatataaataaatacatgtacatatacttatataagtaaattttatatagatatttctaatactattctgatactacagtctgtaattttatatgtttgaaatattgaatagttggcatttctgcaaaaatgaaaaagccttcagaaaataaaaaaaacttcaaaacagctctaaaacaatgaaaatctttgtcagtaactatagttagggttca

SEQ ID NO: 625761 - DNA, 454 bp, Homo sapiens
taattaccaagaattctcagtaagatgtgtttctagtagtactactaccttacttagaaaaagtggactttttatttctgtcatggtatatccagtttccttgatactstgattaatgggcataattcaggaaaaatagagaccctcgaacctcctaatccccagccaaatctctgtttggtgtatttctgtgccggctgccccagagaagcgtgactggctttttcattggttctttgctttacttctgagctagaaagtttgcagaaagtttagtctgttttcatacaaatctttgcatccatctgtatgactggagtaactccatttcaaatatggatttggaaacaagggagtaggtgagtagggagagacaggatgtcattgaaaagttttttagtttcattttattgttttgtcttcattattttaatgacaattactgctgaaagtc

SEQ ID NO: 625762 - DNA, 484 bp, Homo sapiens
gaattcacatctaatttttaggagttcctaagggaactcatcacaccgttgagccttttaatgttgatatcagctttgctatcccacaaaattaagtctgttaacatttaaaaatgctaaacagtaggattggagaccatgaatctttcccaatatgggaatttatatgttcttgatttaagggaaaagaaaatgttctttttttacttcctaatacagagcctttaattgatcactgcagttcttttrgcggtaaacttgtttgtaatctctatagttgatgcttcatgtaagtcacttgttaaactgatgttatatactctttgatgttaatatttaaagggaatatatccaagggtgtgtgggaggcagttcgtatactacctcttatgtatagataccataggacacttacattgaattacatatttctttgtcatagaaaatatacaggacatttaagtgaaaaaatacaaagcacccg

SEQ ID NO: 625763 - DNA, 617 bp, Homo sapiens
tgttggcatatgtcagctgagtacagcctggttctgctttcccttgtgacaggggagcactgagttcaatgcaaatcctgacaatcgctgtgctcaccctctcccaagcatgcaaattctcaccaccastgcagggaggatgggggagtggtagcactggcaattccagactgcctttcctatcttcttcagtgtctctttcagtgatatgaagtccaaaccaggcactatgattgctcacctgctttttgtctcttgtaacggtacttttagtgtgtagttagttgttaaaatttggtgtttctgtgggggtagggggatgagtagtgtaggcttctatcccgccactttgctctgccctccgtcaccatctatcctctaaactaaatgcatattatctttgatggtgggccattttacaaacaggtgaaaactgttggagaaaacattaaatttattaatattttgaaatattttatataactttgagataatccttttgctgtataaaactaaagatttattaatcatctcagaaaaatatttgtttgattttcttgaattataaaggatacttttggagcaaacatttacctataaccttatttgaaaaaaag

SEQ ID NO: 625764 - DNA, 268 bp, Homo sapiens
taccaaagtgaaaactgccacatcagaggatggaggctgtggacagctcctcctctgtcaggcttccatgtccatcatgtcatcttccccaggaagcatcccctccacagtggccatccccatgaaacccaatgcccgggcacactcccccaactcaacaaggctggtccagggctggcaggtaggaggaacaacatagccctgcccctacgccctaccrgggtaagcagggctccctgtgaggcctgaggaggggccccacccaaag

SEQ ID NO: 625765 - DNA, 507 bp, Homo sapiens
ggctgggtgcacaagccccaccaccatctgatgcaagctcacactggcccgttaatggctgtgcactgagccctgggccaggtactgagctttgagacccagttgactaaggagatgttacctaattgtagccccagggttgggccttcagcccagctggctccctggatgggccaaggccagcagatgaggctgcgctgggagctcggcctgggmtcttgggagaggaagggggaggcacccaggctgaatctgactcgcaggtggatgtctgttcgccaaaccacagaccacctgccccgccagaggcccatccttgctcccaccctctctggccccatggctttgtggcctgagtcagcggttgatgtcaggaccaagaataagaagcctgggtggcccctgtcattagtggtttgctgggcatgggctaggccgagcaggctggacagaaggacgcctgggaactgcgtctggaggctggcaaagagaacgtggccaggccat

SEQ ID NO: 625766 - DNA, 418 bp, Homo sapiens
accccaccccccaaagcaagcagaaccagcagaggcgtgtctgctgcaggtgtgcggcacagaggaaagggacaggagcaaggagttgccaggttaacactgtgaaggaaggacagcggagctcttcaacacacacctatatggccatgcgagccacctrcttggtggggtaacagggcagactcaaacctggaggctgctttgactgagctgattcagcagaaaacaaggataggaacacagccccacaggctgctctgcgccatgggagacagggcagggtgagccccctgcatggacctgggcacggggcacataccggctgggtcatgcacagaaggaggcctgtacatgaaacagggaggggcttgtgtgggcgcctgctgctcataccttggctggcttctggcggcaggga

SEQ ID NO: 625767 - DNA, 504 bp, Homo sapiens
ggagacccagtgggaggagcgtctgggcacgggagcctcgggccagggtgtctgggctaccccaccaagccttttgtagctcagctggagggcctgcccactcgttggattcccagrccacttgggctgggatagctgacttggctgcctccctcccctgctgcccctgccttgtccgactctggccccagatggtctttgtgtttccctccgtggctgtggcttgggtgccagctctgattgtctagcaggggaggtgggctgggtgccgatgctcgtggtgtgtgtgggcactgtgggcactcgggagagggaagctgccctgaccacagaggaacttgggaggtttgtggccagtgacgctggagctcccagtgtcacccgggctgtgaggcccaaggaagtgagaacttggagtatctggggaatccacatacctgcggggcggggcacagagcaggcgttgtgcacaggataggagcagggcgccaaggaattaattca

SEQ ID NO: 625768 - DNA, 535 bp, Homo sapiens
ccaagcgtttcaacaagataaaaacctctatgcctgctcccattgtgacgccccctgggtcgtacccacctggctgcagaagagagcaggagaacgcagcggggcaggctgggctgaggargtggggagggagagctgactatgcgtggctgtgcccacagggaggcgggagtccgcatgacctgttctcttttctccgggtgtttatttcaggagcaggcctcacaggacaagccgcccggcctcccgcagagctgtgagaggtagtgtggcccagcctcgacctcgcaggacgggtgtaggggcgcaggcctgtacagccactcagcctggctcctgctgctgcttcccctggaacccactatagtttgccctgatgccattaggggtttttcaaacctgacctggtggagcctcagggccctcctctctgggtcttgccagctgttgttggagtttggtagccagaggcccctggctgggctctgggtctctgctctggtttgcagtgctgagaatgttccagaacggagag

SEQ ID NO: 625769 - DNA, 610 bp, Homo sapiens
ctaggtcttatgctggactcctgtggcctgggctagaatcgactagactcaaaacgcattggttgagagtgagggggagggctggctacttcagagccaaatcaggatattgatgctacacaaatraatagatgtcaacggtaaaaacagcaaatgcccacaagagccatttccaattcttgcatttttatgattacacaagcaacacacagatactatagacattttttaaagtttggaaaatcataaagacaaaaataaaagtcatcagcaaccttgctaagctgagaaaaccaatgttaacatttagacttattttttccagtcctttctttgggccttttattgcattggtgattgtgtgttcagttacacgatgtgtcttctttttacttaacaaacacattattgttttcacaagctaaattcagtctactactgaagaagtagttatgcaggtagttatgtagtttccagagatatacctgagctcagtctccaaggaaggttagtgaagcaggtgagaggcagaagttgtagagcagagagggaccccaggtcaaggggctagcataagcacaggcatggaggtaagaagtaccatactgtt

SEQ ID NO: 625770 - DNA, 610 bp, Homo sapiens
ctaggtcttatgctggactcctgtggcctgggctagaatcgactagactcaaaacgcattggttgagagtgagggggagggctggctacttcagagccaaatcaggatattgatgctacacaaataaatagatgtcaacggtaaaaacagcaaatgcccacaagagccatttccaattcttgcatttttatgattacacaagcaacacacagatactatagacattttttaaagtttggaaaatcataaagacaaaaataaaagtcatcagcaaccttgctaagctgagaaaaccaatgttaacatttagacttattttttccagtcctttctttgggccttttattgcattggtgattgtgtgttcagttacacgatgtgtcttctttttacttaacaaacacattattgttttcacaagctaaattcagtctactactgaagaagtagttatgcaggtagttatgtagtttccagagatatacctgagctcagtctccaaggaaggttagtgaagcaggtgagaggcagargttgtagagcagagagggaccccaggtcaaggggctagcataagcacaggcatggaggtaagaagtaccatactgtt

SEQ ID NO: 625771 - DNA, 600 bp, Homo sapiens
catacacaggctaaaattcaaaaggtacaaattgtatatttttcacttggatgaatctatctgtaggataaataccttaaagcagaattattggataaagaaaatgtatattttaaattttgatagatattgtcaaataaccattcacaaagtttgtacaattttacatgctcttcagaaaatgtataaaggaatgccttttccatatcctcattgctatagttyggatgtttgtcctccaaacctcatgttcaaatttgatacccagtgttggaggtgaggcctaatggcaggtgtttgggtcacgtgggtggatccctcatgaagagcatggtgccatcctcacagtaatgagtgagttctcgctctgttagttcctatgagagctggttgttaaaaggaccatggcacctccctcccctctacctcttgtttcctctctagctgtgtgatctttgcacatgctggctccctctccccttccaccatgaagggaagcagtcagaggccctcctcagtagcagatgttggcaccatgccttctgtatagcctgcagaactgtgagtcaaacaaatctcttatctttataaattacccag

SEQ ID NO: 625772 - DNA, 559 bp, Homo sapiens
attagagtcaagtctcactctgttgcccaagctggagtgtagtggtttgttcatagctcactgcagcctcgaattcctgggctcaagccatcctcccacctcagcctctcaagtagctgagactacaggcatataccaccacacttgctaattgttattattattattattattwtttttttggcagagatggggtctcactatgtcacctaggtgggtctcaaattcatggcttcaagcaatcctcccatcttggcttcccaaagtgctgaaattataggcatgtgccaccacacttggcctgttttattattaatagcagttctactgaatgagaggttgataatctttcactctcaggaattctcctctaaaagctctcactcactgatacttatcttggagaaactaataaaatctttcctgaagaaggcatatacatacctgcatatatacaaacttctgtgttccattttaagggggttttggaatttccaaagcctacctgtcaatcccagaatagaaacttattctgaaccatgatttccttaaagttagg

SEQ ID NO: 625773 - DNA, 559 bp, Homo sapiens
attagagtcaagtctcactctgttgcccaagctggagtgtagtggtttgttcatagctcactgcagcctcgaattcctgggctcaagccatcctcccacctcagcctctcaagtagctgagactacaggcatataccaccacacttgctaattgttattattattattattatttttwttttggcagagatggggtctcactatgtcacctaggtgggtctcaaattcatggcttcaagcaatcctcccatcttggcttcccaaagtgctgaaattataggcatgtgccaccacacttggcctgttttattattaatagcagttctactgaatgagaggttgataatctttcactctcaggaattctcctctaaaagctctcactcactgatacttatcttggagaaactaataaaatctttcctgaagaaggcatatacatacctgcatatatacaaacttctgtgttccattttaagggggttttggaatttccaaagcctacctgtcaatcccagaatagaaacttattctgaaccatgatttccttaaagttagg

SEQ ID NO: 625774 - DNA, 504 bp, Homo sapiens
atgcctttatcagaacagaactgtgtttccccttgagtctgcagggcaagatgcactcagagtggggcagacaactaactatacgtggagccctctctctccttagcaaagagctaaagtattaacatgttgaatctaatagcaagtcatggtgcccaaacccctgactgcttgttattccacaaattctcatggccacaaattgcacaaaaatataaattgtgctgccatttatattttatttgcctccaaatccactttctccaccttctctaataggatctgtgtgttagggagttgacatagggttgcatcaacaggctctttgctttgggcattctgttggattcaaataatggaagccaccagcaagagatagaggagtagaaagagrggatgcggtctgatatatatattccctggtctctacaaaggttcactgcagttcctgcaaggcagccctctccacaaagccacctgtctcaggattctggtaacggcccc

SEQ ID NO: 625775 - DNA, 522 bp, Homo sapiens
ttttttataattctggggtctgggaaatccaaaattaaggcgccagcagatttggtgtttcatgatagctagctttctgattcaaagatggtgccttccagctgtgtcctcacatggtggagggagccagctagatccctgtggtctctttcataggggcactgatcccattcatgagagcagaggatttcaacatatgaattttgtggggacacaaactttycttgccactatttcttcatttataaaatgcagataattatgactcattcttcattgatgatgaagactaaatgcaataacgtatacaaaataattagtatagtattagctgtacattaatgccaaaaaccacaattacttttgcaccaacctaatagcagctgtcactgttgttactgttaccgctcctcttcacaggtacagggtgaactccgagaccatctctcctattcatttacatcctcagaacttagcacgatgtctgaccatagtggattttcaataagtaactatggggta

SEQ ID NO: 625776 - DNA, 486 bp, Homo sapiens
gagggagccagctagatccctgtggtctctttcataggggcactgatcccattcatgagagcagaggatttcaacatatgaattttgtggggacacaaacttttcttgccactatttcttcatttataaaatgcagataattatgactcattcttcattgatgatgaagactaaatgcaataacgtatacaaaataattagtatagtattagctgtacattaatgccaaaaaccacaattacttttgcaccaacctaatagcagctgtcactgttgttactgttaccgctcctsttcacaggtacagggtgaactccgagaccatctctcctattcatttacatcctcagaacttagcacgatgtctgaccatagtggattttcaataagtaactatggggtaaattaatgctctccatttcttcttgtgtggtgggttttcctaaaggccatgtatctgtagtttgtcattctttgagtgctggt

SEQ ID NO: 625777 - DNA, 557 bp, Homo sapiens
gaaactacagataagatacctaacccagcctaatgtcactttttccaaggtgccttccctaactcttcatatgtgaccaggtcactctgtaatatgctaatatgcttgcatggcaccctgagccttttcttcatggcattagtcatggtctaaagtgagttatgtgtatgataatttcatcaatatctgtttggcttctagactctaagcccaggaaaatagggacctcatttgttttgcttaccattatatatccagcacctagcacagtatctgatattttaatttgtggttgaatgaatgaatgaatactgtcatatgtgagcttaattttgaaggacatggaagaagtaacccaggtaaaatgggcaagaggaaaggtgggcaaaaggagggggaatgaagcatgttatattataaaggcatgtaagaaaatatagcataaaattgggggaaaaataagtaaaaaattttaaaagtggctcttgaggtttttattttkttttgttttgttttttttttgagacaggatctcactctgttgccaggctggaatg

SEQ ID NO: 625778 - DNA, 607 bp, Homo sapiens
gaagaaagaatgaatggatattgagaaccagtgagtccacccaggatgcactgtataagcggaatgacttccttttgccctctgaaaccaaagctcatcatctttcaaataccagtttaaatctgctcactcttttaagttttcctaaagaatcatccttaagatgggtctccgtattctaagaggactgggtttaatgttacacctgtagtatatacccaaggaatatatggggagttggttcaaatgctccccaccacctttgccattgtccacggtccagcaaagggagggaatgataccatgagcttacattcactgggcatctactaagcaccaggtgctgtactaacagttatgagcattacctcaatctatcattgtaattgctctagaaattaggtactgttgtccatttgccagaggaggaaactaatactctgtgacrtcactttcccaaagctctgctgctaggaagtgccatattctgaatttaaacatgaaactggctccaaggtttatcgcttatttcaacacattgaaacttttctgtaaagagctttgcaatagggaagcttcacagaactgaaacaactggataagtcag

SEQ ID NO: 625779 - DNA, 617 bp, Homo sapiens
ctttttaattagctgtgaaccgcagggctaagtggcaacagaatcagagaaggcaggaagagcagaaagccaccatttgagttcttaggataagaagcatttactaaaaaacattctgagaatttggataaaagattctgcaagttgttctctcatctttttaaaaaacaaacctctgtctgtcagctcactgccaattccagcctggaaaattggcatgcatgtttcgaggataggaagcagaaagtataaatttaagaattgcggtagaacacagatgcatgagtcagtagatcttcgaaatgctacagaccattttttgtgcgtgttctttaagtctcaatctttctgacccttaagtttctcatctaaaaaaatgagagatgggttagaacatagctactatttgccaaatacctattacatgcagagcctcacaacgatactgtgaggtatgtgttttatgtccaagtttcaaagcagaaaactgaggcttacaaagctgaatttattcaatggctcacagcttgaaaactgtagaacctacccagctataactctagttctttctgaattctttccctgcatcrtaagacttctcatctttaaaatccctt

SEQ ID NO: 625780 - DNA, 513 bp, Homo sapiens
aaagggcaaagaaaaatggatctcacctagaggtgagagagcttggcttcaggagcagccaaaaaacacatggtagagaatactacagccaccaacattttcctccttcaaagggtcagctttgccagtgggggtcaccctgaatcgctgcagtgggaatagcaacatggagaaaatgccaattttcccrgggctccttgctgggatattctgaagccacaatcaaatctttaatttaaaacatgagaaaaggatatctacggcgcttgaggaaaactgccattgatggggacccgccacttttggagataatttcagctaaaatcagcagattacccagaagatactatagaaagctggtgcttaatcaacatgaataagaaatactttccctttgaatccaaagctcacagtcactccctttcaaattcaacctctaagatctaaactggttgtagtaaacaaagctcttaatccataggaactttgatatcttagatttctggtgcaatg

SEQ ID NO: 625781 - DNA, 489 bp, Homo sapiens
aacttattctctgtaagtctacctcatagtggcatatgcagtagtaagtgtttaataagttctgctgttgcatcagcagcatcattattttggactcagatgaagtcccagttcatcatcacccttagacaccatttcctgggagctgaggagacactctgctgcttgaccagctggctattcctgcccttgccttcctccctctgcagtctttcagtgatgggttcccagggtgccttgcagcttggcttggctgagttatgaggtcaggctcgcaaatgacagattcaggtcctgacacatcatggagaaatggtgcmtgatttacctctttccaaccaatactctgaattttgagggagaagaaaagaaaggaggtgggtgtaaaaaataatgcaaagtctcagaaattaatgaggtaatggcaaacatattttcattcaaatgagctggggtcatgttcttgaggtggcaaaacagaggaatagc

SEQ ID NO: 625782 - DNA, 530 bp, Homo sapiens
gatgacacctggatctcactttggcaaaaagcccatgacaaacttctcatcagcacaagggctatgcgattaggcacaggctattaaaacatctcatgttcgaaatcagtcactctgttctctgccagttaggaccaccacctgtgcccaggcagggctttctcacagagaacaasaaaaatccaagtgctaggatgtaggcagtgggggtcctcagcaagatactctttccaaaatcatgcatggtcaggtaaatatgacccaagcagagctgaaatgctccagctgcctctgccctgtcatcttcctctcacattgctaatttggaagtgagaggatggttgaaggaacacaaccctagggctggacagatctgggttcaaattctgctgccaccttgggcaagtcacccaaactccctttggccctgcctcaccttcaagctggaactatgctacctacccacttcctagggctaccctgggggtagaagacaatgaggtttttggagaagcaagggaattgtgggg

SEQ ID NO: 625783 - DNA, 530 bp, Homo sapiens
gatgacacctggatctcactttggcaaaaagcccatgacaaacttctcatcagcacaagggctatgcgattaggcacaggctattaaaacatctcatgttcgaaatcagtcactctgttctctgccagttaggaccaccacctgtgcccaggcagggctttctcacagagaacaagaaaaatccaagtgctaggatgtaggcagtgggggtcctcagcaagatactctttccaaaatcatgsatggtcaggtaaatatgacccaagcagagctgaaatgctccagctgcctctgccctgtcatcttcctctcacattgctaatttggaagtgagaggatggttgaaggaacacaaccctagggctggacagatctgggttcaaattctgctgccaccttgggcaagtcacccaaactccctttggccctgcctcaccttcaagctggaactatgctacctacccacttcctagggctaccctgggggtagaagacaatgaggtttttggagaagcaagggaattgtgggg

SEQ ID NO: 625784 - DNA, 405 bp, Homo sapiens
ccttctctcattttgtctttccttcagtagctgggactactccccagctgccagaatctctggatttaacctgtcctaatgtccccaggtcttagagagctctgagttttcaaaccttgggcctggttgcctaataacaaaccctacctccctaggccctcccacagcctttggctccctcyccatgctgtatgtaataggctttgagccacttttcttacccttcaaggatgtctatttcaaccaatggctttagtataaaaccactgacctctggagccagggactcaaaatgggcattggtccagaggctggaaccttagagatttatctggcaagaaaagggttggggacaagctaaactgaaatttccagaactagggatttatttaacaaatgtttaca

SEQ ID NO: 625785 - DNA, 645 bp, Homo sapiens
aacttattctctgtaagtctacctcatagtggcatatgcagtagtaagtgtttaataagttctgctgttgcatcagcagcatcattattttggactcagatgaagtcccagttcatcatcacccttagacaccatttcctgggagctgaggagacactctgctgcttgaccagctggctattcctgcccttgccttcctccctctgcagtctttcagtgatgggttcccagggtgccttgcagcttggcttggctgagttatgaggtcaggctcgcaaatgacagattcaggtcctgacacatcatggagaaatggtgcctgatttacctctttccaaccaatactctgaattttgagggagaagaaaagaaaggaggtgggtgtaaaaaataatgcaaagtctcagaaattaatgaggtaatrgcaaacatattttcattcaaatgagctggggtcatgttcttgaggtggcaaaacagaggaatagccaattgagtaagctcaaagtggaaatcaagcaaacaggcagaagaaatcaatgtcctggtgcatcttttttgtggcaattacttctctgagcctcccagccctggtgccccatgtttgggctacagatgttcatttagcagccccaagtttgacat

SEQ ID NO: 625786 - DNA, 611 bp, Homo sapiens
tccaaaatatgcaagaagtcttaacactcaataagaacacagacaacccagttaaatatgagccaaagacctttacatacatctcaccaaagaagatacacaaatggtaaatacacatatgtaaagatggtccacattgtataacaaaggagaatacaaatcgagacaatgagataccactgcacacctattggcatggtcaagttcagaactcagggactactaaatgctggagaggatttgcagcaacaaaaactctcatttattcctggtgggaatgcaacatggtatagccactttggaagcccgcttgrcagtttttttacaaaactaaacatgctcttagcatttgacccagcaattgtgctccttgacttttactcaaatgagttgaaaacacacagtcacacaaaaacttacacatggatgcttatagcagctttattcctaattgcaaccaagatgtccttcagttggtgaatgaataaaaatctgtgttacatccagataacgaaatattatttggtgttaacaaaaatgagctcttaagctacaaaaagatatggaggaaacttaaatgtttattactaagtgaaatgagccaatgtgaa

SEQ ID NO: 625787 - DNA, 582 bp, Homo sapiens
tattgtgaacccaaaactgctctaaaaaataaagtctattaaagaaataaaatagtggttgcctctcgggggatagggctagagtctgaatgggaatgtgcttgaggaactttttgggctgatagcaatgtttaacgccttgataaggactttgatcgtgcaagtgctgtatgtatatgtctttgtaaaaattcagtgagaatgttcacatagaatttgtgcatttcattgtatataacttttacctcaaaagaaaagaaaactggaaacaaatgttgaactccagttaatgatattcatactgagatgtttaggggaaagtgtatagatgtctgcattcaatttaaaatgcatgaaaaaataacatggattggtggatggcaatagagattggatagatgagtacacatatgataaaatacaaattgtaaaatatttagtagtgagtgtgtgggtgttcatgaaaatattcttctgtgtgtttgaaagtttttatcatgttggggataaaaaagagttccttaaacaattagtagccttctaaacaaagagatrattataatggtcatattggaagcctga

SEQ ID NO: 625788 - DNA, 585 bp, Homo sapiens
tcataacatcgtggtgggttgagtgagatcatatcagtgaaatacctcacacaaaaggtaaaaataacaatagactcacaaactgtaagttaccattatagaaaatagaacccggatgtgtctatgtggctgggaagaattgtctgctggaagggctgatgctgtgcagggagctgsagttcccattatctgaagagcgtcctataaatggggctgatttgttctctatggtttcagagaaagaaacctgatggttggaagtttcaggacaggttttagttctattttaaaaatatttttgtaactatcagagccatccaacaaaggcaatatagaacagttagtgcatgggccctggggtcagaaaacctgatgtgacattttcagcactaccccttacaagctgagtgaccttgaacaattcatttaaagtctctgacctcgtatacttacctatgaattaagggtaataatagtaactatctcatgtggattttagtgagaaataagacaacgaatgtagggcccagggtccagcctgtaataaacagttaataaatggtagctaattataatttgaataat

SEQ ID NO: 625789 - DNA, 588 bp, Homo sapiens
ttcctcctcacctttacaaaatagcaccccatttctctttattccctcatcttgcctcattcttctaaatggtaatattcccytcctgacaatgttggttcatctgtgtcattttatctcccatcattagaaagcaaaccacaatgagttcttcaaagttgtgggctcagtttcaattatgagtctctgcagcagccagtacaggcctgccattaagtaggtagaaaaggaggggaagaaaaatgaagggagggaaaggaagggaaggaagaggaagaaatgaaggatgtgtagaagaaatgaaggatgtgtagaaggaagaaaggaaggaaagaagaaaggaggggaagaaggaagggaggaagtttaggaatcattgtacaagagagaaaaagaaattaaaacagagaaaaaggaagctgaacagagtacacagcttgggagcctagtatctggagtaactttgccctgaggaacctccatcctacgagatgttcctgtttgttccccgaaaaaatgttccatgggtaagttggaaaatgcacaaatgataaccccttgtgaaagaatatgattttgagaagcata

SEQ ID NO: 625790 - DNA, 458 bp, Homo sapiens
ataggagcacaaaccctattgtgaactgcacatgcaagggatctaggctgtgcactccttgtgagaatcaaactaatgcctgatgatctgaggtggaacaatttcatccccaaaccatccccccagccccccccatggaaatattgtcttgcataaaatctgtccctggtgccaaaaaggttggggaccgctggcttaamgtaacactaagaatggtgattgctgctggagaagaaggcaaggacacaggttaagggaggagcatgtagttggtacaatggtagattgctggtgagtgcatggatgttcataacattgttattattaatatttatcctttgtaggcattaaatattacataaattacattcaaacagataatgaaggaaaaatagtatccaaagaggtaaatgaggctttaggcctggcttgattcaagatctaaacaaagacccaag

SEQ ID NO: 625791 - DNA, 603 bp, Homo sapiens
gcatgaggtcaatctccatggcrcacttccaccccaggggctgtacgagaggaaaaaaatgtgcttcatgtcccaaccaaaagcattctctgtctgaggactgttgcccaagtgtgaagtaggagactcgtgcaattcaaaggcacctatgtgatgcccatgtggagcccttttcttagccaggcacgacaggtatggagccggctctgggaagtgggatctagaatgacaacccttggcacagggctaaggagctttaggagtgatgaaatctcattgtaccactgcaaacagaagctgcatccctgcctgggaaggattaggtcgcctcctaggcaggagcaaacatttggtggaaaggactaggaggttggctgcttgctcttctctttcagcagtgacatctccaccctgcctgtcccacctctccagaaaggtaggtctgggtactaaagctcaagtggactagaggctcccaaagcttctccccatgccatctccccattggctgctgggttcagtggtggccgccccttgggtaccaggggctcctggttctacaatgagaagctgcaggttacagctgtaagttttgtcctcatg

SEQ ID NO: 625792 - DNA, 561 bp, Homo sapiens
caaaaaaaaaaaaaaaaaaaaaaaaaaaaagaatccaastctcaatcccatgacagtatagccacctggcacaaccaacctctcatcttgagggctagctttaaatagcacaacttacattacgcatgagataaagccagtgcggcaggtgagaggtgaatgtcgaataacagagaggcactgtgtggtctaggcaaatgtacctacacagtgagacgcgagagagctaggctcaacttctccctagccatatcagcccccagtacctcattcagttcttttgccagaaaatgaacactaatgaccttatcttgaagctttgagtattgggagaattcaagttaaatatgatgcatgcaacaagcatgaaacagatgcagggaaagaagtagattcctcccatcaacagaacaatttgcaagagtatgccttgcacatggtttcatgtcacttcctctctgttgtgcttgtatgtgcacgtgtgtgattattttgtttgtatttttattgttttgaatttctctttctctcctctggctgattttgctggaggggttaata

SEQ ID NO: 625793 - DNA, 561 bp, Homo sapiens
caaaaaaaaaaaaaaaaaaaaaaaaaaaaagaatccaagtctcaatcccatgacagtatagccacctggcacaaccaacctctcatcttgagggctagctttaaatagcacaacttacattacgcatgagataaagccagtgcggcaggtgagaggtgaatgtcgaataacagagaggcactgtgtggtctaggcaaatgtacctacacagtgagacgcgagagagctaggctcaacttctccctagccatrtcagcccccagtacctcattcagttcttttgccagaaaatgaacactaatgaccttatcttgaagctttgagtattgggagaattcaagttaaatatgatgcatgcaacaagcatgaaacagatgcagggaaagaagtagattcctcccatcaacagaacaatttgcaagagtatgccttgcacatggtttcatgtcacttcctctctgttgtgcttgtatgtgcacgtgtgtgattattttgtttgtatttttattgttttgaatttctctttctctcctctggctgattttgctggaggggttaata

SEQ ID NO: 625794 - DNA, 561 bp, Homo sapiens
caaaaaaaaaaaaaaaaaaaaaaaaaaaaagaatccaagtctcaatcccatgacagtatagccacctggcacaaccaacctctcatcttgagggctagctttaaatagcacaacttacattacgcatgagataaagccagtgcggcaggtgagaggtgaatgtcgaataacagagaggcactgtgtggtctaggcaaatgtacctacacagtgagacgcgagagagctaggctcaacttctccctagccatatcagcccccagtacctcattcagttcttttgccagaaaatgaacactaatgaccttatcttgaagctttgagtattgggagaattcaagttaaatatgatgcatgcaacaagcatgaaacagatgcagggaaagaagtagattcctcccatcaacagaacaatttgcaagagtatgccttgcacatggtttcatgtcacttcctctctgttgtgcttgtatgtgcaygtgtgtgattattttgtttgtatttttattgttttgaatttctctttctctcctctggctgattttgctggaggggttaata

SEQ ID NO: 625795 - DNA, 587 bp, Homo sapiens
catcattttccaaaacaactgtctatggaaacctgtttccgtgccgatacctcttaacatctcagtcatcactagagttccacaaaayacagctcagaaactgttagatatgtttctcccttcttttttaagaaaattaccattttaaaaaaatgtatgtaagaatataccatcaattagagacagggaagaaataaaactaggatcgtaattccactgcccaagcataaccactgtgagtatttcaatgtattttcattcatgcttttctctcaattaaaaaaaaatagctggaggtatttgactgtatcagagcttcttcagtgccctacccctaccccaatgtcttctagcacaccaactgcctctgccttcactcattcacccatctgggctccacctcttgggcaccccccactccatcaactctctcttaccatctccttggatcttccccttgttgtcattctgccatacccaccatgcaaatccttcctggatcagctcatccctgtggtcttattcacaaagcctgggctactgaggctggctggggaacaggctgttgacacaatgaccccagtcag

SEQ ID NO: 625796 - DNA, 481 bp, Homo sapiens
atgtggtaggtcatatagaaagtatcaataaatttaaaattgttgaaatcatacaatagaatgaagttcataagcaataacagaagaaaatgtgagaaatttacaaatatatggaaattaagcaacgcgttcctaaacaatgagtcaaagaaaaaataacaagggaaatttaaaaatactttgaggtaataaaaataaaatcacaacatgctaaaactttttgtggtgcagataaagcatcacttgaatgaaaatctatagctgtaaatgtctatattaaaaaggaagatagctctcaaatcaataacctaaccttctgacctaagataatagaaaaagaagagcaaacaaagcccartgcaagcagggaaataaaataataaagattaaagcagaaataaatgaaatagagagtaaaaacaatagagaaaatcaacaatcccagaagctgattctttgaaaaatatcaacaagattgaca

SEQ ID NO: 625797 - DNA, 549 bp, Homo sapiens
tttcttctacttattttggtttaaatttgctctcctttttatagtttcttcagttggaagctgaggccattacttttaggcatttcttcatttccaacattggcatttagtgctataaatttctccctaagtactgctttagcagcaacaaacaaattttaatatattgagttttaattttcattaaagtcaaaagaattttaatgtctcttttgatattttgtttcatctatgggatatttacaaatgtgttatttagtttccaaaaattttgtgattttacaaatatatttctgttattgatttctaatttaattccatgtagtctgagaaattactttatcwctaatcctattaaatatgttgagtcttgttttatgtcccagagtatggactatcttgttaaatgttcttcgtgcacctgaaaagaatgcataatttactattctttggtggaattttctatagcagtcaattaggtcaaataggttgattttgtggcacaagtctactaacttctatttgttccatctgttattttaaaaagag

SEQ ID NO: 625798 - DNA, 549 bp, Homo sapiens
tttcttctacttattttggtttaaatttgctctcctttttatagtttcttcagttggaagctgaggccattacttttaggcatttcttcatttccaacattggcatttagtgctataaatttctccctaagtactgctttagcagcaacaaacaaattttaatatattgagttttaattttcattaaagtcaaaagaattttaatgtctcttttgatattttgtttcatctatgggatatttacaaatgtgttatttagtttccaaaaattttgtgattttacaaatatatttctgttattgatttctaatttaattccatgtagtctgagaaattactttatctctaatcctattaaatatgttgagtcttgttttatgtcccagagtatggactatcttgttaaatgttcttcrtgcacctgaaaagaatgcataatttactattctttggtggaattttctatagcagtcaattaggtcaaataggttgattttgtggcacaagtctactaacttctatttgttccatctgttattttaaaaagag

SEQ ID NO: 625799 - DNA, 565 bp, Homo sapiens
tttatctctctgtttaattttgttaattcatcttgtcctgtactgactgtggcatatgaaaattactcactggattaatcacgtttttgtcaatttcttcttatatttttacttttactttacatattcctataattatatttcacacataggggtttattattcatatatatattcgtggtgcattttgctttttgtctatatgaaaatcattgaaactgtttcaactcttaatttgatatttcttctacttttcagttacttgtatttacttgacatgtctttgtccaacccctattttccaatctttctttttattttatatgcatgtctttttattttatatgcatgtctttttatyttatatgcatcttttgtcaacagactttaattcaactctgcttttcaatcaagcctgcaagtctgtcatttgaggaatttggcctcttcacatttatcactggacttacttctattgtcccttattttttaatacgttcttgttgcttccctttattcatcttttattaaagaattgtttccttagctcttttttcttttggta

SEQ ID NO: 625800 - DNA, 629 bp, Homo sapiens
gtccccatccttcattttctgatgtccagtgtcttgaaaacaaattttttcaaatatttcagtttttgattgtttccagatgaggataaatctggtcctattattttgttttggttgaaagtggaaatcatgatatattttaaaaagtttcatttataaatgttttgtkggggagtatttaggtataattttgattgttaatgtgtttatttagaatctagctaatttattaactcttaatcataatgtattttctaattcattttatttcattttctaagtaattatcatctgtataatgattattttccaccacacttttctaatagttacataactaattttcttttttatcttatttgcatgtcctggacttccagaacaataattaataaggttgataatgaatatcagaacttttttcctagtgttaatgagaacaactctagtatttcagggtaattagaatgtttaatgttagtttgagattactattttctatcatgttaagcaagaatgcttttgtaatgtgttcttaattagagtttttatagaaacaattttaggatatattgggcgaattatttatgatgcatcctatgcatgctttcccttactttcttgaataa

SEQ ID NO: 625801 - DNA, 629 bp, Homo sapiens
gtccccatccttcattttctgatgtccagtgtcttgaaaacaaattttttcaaatatttcagtttttgattgtttccagatgaggataaatctggtcctattattttgttttggttgaaagtggaaatcatgatatattttaaaaagtttcatttataaatgttttgttggggagtatttaggtataattttgattgttaatgtgtttatttagaatctagctaatttattaactcttaatcataatgtattttctaattcattttatttcattttctaagtaattatcatctgtataatgattattttccaccacacttttctaatagttacataactaattttcttttttatcttatttgcatgtcctggacttccagaacaataattaataaggttgataatgaatatcagaacttttttcctagtgttaatgagaacaactctagyatttcagggtaattagaatgtttaatgttagtttgagattactattttctatcatgttaagcaagaatgcttttgtaatgtgttcttaattagagtttttatagaaacaattttaggatatattgggcgaattatttatgatgcatcctatgcatgctttcccttactttcttgaataa

SEQ ID NO: 625802 - DNA, 629 bp, Homo sapiens
gtccccatccttcattttctgatgtccagtgtcttgaaaacaaattttttcaaatatttcagtttttgattgtttccagatgaggataaatctggtcctattattttgttttggttgaaagtggaaatcatgatatattttaaaaagtttcatttataaatgttttgttggggagtatttaggtataattttgattgttaatgtgtttatttagaatctagctaatttattaactcttaatcataatgtattttctaattcattttatttcattttctaagtaattatcatctgtataatgattattttccaccacacttttctaatagttacataactaattttcttttttatcttatttgcatgtcctggacttccagaacaataattaataaggttgataatgaatatcagaacttttttcctagtgttaatgagaacaactctagtatttcagkgtaattagaatgtttaatgttagtttgagattactattttctatcatgttaagcaagaatgcttttgtaatgtgttcttaattagagtttttatagaaacaattttaggatatattgggcgaattatttatgatgcatcctatgcatgctttcccttactttcttgaataa

SEQ ID NO: 625803 - DNA, 412 bp, Homo sapiens
tttaaagtaacgcttttattttagaatcattttagatttacagaaaatttgagaagacagtgtaaagaattcctatatatatatcctatccccagtttctgttattatgaacatcttacattagtgggatacatttgtcgcaagtaaatgagccaataacttaatggtattgtagtttctttctttctttctttctttttttttttttgagagtcttgctctgtcatccatgctggagtgcagcagcacagtcacagctcactgcagccacagcctcccaggctcaagctgagcaygatctcggctcactggaaccttcctctcctgagttcaagcaattctcctgccttagcctcccagatagctgggattacaggcacccaccaccatgcccagctaatttttgtatttt

SEQ ID NO: 625804 - DNA, 576 bp, Homo sapiens
actctgaagataatgcctgcagttagtagactactgccatgaagggatgctggcctggtgttgcttcttatttaagagaagctagaaagacagctttctctcccaaatttaaaatgttcacttactttacttttgaaattctaggtaagccaaataacaattttgtccattgttggctagcctgtaaccactggttcacattctgcagacgctgcctattttatctgtcgcttctccaggctatttactttcattgcaccaaaataataaggctggtggtgctctagtaacagtcccccaaaatatgttaaaactgataaccaggcactgtccagatagtcttgtttctcctaaactgtcccctccttcccagctgcctaagcctgaacctgggtatccttccttgcaggcttgaagtctcacctatctattcagagsagtatatgctgaaagagaggagtttgtgatgtgactgattaattcttcatggattaaaaatgctttaacatttgcatttttaattatgcaaaaggaatctggaaacctggaagagagtagttttaagatccagaattc

SEQ ID NO: 625805 - DNA, 632 bp, Homo sapiens
ttccttccttgcccaattactaattcttcttgtatcctgggaaaaaaataatctgggttattttacttgtaccaatggttaagtccaaacttcagctatttcatggatgtcatttaaagcagacaccaggactggagtaggcaaaaagtgactccgggagaaacagatgtagggcagacctgtcatgaagccgtagtaacaggcagccagcagtgaccaccagcgtctcagatcattaagcaatgtcttactgtgatgtcatccatggatgtacagagttgtaatcctttcaaaacagacagactgtcagcatgacaaagtggatacaaacaagttcttgaactgggatgactaaagcattggggggataaatgtcactgaactaaaaagggatcctatgatacagaactaccagatattgacaccattcagagaggcagrtaaacaacctgcttcccacttagatatttttctatactgattagcaattccataaaatatgcctgatctctagataaatagttctaatctacagatgtcagaactgagttcttaattgctgtaaattagtgagcaaacacaggtttctcattaaacccattacaccccgtgtgttaaaatggaacacttgt

SEQ ID NO: 625806 - DNA, 412 bp, Homo sapiens
tgtaacatctttggaaatgctcccatcttcagatcaatacctaacttgttcagtcttatagtccccaacaactgattttgtcaggatggcaccctcaaagccaacccacagtggccaacagagtgcgaggaggagcccagtgyctcccaaaaggctaagagcagaactaattgagacaactgcaaataaacaccaatagatattcaggccaaggctgctattccagctgacaaagactgtcagtactgaagacaaaaggaaaacaacaatccatgagtcagaactgattttcattttctcttcattgtttctgatgctatttgggtactctccagttggtgatggcttcatgcactttctattatgttggctgttaataagagctttctctctaatcagacggctgtccacc

SEQ ID NO: 625807 - DNA, 511 bp, Homo sapiens
cacattcggtggctgcctaaaagggtattagaactaaaatattttgcgtttgcatgctttaaatgtatgtattctatcattaccactcactgacagtttggctaggtatggaatttcaggtaacaaaacattacccttcataatttgaatgtgttgctctattatcttctagcttacaagactgatgtgaagaaatctgattatattctgattctcaactcttcattgtgtgtgtgtgtgtctctctatttctatatatatatatatatatattttttttttttttttttttacaagatcatcttccctcgtttttccaaaacttcacwatgctgtcctttttgaaaaattgattttgctcagcactaggtgattctttaatctggaatcttaagttctccagttctggaaaagattcttgtgttatttctctaataatctatcctttattatctctgttctctctttttagaaattgttttctttaaatattggacctcccagaatgaac

SEQ ID NO: 625808 - DNA, 515 bp, Homo sapiens
gaaaagttcattctgggaggtccaatatttaaagaaaacaatttctagaaagagagaacagagataataaaggatagattattagagaaataacmcaagaatcttttccagaactggagaacttaagattccagattaaagaatcacctagtgctgagcaaaatcaatttttcaaaaaggacagcatagtgaagttttggaataccagaaagagaagatcctgtaaaaaaaaaaaaaaaaaaaaaaaaatatatatatatatatatatatatatatatacacacacacacacaatgaagagttgagaatcagaatataatcagatttcttcacatcagtcttgtaagctagaagataatagagcaacacattcaaatattgaagggtaatgttttgttacctgaaattccatacctagccaaactgtcagtgagtggtaatgatagaatacatacatttaaagcatgcaaacgcaaaatattttagttctaatacccttttaggcagccaccgaa

SEQ ID NO: 625809 - DNA, 556 bp, Homo sapiens
acattccagtgtgattctgtcattctatattaactatgtccattttcacaaaaatagagttactatttctatatctcattctgtttcttgttttggagtgatttccaaaaggaaaagaggaagaaatagctttactctctaatgttagactttctaatttctgttattcttaattctcaattattttcaaatagcttaaatrtcttttcaagaataaaactggtatatggatgcttatatatttttttaagtagacgaaagacatggatgtaaatgttccaaaatggtaacagctattggttataattacagaattatgtccaccacttcctaacacactttaggaataatttctgtattacttttttacaatatttatggttaatttagggagtacatttttaaaacattttgtttgtaatctacaaagctccaaatacaaatactgttttaaagatttaaccgagtcctccacactttttctcccaagcacatgacctggtgctatactcaaactagttttcctttctttgacatgtgatgaaaatcacagttt

SEQ ID NO: 625810 - DNA, 556 bp, Homo sapiens
acattccagtgtgattctgtcattctatattaactatgtccattttcacaaaaatagagttactatttctatatctcattctgtttcttgttttggagtgatttccaaaaggaaaagaggaagaaatagctttactctctaatgttagactttctaatttctgttattcttaattctcaattattttcaaatagcttaaatgtcttttcaagaataaaactggtatatggatgcttatatatttttttaagtagacgaaagacatggatgtaaatgttccaaaatggtaacagctattggttataattacagaattatgtccaccacttcctaacacactttaggaataatttctgtattacttttttacaatatttatggttaatttagggagtacatttttaaaacattttgtttgtaatctacaaagctccaaatacaaatactgttttaaagatttaaccgagtcctccamactttttctcccaagcacatgacctggtgctatactcaaactagttttcctttctttgacatgtgatgaaaatcacagttt

SEQ ID NO: 625811 - DNA, 583 bp, Homo sapiens
ataaatgtttctgcaaagagtctgtccggccaagtgtttgaatcacagatccaatgctagtgcaggtggatctccaatggtccttactgtggtttgaagccttctctcttgtaagaagccttaattcacagtttcattattcatggcttcccaggatttgagacagagactgtatatttaattaactctttttcctgaaaatgttagcattgcattcttactgaaaataaacatgggttgggttcattggctcacacctgtaattccaggcacaggagttcgagacgagcctgggccacacagtaaggccctgtctctattaaaaaaaataaataaaaaaaaataaataactgaagtcttgaaaaccatctgataaagggtattgtggattgggttgagtgcctgtgagaaggcttgacctctgctctgacttgaaagcagtttgcagttctaccctcgcccccgcccaagtgaaagccctcagttctagtaaggagacacacagaagagtgtttatttgtcatgctagttttttatgacttggrcctaattgccatggggattaatgtgaccagtttcacat

SEQ ID NO: 625812 - DNA, 441 bp, Homo sapiens
taatagagatgtcgctttctttcattcgagaagaaaataccatgtaatctttaaatatacttgatttctggttgaagtctttaggaaaatcttacaggaagtcagattttcaactatctcatctctaaaaactactattggtaaacaacataaaagtaaaaaaaaaaaaaagaagaagaaggagaagaagaagcagctaaaaataaaggtaaacaaacaatttaggccatagagctcagcacaacttggaaacatttctgtataatattaataattacaagcacaakggatgatgagttacaaataggtgagccttcttaattggctatttctccccactgatatttaacatgactttcttttaaaattagtgataataggtataaaagaaagtgtaatatgtagcagcctggcctccccaccaaagagaaaagcctcgtt

SEQ ID NO: 625813 - DNA, 441 bp, Homo sapiens
actgtcccccctgggcagtctgctcgctgggtggacgcactgcctgtccagctattctgcactggctcgtctctaattaaagtacttgctatgaacgatttttaagtactggagcttaatgaagttagaaaaaggatttggatgcagtttgtgaagacttcaaattgtttgagttttttctctagggagaattgtaaagtctggaggcattctgaattacttacaatgtattccattttgttcttttcaaaaattctctcatagtggtgaatagctgagaaaaaaaaaaataaaagccccctgcccatcttttcccccaggagaacactgtaactcttgcttggcaaagtggcttcttgggaatttacaagtcttkgaatactgttatctaattaaagggatctttaattctcattggcaattctacctttgaccctacag

SEQ ID NO: 625814 - DNA, 520 bp, Homo sapiens
ttcccagggagccagtgaggtctgcacctccaagaggcagatgagccctgagggcatttggtcttccacacatcaaagatggaatcactttcctctttccccaacagcatcaaacccaagcactgcaccatcctcctaattccatgcaaaataacctaaaataggacctttttatttccatcttctaaactcacttatagctcatgaataatcttatgactttatgtaaatcttgatgaaagagaaaacatctttatgacatttcaactgttaagactctatagttaaaggaaaaacaggtttgttggataaaaaaaaatatattgtgggaagagaggtagcctgacagtagggttcattttccattctgctaacaagataaaaaataatggggaggccaggaagacacatctgtttccttcctttaaacttttagtctccctmtaatgctctacctaaagaaaaagagagagagaaaagacttttctatccattctatttgcagactctatttaatgtg

SEQ ID NO: 625815 - DNA, 642 bp, Homo sapiens
aacatatttataaaatttagcctaagttgtattttttataaataattatttcttttaaagggaatgtttgagaagcaccaagttattcttataccagaaaacaattcttccccatcacaagctaagtaaaaactagcagaaatgatcaatgaaaatgaggccacatggataagaagagytcagctctaccaaatatcagtaccatatagaaatgttcaaaaggaaagacatcaaaatcctttccaaaacagaagctactggctttacaccaacagtactgtgcattgatatcaaaagactcagaccacttctgacagcttttcactgcagaccttcactctgaatcaagttttgcccccaagagtttcaaagggccactggtgaaattcaaataagtctgaagttcagttgttagtaatgtaccaatattagtttctcatttgtgacaaatgtaccaaagtaatgtaagatattaacaatggtgggggaggtgataaggctgtgaacgctctatactatctttgcaacttttctacagatctaaaattattcagaaataaaaagtttatgtaagaacaagcaaaaagctactgtcctaaatcagtgtctctggatttaactgtgaagctattattccctcaa

SEQ ID NO: 625816 - DNA, 589 bp, Homo sapiens
tgtacataaggactgacatcatgtcttttatttcctcctgtctcctaccccccattttttactaatgctcaagaacacaaaagggtgagatgcacctattttgtttttgcaaaaatctgttttttgctttaagtaactctcacaaatctaaccctctaccagacacagattttgaaagactcattctattgaagaaaatgtagtttcaaagcatttttcaaagacargcagtttgaactattgcagtgttagaaagtttcaaagttatataaatcatagttaaatattataggtaaaattgctatcttgtttggaatataatgaaaatgggttggactcatttcagtgaaaagttctttttattggaaagactctgagaatgtatttatcagatgaaactttgaacctcataaacatttttaatagtccagcaaagcatcatttttatacttttatatttcaaaagctatgtgtaattttagggatgctgctatcacttcatgaaattatcacaccaactgagtgtggacactgctttaaactgcataagaatcatggtaatttttacacgtaggcatgtcttagaggg

SEQ ID NO: 625817 - DNA, 363 bp, Homo sapiens
ttacttacacgtggcaagtaggatttgacacacaggctgtagtttgctgtcttctcttatagattaatctcctataaaagttacagctctctgcagctgttcagttttccccttagataaaaatgttttttcattatcaagaaactaatgttaatrgcaattactttatgacaatttccttatataagacacaaaagatgtgacctctaattacctctttaaagggtctgtcacatttcatgcattaccagggggactgatattgtcattggctcaatctccattcaaaaccctctagcatgcctttcagcactgcagatgatggggcatgaactatatttactagactctcttgcagctaga

SEQ ID NO: 625818 - DNA, 526 bp, Homo sapiens
tttaattttgatgaggtgtagtttattaattttttcctgtggattatacttttttgcrtcaaatctaagaactctacctagccctaggccccaaacattttcttccatgactttttttttgaaatattctataattttacatttaagtccatgttccatttgggataaatttttgtatgagcagtaaagtgtaggttgagcttattattgctatttttgcttttgaacatataattatgtaaatcctttttgtatataaagaaatgacagcagtcaattgtaccattcatgatgctcccttacttgtgtttttgtaaactttcttgaatgggagacaggaagatggcatggagctacagctatggtatctatttatgtgcctacctatcaataaattttgtgtcagcagagggaaagggctttaaacaagcaagcataagccaaataatcctgcagacatgtttgtcccacacagtgttctaaaaaaaatcttgagctgacttaaaacaaatttgaagatttaata

SEQ ID NO: 625819 - DNA, 553 bp, Homo sapiens
ttctaatcataaaggctagctgccagaaatgctaacctgacccactagtggtgtgggttgttaatgctggacgtgttggtggtccagagtatcttggttcccttttagcatttctaccatttgtttactcttatcagaagtaaacaggaatacagaaggaggcttctccagagagaaagtccagcatggaattaagatttcagatctgacasgttgagaaaagttcttcaaacttgctcactcttttctgatctaattaaatgcctcaccttcttgatcttgaacagttgaggagaaacaatatcatcagcacacagctaagcctttaaacaacccacaactactgtgatgttcttgtgtcagtgtcaaaaaaacaaaaaaaggtgcagcaaccctacggcatgacatagcacaccctcctcagagaattctgccccttttgcagaacaagaaaactcttttgaagctaatttgtctcagtgtgtctagacaaaaatttgggacagacaatacaaagccctcttttaagattcacttctatttttgccttcac

SEQ ID NO: 625820 - DNA, 612 bp, Homo sapiens
agactagaactggaagagcagagtacaccctacgacaaagatcctctccttgaccaacctctgcttgggctcccctgaactctttctcaagtaggcctgacttttggacttccacgttcgtctgccttggattggtaagaatcctattaagttggttaagccaaaatcttccatatctgattgtcctccacatctaatcaggttcctcatcctctactgtcccgcaggggatgtctatcaccctggcctgccctcagmaccagtcctgttacattggtttatccaggatccccccttacccctgatgtttcctcttagtaatttcccatccactgccacccaccctgcttcttggctatgaattcccacatgtccatgctgtatgcagagttgagcccagttccatactgagctctctttttccatattgcaatagtcctgagctctggttttctttgacacctacaaacactgaataaccagatacgtcaaaacaaaagtcatgatgaatttctgggggtcccaacagagagatcatattgatgattaatgggcaccttaagtttttgcacctagatatgatgtccatttttaaataagtgaataataagt

SEQ ID NO: 625821 - DNA, 612 bp, Homo sapiens
agactagaactggaagagcagagtacaccctacgacaaagatcctctccttgaccaacctctgcttgggctcccctgaactctttctcaagtaggcctgacttttggacttccacgttcgtctgccttggattggtaagaatcctattaagttggttaagccaaaatcttccatatctgattgtcctccacatctaatcaggttcctcatcctctactgtcccgcaggggatgtctatcaccctggcctgccctcagaaccagtcctgttacattggtttakccaggatccccccttacccctgatgtttcctcttagtaatttcccatccactgccacccaccctgcttcttggctatgaattcccacatgtccatgctgtatgcagagttgagcccagttccatactgagctctctttttccatattgcaatagtcctgagctctggttttctttgacacctacaaacactgaataaccagatacgtcaaaacaaaagtcatgatgaatttctgggggtcccaacagagagatcatattgatgattaatgggcaccttaagtttttgcacctagatatgatgtccatttttaaataagtgaataataagt

SEQ ID NO: 625822 - DNA, 638 bp, Homo sapiens
actatttgttttcattgtggagattgtaataaatactactgtttttagctgtttaaaaacagctcaggcttttgctatatataaatgtgtccctaatgcaaaacttgrctgacatttgaaaattttacaaaaacattttaacttatttttaaaggattagttattaccactgtctatatccatttacaaacacaaaaaaggataaaaagatgccttataatttaaaaggaatattacacttacaatacaaatattaacaaccagagtcactactgagacttaatgtgcaacatcttcatacacataatagttactgaactaagattatattatttcgctatgtaccattatggatggattccacatgcacgctgaacatccgcaagttacatgttatagcacactcacatacgcacaaaatcctatatgctaacagacatttaatgtatgtttaatgatgttgcctgataacttgtgctttttaaaagcttcatatatgtagacatttgcaggtttccttttaaaatagagcaatctcggcatcagatctgcaacatgatttgtagtataactgtttccctcagtacaaattatttgaatttttattgaacaccttccaaatatttaaaatatctatc

SEQ ID NO: 625823 - DNA, 638 bp, Homo sapiens
actatttgttttcattgtggagattgtaataaatactactgtttttagctgtttaaaaacagctcaggcttttgctatatataaatgtgtccctaatgcaaaacttggctgacatttgaaaattttacaaaaacattttaacttatttttraaggattagttattaccactgtctatatccatttacaaacacaaaaaaggataaaaagatgccttataatttaaaaggaatattacacttacaatacaaatattaacaaccagagtcactactgagacttaatgtgcaacatcttcatacacataatagttactgaactaagattatattatttcgctatgtaccattatggatggattccacatgcacgctgaacatccgcaagttacatgttatagcacactcacatacgcacaaaatcctatatgctaacagacatttaatgtatgtttaatgatgttgcctgataacttgtgctttttaaaagcttcatatatgtagacatttgcaggtttccttttaaaatagagcaatctcggcatcagatctgcaacatgatttgtagtataactgtttccctcagtacaaattatttgaatttttattgaacaccttccaaatatttaaaatatctatc

SEQ ID NO: 625824 - DNA, 420 bp, Homo sapiens
ttgtggtattcatggcctcgtgtgttttgggtaaatctgactctgatgggtgggaaagggtcaggcttcccctctatgcagctgcacactcctccactgttggcaccctacctattctatttttagagacagggtctcactctgtctcccagactggagtgcagtagcacgatcatagctcattgtagcctccaattactgggctcaagcaatcctcctgctttagcctcctgagyagctggaactacaggtatacaccactacacctggcttttttttttaagagacaaggtctcactatgttgtctaggttggccctgaatttctggtctcaagcaatcctcctatctcagcctctcaaaagtttaggattataggcatgacccactgcacttggccacatctagtgaattttttatt

SEQ ID NO: 625825 - DNA, 570 bp, Homo sapiens
gcttttataattcatgtgaaacttctactttttttttttttttttttttttgggacagtgtctcactctgttgcctgggctggaatgcagtggcacaatctcagctcactgcagcttccgcctcccgggttcaagctatttccagctaaactttgtacttttagtagagacaggatttcaccrtgttgaccaggctggtctcgagctcctgacctcaagtgatctgcctgcctcggtcttccaaagtgctaggattacaggcgtgagccactgcacccagtcttacttctacttcttaactgtgatatttcaaccacatatatttaatacaattttttaatgtttggattcatattattttgctgagtgtttcctccttgctcatttgttctttttcctttttttcctcgttttctctcatttggattgataatttttattttgttttatctccgctgaattcttgttagtattacaggttgagcatccctaatctgaaaatctgatatctgaaatgctcaaaaacccagaactttttgagtgccaacaggacaccacaagtggaaagtt

SEQ ID NO: 625826 - DNA, 570 bp, Homo sapiens
gcttttataattcatgtgaaacttctactttttttttttttttttttttttgggacagtgtctcactctgttgcctgggctggaatgcagtggcacaatctcagctcactgcagcttccgcctcccgggttcaagctatttccagctaaactttgtacttttagtagagacaggatttcaccatgttgaccaggctggtctcgagctcctgacctcaagtgatctgcctgcctcggtcttccaaagtgctaggattacaggcgtgagccactgcacccagtcttacttctacttcttaactgtgatatttcaaccacatatatttaatacaattttttaatgtttggattcatattattttgctgagtgtttcctccttgctcatttgttctttttcctttttttcctcgttttctctcatttggattgataatttttattttgttttatctccgctgaattcttgttagtattacaggttgagcatccctaatctgaaaatctgatatctgaaatgctmaaaaacccagaactttttgagtgccaacaggacaccacaagtggaaagtt

SEQ ID NO: 625827 - DNA, 570 bp, Homo sapiens
gcttttataattcatgtgaaacttctactttttttttttttttttttttttgggacagtgtctcactctgttgcctgggctggaatgcagtggcacaatctcagctcactgcagcttccgcctcccgggttcaagctatttccagctaaactttgtacttttagtagagacaggatttcaccatgttgaccaggctggtctcgagctcctgacctcaagtgatctgcctgcctcggtcttccaaagtgctaggattacaggcgtgagccactgcacccagtcttacttctacttcttaactgtgatatttcaaccacatatatttaatacaattttttaatgtttggattcatattattttgctgagtgtttcctccttgctcatttgttctttttcctttttttcctcgttttctctcatttggattgataatttttattttgttttatctccgctgaattcttgttagtattacaggttgagcatccctaatctgaaaatctgatatctgaaatgctcaaaaacccagaactttttgagkgccaacaggacaccacaagtggaaagtt

SEQ ID NO: 625828 - DNA, 592 bp, Homo sapiens
tcagttttcttgtttgtcaagatggaagacagtcacataaagattgttgtaaggactaaataaaagagctaatgagaagaaaaaagtattttcaaaataccttatcagctgaggttaactactaagctctgtgccaaattttttacatatgccaaaaatgtgaaactcagaaccactccgcatggcacatattattgatgggatgtgctatacaaaatgggcttactctgattgagagctctaaactggaggtaggaagtcattctaagggctgcctgcacattctacaaacctgcagggaaaaacaaaacaaaacaaaaaaaaggaacttgccttgaacctttgaagtgggccaaactgcaacgaccacaaaattatgtaaaacagctgaacttcaccagcgttgcaactcctgaacagtaacaaccaatgaactatggactcaggtactaagccacccgcttccaccaacggataattctttcaggacttgcataaacacccgtagcttcctttctgatttyctccctgttcccctccctctttttggaatacaatttggcttccagcccaatgcatctccagaatcgca

SEQ ID NO: 625829 - DNA, 605 bp, Homo sapiens
gtactttgtgttaattatttgtgaaatatttttcttkcatgaggcaatagaggcaactcctgcttctttgagcagaatgagaatttagtttaaagatataggggagaaaatagaataagtactgtggcattggcttggaataggtgttattgtgagtatatgattttcattaaaataagaaatatgtaaaagtgcaaatgtggctgcttgtatgcacacattccaactctgtccactgagggggcatggtagcgctaataaactagtagtaataagcatagctggtttctacattttggttcccaaatgccattctttactaaaagaacctggtgtccttgaagaaatagctgattgcaggactgggacaaggaaattacaagattagcctgaaatatttttttgtgtgaaaaagtaaagaagtgttcacagcatgatgagactgtcaaaagtacacagtttaaagcaacctaaagggacccctattggcagaatctgggacagtgtaagaataatgatcgtaatggactgtagaacattgagtaaaatagaaatccataactctacactaatacaaatgaatgaagagaagagaatgctcttcc

SEQ ID NO: 625830 - DNA, 549 bp, Homo sapiens
cccataatagtttgcttcttcttagaggccagtaggaacttttctctgatactttaccttccttttttgagacagagtctcactctgtcacccaggctggagtgcagtggcgcgatctctgctcactgcaacctccgcctcccaggttcaagcgattcccrtgcctcagcctcctgagtagttgggattacaggcgcgcgccaccatacccagctaatttttgtatttttagtagagatggggtttcgccatgttggccaggctggtcttgaacccctgacctcgtgatctgcccgcgttggcctcccaaagtgctgggattacaggcatgagccaccatgcccggccactttaccttctttttaaggactcacctgattgggtaaggcccaccaagacaatctttcttttgatcaactcaaaataaactgattaaggtatcttaattataactgcaaaatccatttgccatataatgtaatataatctttactggagctacaaattctcacactaacaggaggagattacataacgatgtaagtcatt

SEQ ID NO: 625831 - DNA, 427 bp, Homo sapiens
caccttcgccccatccccctcacaagctgtatgagtttgctagcgctgtcataataaagtaccagagaccgggcagcttgaatgacagaaatgtattttctcacagtctggasgctagaagtccaaagtcgaggtgtcaggagggctgcttccttctgaaagctctgaaggaaggttctgttctaggattctctccttggctggtaaacagccaccttccccatgtcttcacatggtcttccttctgtacatctctctgtgtccaaatttcccttttaaaaggacaacaattgatatggtttgaatttgtgtccccgcctaaatatcatgtcaaactgtaatctccaatgttgaaagaaggggctggtgggagatgactggatcatgaaggcggatttcctgcttgctgttctcatgatagtgagtt

SEQ ID NO: 625832 - DNA, 410 bp, Homo sapiens
tgttgttttaactcaccttcgccccatccccctcacaagctgtatgagtttgctagcgctgtcataataaagtaccagagaccgggcagcttgaatgacagaaatgtattttctcacagtctggacgctagaagtccaaagtcgaggtgtcaggagggctgcttccttctgaaagctctgaaggaaggttctgttctaggattctctccttggctggtaaacagccaccttccccatgtcttcacatggtcttccttctgtacatctctctgtgtccaaatttcccttttaaaaggacaacaattgatatggtttgaatttgkgtccccgcctaaatatcatgtcaaactgtaatctccaatgttgaaagaaggggctggtgggagatgactggatcatgaaggcggatt

SEQ ID NO: 625833 - DNA, 637 bp, Homo sapiens
aaatgcatgctattgatagccatgtgcggaaaaaaactccttacctactgagacaagattgctataattttccaggatcacatctctgtatagaatcttctgagcagggtccagcagataccactcttcctgagtgaagtccacacatacatccttgaatgacacttgttcctgtaatagtatactctttttacatgaaatggtcagaactagatgatayagaaaagatttaagagaactaatctctttagagtttactaaaaaatgacaggttacctccctctgtgctgctatactatacagaatacaaaatatcttgtataaattgagtttctactaagggtctggaattgtgctagctgctgcaaatcctactggtgaaaacagacaaacatggtccctgttcctagagtgcttatgacctgaaaaggagatacacagaataacatttattaagttgcaaactgcaggaactagcagtgtgtaccaaggagattgaagttacagaggaaatattagttgtttcatattaccttttacattatcaagttaactgtcatcaaggaagtaaaactttgttattaaaataatgggattgaaatgaatatgaccaagctcagcacatattgattcaagt

SEQ ID NO: 625834 - DNA, 407 bp, Homo sapiens
aggaagtacctgtgactagcctctaataaaaattctggacaccaaatgtctagtgagtttccttggtacacattttacgtgcgttgtcacatgtcattgctagaggagttaagtgtgttctgtgagactccattgggagaaacctctaggaatttcgctgattttgctttgtatcctttcactacaataaatcatagccataagtatgactatgggtctayaagaaacaatacatcagtaacaactgacacacctagcaccctaatttttgtttctaacgccatgctccaatatatgctgagtcatcctaggacatcattaataacctgggggtggtctcagacacctcttatacatgtatacacacacacacacacacacatgcacacacacatacataaaatgga

SEQ ID NO: 625835 - DNA, 445 bp, Homo sapiens
gaattctgacttctatacctgttccatcaccaccctccccttctagggaattatagggaacaaagtttttacatgtgcatttttttcatttttttaatgcagacaagtaaattaggttttatatcaatctacctacctgcatgtatatatgtgtatacatatatgtttgtgtccacacataatatatatttttamccctttcttgttatgtttgtattcatgtgaatatacatgtacatgtgtatctgtgtatatgtttctacactcttcttacacaaaggatagaacactatataccttgtcctttaatttttacatataacagtatatactggagatctttccaaattagtgcacatggaaattcctcattgttttattaacatttttttattgagatgaaagtcacataccacaacatccactagtttttagtatattcata

SEQ ID NO: 625836 - DNA, 445 bp, Homo sapiens
gaattctgacttctatacctgttccatcaccaccctccccttctagggaattatagggaacaaagtttttacatgtgcatttttttcatttttttaatgcagacaagtaaattaggttttatatcaatctacctacctgcatgtatatatgtgtatacatatatgtttgtgtccacacataatatatatttttaaccctttcttgttatgtttgtattcatgtgaatatacatgtacatgtgtatctgtgtatatrtttctacactcttcttacacaaaggatagaacactatataccttgtcctttaatttttacatataacagtatatactggagatctttccaaattagtgcacatggaaattcctcattgttttattaacatttttttattgagatgaaagtcacataccacaacatccactagtttttagtatattcata

SEQ ID NO: 625837 - DNA, 495 bp, Homo sapiens
cacacccaactaattttttagctttttatagagacgggggtctcactgtgttgcccaagctagtcttgaattcttgggctcaggcaatcctcccactttggtctcccaaagttctgggattacagatgtgagccactatgccgtaccatcccatgcatttttgaaaatactaatcactatgacatcacaaatggaaaataattctatcactttgttttcttctcacaacatccttagagcattttgaattgaataaagtgcccaatatttcaaagaatgtagtgagaaacaaatgagaargaagacatagacctttattttgtggagaaataaacataagaaccattatgggattcatttggtataaatttattatgcagaagaaactataaattgagtattcaaaaataattgaatacattcacatttttagtctacctcacattcaggttttaaagtaacaggagtgtaaaaagatatcaataatataaataa

SEQ ID NO: 625838 - DNA, 601 bp, Homo sapiens
taaaacataagatataaaacagtggtaaatgtacataagagagtgcattataaagaagctatggaactcaagagaaaattagaaacaatccaaccaagttttatagttgaaaaaaatcctgagaattatattaaaggtgctaggaaaatctaattccaggcctcaaaagttagtgttgttcagaacccattctaaggtaggtaaatatagatkggggtcactgggtaatatatctaccaagtacaatcccggcttctatcacatgcctgtgcctttagtaggtataatgacaatttggagaacagcataagtgtgctggcccctgacaaacagaaaggaactacatggtttttttttaaattaagttttcaacctagaatccaatcaggaaaagactaaattttggactatataaaaatgtaaaattccatatatcaaaaatatcataaaattctagctggacacagtagcttacacctataatcctagcagtttgggaggccaagatggaaggatcacttgaggttaggagttaaagaacggcctaggcaacacaatgagacccccatctctacaaaaaaaaatgtaaaatttagcaagg

SEQ ID NO: 625839 - DNA, 601 bp, Homo sapiens
taaaacataagatataaaacagtggtaaatgtacataagagagtgcattataaagaagctatggaactcaagagaaaattagaaacaatccaaccaagttttatagttgaaaaaaatcctgagaattatattaaaggtgctaggaaaatctaattccaggcctcaaaagttagtgttgttcagaacccattctaaggtaggtaaatatagatgggggtcactkggtaatatatctaccaagtacaatcccggcttctatcacatgcctgtgcctttagtaggtataatgacaatttggagaacagcataagtgtgctggcccctgacaaacagaaaggaactacatggtttttttttaaattaagttttcaacctagaatccaatcaggaaaagactaaattttggactatataaaaatgtaaaattccatatatcaaaaatatcataaaattctagctggacacagtagcttacacctataatcctagcagtttgggaggccaagatggaaggatcacttgaggttaggagttaaagaacggcctaggcaacacaatgagacccccatctctacaaaaaaaaatgtaaaatttagcaagg

SEQ ID NO: 625840 - DNA, 410 bp, Homo sapiens
gctaagaatggctggaaaccactctagtgatctgtcagctggagtcctgggacattcacaccactgggcaagaagcatttagaagcccactaatgagcacaacccatttccctcatcccttcctcccctacagctcctgaagcaaaaaagaaataataattcgttattttcggccagaagggatgataatccagagttccaaaataagtccatggtagcagaagtaatatttaggaagtacgtgccaagtgccaggcacctagctgtggtttaaatacatgattayaattcacgtcaattctatgaggaagttgttgacaatcccgtctctaaattagcattgggtggtctcacttcttctaggtacatggatatgggttgagttgtatagtcgctgtgcccttcaccat

SEQ ID NO: 625841 - DNA, 582 bp, Homo sapiens
gttgaatatattgttaatcacgatcaatttgagtgttcgtgtgtgtttatagatttgctatagacttccctccttcattttctttctttttttcaatttttatttttattttaagttccasgacacgtgcaggatgtgcaggtttgttacacaggtacataggtaaaagtgtgccacagtactttgcacacctgtcaactcatcacctaggtattaagccccacatgcattagctatttttcctaatgttctccctcccccgaccccaccaccctgcaggccccagtgtatgctggtcctcttcctgtgtctatgtgttctcattgttctgctcccacttataagtgagaacatgtggtgctcggttgtctttttttttttaagacagtgtctcactctgtcagctaggctggagtacagtggcaccatgtcagctcactgcagcctcagcctcccaggctcaagcaattttcccacctcagccttccgagtagctgggactgtaggcacacgtcatcacacccagctaatttttgtattttttgcagagatggagttttgccatgttgcccaggctggcct

SEQ ID NO: 625842 - DNA, 391 bp, Homo sapiens
aaacagcgtggtactggcatgaaaacagacacatagaccaatcaaacacaatagagaacccagaaataaatccacacatctacagtgaactcattttcaacaaaggtatcaagaacatccattgggaaaagacagtctctttctgccttaataaatggttctgggaaaactggatrtccatatgcagaaaaataaaactagacccttatctctcaccatatacaaaaataaaataaaaatggattaaagacttaaatccaagacctcaaactatgaaactactaaaagaaaacactgggggaaatctccaggacattggtctgggcaaaaatgtcttgagcaatatcccataagcacaggcaaccaaagaaaagatggacaaatgggatca

SEQ ID NO: 625843 - DNA, 597 bp, Homo sapiens
taagtgttcatccacagatgaatggataaagcaaatgtggtacataaggccgggcatggtggcttatgcctgtaatcccagcactttgggaggcagaggcgggtggatcacccgaggtctggagttcgagaccagcctgaccaacatggagaaaccccgtgtctactaaaaatacaaaattagttgggcgtggtggtgcatgcctgtaaactgagctattcaggaggctgaggcaggagaatygcttgaacccaggagacagacgctgcggtgagccgagattgtgccattgcattccagcctgggcaacaagaatgaaactccatgtcaaaaaaaaaaaagaaaagaaaagaaaatatggtacatatatacaacggagtactgtttggccataaaaaagaatgagatcctgtcatacgcaacaacatggatggaggtgattatgttaagtaaaataagacaggcatagaaagacaaacatcacatgttctcacttatttgtgggatctaaaaatcaaaacaattgaagtcatggagatagacagtaaaaggatggttatcagaggccaggaagggtcggtaataaggggttgcgga

SEQ ID NO: 625844 - DNA, 597 bp, Homo sapiens
taagtgttcatccacagatgaatggataaagcaaatgtggtacataaggccgggcatggtggcttatgcctgtaatcccagcactttgggaggcagaggcgggtggatcacccgaggtctggagttcgagaccagcctgaccaacatggagaaaccccgtgtctactaaaaatacaaaattagttgggcgtggtggtgcatgcctgtaaactgagctattcaggaggctgaggcaggagaattgcttgaacccaggagacagasgctgcggtgagccgagattgtgccattgcattccagcctgggcaacaagaatgaaactccatgtcaaaaaaaaaaaagaaaagaaaagaaaatatggtacatatatacaacggagtactgtttggccataaaaaagaatgagatcctgtcatacgcaacaacatggatggaggtgattatgttaagtaaaataagacaggcatagaaagacaaacatcacatgttctcacttatttgtgggatctaaaaatcaaaacaattgaagtcatggagatagacagtaaaaggatggttatcagaggccaggaagggtcggtaataaggggttgcgga

SEQ ID NO: 625845 - DNA, 566 bp, Homo sapiens
tactcaccacattagtaaattagtcactattcattcttctgatgcaaacacaagcatatcaccctctatcccatccacgtatttggacaaatacccatgactatgtattcaaacaatgctattttaaaaataaagatattattcttctcagtcaatattttaggaaataatcatcatggaaagttaaataataagctagacacggctcaccctgttttcatagtacayaaaaatttgctgctaatatatagaaatacaattgattagtaaattgaccttgtattccatgaccttgctaaatttaactaatagttttggtacacattttgtagattccttaggattttctttgtaaacaatcatgtatttcaacaatatagacaatattagtccttcctttcctgtattatgccttttgtttctttttcttgtctcagagcactatttagaacttctcagaccactatttagaatttttactacttctatttaacaacgttaaatagaaatggtaaaagccgacaccctcacaattcccaatattagggggcagcactcaacatttt

SEQ ID NO: 625846 - DNA, 482 bp, Homo sapiens
gctgtacttcaaccacttcatacactgctgagtgttcaaactgtgttcaataaggcaaatgctgaaccgtaaccaatccagccattctgtacctcacttccgatatctatacatcatttccctttttttgtctataaatcttcttccaccacgtggctgcgctggcttctctgtgaatctgctgtgtttctgggggttgcccaattcrtgaattgttcattgctcacttaaactcctttagatttaacttggctgaagtttttcttttatcactagtataaactttacatgcatttatgcagatgcattaatatgaactctgaacttggaaatattagtaagccaaatctctttctagctaataaaaaatgctgaactgctatgtaataactatcaattatacccgtattctattcatttatttggagaaatcttgtttgcaattttaaggaaaatgtatgtatggcttgctaatgtaattt

SEQ ID NO: 625847 - DNA, 621 bp, Homo sapiens
ctaaaacttagtgatgacctcaatgtgacctaaaatggtttacatttagttagttcaattgtggatataactatatatgatttttgtatttgaagatgctggagattaccataaacaaatcatattattagacaatatgccctgattatcttcaactattttcaaatgatagcaaaagtctaatttgaacacaccatgacatttattgtgctaattcaaccgttataagtgttttaaatggtgtatctcttaatttataccataggtattttaaatttgtgaggggaaagatgtattatagcccatcaaacagaagattagggactgttgtatattgagagtgagtcaaagctaaaagattatcatataggcttttgaacatggatatgacaaaagatagtacagaaagaaaagataaagaaatagaagaaataaagagaagtataaaaagtgtgtcccataaagttttctataatcactgtggttttaaaaattagctgtttatgttatatgtatatattgaaaaatatatcaaaaaagaatttaccatttttccttgtttcctttttgyagtatgtatgcattccagggtgcacaaaaaatccatgttggtttttgaag

SEQ ID NO: 625848 - DNA, 621 bp, Homo sapiens
ctaaaacttagtgatgacctcaatgtgacctaaaatggtttacatttagttagttcaattgtggatataactatatatgatttttgtatttgaagatgctggagattaccataaacaaatcatattattagacaatatgccctgattatcttcaactattttcaaatgatagcaaaagtctaatttgaacacaccatgacatttattgtgctaattcaaccgttataagtgttttaaatggtgtatctcttaatttataccataggtattttaaatttgtgaggggaaagatgtattatagcccatcaaacagaagaktagggactgttgtatattgagagtgagtcaaagctaaaagattatcatataggcttttgaacatggatatgacaaaagatagtacagaaagaaaagataaagaaatagaagaaataaagagaagtataaaaagtgtgtcccataaagttttctataatcactgtggttttaaaaattagctgtttatgttatatgtatatattgaaaaatatatcaaaaaagaatttaccatttttccttgtttcctttttgcagtatgtatgcattccagggtgcacaaaaaatccatgttggtttttgaag

SEQ ID NO: 625849 - DNA, 621 bp, Homo sapiens
ctaaaacttagtgatgacctcaatgtgacctaaaatggtttacatttagttagttcaattgtggatataactatatatgatttttgtatttgaagatgctggagattaccataaacaaatcatattattagacaatatgccctgattatcttcaactattttcaaatgatagcaaaagtctaatttgaacacaccatgacatttattgtgctaattcaaccgttataagtgttttaaatggtgtatctcttaatttataccataggtattttwaatttgtgaggggaaagatgtattatagcccatcaaacagaagattagggactgttgtatattgagagtgagtcaaagctaaaagattatcatataggcttttgaacatggatatgacaaaagatagtacagaaagaaaagataaagaaatagaagaaataaagagaagtataaaaagtgtgtcccataaagttttctataatcactgtggttttaaaaattagctgtttatgttatatgtatatattgaaaaatatatcaaaaaagaatttaccatttttccttgtttcctttttgcagtatgtatgcattccagggtgcacaaaaaatccatgttggtttttgaag

SEQ ID NO: 625850 - DNA, 621 bp, Homo sapiens
ctaaaacttagtgatgacctcaatgtgacctaaaatggtttacatttagttagttcaattgtggatataactatatatgatttttgtatttgaagatgctggagattaccataaacaaatcatattattagacaatatgccctgattatcttcaactattttcaaatgatagcaaaagtctaatttgaacacaccatgacatttattgtgctaattcaaccgttataagtgttttaaatggygtatctcttaatttataccataggtattttaaatttgtgaggggaaagatgtattatagcccatcaaacagaagattagggactgttgtatattgagagtgagtcaaagctaaaagattatcatataggcttttgaacatggatatgacaaaagatagtacagaaagaaaagataaagaaatagaagaaataaagagaagtataaaaagtgtgtcccataaagttttctataatcactgtggttttaaaaattagctgtttatgttatatgtatatattgaaaaatatatcaaaaaagaatttaccatttttccttgtttcctttttgcagtatgtatgcattccagggtgcacaaaaaatccatgttggtttttgaag

SEQ ID NO: 625851 - DNA, 663 bp, Homo sapiens
ataggattctgtctctgaaattgaagacaaaaattctccttaatattattacagctttatttttaaaaactaaaaaggaaattaaaatattaatagtggttgtatctggtgatgaaagaaaaagactgtagtacttttaaatgttttgttagttaccatataatagtttatactgaaaaatttcatttttaaataaagaaaaaaatgtttcctaatgtaaaaagaagggaacataggagcattctgttttatgtgcttttctgcataagtattaaaaactactacatttttactataacgattgctcctgaaaatcgtgtaaaatacattaaataatcaataattattcatggaacaagaggaatgtattagtagtgtaatactcttttgctttcacaaaaattaaatatgctaaatgaaatttcatttattcattcaacaaacattggctggatgtatattactgactagcctctttaatgacattctcttctgcagtgctgtggagttgtaattatttatgccaattattaatattcagtattacatatatagaaggtgttggayatatgatttaatagttcatatttgaagaccagatatgtagggattaagcaaaaggcatcaaaatcaaacaaatctttctgaagcaaaattagcaat

SEQ ID NO: 625852 - DNA, 525 bp, Homo sapiens
gattaagtgtacgaattcaatagtagactttaggaccaggctcaacgtgttcaaatcttggctcgggcatccttggacacagtgcccttgtgcctcaatttcatcatctacaaaataaaagattcttatagtgctcataggttatgagtatttcatgaacatatgtaaagcacttaggatagtacctgctaaatagtaattgctcaataaatactcatggttaatttttctagtttttattcttgtaaatgtaatttataatccccatgtgtcagctatggtgaaacaacacatagtagtaataattcaaagtagaacttattctactttgaataagtggccaccagaatttattctcttgggtggataatttgtatttatttacttatttgagacagagtctcactctgttgcccaggctggagtgcagcagtgcgatctyggctcacagcaacctccacctcctgggttcaagtgattctcttgcctcagcctcccaggtggctgggattacaggcacatgcc

SEQ ID NO: 625853 - DNA, 569 bp, Homo sapiens
taagtatggtacctttgttataattaatgaactaatactgatatactaaccaactaaagtccatactttattcaaattttctcagtttttccttaagttacttttactgttccaggaccctatcctaaatgtcacattacatttaggatacagtctttttaggcttcacttgcctgggacagtttctcagactttgtttttttttttttttttttttttttcagtgttgtgtatttgcttgtttttaatttcattcgattcaattcaattcaattcaattttaagttctaggatacaggtgcaggacatkcaggtttgttacctaggtaaacacctgccatgatgattcgctgcacatgtcgacccatcacctcggtattaagcccagcatgcattagctgtttttcctgatgctctctctgttgcccaggctggagtgcagtggcctgatgatggctcattgcagcttcaacctcccaggctcaggcaatcctgccacttcagcctcctgagtagctgggactacaggcatgcaccaccacgcctggccaatttttcattttttgtag

SEQ ID NO: 625854 - DNA, 562 bp, Homo sapiens
aaaagtttccagacatctctatttggaaactctccaggcactgtaaacatggttatacaagactgagctccatccttgcggtcctgttcctccctctctctgctcctcccttccactctcccaccactacttatatctactcctcatttactggttagattaaatgacacttttatactctccattgtccaagccagaaacatggtcctgtccctcttctttactttctgatccattcaatcatgttcratcattgctacttccttgagagctctggaatcttttctttctattccacctatctccatcctagtgcaggctgttattttcttccccagttaccacagtaactgcagtagtccattctcaccctgctgtaaagtagtactcaagactggataatttataaaggaaagatgtttaattgactcacagttcctcataactgggtagacctcaggaaacttacagtcatggcaggaggcaaaggagaaataaggaccttcttcacgtggcggcaggagagagtagagagcaaagggggaagaaccccttataaaac

SEQ ID NO: 625855 - DNA, 580 bp, Homo sapiens
ataatgcattttggcaaaagcaaacttgaaggtcatcttggatttgctgttgccctggaaatgttgaaaggaatgaatttgttctggcatcttggactgttttggacacagtttctagcagggtacttgtttttatatactaactgaaatagtactgaggtcaatagcttgcatttggaaaacagaaatgaaaatacatcttttaccttgacaaaaggttggcaactgatggcagagatgatcagaaagtagaaatagggtgtgtgagtgggattcccatttgcgtagctttctttgcatacccagcacattcattcatttaataaatatttattctgtgcctaccaygtgccagaaactgttctcggtgcttgggatatggtagagaacaaagcaaacaaaatcatgttgtcatggagatgacatgctgatggtgccaacagagagtgaacaggtaagtgtgagtcaggggtgattggtggtttgaggaagtcatcgtaaggtgataaagaatggctggtgggaggtgttactcaaagaaagcttcttttagttgacatgtgaacagagacacaaatgt

SEQ ID NO: 625856 - DNA, 522 bp, Homo sapiens
ggtcatcctgctaattcttggccacagatactctgtcctgactccagagatggctcttctagccattctattatatttctttgcaagtagcctaaaatagatcaaagaataacttctcactccatactccacagcaatttcactcacaagagtggctctcaaagtttgatgtgtattgttgaaaacacaccaataatgttaaacacatttctagtagtagagagttttactaaagtgctttggtttgcagaatagctcacattatggaaagaagtaggaaaaatagtcaagaaacaggattttttgagcccagaaaaattaacaccaattcccaacatgactttctggcatcatgaaatggaacagcaccaatctttcaaagagcaaagakaaagccactaacagattccgaaagctaccagccagccctgtggttctacagtgactgtgattcacagttatgcacaattctattccacatactcttaaaaatcaaaggcatgagaaatcaccggttccacg

SEQ ID NO: 625857 - DNA, 601 bp, Homo sapiens
ctgtggcatattcctgtgtctcttttgtacccatgaggtactgcagaatattgcagaaacctgcttcagaccctgtagtctgatattttcaaagagtgagtgacagaakcttaaagcatcaatcaaggaaaatgttcagtgatggctcgcttaatggggactctgttaacagctttcccagtgatgaaaatccagtcttgcttaacaacagagataataggaaactgactgaattatacagtgtcagtctgtatgtcaagaaagggaatttcagcataaaaatgtcacagattacaaagtatgtgcttcctgaaacaaagacagaaaggcaaagaacttgctatttcttgacgttactacattccagatggatcttactccacagccacaacacagaagagataaacattccaaaatagaacctgagaatggttctggaactatagacactggctcaaccttttcaattcatgccattgggcggccaatgactgagaaattactctgttccaggaactatactaaatccttaaactatatcatctctaatttgcttaagcccttatagattgtgtattattatccttgctttacagatgag

SEQ ID NO: 625858 - DNA, 517 bp, Homo sapiens
ctaggcatgaaaaaaaaaacaacagttgatccagtgaattaagtggataataatgaacattagaaacgaactggacattagccccttggtaatcacttaggtggatttctctagtccttaggtcactcttaacagtaaaagttaagggtctgttttgaggatgtgtggacagtggatattcaattacatttgttggttgaatcaggcaggcagtcagcaaacatttatagagcacttgtgaggcatcaggctttgctctaggcactaagaatattgtgaagaacaagagagacaaagaaccaaactctagaagctcattttctggtgggagagagggataaaacagacacaaaacactgaaataaagtaattttgtgtagtgataaatattatagaaaaataacaaaataggatgtgataggaactggcttgggatgagagmaggggacagacactactttacatgggatggtcagggaaggtaactgagaaagcaggttgtttagtagaatgtgaa

SEQ ID NO: 625859 - DNA, 490 bp, Homo sapiens
gtatttagaaagaagagggagagacttcacctagaataaaaaggtcagagaaggaaggagaaatctagggcaggtgggctctggacacagagctcccagccccacagaatagtcgtatgccctaattggaccagaaaagaccatgttcctgggataatgggtatcttaaagatagtcagggtggacagataagtgatggctaggrttttctccctgatgttctgtggctgggtaagacactttcagagccctgaggggtgtcttggtaacttacatttcctgccgggataaatagatgggtgttcagacttagatttaatttgattgcagagaacaagagattttctatactcttgaatttgtcaactaaaagtccaacgtgcctcaaacatgtggttctatttacaaaatagccatttacaaagctggtttacaaccatataactgtttgtaatactctgtataatattatgttatcacctgcatcata

SEQ ID NO: 625860 - DNA, 490 bp, Homo sapiens
gtatttagaaagaagagggagagacttcacctagaataaaaaggtcagagaaggaaggagaaatctagggcaggtgggctctggacacagagctcccagccccacagaatagtcgtatgccctaattggaccagaaaagaccatgttcctgggataatgggtatcttaaagatagtcagggtggacagataagtgatggctaggattttctccctgatgttctgtggctgggtaagacactttcagagccctgaggggtgtcttggtaacttacatttcctgccgggataaatagatgggtgttcagacttagatttaatttgattgcagagaacaagagattttctatactcttgaatttgtcaactaaaagtccaacstgcctcaaacatgtggttctatttacaaaatagccatttacaaagctggtttacaaccatataactgtttgtaatactctgtataatattatgttatcacctgcatcata

SEQ ID NO: 625861 - DNA, 575 bp, Homo sapiens
atgtcatcagacctcttcctaggatccatactggatcttgacacatgcctcctaaacatgtccactggctttccattatcacgaaaataaaacccatacaccttatacaaaagaccctacttgatctggtccaaattcctctcaattgctctctcccacaacttgtattccagtgatttccagtcactaaacatgtagcattttctgagtttgctcatttttaataatatacatttccttctgtctaaaaaggctatcctcaggtcttggcctggcaaagtcatcttttaagaccagctcaaatatcatctattctgagccagkcagaggacatgttctcttaaggcattctgttcacccctctggcataatctagccgagagtgacaagagattacgataataatcccttatgaccttgccttgttgttaacaaagttatctcgtttgaaccatataatgactcagatgaggcaagaaggcatcccatttcatagatgagaaaatgggctcaagacagcaagtatcctccccagtgtcatgtggacaggatgggatccagattttgtagccaga

SEQ ID NO: 625862 - DNA, 578 bp, Homo sapiens
cccaaatacttagcctcctacctttggaggtttccttccattggcctaacaccagacatgggcaggacatttttgttgaccggtgttcagctgggcctatgaccactctgttggtcaggcttttccagggaagctggkcataaaacagcagctgagcacctgcagtgggaagagtggggaaagagaagtgacattgtgacattctttaagaggaaaaagtatagtcctaactatcttatcatgaatccatccagttaataacagaatataggctgccataaatttgtgtatgagactacctgcctaaagactctcattttgttttattgaacaatgggatgatctccattagtggatttcaccatatacagatgtagtaaaaatcattaatatatttaaatttgttgagctggagttttataagggattttttccttgaggaaattgatttggttttgtatatgtgttcatggcaatatgatatatcttgtctcattaaattcaaagaatgaaggattataacaaaacaaagtaggcactgcttttatgaagcatgcccaacaatgtgctgtgaagat

SEQ ID NO: 625863 - DNA, 578 bp, Homo sapiens
cccaaatacttagcctcctacctttggaggtttccttccattggcctaacaccagacatgggcaggacatttttgttgaccggtgttcagctgggcctatgaccactctgttggtcaggcttttccagggaagctggtcataaaacagcagctgagcacctgcagtgggaagagtggggaaagagaagtgacattgtgacattctttaagaggaaaaagtatagtcctaactatcttatcatgaatccatccagttaataacagaatataggctgccataaatttgtgtatgagactacctgcctaaagactctcattttgttttattgaacaatgggatgatctccattagtggatttcaccatatacagatgtagtaaaaatcattaatatatttaaatttgttgagctggagttttataagggattttttccttgargaaattgatttggttttgtatatgtgttcatggcaatatgatatatcttgtctcattaaattcaaagaatgaaggattataacaaaacaaagtaggcactgcttttatgaagcatgcccaacaatgtgctgtgaagat

SEQ ID NO: 625864 - DNA, 548 bp, Homo sapiens
gagcactcacttttgttataggtccttgatatgtattttcttttatcctcacagtaatgcttttaggaaggcaagcactgtgtacccattttataaataaaaaaagttaggcttgcaaaacttaagcaacttacacaggaacacacagttgggagtcaattccagatctttgtagwaccaaggcatacacgatttttcttgatactgtatagactgcccctaaaatttcagactttagatttcaaagagcatggtagtctggtgtcatgtaatggagagacagagaattccctaggccttgatgaggtctaaagtcatgaattttgaacagaatatttttatttttattttttaatttttgtgggtacatagtagttttgtatatttatggggtatatgagatattttgatacaggcatgcaatgcttaataatcacagccagataaatggctattcatcccctcaagcatttatccttttttgtgttacaaacatccaattatactcttagttatttaaaaatgtacaataaattatttttgactgt

SEQ ID NO: 625865 - DNA, 469 bp, Homo sapiens
ttttatcaatattttcattcagaagagaattttgctaataaggtctgtctgccaaggtatcgtatagctcttctctcccattatattccagtggcaaagaggtccacccgacagtgagacctctctacccgcacacctccacaggtacctccaaccctcatgacccaactaaactcgttgtcccccacactccaaaccccatcttccttccacattccaatctatatcaacagagcatcagctcttccacacgaggagtttcagcatcaccctttactcccccttccaccctccactgtctrttaccattctcctgttctgcttctttgactcctttgtcatggcctctgcttgagttcaagctcattatttttcatcagcaccaacagtatcctttttatttcttaactgagttgaaattgacataatattaaccattttaaactgaacatttcaatggcatttagta

SEQ ID NO: 625866 - DNA, 469 bp, Homo sapiens
ttttatcaatattttcattcagaagagaattttgctaataaggtctgtctgccaaggtatcgtatagctcttctctcccattatattccagtggcaaagaggtccacccgacagtgagacctctctacccgcacacctccacaggtacctccaaccctcatgacccaactaaactcgttgtcccccacactccaaaccccatcttccttccacattccaatctatatcaacagagcatcagctcttccacacgaggagtttcagcatcaccctttactcccccttccaccctccactgtctattaccattctcctgttctgcttctttkactcctttgtcatggcctctgcttgagttcaagctcattatttttcatcagcaccaacagtatcctttttatttcttaactgagttgaaattgacataatattaaccattttaaactgaacatttcaatggcatttagta

SEQ ID NO: 625867 - DNA, 469 bp, Homo sapiens
ttttatcaatattttcattcagaagagaattttgctaataaggtctgtctgccaaggtatcgtatagctcttctctcccattatattccagtggcaaagaggtccacccgacagtgagacctctctacccgcacacctccacaggtacctccaaccctcatgacccaactaaactcgttgtcccccacactccaaaccccatcttccttccacattccaatctatatcaacagagcatcagctcttccacacgaggagtttcagcatcaccctttactcccccttccaccctccactgtctattaccattctcctgttctgcttctttgmctcctttgtcatggcctctgcttgagttcaagctcattatttttcatcagcaccaacagtatcctttttatttcttaactgagttgaaattgacataatattaaccattttaaactgaacatttcaatggcatttagta

SEQ ID NO: 625868 - DNA, 575 bp, Homo sapiens
tgataaaagagaaatagattgacttaaaaatattactacagaagttctactttcacagtttttgagaaatagatataaaagtaatttaaattattttgagttactaaataacatgagataggttctggtcactggacttttttcttgacacactcaaactgtatcatgacacatccatctatcaatactttagattaactttatcgttttccttttgaattgagagtgtattttcaccatgactgctgatttatcaccgtgttttgcaaaaataaataaataaataaattgctgaagrgatagtatggagatcacattaacatttgaatttttttttcttagggaggagactacagatgtgagggttctatatttcaagtagagaccagtaattgcatagcactttttgagtcccctgacttgaattaacctatgaaacaagctgctaaaattatcagccagaaatttgttttcaaccctgggtcaaacactatttattaagaagttctacctagtgggtactactacaggagatagtgattcaaatatgttgcaattaattcaatgtacttgcc

SEQ ID NO: 625869 - DNA, 575 bp, Homo sapiens
tgataaaagagaaatagattgacttaaaaatattactacagaagttctactttcacagtttttgagaaatagatataaaagtaatttaaattattttgagttactaaataacatgagataggttctggtcactggacttttttcttgacacactcaaactgtatcatgacacatccatctatcaatactttagattaactttatcgttttccttttgaattgagagtgtattttcaccatgactgctgatttatcaccgtgttttgcaaaaataaataaataaataaattgctgaagagatagtatggagatcacattaacatttgaatttttttttcttagggaggagactacagatgtgagggttctatatttcaagtagagacyagtaattgcatagcactttttgagtcccctgacttgaattaacctatgaaacaagctgctaaaattatcagccagaaatttgttttcaaccctgggtcaaacactatttattaagaagttctacctagtgggtactactacaggagatagtgattcaaatatgttgcaattaattcaatgtacttgcc

SEQ ID NO: 625870 - DNA, 575 bp, Homo sapiens
tgataaaagagaaatagattgacttaaaaatattactacagaagttctactttcacagtttttgagaaatagatataaaagtaatttaaattattttgagttactaaataacatgagataggttctggtcactggacttttttcttgacacactcaaactgtatcatgacacatccatctatcaatactttagattaactttatcgttttccttttgaattgagagtgtattttcaccatgactgctgatttatcaccgtgttttgcaaaaataaataaataaataaattgctgaagagatagtatggagatcacattaacatttgaatttttttttcttagggaggagactacagatgtgagggttctatatttcaagtagagaccagtaattrcatagcactttttgagtcccctgacttgaattaacctatgaaacaagctgctaaaattatcagccagaaatttgttttcaaccctgggtcaaacactatttattaagaagttctacctagtgggtactactacaggagatagtgattcaaatatgttgcaattaattcaatgtacttgcc

SEQ ID NO: 625871 - DNA, 575 bp, Homo sapiens
tgataaaagagaaatagattgacttaaaaatattactacagaagttctactttcacagtttttgagaaatagatataaaagtaatttaaattattttgagttactaaataacatgagataggttctggtcactggacttttttcttgacacactcaaactgtatcatgacacatccatctatcaatactttagattaactttatcgttttccttttgaattgagagtgtattttcaccatgactgctgatttatcaccgtgttttgcaaaaataaataaataaataaattgctgaagagatagtatggagatcacattaacatttgaatttttttttcttagggaggagactacagatgtgagggttctatatttcaagtagagaccagtaattgcatagcactttttgagtcccctgacttgaattaacctatgaaacaagctgctaaaattatcagccagaaatttgttttcaaccctgggtcaaacactatttattaagaagttctacctrgtgggtactactacaggagatagtgattcaaatatgttgcaattaattcaatgtacttgcc

SEQ ID NO: 625872 - DNA, 633 bp, Homo sapiens
ccaatgcaatatttagtaaatacttataataaaaaatgtattcgtttatgtcacattccaatataagtaggggttcttttacgtgtttaccctctacttgtagacattgagattttctatgtcaaatcataagctatatgtgtgatgagaaatagttgtcaagtataacaggggccttctcttcccttatttgcaactctaatagagtattcttgaagtaattcctgtggcaatcttgtgactgtggccagtatagccacaacttgtagggaactctgcgtttcccccaatgttgtgtcctgtaggagctcccttgccctgccagttcarcatccttcattcgggagtcaatctcagaggccaaattaaaactgtctgttctaggtcttctgatgacaattcaaattcagttttattgaggcaaaaattatataaaatacactgcaatgatttaaggtatcaaatttgatgagtcttgatagatgtatacacttgtaaaatcggtaccaacaagatataaaatatttttatcacccccaaaattgtactgtgtcctccctcctccctataccatcaacctgcggtcaataatttctccagtttctgttattatagttttcattttctagaatt

SEQ ID NO: 625873 - DNA, 633 bp, Homo sapiens
ccaatgcaatatttagtaaatacttataataaaaaatgtattcgtttatgtcacattccaatataagtaggggttcttttacgtgtttaccctctacttgtagacattgagattttctatgtcaaatcataagctatatgtgtgatgagaaatagttgtcaagtataacaggggccttctcttcccttatttgcaactctaatagagtattcttgaagtaattcctgtggcaatcttgtgactgtggccagtatagccacaacttgtagggaactctgcgtttcccccaatgttgtgtcctgtaggagctcccttgccctgccagttcagcatccttcattcgggagtcaatctcagaggccaaattaaaactgtctgttctaggtcttctgatgacaattcaaattcagttttattgaggcaaaaattatataaaatacactgcaaygatttaaggtatcaaatttgatgagtcttgatagatgtatacacttgtaaaatcggtaccaacaagatataaaatatttttatcacccccaaaattgtactgtgtcctccctcctccctataccatcaacctgcggtcaataatttctccagtttctgttattatagttttcattttctagaatt

SEQ ID NO: 625874 - DNA, 349 bp, Homo sapiens
actcatggaatagattgccacaaaagagcaatgtacaggtagaatttatatgtgtgtatatgtgcacatatatttgcatattcattattttataagcataaggttaatgagcctatttttaatacattacatataatataaacacacaatttaaagaataccttcataaataaaaatatattgaccaaaagaactgaaatgatttatatttctagttttccaaagagaatcactttccatttagaagttaactcactgaaattcatatcagtttgaattttaaatatttagcaccytaaaacatatatatttgaatttgtatgcagggcccaaagcatttctttaacta

SEQ ID NO: 625875 - DNA, 606 bp, Homo sapiens
taaagcatgttatttcacaatacaatcatcgaatcacaacttggacctagttyataaaatagtttgtgaaagggtaaaagaagcagtcacaagagacttcaactcaacccttgttatcatcttgcaatagttaataagaagttgaataatactaagtactcttacagataaaatcgagcaaaaataaaaatatcattttctctacttgatatctgtctaatgtaatgttaccacatttttttcaagtgtctagcaaaaattcaaattaagaacagcaaaatagtcctacaatctgatgtctgaaactaactgtgtggctctagaatcttattttgtatttccccatgattgagatttttcactaaaataaacaaattccgcttcttacataataacctgaagaatttgtatcattacaaattgaaagcaactgggattctgttttccacattgagtctctgtaaaattcaaatacaagaatatctgaggaaaatatttagagaacacacatcttatttcagaacttgtaaaatggggctgtaggttaagccctggtaaatgcttccatggaaatcccattagaacatcaaagaagaaagccccatg

SEQ ID NO: 625876 - DNA, 529 bp, Homo sapiens
attgtgcatgtgtgcactccaataaacactactgggatcaatatattraagtttctatgacagcagaagttttttttttaataacttcagagccaatatgacactccaatatgtaacactattctgactgtcattgccataaattagttttgtctgttcttgaatttcatacaaataaaatcatgaagtatgtattatcatgtatctggattcttttgcttgacatagagactatgagattcatttatgctttgtgtatctgtagctctttcatttcatgcaggtttagagagaccatgatttgtttcccacattcttactgaagagtacttggataattttccattttatgtatcaggaatcaagctgctatgaacattctttggatggacatatgcactccatttcttgtgtgcccgtatcatgcatattgtattaataatttctgggtcatgggatagggaaatgcttagctctagtgaataccataaaaatttttctaagtatttgaaccaagtgacagctccat

SEQ ID NO: 625877 - DNA, 508 bp, Homo sapiens
aaactgaaaattaagggaaatatatatatgcaaaatatatttattatatatgcttctatatataattcatctatactatcgtatcacattggatttttaaatgatctaaactctgataatcatactttacaaactagatctaaaatttaatttccagtatttaaaaaatttatatgccagtaaaggttaagtctacctaggtgacgaaaatttcctactacaacaaatttaagtagtcgaaaatacacttattcccacatccagaatgtwcattagattttgtagcccagactgagaatttgctggaggctgttgtctattttgcatggctgtggaggaacaatatttattagataagaggagtggccataaaaaaaaaaaagtttttttttttattttgagatggaatcttgctctgtcacccagctggagtgcagtggcacaatctcagctcactgatcactgtaaactccacctcctgagttcaagcgattctgccacttcagcc

SEQ ID NO: 625878 - DNA, 544 bp, Homo sapiens
aagggaaatatatatatgcaaaatatatttattatatatgcttctatatataattcatctatactatcgtatcacattggatttttaaatgatctaaactctgataatcatactttacaaactagatctaaaatttaatttccagtatttaaaaaatttatatgccagtaaaggttaagtctacctaggtgacgaaaatttcctactacaacaaatttaagtagtcgaaaatacacttattcccacatccagaatgttcattagattttgtagcccagactgagaatttgctggargctgttgtctattttgcatggctgtggaggaacaatatttattagataagaggagtggccataaaaaaaaaaaagtttttttttttattttgagatggaatcttgctctgtcacccagctggagtgcagtggcacaatctcagctcactgatcactgtaaactccacctcctgagttcaagcgattctgccacttcagcctccggtgtagtagctgggattacaggtacgtgccaccctgcacagcta

SEQ ID NO: 625879 - DNA, 564 bp, Homo sapiens
attaatttgaaacatattagaaattagttacagtttatattttgatatcataaaataaattataacagaaaagtatattttagaacaaataaaaatcatacctaatcacacaccataatactattcacagtatagctaatgtccttctagtctgtgttcctatcaatacacatattttacatagctgcaactttgcatatttagtcatttgtgttctgctttttgttgcatattttacagtctattttctacttcctacacaaacattatgaaaatgcttagaaaatgtaataaatccataacccgtaactctatttaaatactattatttgaatataaataatgctataatgagcacatgcatacttagggcctttctgtatcttggataatttattcagaagttctcttagtccttccaggtagctataasaaactaccatagactgggcagcctaaccaacaaacattgatttctcacagttctggatgttgagaagcataagatcagagtatcagcaattttggtgtctgatgaaggcctgattccttgttcagaaatgg

SEQ ID NO: 625880 - DNA, 591 bp, Homo sapiens
aattaggtgcttttaaaaattatggaaaataagatgtaacattgtatatttgatgaattatatgttatgttactattatctatttttctgyattatacaatggtacactacatatatgtgaagaatttttttctaaaatagctatgaaaatacttaattttacttcttttcttttttttgtcaattttataagccatgggattatttatcctcaactcatagcaaatccagaaagtacaattgaccactggtgattttaaaagtctagacacaccagtcatataatatattctatttatattgttaaatatatcttctttcattaatcattatattttcatctaaatttaaaattgtaatttattttctaataacaactgctaataaataaattgctcaattggtaattgttcttgttttaaaacaatttaaaataaataaattttaaagtaataaaatagattctttttaaaatagattatttctttgttttgcattccaggtcttccccccaccccgccacatatacacacagagtgacttcaaattccttttaacattcagctcatataattttgtaatcataagtca

SEQ ID NO: 625881 - DNA, 591 bp, Homo sapiens
aattaggtgcttttaaaaattatggaaaataagatgtaacattgtatatttgatgaattatatgttatgttactattatctatttttctgcattatacaatggtacactacatatatgtgaagaatttttttctaaaatagctatgaaaatwcttaattttacttcttttcttttttttgtcaattttataagccatgggattatttatcctcaactcatagcaaatccagaaagtacaattgaccactggtgattttaaaagtctagacacaccagtcatataatatattctatttatattgttaaatatatcttctttcattaatcattatattttcatctaaatttaaaattgtaatttattttctaataacaactgctaataaataaattgctcaattggtaattgttcttgttttaaaacaatttaaaataaataaattttaaagtaataaaatagattctttttaaaatagattatttctttgttttgcattccaggtcttccccccaccccgccacatatacacacagagtgacttcaaattccttttaacattcagctcatataattttgtaatcataagtca

SEQ ID NO: 625882 - DNA, 565 bp, Homo sapiens
attatctatttttctgcattatacaatggtacactacatatatgtgaagaatttttttctaaaatagctatgaaaatacttaattttacttcttttcttttttttgtcaattttataagccatgggattatttatcctcaactcatagcaaatccagaaagtacaattgaccactggtgattttaaaagtctagacacaccagtcatataatatattctatttatattgttaaatatatcttctttcrttaatcattatattttcatctaaatttaaaattgtaatttattttctaataacaactgctaataaataaattgctcaattggtaattgttcttgttttaaaacaatttaaaataaataaattttaaagtaataaaatagattctttttaaaatagattatttctttgttttgcattccaggtcttccccccaccccgccacatatacacacagagtgacttcaaattccttttaacattcagctcatataattttgtaatcataagtcagtaaaagtacatatgcacacttggtcttttgagataattgcttatttg

SEQ ID NO: 625883 - DNA, 609 bp, Homo sapiens
tgttcatggattggaagaattaatattgttaaaatgtctattctgtccaaataatttacagattcagtgcaacccctaccataatttcaatgtcatttttcatagaaataaaaawatatatataaaatgtatatgaaatcacaaagtaccctgaatagctaaaggaatcttaggtaacaggaacaaagtcagaggcatcacactgcctgacttcaaaatctattacaaagttataataaccaaacaatatagcactggcataaaaatagacattacattgaccaatggaacaggctagggagctgaaaaataaacccacacatgtagtcaattgatttaaacaaaagtgccaaaaacatacaatggagaaaagacagtctgttcagtgctgtggggaaaaactggatatccacatgcagaaaaataaaactttatctttatctcacaccatctacaaaatcaactcaaaatgagttacagacttaaatgtaagacctgaaactaaaggcacttaaggaaaatacaggggaaatcctccataacgttggtctaggcaaagatttcttggacacaactccaaaagcatatacaatcaaagcaaaaataaat

SEQ ID NO: 625884 - DNA, 609 bp, Homo sapiens
tgttcatggattggaagaattaatattgttaaaatgtctattctgtccaaataatttacagattcagtgcaacccctaccataatttcaatgtcatttttcatagaaataaaaaaatatatataaaatgtatatgaaatcacaaagtaccctgaatagctaaagsaatcttaggtaacaggaacaaagtcagaggcatcacactgcctgacttcaaaatctattacaaagttataataaccaaacaatatagcactggcataaaaatagacattacattgaccaatggaacaggctagggagctgaaaaataaacccacacatgtagtcaattgatttaaacaaaagtgccaaaaacatacaatggagaaaagacagtctgttcagtgctgtggggaaaaactggatatccacatgcagaaaaataaaactttatctttatctcacaccatctacaaaatcaactcaaaatgagttacagacttaaatgtaagacctgaaactaaaggcacttaaggaaaatacaggggaaatcctccataacgttggtctaggcaaagatttcttggacacaactccaaaagcatatacaatcaaagcaaaaataaat

SEQ ID NO: 625885 - DNA, 569 bp, Homo sapiens
taggacaaatcaatcacaaaaaacacctttgtatgtcagcaagtgcttttctccttaatgcactggtgctttcctcctgtagcctcttgcctgggaatatattgccatttccaatactttcccttatttcctcacttctaccacctttcatttcactctcatccttgcccatttaaaaattaaggaacttcgagttcagattctggggaaggtgggtaagtacacttcactcagtttctcccactgaaaacaatcccaagttccagacagaacgcgtggaacagcaatccgaggccctaaaaagcacacagtagcagttgtattggggaaggacatcagaatttcaaaattcaaagttctstggaactggtggtaagtttatagtgttttctttctgcctctggtattacccaacctggactaaaaacaggcccaagtctggaaatgcatataccaagcacagatagaaagaggtctatgagaaatatgttctccaatttgaggaggaagaaactaccgaaggttggaaaaaatgaaagaaatggcttgttttgttttaactttttttc

SEQ ID NO: 625886 - DNA, 550 bp, Homo sapiens
aagaagtatacaaggagcttggagcagtaagttttgtaattcaggacttcttttcttataatagaaaccacacagaaaatgatttgcagagatacgtcatttttcctgcagctaaaatggaatatgtattcatataggaattgatttgatcaccattccaatctaatgtgagctatgtataggaggtgacttacgataggacttcaatggctaactttgtactcattaaaakgtatttttcattttcatgcccttaaaaaaacaaaagtactcatcaaaagaaatttgatagaatttttattatttccttatctttctttaaaagtgattttattttaatgacatgtacttaggaaaataatgggatggagtttcatgatatgctattttgatggagacaactacttttattactaagctcccatacatagggcagagaaacagagtatcaaaagaaagataaaattttgataagaatttttttcaattagaaatatgagtacaattgcatatttgagacaaataaaaaattaaagtgaaagctaagcta

SEQ ID NO: 625887 - DNA, 530 bp, Homo sapiens
gcaatttgtactgcaatcttttcaaagttctcttagtaaatgaatagtaccttagttacaaaaaggtgaataaaacatagcagtgcataatattttaagtttgtaggaattatttaatatttgaagaaattttraacttgtcattatatgaacataaagagtcatctgaaggcataaaaaaagactggaatatttctttttattttacccattggccattgctaaacatctttgttttaaccaggatatgaattttgttctgctctgtttacatcctggaaggttcatccctctggtgaatcgcattgcgatactggcacagaatgacaagggtatttgtgtgcacgtgtgtgtgtgtgtgtgtgtgtgtgtgtgtgtatttccataatatcaaaatgccagcattaataacagtatttgatttaaaagtacccacaatacacgcacaaaaaagctaaaactaaatatgtgatcttaagacaaatgtgttataaatcaaaaaatatataagtaaatacaattatctatat

SEQ ID NO: 625888 - DNA, 416 bp, Homo sapiens
ctcccctgttgcaatatggaagtcctcacttatccacaggggatacgttccaagacccccaaagaaagcttgaaatcacagagagtaccaaacccaatttccatcaatccaaacacacttctgttcatgtcctgtacccacaaatttaatgcctttttcatcttaactaagcacttgacatgcactgtgaccataacttttgcagtgtgaggtgtgacagcaaagctagcctaagtttcttcttttttcttcttcactgtttcacaaatagaagactcattcttaccatagatttttagaaccttagcatacatttttttcctttattaagtygacaactttcacctttttccataaaggaagaatgttacagcttctctttggcatatccaaattgtcagcatcactacttttat

SEQ ID NO: 625889 - DNA, 538 bp, Homo sapiens
ctgttcatgtcctgtacccacaaatttaatgcctttttcatcttaactaagcacttgacatgcactgtgaccataacttttgcagtgtgaggtgtgacagcaaagctagcctaagtttcttcttttttcttcttcactgtttcacaaatagaagactcattcttaccatagatttttagaaccttagcatacatttttttcctttattaagttgacaactttcacctttttccataaaggaagaatgttacagcttctctttggcatatccaaattgtcagcatcactacttttatgccttggggccattattgagtaaaataagtgttacctgaacacagcattgtgataccacaacagtgratatgataaccaagatggctacaaagtgactaacgggtgtggatacactggacaaagggaggattcacatctcaggtggagcaaagttggatagcatcagattgcatcacactactcagaatggcccacagttaaaaatttacaaaatttttatttcatattttcaggctgcagt

SEQ ID NO: 625890 - DNA, 548 bp, Homo sapiens
cgaggcgggcggatcatgaggagatccagaccatcctggctaacacggtgaaaccccatctctactaaaaatacaaaaaaattagccaggcgtggtggcgggcacctgtagtcccagctacttgggaggctgaggcaggagaatggcatgaacctgggaagcggagattgcagtgagccgagatcgtgccactgcactccagcctgggccacacagcaagactccgtctcaaaaaaaaaaaaaaatttgaaaactccaagagaaaaagagatcacctttaacagaacataactaagaatgtcattagcctgcatgaggaaggcaataaagcaatgccttcaaaattctgtggaagaataatttggagtgtagaattctaatatccacagcagatattaaataagtatgattacrgagtgaagacatttcaggcatgcaagaactcaaaatgtttacttcttattcagtctttcctcagaagttacttaaggttgcacttatctaaaatgaaatactagatcaaatccaccaaatagagcaatgtgtga

SEQ ID NO: 625891 - DNA, 536 bp, Homo sapiens
gcctggcaactctaagacagagctggacactcagctaagagttgatgttgcagtcctgagtttgatcaaggctggaaagtcaggcaagatttctgtgttgcagtcagcttcccactgattggatgaggcccacccacactatggggagggtaccctattttaattaacatcaactgattgtaaacrttaatgccatccacaaagtaccctcacaacaacatctagactggtgtatagacacaaacaactgggtaccatagcctagccaggtcgacacataaaatcagccatctcactgtcttgtgatatttctcctccctcctccttaagacacttgctgatttctgaacccttagcacaggtttatacacctattaccaagatatcccctgtgtaaaccagcattgtcacacagtatatttggtaaatgagtgttccagctttctgagccccaaagagtggctcagaacaatacaatcacacactattattacctctcctcattctgtggcttgactgagcttagccggacagtt

SEQ ID NO: 625892 - DNA, 536 bp, Homo sapiens
gcctggcaactctaagacagagctggacactcagctaagagttgatgttgcagtcctgagtttgatcaaggctggaaagtcaggcaagatttctgtgttgcagtcagcttcccactgattggatgaggcccacccacactatggggagggtaccctattttaattaacatcaactgattgtaaacgttaatgccatccacaaagtaccctcacaacaacatctagactggtgtatagacacaaacaactgggtaccatagcctagccaggtcgacacataaaatcagccatctcactgtcttgtgatatttctcctccctcytccttaagacacttgctgatttctgaacccttagcacaggtttatacacctattaccaagatatcccctgtgtaaaccagcattgtcacacagtatatttggtaaatgagtgttccagctttctgagccccaaagagtggctcagaacaatacaatcacacactattattacctctcctcattctgtggcttgactgagcttagccggacagtt

SEQ ID NO: 625893 - DNA, 536 bp, Homo sapiens
gcctggcaactctaagacagagctggacactcagctaagagttgatgttgcagtcctgagtttgatcaaggctggaaagtcaggcaagatttctgtgttgcagtcagcttcccactgattggatgaggcccacccacactatggggagggtaccctattttaattaacatcaactgattgtaaacgttaatgccatccacaaagtaccctcacaacaacatctagactggtgtatagacacaaacaactgggtaccatagcctagccaggtcgacacataaaatcagccatctcactgtcttgtgatatttctcctccctcctccttaagacacttgctgmtttctgaacccttagcacaggtttatacacctattaccaagatatcccctgtgtaaaccagcattgtcacacagtatatttggtaaatgagtgttccagctttctgagccccaaagagtggctcagaacaatacaatcacacactattattacctctcctcattctgtggcttgactgagcttagccggacagtt

SEQ ID NO: 625894 - DNA, 562 bp, Homo sapiens
agaaattaaaataagctttcattttggttattactgtaaagaaaaatgattggtgaaatgtgatacctaccrttttcagaagaggtcaaaacaagggcctatggaatttgctggaagccagttttgcttaggccttgaatccatgaccaatcatctcaggattgttgaatttgtcaaataaagcagggctctggcatttgaaatggatcttgatcacattttccacagaatgaatttctgctgtgatgagcctttgtatgcttcctggtagccccgtccactgaggcaggcaacagcgggcttcctcgtcgattatttgttaagggtgattcaatgctgaatgaaacatgacccttttattccacatgtgagggattacatcctcacacacttacatgatcactctctggactcacagaaacaaatatatgtactattactaagttctagattttttcatgaacactgaattgtttgctgacagtgtctatgtgagctttggctttgacagggccatgtatctgcggtggcagatgggaagcattgcaagatgcaaagatct

SEQ ID NO: 625895 - DNA, 565 bp, Homo sapiens
agttgtcctcccaagtcctttttgagcttggtcccagcctcatgctctctccccagtccccagtccaagatgactctggagttcgtagcctcagcttgctgtcctggacagagcctgggacacctgacgaaccagtaggaccaaggagtggggttctgctctgtgggattccaggagagttgcctctgatttctaagggagcactgctttccaaacagaggcaagtcacagagctctctccgaagctatcaggctcacccttagggtcagcttagagggaggctaaggttatagggggttgactgggcactgaacactrgtcactgaacacttctgatgtctctctctatccctgcaaccatcctagtaatgacagaagagcatggaggtactgtttttgaatagttactatgtgtcacccactgggttatttgacacatttatttattatttccaattctcacaacagcctcatgagacaatggtgttcagagaggttaagtagctggccccagtctcacagcctgcaagatttgctgccaggactggaatatgagagcaaagc

SEQ ID NO: 625896 - DNA, 588 bp, Homo sapiens
atgtggtacagcatggaagagaccttgaggacaatatgcaaagtgacagaagtcagtcataaacgaccacatgttgtatgattccactcctgtgtaatctccagaaaaggcaaatccatagagacagaaagattatyaactgccagggattgggggaagaggaatgaggaccagggactgctaatggatacagggaatcttttaaaggggtgatgaaaatgttccagaattaaatagtggtgttagttgcatagcctggtgactgtgttaaaaaaccactgactgtacaccttaaatggctgaatctcttttttttgagatggaattttgctcctgttacccaggctggagtacaatggcgcgatctcagctcactgcaacctccgcctcccgggttcaagcgattctcctgcctctgcctccttagtagctgggattacaggcatgagccatcatccctggctaatttttgtatttttagtagagatggggtttcaccatgttgaccaggatgatctcaaactcctgacctcaggtgatccacatgcctcaccctcccacagtgctgggattacaggcatgagccac

SEQ ID NO: 625897 - DNA, 588 bp, Homo sapiens
atgtggtacagcatggaagagaccttgaggacaatatgcaaagtgacagaagtcagtcataaacgaccacatgttgtatgattccactcctgtgtaatctccagaaaaggcaaatccatagagacagaaagattatcaactgccagggattgggggaagaggaatgaggaccagggactgctaatggatacagggaatcttttaaaggggtgatgaaaatgttccagaattaaatagtggtgttagttgcatagcctggtgactgtgttaaaaaaccactgactgtacaccttaaatggctgaatctcttttttttgagatggaattttgctcctgttacccaggctggagtacaatggcgcgatctcagctcactgcaacctccgcctccygggttcaagcgattctcctgcctctgcctccttagtagctgggattacaggcatgagccatcatccctggctaatttttgtatttttagtagagatggggtttcaccatgttgaccaggatgatctcaaactcctgacctcaggtgatccacatgcctcaccctcccacagtgctgggattacaggcatgagccac

SEQ ID NO: 625898 - DNA, 496 bp, Homo sapiens
catcattagaatttcaagttgctgctacaaatatgtacttattcagcatatactttttgagtgcctaccaaactgtagccatggggatgaggacaaagacctggccctttcttggagattatcttctggggtgagagatgggtcagcaaagggcaagtagaattcagcgtgggaagggctctgagtgrgttaatcacagggcatcacaggagtgtgtgcaggggtctcaatcttgaccagggaagttgaggtgagtggcctaggctgaggcagcaggaggatacggagggaaagaagcatgggagagagtttagagggcagagttgcttggaccctggactgtgtggatgtggggtgcaatgctgtgggaggacaatgtgcagggagaccctgctggggccaccttgtagaggggccccctgtcctttttataagagacaagaggcaggttgtttggaggagcagggcggggaagagaatgagttcagcttcagaa

SEQ ID NO: 625899 - DNA, 633 bp, Homo sapiens
gccttccccatgtatgcaaatttcctttaatatcgccttcccctagctgcagtgggtttccccacggcagggtgcattgctctttctctgaagattaaagctgctgttcccttctctaagcaggatggggagggagctgtctcagcattctcagtgatcttccctgggagtggattttgggcttcatggaggaaaatcctgcaagtggtgctaatgcccccaaatctccatccccttcaggtatcctccttctcatgctagccatccaaaagttgtaagattcaaaatagaataacttgtgtcaaatcctggcctaaattgtgggtgcagtgaactggatgaggggagatgggctgacgtgagtttggagaaagggccagaaaccaggttgtgcagggccatgggggccaaaggaaggaactggtgtcatgctaagggagccagtggaggaactggaatttggcacttccttgatcttatttacttttaaaggaggctagtctgaaagtttgggagagggcgagtgggcagcatggtttataaggtccrtactcaaccccaaatcccatgaccctgtcccatgtctatatctactgcaggataatgagcttctgcttccatctctctcaaaat

SEQ ID NO: 625900 - DNA, 566 bp, Homo sapiens
cccctaaaacctcttgtgagtgtttgctccaggcccatctgggttggaggagaaagcaacttccccttgcaggttgagggcacgcacagcttcaggccaaccctttctacctccacacccgatggctccatattgctggcgtggaatgtgttgtattgactcacacgggaagtggggccctttcaccgtgggcacagagtggcttgatggagatgggtaggcagcaaggayaggggtgccatcttagaggattatccctgtgtccccatggctgcccatggcagggctccccttgaatcctcacttggaaaaagcctcttcctgaacagcaaatgtttaaaatggccttgtgaccccaccgagccagtcatggagccctcagatgacctgccgcaagacacttgtcccaagccagccaccccagtgggcagtcagcattctggggaccttatcagaggacatgtccttccttggcatcaggtgatccagcctctgggcatatgggaactgtgggggttgcatgtggcaagactgaagatttccctcatcagtgataaagacattga

SEQ ID NO: 625901 - DNA, 566 bp, Homo sapiens
cccctaaaacctcttgtgagtgtttgctccaggcccatctgggttggaggagaaagcaacttccccttgcaggttgagggcacgcacagcttcaggccaaccctttctacctccacacccgatggctccatattgctggcgtggaatgtgttgtattgactcacacgggaagtggggccctttcaccgtgggcacagagtggcttgatggagatgggtaggcagcaaggataggggtgccatcttagaggattatccctgtgtccccatggctgcccatggcagggctccccttgaatcctcacttggaaaaagcctcttcctgaacagcaaatgtttaaaatggccttgtgaccccaccgagccagtcatggagccctcagatgacctgccgcaagacacttgtcccaagccagccaccycagtgggcagtcagcattctggggaccttatcagaggacatgtccttccttggcatcaggtgatccagcctctgggcatatgggaactgtgggggttgcatgtggcaagactgaagatttccctcatcagtgataaagacattga

SEQ ID NO: 625902 - DNA, 454 bp, Homo sapiens
aagatctccccccaccactcccatcccatacacacgagtctttgcagaatcagagagggtgggaaggccctaaaaactgggactctgaaagccaagtgcgtttatgcctcattctccagggaaatatccaatagctgcctctaaactgtatccatctctcactgcctttggccaccacccatgtttgctggttgattttgttcactgggttccacctttcttggctgggctgagtccgtggtgacttgcacagatgcagatacttgtgtgcctgtgagcaaggagcgatgagtggggcaggatcctcatcccgctgytctgtccagggaattctcaacagaaagaggaggggccaggagcctcggggcttgggtgatttggtctggaagggaagggcccatttaaccatgagtgcagagagctggcggggaaaccctgaagcagaagatcacag

SEQ ID NO: 625903 - DNA, 421 bp, Homo sapiens
catcccatacacacgagtctttgcagaatcagagagggtgggaaggccctaaaaactgggactctgaaagccaagtgcgtttatgcctcattctccagggaaatatccaatagctgcctctaaactgtatccatctctcactgcctttggccaccacccatgtttgctggttgattttgttcactgggttccacctttcttggctgggctgagtccgtggtgacttgcacagatgcagatacttgtgtgcctgtgagcaaggagcgatgagtggggcaggatcctcatcccgctgttctgtccagggaattctcaacagaaagaggaggggccrggagcctcggggcttgggtgatttggtctggaagggaagggcccatttaaccatgagtgcagagagctggcggggaaaccctgaagc

SEQ ID NO: 625904 - DNA, 520 bp, Homo sapiens
tgcaacaccattattaagctacagcacaaagatgcaactctgagctcctgccttccaggctgtgggaaaaaaggacaatagagagaactagcttgttgcattcctccaaccaagaggaagcagtccacacaaggtttgctggraaagaagaaagatcttcaagggcttgtgttcatactcagcatttaggcctctgggacgtcatgggaaagcatggtaacgtctgctctttaaagtagaatcaagaaaagaggctcaagatgagactcaccctagcatgcaaagtgtttgatgggacgcagccaataggagccgatacttcctgagcacctgtatctattgccacagcaacccaagaaggcaggcaagggtatcgtccccatggtggacatgagcaccctgtcacctgcccagggccgtgtagttggttcttggtggagctgggatccaggctggttcttcacctctgtcctgccctgtctctgtatctcacctgagggtcactgaaacaccaggtgta

SEQ ID NO: 625905 - DNA, 520 bp, Homo sapiens
tgcaacaccattattaagctacagcacaaagatgcaactctgagctcctgccttccaggctgtgggaaaaaaggacaatagagagaactagcttgttgcattcctccaaccaagaggaagcagtccacacaaggtttgctggaaaagaagaaagatcttcaagggcttgygttcatactcagcatttaggcctctgggacgtcatgggaaagcatggtaacgtctgctctttaaagtagaatcaagaaaagaggctcaagatgagactcaccctagcatgcaaagtgtttgatgggacgcagccaataggagccgatacttcctgagcacctgtatctattgccacagcaacccaagaaggcaggcaagggtatcgtccccatggtggacatgagcaccctgtcacctgcccagggccgtgtagttggttcttggtggagctgggatccaggctggttcttcacctctgtcctgccctgtctctgtatctcacctgagggtcactgaaacaccaggtgta

SEQ ID NO: 625906 - DNA, 520 bp, Homo sapiens
tgcaacaccattattaagctacagcacaaagatgcaactctgagctcctgccttccaggctgtgggaaaaaaggacaatagagagaactagcttgttgcattcctccaaccaagaggaagcagtccacacaaggtttgctggaaaagaagaaagatcttcaagggcttgtgttcatactcagcatttaggcctctgggacgtcatgggaaagcatggtaacgtctgctctttaaagtagaatcaagaaaagaggctcaagatgagactcaccctagcatgcaaastgtttgatgggacgcagccaataggagccgatacttcctgagcacctgtatctattgccacagcaacccaagaaggcaggcaagggtatcgtccccatggtggacatgagcaccctgtcacctgcccagggccgtgtagttggttcttggtggagctgggatccaggctggttcttcacctctgtcctgccctgtctctgtatctcacctgagggtcactgaaacaccaggtgta

SEQ ID NO: 625907 - DNA, 606 bp, Homo sapiens
ggttttcccttgccactgcatctttccaacagcacatcagcttgcagtgaaagcttggtctttaaaaataggaatatgaagcttgtttcctgcctcaggaccttgttcctgaccctactccttcctggatggcccccttgcaggtcttctcagggtcatcttgactccgcatccctcctgcaaccaccatcccacttctctgctcctctctaaaggaacatctgcagaagtggcatgtctaataccaaaatgttggttcctaccccagaactgccccatccccacagccctgttctacctagacagggtccgcwtctcacggagggcactgccatcttcctgtttggccttcccacccaggagctcctactgctgcctaccctacttcccatagtgcttggggttatgatctccatgtgcttctactccaaaccacctgtagtttcctgtcccttccagaagaaaatccaatcccaacactgtggcctgtaaggccctgaccacctcctgccatgccttcacttgccctgttccagctacactgactgtgagattcctataacatgaagctgttttttctcactccaggacctttgcattgactcc

SEQ ID NO: 625908 - DNA, 606 bp, Homo sapiens
ggttttcccttgccactgcatctttccaacagcacatcagcttgcagtgaaagcttggtctttaaaaataggaatatgaagcttgtttcctgcctcaggaccttgttcctgaccctactccttcctggatggcccccttgcaggtcttctcagggtcatcttgactccgcatccctcctgcaaccaccatcccacttctctgctcctctctaaaggaacatctgcagaagtggcatgtctaataccaaaatgttggttcctaccccagaactgccccatccccacagccctgttctacctagacagggtccgcttctcacggagggcactgccatcttcctgtttggccttcccacccaggagctcctactgctgcctaccctacttcccatagtgcttggggttatgatctccatgtgcttctactccaaaccacctgtagtttcctgtcccttccagaagaaaatccaatcccaacacygtggcctgtaaggccctgaccacctcctgccatgccttcacttgccctgttccagctacactgactgtgagattcctataacatgaagctgttttttctcactccaggacctttgcattgactcc

SEQ ID NO: 625909 - DNA, 597 bp, Homo sapiens
atgttttcccttcctaatgaacaaccttccagcctgtcttgtatcttcatgtctgtgagttgcagtgagagttactacagaaggatttgtgttagaaaacgatcataaaactagggttagagttagggtaccctaactgtggtaacaagggcaacgaggagatccctttagttacgacaaagccagcctgtgagtcagatccaagggcacactggatgcctactctgtgcaccccactgacttctctacactttttgtgggaaacrcttagcctgctctcaagtccgaggtgtttattcaaccagttaaagaaggagtttaagctggacgtggtggctcacgcctgtaatcccagcactttgggaggctgaggtgggcagatcatttgaggtcaggagttctagaccagcctggccaacatggtgaaaccctgtctctactaaaactacaaaaaaaattagctgggcatggtagcacacacctgtaatctcagctacttgggaggctgaggcatgagaatcacttgaacccaggaggcggaggttgcagtgagccgagatcataccactgcactccagcctaagtgacacagtgaga

SEQ ID NO: 625910 - DNA, 677 bp, Homo sapiens
tcatattccttgtacttgattaattgcctttcttttgctgccttcaagattttttctgtctttgattttcatcaatttgactatgatatgtccatgtgtggatcctttggagtttactccacttggagttcactgagcttcgtgaaggtacagattaatgtttttcatcaaacttttcagacattattttatcacatattttttctacctctttcttttctcattccctctgaagcagtatggcagcattatatgtatgttggtatggttgctgaggttctcttcacttttcctcattattttttctttctgytcctcagagtggatttatcattaagttaactgattattttgccagctcaaatctgttgttgaatttctctaatgacttcttgtcaactccaaaattttggaggccaaagcaggaggatcacttgaggccaggagttagagaccagactgggcaacgtaacaagaccttgtctccaccaaataaataaacaatttaaaattaaaaattagtcaggcatagtagcacatgcctgcagtcccagctactcaggaggctgaggtggaaggattgtttgatcccaggagtttgaggctgcagtgagccatcatcacactgctgcactccagcctaggcaaccaagtgaaagctgggggaaaaaaagaaa

SEQ ID NO: 625911 - DNA, 283 bp, Homo sapiens
actacagccctcaaaagcactggcttcagtgttttcaggayggggtttttcaaatgctgaattctgtttaaactgaccaagagcaagaatgttgggggaggggagagtctgtagattcttctttggaaagctaatagaattctgacatcaaaaccaaaaaaagttgcacagaaaaaggaaactccagatagctctcacaaacgctgagcattgatcctaagttaaatattatcataaataagaataaagaaataagaagtgtgaaatgcacctgtgtcagtca

SEQ ID NO: 625912 - DNA, 506 bp, Homo sapiens
ataaagaaataagaagtgtgaaatgcacctgtgtcagtcagctttgtgaatatcttgcttggtcactggaccaagctacatttctgaagctgagtgtgggacttctctgaagggaatggatggtcctactcaatattgccaagcaggaaggagcattcaggatggggcagagagtttgggggcttgaacaccaaaacgtggacaaacttggaacttttgtagagcttggatttgggagggagatagcagatggctggggcagagaccacagggcaggtctgggccttagaggttgcagactmtttagtgaattattctgcacctctatcatctggaactctcatagaagtggaggcagagagagctgatgcctgctcccaggggtgtaatgcagaatgaggactgtgttcacactcggggacaggagttcagggacagtgcaggtggccaccaggggttctgggggagaatggcgcaggatcactggctcaccaggagcctggttg

SEQ ID NO: 625913 - DNA, 631 bp, Homo sapiens
taatgcagctctcactgctctgccggccttggtggttgtggagtttgccacatgtatgattttgccctgggctccttattaatgagccttgaaaagagggtgtggaatacgtgagcccttcagctgtgctttccttgaggagaaaacaaacagaaatacccaccttgaagtgcgtctgggctctgccttcctggaaagaaagccaatcaacttgggcttcccaggcctcattgcgggtggagaagcgtctgacacttgcattgtctccggctcttggtgtttacaggtcaggaggagaggattgctgaggtctttgtaacaaactcaggtccttctgccactgcgcccaccaggattgattttttaaaagggtgtggggtttggggaccagcttcccctattttcacagctctcctggccaaatctaaccaggatgtcctgggtcacatcccattccagcccctacttactgtgcacagctcccctaackctctcctcactttcatccctcggtccattgaatgagcacttccaggtgtggcctctaagggtcctctgtgctttgcatccatggacgttggggcaccaacatggagcaagcagaggccctgggggcacgaggtctcgctca

SEQ ID NO: 625914 - DNA, 241 bp, Homo sapiens
caacaaactctaaacaaaaatarcaactctggccaagatggctagattagaagcagctacagtccatggctctcacgaagaggaaagaaaacagcaagtgaattctgcaccttcaactgaagtatccaggctcttgcattgggactgattaattggacagcttgacccatggagaatgaggaaaagctgagcggggcgatggcccacctgggagtggcacagagccaggggagctcccatc

SEQ ID NO: 625915 - DNA, 496 bp, Homo sapiens
ctttgtgctaggtttctattttcatgtcatgctctgaagaacttgactaagactcttcccaagtagtcttcttggtacttacaacaaccttgagcataaccacgggccccatatggagaaatgtttaaatttctccctcttaacattttgcttcatgtcaaatttataagttatccatttttatggaattttcatttaaaaagcttgtcttaactttttgtacttttcattcccactgccaactttgtggtcagactcccataacctttattttaaattttaayttttcatgggtacatagtaggtgtatatatttatggagtacatgagatgttttgacacaggcatgcaatgtgaaataagcacaattattgaagaatggggtatctgtcctcccaataattcatccattgagtttcaaacaatccaagtatactatttaagttattttaaaatgtacagttattactgactactgtcaccctgctgtgctatc

SEQ ID NO: 625916 - DNA, 496 bp, Homo sapiens
ctttgtgctaggtttctattttcatgtcatgctctgaagaacttgactaagactcttcccaagtagtcttcttggtacttacaacaaccttgagcataaccacgggccccatatggagaaatgtttaaatttctccctcttaacattttgcttcatgtcaaatttataagttatccatttttatggaattttcatttaaaaagcttgtcttaactttttgtacttttcattcccactgccaactttgtggtcagactcccataacctttattttaaattttaatttttcatgggtacatagtaggtgtatatatttatggagtacatgagatgttttgacacaggcatgcaatgtgaaataagcacaattattgaagaatggggtatctrtcctcccaataattcatccattgagtttcaaacaatccaagtatactatttaagttattttaaaatgtacagttattactgactactgtcaccctgctgtgctatc

SEQ ID NO: 625917 - DNA, 579 bp, Homo sapiens
atcttgataggttgtatgttcccaggaatttatttcttctaggttttctaatttattggcatataattgtttatattagtctcaaataatcttttgaatttgtggagtattagttgtaatgtatccttttaatctctgactttgagttttctattttttttcttagtctagataaaggtttgtcattttggttatcttttcaaaaagtgaactttttgtctcaataattttttgtactattgttttgttttaatatcaataattttttatatgatagttattagttgttttcttctacttatattgatttggcttgctcgttcttttctagttctttaagatgaatcagtaggttgtttatttgaagtatttctactttttaaatgtagtcacttattgctataaacttttatcttagtactgcttttactgtatccctttcgctttagtatgttttgttctaacttttwtttgtttcaagaaattattctcttttctcccttggcccactgatcattcaagaacatattgttcaacttccttgtgtttgtatactttgcaaagtttctgttattattg

SEQ ID NO: 625918 - DNA, 434 bp, Homo sapiens
ataggactattccagttcttttgctacaaaggaaagatttaaaaaacctgaaattcaccaagtacgcggcgttttttttgtttgtttgtttgtttaattttatttttggaaaatcggggaagagctcattgaatttttctatttaggaaatggtctctccacttgctttacatttgatgtagtactgaatgtcaaatttcasattagttatttaggtttaatctttcaaagtatacttattttcattatatatttttaattgttctgagaactgaataaaattcttatgagcagccaagtatgtacggataaatgaaatatctaggatttgctttaaataatccagcaagtaaaaacgggggtgtggatgaaataatatgtaacagagttgataaatattcaaggtgggtgttaagtgtgtggtggttcattgt

SEQ ID NO: 625919 - DNA, 531 bp, Homo sapiens
ataaactgtaactcaaatcatctaagtaatctaaaatttaaagtaaactcattatacttttttcactccccagaggtaaacacttttaaagagtttctgtattttagtcttactagtggtaaccattataaatttaaataagtctttatttctctttctcaatrtataagttttaaacagtcgatgtcgactatccactgtgaaaggttgcaatttgctgtgcttacacaaactctccacttccatggtgacaccatggagaaggaaatgtactcttctgtctgtcacacaacaatgtcacaagcatggaaaagggctatggacatattaatttatttccacatatatttacttattctaggtcatacaaagctgacagtgttttttacatttttgttatttataatatatattatcaaacctacctggagaaagactgtaccagtttatcttccaaccagcagtttacaagagtgcctatttccctgcattcttgccaatagtcatatatgataatttttttaaaaaatg

SEQ ID NO: 625920 - DNA, 531 bp, Homo sapiens
ataaactgtaactcaaatcatctaagtaatctaaaatttaaagtaaactcattatacttttttcactccccagaggtaaacacttttaaagagtttctgtattttagtcttactagtggtaaccattataaatttaaataagtctttatttctctttctcaatatataagttttaaacagtcgatgtcgactatccactgtgaaaggttgcaatttgctgtgcttacacaaactctccacttccatggtgacaccatggagaaggaaatgtactcttcygtctgtcacacaacaatgtcacaagcatggaaaagggctatggacatattaatttatttccacatatatttacttattctaggtcatacaaagctgacagtgttttttacatttttgttatttataatatatattatcaaacctacctggagaaagactgtaccagtttatcttccaaccagcagtttacaagagtgcctatttccctgcattcttgccaatagtcatatatgataatttttttaaaaaatg

SEQ ID NO: 625921 - DNA, 599 bp, Homo sapiens
taagttactcttgacttaagtagaaagactaaatgatgaaccaataaaaataataaatacaataacttttcaagacaaagatagtacagtaaaacataaataggaaaaaaaagtttaaaagtggagtggagtggggggcaaaattaatgtgtagagttttaattagatttttgggtatgtgtttatgcaatcagtattaagttgtcatcagtttaaaataatggattatatatagtatttccaagcctcatggttacctccaatcaagaaacatacaatggatgmagaaaaaataaaaatcaagaaattaaattataccaccagataaaaccaccttcactaaaaggaaagcagcaaggaaggaaagaaggaagagaagaccacaaaacaataagaaagcaaataacaacctggcaagagtaagtcctgacttatcaacaataacattgagtgtaaatgggctaaactctccaatgaaaagacatacagaggctgaatggatgaaaaaacaacatccattgacctgttgcctacaggaaaagcacttcacctataaagatacacattggctgaaaataaagggatgtaaaattatattc

SEQ ID NO: 625922 - DNA, 592 bp, Homo sapiens
atgaatattgatgcaaaaatcttcaacaaaatacagcaagacgaattcaacaatacattagaaagaycattcctcatgaccaagtgggatttatcccttggatgcaaggatagttcaatatatgcaagtcaatcaatgtgatacatcctatcaagaaaataaagaacaataactatatcatcattttaattgatgttaaaaaagcatttaataaagtttaaatatcccattatgataaaaaccccaaaataactacagatggaaggaacagacctcaacataataaaagccatatatgacagactgacagctagtatattgaatgggaaaaaatggaaatcctttcttcctatatatggaacatggcaaggatgcccacttcctctactgttattcaacatggtactaaattttctagctagataaattagaccagagaaagatacagagatccaatggtaaaggaagtcaagttattcttgtttgcagatgatatgatattttttatttttagcatcccaaagattccaccaaaaaactcttagaactgatatattcagtaaagttgcacaatatgtaatcaacatacaaa

SEQ ID NO: 625923 - DNA, 592 bp, Homo sapiens
atgaatattgatgcaaaaatcttcaacaaaatacagcaagacgaattcaacaatacattagaaagaccattcctcatgaccaagtgggatttatcccttggatgcaaggatagttcaatatatgcaagtcaatcaatgtgatacatcctatcaagaaaataaagaacaataactatatcatcattttaattgatgttaaaaaagcatttaataaagtttaaatatcccattatgataaaaaccccaaaataactacagatggaaggaacagacctcaacataataaaagccatatatgacagactgacagctagtatattgaatgggaaaaaatggaawtcctttcttcctatatatggaacatggcaaggatgcccacttcctctactgttattcaacatggtactaaattttctagctagataaattagaccagagaaagatacagagatccaatggtaaaggaagtcaagttattcttgtttgcagatgatatgatattttttatttttagcatcccaaagattccaccaaaaaactcttagaactgatatattcagtaaagttgcacaatatgtaatcaacatacaaa

SEQ ID NO: 625924 - DNA, 592 bp, Homo sapiens
atgaatattgatgcaaaaatcttcaacaaaatacagcaagacgaattcaacaatacattagaaagaccattcctcatgaccaagtgggatttatcccttggatgcaaggatagttcaatatatgcaagtcaatcaatgtgatacatcctatcaagaaaataaagaacaataactatatcatcattttaattgatgttaaaaaagcatttaataaagtttaaatatcccattatgataaaaaccccaaaataactacagatggaaggaacagacctcaacataataaaagccatatatgacagactgacagctagtatattgaatgggaaaaaatggaaawcctttcttcctatatatggaacatggcaaggatgcccacttcctctactgttattcaacatggtactaaattttctagctagataaattagaccagagaaagatacagagatccaatggtaaaggaagtcaagttattcttgtttgcagatgatatgatattttttatttttagcatcccaaagattccaccaaaaaactcttagaactgatatattcagtaaagttgcacaatatgtaatcaacatacaaa

SEQ ID NO: 625925 - DNA, 621 bp, Homo sapiens
attttggtcagtgacagaccacatatatgacagtggtcccatacattatcgtggagctgaaacattcctattgcctagtgacataacccttatcataacatcatagcacaacacattaataacatgtttatggtgatgctggtgtaaataaaccagcactgwcagttgtacaaaagtatagcacaaactattatgtacagtgtaaaatacttgatagtgataataaataaatacgttattggtttatatatttactatgccatacttgtaatgttattttaaagtatacttcttattgaaaaattaaaagttaactgtaaatcagcttcaggcaggtccttcaggaggtattccagaagacattgttatcataggaggtgatagttccatttgtgatattgcccctgaagaatttttagtggaacaagatttggagagggaagacagtaatattgatgatcctgtccctgtgtaggcctaggctcatgtgtgtgtttgtgtctcagttttaaacaaaaaagcttaaaaagtaaaaaacaaaaatttaaaagtagaaaaaaagcatatagaataaggatacagaaatataaagtattttgtacagctgtgcaatgtgtgtgc

SEQ ID NO: 625926 - DNA, 472 bp, Homo sapiens
gaattcataccttggacccacyctgaacggcctgcatggtcctaagtaagtcacttcatctcattaaggctcagattcctcaactgcaaaaagtggatattgatacctacccctgaacccctcccagggctgttttaagattacaagaaaatggacgtgcaagggcttagatgatctcaacaagtgacacaaataaaacatacagagtggagctctgtctatctgcttattaagctgccccagctggggtggtgaaggctcatttaagaggcctggcctcactgctttggtagaaggctcagtgggtaagagaagctaaggatggactccaacaagcgcttttaaggaaggtctatggctttaaatcttcccgatcacctgttctgattttgtgaagacagttcaagctgaggtaaaggtgcgttccctatttctccaggcagatagagactcctaggaagaaagggaaatg

SEQ ID NO: 625927 - DNA, 627 bp, Homo sapiens
aaaaggggtcatgggatggaaagagctctggacccctgacaattctgtggccctagcctacagctccccacaaggctcagctcctatatagggactccatggtctagtgggaaaggccctgggccagaaggccatggccaggtttaggtcaggactctgtagcactagttatgtgaccttaggaagtcactttgtccctgtgacttggtttccgcatctgcaaaacagagataacatctaacctcacgtgattattgtcatctagtgagataagtgaatgtggaatcactttgaaaagactacaacactacactgcaggatagccttgtcgcctgtaaaggaaacctctccaaggctgtgaccactacagattttgcctgaggttaagtcccttacttctctcccactcccacccccagcctgcctgggttcagtgttcttaaattgaaactgaagctagaawgaacctgaggaaagaaatattagtctatgtgtatagatgtccaagcccactgggcatgatttcctaaccccacctccagcgtgcgtgcacacacacacacacacacacacacacacatatacacacacacacacagacacacacaattatttacttccttccca

SEQ ID NO: 625928 - DNA, 594 bp, Homo sapiens
gccctagcctttctcttcctgaggccctgccaggaagagtayaggcagagcagggcggagaggagccacttcttctttggctaatctagttaccctcacagccttagaaggcccaatcataagattctgatacccaggaagcaggccctgccttcaggctggtgccagtgactgcagctgcagaggcaagccctccattcccagtggggtaggtgtcactgtctctgtgcaccgacactaggtcatcggtttcttagccacccagggcaggagaagagctatgggagcccctcccatcatacatctgcccagcctcctgtctgcagtgagatctgttgtctgtagaggagcacccagatgactcactgacagagaaaaaggagagaggcggggaaggcagagcggggctgcgaggggcagtgtggagcacagagaggaagatgttccctcgacccatgaggaccctcgacccatgcggagaaaggacttgtcagcagccaggctggggcagccctgcctttaggaggagcagagcaaggcctgaggccttcattcagtgagttaagatttactgagctcctactgtggggcagg

SEQ ID NO: 625929 - DNA, 601 bp, Homo sapiens
gatatgaatctttcccccaaatctctctgtactcattattatttcccccactttatggatgaggaattgagacacaaagaggttaagcagcatgctcaagctcatgcagcttaattaatcctggaacgtagctacagtgtagttcttaagggaggtaaccccaagaaaataactcaagattggggtgctcacaataaaggagaggctggcatttggcattttattggtcagtgtcaacacttagccacagggcttgcttgcctcaccctgggctgsctgttcagggaaagaaaggcaaggaagaaagtatggtgggcaacagccaggtggagtaggggccaagtccactccccactccagttccctggtggatgctacatgtgtccacagatgctaaagttggctgcagacagtagatgaggccaaggtcccaccacaacctgggagacagagacacacacaggatgtgtgccaggctgggtgtggagggaatcactggaagcctttcgcaggagtgacttaacccaccctggctgtgcggaggagcactctggtagccacatagggaggacaaaaagaactgaggaggccatggcagcaa

SEQ ID NO: 625930 - DNA, 601 bp, Homo sapiens
gatatgaatctttcccccaaatctctctgtactcattattatttcccccactttatggatgaggaattgagacacaaagaggttaagcagcatgctcaagctcatgcagcttaattaatcctggaacgtagctacagtgtagttcttaagggaggtaaccccaagaaaataactcaagattggggtgctcacaataaaggagaggctggcatttggcattttattggtcagtgtcaacacttagccacagggcttgcttgcctcaccctgggctgcctgttcagggaaagaaaggcaaggaagaaagtatggtgggcaacagccaggtggagtaggggccaagtccactccccactccagttccctggtggatgctacatgtgtccacagatgctaaagttggctgcagacagyagatgaggccaaggtcccaccacaacctgggagacagagacacacacaggatgtgtgccaggctgggtgtggagggaatcactggaagcctttcgcaggagtgacttaacccaccctggctgtgcggaggagcactctggtagccacatagggaggacaaaaagaactgaggaggccatggcagcaa

SEQ ID NO: 625931 - DNA, 487 bp, Homo sapiens
taaacagaaaacagcatatctcttctgccttcaaaatgctgtagtttcatggagtcatatagacagmatatcataacataacataacattcaataacatagtataacataacacaacataacatacaaaatgatccatagcacattaagtaaattcattaatagaaaccattgttaaggggtgtagttaaaggtgacaattaattctcctcaggggtatggagtaaagctttatcaaggagatcacattgtcaaagtattgaaggatgagttggaatttgctggatggacaaagagaaatagatattatatagcaaaagggcagtaggtttagaaagacatggagttatacaaagccaataatacacactcttagaagggtgaaaattatagcttgcctgaagcttggatgcttatgaaatattacattataagaaaatgaggctggagaagtagattcagtccagtggtaaataaaattatgtctc

SEQ ID NO: 625932 - DNA, 527 bp, Homo sapiens
aggcatgtgagcattttaaaggccctgaaataggctgctattaaggcactattatcccatttgacatttgagccccaatcttgtagcaactatcagccaaaaccactttgggagtgtactcctctggccagggtttctcaatctcagcaccattgacattctggtctgggtaattttttgttgtagagaactgccctgtgtatccctggcttctatacccactagacaccagtagcagtcccccttccaccccaggtgtgaaaaacaaaatgtctccagacattaccaaatgttccccaggggacaaaatctcccctagttgagaaccactgctataaacttataaaaagcaaaacctccatagttattagcttttcaattatgtttaaaaagtaaaaaaaaaaaaaataaagtatttttcagatcatttaagagagggagtaaagtctgttakgcacatgaggactagataaagggcttcaggcatgatctccagaaccaagcacattcgctgactctacagatct

SEQ ID NO: 625933 - DNA, 470 bp, Homo sapiens
acactgcaaggcaggaaaatatagtaagagaagatgtaactcaaggacttgattatgaaatattaatttcagcatcagagggtagaggctagatcccattttaagggagaaaaatgaaagtcatgaaggcacmatatatttttggagcttgtctgtacagcccaaagaaagacgaaacattgcaaatatgaattggagccagggaaggtaaatttaggattggattttaaaaaatgcttctgaaagctaggaatggcagcataataccaacagcaaaatacaaaggaggcatggaaaaaagataacagagatcactaaagaaggcactcaatggaaattgtataaaattgtataaaattatacagctagtgctttagatgttcacagctttgagggagcgacagggaatggagtgaaggtgatgggttggtcaggagagaagctagggaggggtgagaactctcaccata

SEQ ID NO: 625934 - DNA, 470 bp, Homo sapiens
ttggttaatccaaattgatgtgctgtaagtaaaaaaatacacaagatttcatattcaaagaaaacaatttatgcaaatatctctctaataaattttgtattgattacatgtttttgtttgtttgtttgtttgtttttgagacagggtctcactctctcacccagactggagtgcagtggcacaatcttagctcaccacaacctccgccttccaggatcaartgatcctcctgcctcagttttccaagtagctgggattacaggcgtgtaccactactgcctgtctaatttttgtatttttagtggagataggttttcgctatgttggccaggctggcctcaaactcctaacctcaaatgatccacccacttcagcatccaaaagtgctgggattacaggcatgagccaccgccagattacagtttaaatgagatgttggttatctcgtgctaaagtacactactagaatt

SEQ ID NO: 625935 - DNA, 564 bp, Homo sapiens
aacttgaaggtgatgagccaatctaaaatgaacaattaaagtttgaaaacaccatttctagatcagggttcagccctatgctctatgtggctaggagtatttaaaccttggaccacgtgaaaaaatgaaagaacagtcmttctcaaagcattttaatcctgttgagatagtttggggaaagagcttctcacacttggatgccatatggaagaacatcaacgcacttttgttagcaattactctaaaatagctttgggtctaattagtgacacttgaagtgctcatcatagtaatctgtagttatcaaattttcatcaaagagtaagacagatgcagaaattttaaaaatggaatgaatcagttatgtcatttatttgattacaggtcacaaataaaatctggtattaatggctgggcacagtggctcacacttgtaatcccagcacttttggaggccaaagcgggtagatcatttgaggtcaggggttcgagaccagcctggccaacatggtgaaaccctgtccctactaaaaatacaaaaattagctgggtgtggtggtgcgt

SEQ ID NO: 625936 - DNA, 620 bp, Homo sapiens
tctctcccattcccattcccctgaacttttcaccaagctgccagccccaccagaaaaacctaygtgggtgttttgtttgttccttgcattttgcctgattttctctcattttcccttctgttttcagatcttcaacaggaaaggtgagtgctgccactaagtctcccctcgttcaggttaaaggccccatggttgatagttaaggggccgagacaggctggaagcaccagtgtcacatcacgatgtcccagggtccacagctgcttttgagcccatcaccatcgtcttcctgggctttagtggactcctgttgcacctgtccttgcagtggtgagcacagtctcctcttccttcaatcgcccactgatggcagatagggaaggcagaggggatggggtgaaggcaccgggtcagctcccccacaccctgctcctgccagataggagccccccccacaagtcctctctcaatcctgcaccccagcttaagcttttcctgctgcacgaacccatcagcactatccccgagcctgtctgttcaccagcggtactctcttctccttgggttcatgtaaagttgtctcaatgagtttttaaaatgccatactgtttaaaagacat

SEQ ID NO: 625937 - DNA, 651 bp, Homo sapiens
aaaggggaaattaaggaaccagtggggtttgtcccaaccaaattatttgtccctagtgcttccctctcttaagtgaaaactcaagcctcagcagaatattcctagaggttcccatgactcttcaatagttgagaatgtcggtttaattaatggatcagagccttggcactctttaatgtaacaaggktaccctgaagctggccatcgcagctgtgtctgcatcacagggaatagtctctgccatacaaaggacctaatggtggacattcaggtgctacagcaggcccgcatgagaacaaacctcagttgaagaagcctttctggttattctaaaatcataccacaaaggtgaggatctacctctacatttggctatggtgattttctaacctgtatgttcttcctcttacatgcaaatccgcttgtctaacacacagggacacaaatttgagttcacattgaatgggcttacaatttgtttcagagccaaggattgctgtccaactctttcagatgttcttcccctcactgttactagggtgaaaagtcagtaaggttgtagacaatgaagggaagggtaaggaggagaagttacttgagggcaaggggaaaaaaggaaggaggagaaaggaagtagctaattgtgacctg

SEQ ID NO: 625938 - DNA, 651 bp, Homo sapiens
aaaggggaaattaaggaaccagtggggtttgtcccaaccaaattatttgtccctagtgcttccctctcttaagtgaaaactcaagcctcagcagaatattcctagaggttcccatgactcttcaatagttgagaatgtcggtttaattaatggatcagagccttggcactctttaatgtaacaagggtaccctgaagctggccatcgcagctgtgtctgcatcacagggaatagtctctgccatacaaaggacctaatggtggacattcaggtgctacagcaggccygcatgagaacaaacctcagttgaagaagcctttctggttattctaaaatcataccacaaaggtgaggatctacctctacatttggctatggtgattttctaacctgtatgttcttcctcttacatgcaaatccgcttgtctaacacacagggacacaaatttgagttcacattgaatgggcttacaatttgtttcagagccaaggattgctgtccaactctttcagatgttcttcccctcactgttactagggtgaaaagtcagtaaggttgtagacaatgaagggaagggtaaggaggagaagttacttgagggcaaggggaaaaaaggaaggaggagaaaggaagtagctaattgtgacctg

SEQ ID NO: 625939 - DNA, 606 bp, Homo sapiens
ccttaaccatgagaattttaaaatgtgatgaacataattgagggtctgttgtcatcttaatcatttgtttgaactaaacagtctaaaattccattgagtgattagtacccattggtaaattaaaatgtgtttaaattatctctacagtatttaaatttaaacactcttgtatcttggagcagggccagccaatatttttaaataataacactataattaaagcttagggtaggcttaggatctcattcaagttaacaaaagattacccttcacaccagwatttaaaacaaggctctaattaatgaatgtgctaattgttcttctttttttgcaatcgttcaaaaagatgctgcacagatattcacacaaaaaccacagctgataccctggtgaattgcagtgctcagaaagctgtcatttcactgtgctatcctgggcaactgtggggcactcctgtgatgtcaaatgtaggcctagagtagagtcctctaatgtgaatttacactctcaagtattggagagctgtagctatctctagaatagggaacccagccccctcggtttgcctgagacagtccagctccctcagtttgcctgagacagtcc

SEQ ID NO: 625940 - DNA, 541 bp, Homo sapiens
tttctctaatatctggccacaactctccaaactaaaataaaaactccaagtttctgaaggctctatcagctgaagttggataacttgaagtaaatttcaaaggataagtctcatgcctgctgcatgggctacatagagagttcaccagaatacacaatgccacaactagaagcattcagattgcaaaccaggactacgcattgttatactgttgatttcatgctgtagacagcttttccaaagattgtcaggtcaagactctctatcataataagaaccttacctctcttaatttttccttatgcccacctctttcaattggcaagataatgctgttggcagcactgggccatctggagcggccacwggttgccacaccagctgctgcagggagggcatggggagaatgtggacagcccccacacagcccaccaccctggaggccaccatgaagggtccaggctgggttgcccaccagtggggaagcagcacaaagggggagcagcgcgactgggcagagaggggtcccagggtggtgctg

SEQ ID NO: 625941 - DNA, 597 bp, Homo sapiens
cattgttatggactaagctcctgcactaggccccagcagaccagactaaaatcaaaatgatgtcacccgtgctaaacttccatgtcaccaaacctaaactaagttgttatctgaccttctgagaaatcaagaaaaagggataatagccattttcccaaacaggtcagtttaaatcccaaatcagcatcatgatgaagctcctctgccttgatccctacacaagaaagtagattaaagtaatctgatgttaactaatcagttatttttctactattctttcttcctgtccttgtcttacaaaagaaagtatctttggaacaattaatactctttgttctttgattttgctttcttcagcccttctctgtccataaagccaatgtcttctgttcagttcattggaacactttttctattttatggaataaagtgttgcctgattctagaatcacaaataaagccaactgcaatcattaarctaaatttgttgtagttttgtcttttgacagtacagaataggcaaaccacttcatggtatgatttgagagacccagggaaggtttgcctttgcaaggtttcttcttgccaaacccatca

SEQ ID NO: 625942 - DNA, 505 bp, Homo sapiens
ttttaccataatgaagatatggataattttcatcatcagaaaaagtgcttttgtgttcccatgtagtcaatgcccctcacctccattcccaggcaataattggtgtactttctatcattatagatttctttgtattttctattactttacatttatagaataacatattcctggcttcattaactcagcataacatttttgagatttatccatgtcattttatgtattagtaatttattcktttttaattactgagtagtgttccattgtacctacacatccaatgatggaaaatttagtttccagtttttgtgattgtgaataaagtcactttaacattcatatacaatagtttgagttgaacaagttttctttttcttgagtaattacctagaagtggtctcgttaggttatatggttgatatatgtttaatctaaacgttaaacaatgtttcctaaagtgtttacaccattttacatttctactagcaatgtaggagattgt

SEQ ID NO: 625943 - DNA, 459 bp, Homo sapiens
aaactttgcctctgcccaagtagtgaatatatttgttctcccatatgttcttctagaaactgtatagttttcacttttatattttgatgaatacccattttctccagcacaattcgtttaaaagatttttccaatttatttagtttgtcatttttgcattttaagagctcactccacaacagactgcacactgttctgggacctagcagtgccaatgcagagaaagagggtgaagcatgagctgccactgctggaggagaggtgtgaattaggcatagactgcaacyctcatggctgaggtgcaatcagggcatgggctgctaccactgaggctgaggcacaagtgaggcatagaacagtgccaccacaactgaagtgtgagcagggtacagcctgctacaactgagtctaaggtgtgagcaggatgttggatgccactgccgtgactgaggtgagagt

SEQ ID NO: 625944 - DNA, 537 bp, Homo sapiens
ggtcaaagccattcaacaagtctataggaagtttcaaattttcctacatcttcctgtcctctgagccctccaagtctctagaaagatccaaactttgtcatatttttagatatcrttacagcagtgccccactttctgtggtaacaatttactgtattagtctgttctcacaatgctaataaagacatacctgagactgaataatttataaagaaaagagatttaattgactcataattttgcatggctggggaggcctcaggaaacttataatcatggcagatgaagaagcaaacatgttcttcttcatatggcagtaggagagagaagaatgagagccaagcgaaggggaaaccctcttataaaattatcagatctcataagaacttacttgcacaagaatagcatgagaatagcatgagaaaagcatccccatgattcaattacctccccgggtccctcccatgacacattgggatgaagggaactacaattcgaaatgagatttgggtggagacacagccaaaccatcccaga

SEQ ID NO: 625945 - DNA, 537 bp, Homo sapiens
ggtcaaagccattcaacaagtctataggaagtttcaaattttcctacatcttcctgtcctctgagccctccaagtctctagaaagatccaaactttgtcatatttttagatatcattacagcagtgccccactttctgtggtaacaatttactgtattagtctgttctcacaatgctaataaagacatacctgagactgaataawttataaagaaaagagatttaattgactcataattttgcatggctggggaggcctcaggaaacttataatcatggcagatgaagaagcaaacatgttcttcttcatatggcagtaggagagagaagaatgagagccaagcgaaggggaaaccctcttataaaattatcagatctcataagaacttacttgcacaagaatagcatgagaatagcatgagaaaagcatccccatgattcaattacctccccgggtccctcccatgacacattgggatgaagggaactacaattcgaaatgagatttgggtggagacacagccaaaccatcccaga

SEQ ID NO: 625946 - DNA, 631 bp, Homo sapiens
gcaggggagtgaagtggactctgtgagggtccttgcttgtatttttgtttagtgcactggttttatgttgtttggcttctggccaggaggtgsggctttcaagggagcatcagctgcggtagtatggggaagatacaagcttgccctagggtcagctggacacatattctggtttctcaggcagtgggcaaggccatagacctttcaagagattatgtgctctgtcttcagctactggggtgggtagagaaagactatcaggttggtgtggggttaggtgtgtctgagctcaggttctccttgggcggggcttgctccaggagctgtgggggatgacagcgtggttcttaggccattggtattatgtccccagagagataatgactgtctctgctctgtcaaacaggtcaacagggaagaccgtgccactacccttgacaacttctgataactatcctactgtctatatccatgtactcaattgttttgacgtttacatcccacaaataagtgagaatatgtgatgtttacttttctatggctggcttatttcacttaacatgatgacctccaatttcatccatattgttgctaatgacaggaaattattcctttcttatgactgaatagt

SEQ ID NO: 625947 - DNA, 631 bp, Homo sapiens
gcaggggagtgaagtggactctgtgagggtccttgcttgtatttttgtttagtgcactggttttatgttgtttggcttctggccaggaggtggggctttcaagggagcatcagctgcggtagtatggggaagatacaagcttgccctagggtcagctggacacatattctggtttctcaggcagtgggcaaggccayagacctttcaagagattatgtgctctgtcttcagctactggggtgggtagagaaagactatcaggttggtgtggggttaggtgtgtctgagctcaggttctccttgggcggggcttgctccaggagctgtgggggatgacagcgtggttcttaggccattggtattatgtccccagagagataatgactgtctctgctctgtcaaacaggtcaacagggaagaccgtgccactacccttgacaacttctgataactatcctactgtctatatccatgtactcaattgttttgacgtttacatcccacaaataagtgagaatatgtgatgtttacttttctatggctggcttatttcacttaacatgatgacctccaatttcatccatattgttgctaatgacaggaaattattcctttcttatgactgaatagt

SEQ ID NO: 625948 - DNA, 631 bp, Homo sapiens
gcaggggagtgaagtggactctgtgagggtccttgcttgtatttttgtttagtgcactggttttatgttgtttggcttctggccaggaggtggggctttcaagggagcatcagctgcggtagtatggggaagatacaagcttgccctagggtcagctggacacatattctggtttctcaggcagtgggcaaggccatagacctttcaagagattatgtgctctgtcttcagctactggggtgggtagagaaagactatcaggttggtgtggggttaggtgtgtctgagctcaggttctccttgggcggggcttgctccaggagctgtgggggatgacagcgtggttcttaggccattggtattatgtccccagagagataatgactgtctctgctctgtcaaacaggtcaacagggaagaccgtgccactacccttgacaacttctgataactatcctactgtctatatccatgtactcaattgttttgaygtttacatcccacaaataagtgagaatatgtgatgtttacttttctatggctggcttatttcacttaacatgatgacctccaatttcatccatattgttgctaatgacaggaaattattcctttcttatgactgaatagt

SEQ ID NO: 625949 - DNA, 602 bp, Homo sapiens
agtggttctgaccaccaatcaaacctgtctggagacactttcccccctcacactctctctcaatctccctctctctctctctctctttctttctgtctctctctctctctttctttctctctctctctctcacacacacacagacacagacacacacacacacacaaagattgattcaggaaaaatgaatcttatgcctaccaaaagatgtgtataagaatgctcacagcagctttatttataatatccccaaactagaaacagcccaaatatctacaagtagaccaagtaaacaattgatgattaattatatagccatacagcagaatrctgcacagaaataataaatgtatttgtgatacacacaaaaacatgactgaatcttacagacatgaatgagtgaaagaagccagacacaaatgaatggagactgtattattccatttacataaagttcaagcacagtcaaatctaatcattggtgatagaagtcaatgacagttacctctacaaggagggtattaatggagaaggggcttaagggagccttctctggtgctggtcatgtttcatactttgatctaggtcaggggtgagcaaac

SEQ ID NO: 625950 - DNA, 425 bp, Homo sapiens
ggtctgttccttttcccttattcttgctttggctatgtagggtcttctttggttaaatatgaattttaagattgtgttttctagttctgtcaataataatagtggtatttttatgggaactgcattgaatttgtaggttgcctttggcagtatgatcatttttcacactactgattctatccatccatgagcatgggatatgtttccctttgtttgtgtcatcaaaggaaagcccaagacctgattgaattagtgttgaaytctaccaaatatttaaggatgaataaatagcaattctttccaaattcttttaaaaaattgaagaaaaggaaacattttccaactcattttatgaggctagcattagcctgataccaaagccagatgaggataccataggaaaagtaaactacagaataatattt

SEQ ID NO: 625951 - DNA, 614 bp, Homo sapiens
tttgtttgtgtcatcaaaggaaagcccaagacctgattgaattagtgttgaactctaccaaatatttaaggatgaataaatagcaattctttccaaattcttttaaaaaattgaagaaaaggaaacattttccaactcattttatgaggctagcattagcctgataccaaagccagatgaggataccataggaaaagtaaactacagaataatatttctgctgaacataggcaaaaattctcaataaaatgctagaaaccctaattcaacaagacattaaaaggataattcaccatgatcaagtgtgattcatccctgggatggaagaatagtttaataagtgcaaattaatgaatgtgatataccacattaatggaatgaaggataaaaatgatatgaccatctcaatagatgcaaagaaagcattcaacaaaagtcaacatttctttcattagaataactctcaaaattaggtgtagaaggaatgtatctcaatatgataaaggccatatatgaggggtcttcaaaagtttattgaaaatgcgtataatgaaataattatgcatrgatttcaaaactcatttgcaccaaagtaaactctaacttgttataaa

SEQ ID NO: 625952 - DNA, 584 bp, Homo sapiens
aaacttacaatcatggcagaaggtgaagggggaaaggccaatctcacctggcttgagtgggagggttgggttgccacacactttttaaaaaccagatcttgggagaactctattatgagaacagaaacaaaggaggaaatcaacacccatgatccaattaccttcaatcaggctccacctccaacactggggctacaaattcacatgagatttgggtggggacacagatccagamcataccatagatgaactaacaaaaaagagagaaaatccaaataaataaaatcagaaatgaaaaaggagacattacaacagatagtgcagaaatgcaaaggatcattagtggctaccatgagcaactatatgccaataaattagaaaatctagaagaaattgacaaattcctagatatgtacaatctaccaatattgaagtaggaagaaatttaaaacctgagcagaccaattacaagtaacaagattgaaaccataataaaaagcctcccagtaaagaaaagtctggtacctcatgacttcactgccaaattctaccaaaaatttaaggaagagctaatatcaatccta

SEQ ID NO: 625953 - DNA, 594 bp, Homo sapiens
acagtgatcagtctgaaaaagaaatcaaaaaagtaaacccatatacaatagccacaaataaaattaaatatctaggaattaatttaaccaaagaagtaaaagatctctttaaggaaaactataaaacactgatgaaagaaattaaagaggacaccaaaaatgaaaaagtgttccatgttcatggattggaataatcaataatttttaaatgtccatactgcccaaagctatctacagattcaatgcaatccctatcaaaataccaatgacatactacacagaaatagaaaaaacaatcttaaaatttatatggaaccacaaagacccagaatagccaaagctatcataagcaaaaagaacaaaactgaaggaatcacagtacctgacttcaaattataccatacaacacagatawagtaaccaaaacagcatagtactggcatagaaacagatacatagaccaatgaaacagaatagagaactccgaaaaaaatccgcacgcctacaatgaactcattttgacaaagataccaagaacatacactggggaaaacagtctcctccataaatagtgctgggaaaactggatactca

SEQ ID NO: 625954 - DNA, 558 bp, Homo sapiens
atcaatccaaatgcccatcaatgatagacttaataaagaaaatgtggcacatatacaccctggaatactaggcagccataaaaatgaatgagattgtgtcctttkcagggatatgaatgaagctggaagccatcatcctcaacaaactaacacaggaacagaaaaccaaacactgcatgttcttactaataagtgggagttgaacaatgagaacacatagacacagggaggggaacaacacacactggcaccagttgggggctgggggatgagcggagggagagcattaggagaaatagctaatgcatgcagggcttaaaacctagatgacaggttgataggtgcaccaaaccaccatggcacatgtatacctatgtaacaaacacacacattctgcgcctgtatcctggaacttaaagtataattaaaagaaagaaatccactctagttaacagcattctgatcaagtccacagatatgaatgagggccataaaataaatcagatttatctatgagaaaaagaagatgtagaaaataccaaatctaaacaacagaga

SEQ ID NO: 625955 - DNA, 558 bp, Homo sapiens
atcaatccaaatgcccatcaatgatagacttaataaagaaaatgtggcacatatacaccctggaatactaggcagccataaaaatgaatgagattgtgtcctttgcagggatatgratgaagctggaagccatcatcctcaacaaactaacacaggaacagaaaaccaaacactgcatgttcttactaataagtgggagttgaacaatgagaacacatagacacagggaggggaacaacacacactggcaccagttgggggctgggggatgagcggagggagagcattaggagaaatagctaatgcatgcagggcttaaaacctagatgacaggttgataggtgcaccaaaccaccatggcacatgtatacctatgtaacaaacacacacattctgcgcctgtatcctggaacttaaagtataattaaaagaaagaaatccactctagttaacagcattctgatcaagtccacagatatgaatgagggccataaaataaatcagatttatctatgagaaaaagaagatgtagaaaataccaaatctaaacaacagaga

SEQ ID NO: 625956 - DNA, 558 bp, Homo sapiens
atcaatccaaatgcccatcaatgatagacttaataaagaaaatgtggcacatatacaccctggaatactaggcagccataaaaatgaatgagattgtgtcctttgcagggatatgaatgaagctggaagccatcatcctcaacaaactaacacaggaacagaaaaccaaacactgcatgttcttactaataagtgggagttgaacaatgagaacacatagacacagggaggggaacaacacacactggcaccagttgggggctgggggatgagcrgagggagagcattaggagaaatagctaatgcatgcagggcttaaaacctagatgacaggttgataggtgcaccaaaccaccatggcacatgtatacctatgtaacaaacacacacattctgcgcctgtatcctggaacttaaagtataattaaaagaaagaaatccactctagttaacagcattctgatcaagtccacagatatgaatgagggccataaaataaatcagatttatctatgagaaaaagaagatgtagaaaataccaaatctaaacaacagaga

SEQ ID NO: 625957 - DNA, 625 bp, Homo sapiens
aagtatgaatggctatattaatatcagacaaattagacttcagagtaaatacaattaccaaaaacatacagggacactatgtaataatagaagggtccatccaccaagaagacatggatcttaaatgtacatgcattaaacaacagagctgcaaaatatgtaaagcaaaatctttcaaaactaaaatgagaaatagaccaatccacaattatacttgtacacttcaacactcatccttcaacaattgttacaacaactagactgaaagtcagcaagaatttagaattttacagcacaatcaatcaacagtatctaatggatatatatagaacacaccacccagcaacagcagaatatatattccaaatacrtattatttttaaggtcccatggaacattccttaaattaaaccatatctagggccataaagcaaacctcgacaaatctgagagaactgaaatcatacagagtgtgctctccaatgacaaatcaaatcaaactagaaaatgaacaagaaatttttcaaacccttggaatcaaaacaagacacttcaaaataatctattaaagaggatgcttgaaggaaatctaaaaatacattgaactgaatgaaaaggaaaacac

SEQ ID NO: 625958 - DNA, 625 bp, Homo sapiens
aagtatgaatggctatattaatatcagacaaattagacttcagagtaaatacaattaccaaaaacatacagggacactatgtaataatagaagggtccatccaccaagaagacatggatcttaaatgtacatgcattaaacaacagagctgcaaaatatgtaaagcaaaatctttcaaaactaaaatgagaaatagaccaatccacaattatacttgtacacttcaacactcatccttcaacaattgttacaacaactagactgaaagtcagcaagaatttagaattttacagcacaatcaatcaacagtatctaatggatatatatagaacacaccacccagcaacagcagaatatatattccaaatacgtattatttttaaggtcccatggaacattccttaaattaaaccatatctagggccataaagcaaacctcgacaaatctgagagaactgaaatcatacagagtgtgctctccaatgacaaatcaaatcaaactagaaaatgaacaagaaatttttcaaacccttggaatcaaaacaagacacttcaaaataatctattaaagaggatgyttgaaggaaatctaaaaatacattgaactgaatgaaaaggaaaacac

SEQ ID NO: 625959 - DNA, 556 bp, Homo sapiens
acaggaagcatagcatcatctgcttctcaggtagccccagggagcttttactcatggtgaaaggcaaagcgggaggaggcacttcacatggcaaaaggaggagcaagagagagataatggggggagaggcattacacacttttaaaccaccaggtcttatgagaactcactcaccattgcaaagacagcaccaggccatgacccaaacacctcccaccagaccccactttcagcactggggattacaattcaacatgagatttgagtggggacaaatatccaacctatatcaatagccattctggaaaacagttttacagcttcttaaaaaaaaaaaatgcaactactatgccacgcagcaataacaatcctcagcttttagcccagggaaatgaaaacttgtgttcacacaaatcctgtacataaataatccaattaaaaatgggcaagagacctcagtasacatttctgaaaggaacacatataaatgccttctatataaataacatataaatgttcacagcagctttattcataattaccaaaaactggaaac

SEQ ID NO: 625960 - DNA, 512 bp, Homo sapiens
tggtacttacatttctaccaatggtgtgcaagtgtgcccatagctttgccaatacctgtcatccttcttgtgataataaccactctgagaggtgtgaggtgatactatgattttaatctgcattttcccaatatttaatgatgttgagcattttttcatatatctattggctatttatgtcttttgataaatgtctattgaggtccattgcccatttyttaattgggttatttgttttcttggtattgagttgtatgagatccttataattttggataccagatctatgacttgcaaatattttctcccagttcataggttctctcttcactctgttaattgttttctttgctgtgcagaagctttttagtttgatgtgtttccatttgcctatttttacttttgatgcctggacatttggagccaaatccaaagaatcattgcccagaccaatgttatgtagtttttcctccatgttttcttctgtagttttatggacttcacgtcttatg

SEQ ID NO: 625961 - DNA, 548 bp, Homo sapiens
ctggctttctaaatgtaggtaagattttattcctccttcaaaatacaaatacacacaacaatggcactcatcccctgatgaaaatgtttaagacctttaagatgccatggaaataaagcccactagagattttttttttattatactttaagttttagggtacatgtgcataatgtgcaagttagttacatatgtatacatgtgccatgctggtgtgctgcacccattaactcgtcatttagcattaggtatatctcctaatgctatccctcccccctcccccmaccccacaacagtccccagagtgtgatgttccccttcctgtgtccatgtgttctcattgttcaattcccatctatgagattttttaagggctgggaccatgtcttactcattcttgtatctgatgcccccaccacttccctacgtagtgcagtgtctggcacatagcacatgctagggaatatttgactactgattgagtatgaaaatgaattgaaaaaatcactgaatgccagaaataaaaggaactttagagattgtggttt

SEQ ID NO: 625962 - DNA, 655 bp, Homo sapiens
gtttaagacctttaagatgccatggaaataaagcccactagagattttttttttattatactttaagttttagggtacatgtgcataatgtgcaagttagttacatatgtatacatgtgccatgctggtgtgctgcacccattaactcgtcatttagcattaggtatatctcctaatgctatccctcccccctccccccaccccacaacagtccccagagtgtgatgttccccttcctgtgtccatgtgttctcattgttcaattcccatctatgagattttttaagggctgggaccatgtcttactcattcttgtatctgatgcccccaccacttccctacgtagtgcagtgtctggcacatagcacatgctagggaatatttgactactgattgagtatgaaaatgaattgaaaaaatcactgaatgccagaaataaaaggaactttagagattgtggttttagagatgtagttctgcyttattgatttacagattaggaaaatgaggcttggggagtttaactgtaagtcaatgttcatcttaacactatattgcagtgaagttaggtacagaaaaggatcagtctcctaaagtagaatgtgatgctcattctctgaataactttaaatatacgaggcatgaattaaccagg

SEQ ID NO: 625963 - DNA, 580 bp, Homo sapiens
cacattggataatttgcatagaaataactgtgctttttggttaatgggtggcatacattgggaagtcaatgtaaatgactaatttctcaatctttgacatatagctagatgaaatgcttattttttatttttgtccaaagactctaggctgaatcatctggtgcttccaacctatttttcatgttatatcataaccctgggcttcccaatctgatgacactctggagttcatttggatacccygggtatccaaaggactcctagaggcacaaattgcaggccatatggttcagttagattggttgagggttggggatgtgtggtacataaatggagataagaggagctggatagctggggaggtaaaaacccaggtggagtttttaatggactctggattctcaggaacttcattcatgttttcaggcagattgagagccagagctctgataaaggttgtgaattcaggcaagagccagagggacaggaaaggctccagtttcccagacattttggctcccagcagctccagggatcatgtaggcaggcactgctatagtccttccagagatttattgac

SEQ ID NO: 625964 - DNA, 488 bp, Homo sapiens
gtcttattcacttttgcatctgacaccttggccttcaccactgcctaatacagtgcctgatatattatagatgcttagtaaatatttccatacaaacaaaagctaaggttgtatagaactgggcagaggagtagcgatgggggaagtgtttgtggttgtgtccagccatggaaaatgactgagtcataacctttacttgttatgtattcccagagggaaagagaagcagtggtttaagacttttaaaagattgmttgctaactaatgcttaaactgtatgggtaagtgcttcaatcagactatggacattgtgcagattccaactatatatcagcaatttaactactttcttttgatgttactttaaatttctgttttatctttttaatagttttttcagatataactgatataaaataaagtacacatattgaaagtgtagaaatatataaacacatatatgtataatattcataaaagaattacaa

SEQ ID NO: 625965 - DNA, 562 bp, Homo sapiens
tccattacaaaaaaataaatctctctgttaatctctcattgtagtaatttattatttactgatttaattaagatgtttatctgccttttattgaagttcactgtgcttccttaaaacaattattttgaatactttgtcaaggagttcataaatctttatttcttggggatggtttctggtgctttattttattcttttggcagtgtaatattgctggtgtcatgtttccctgattattcttttttaaacttttttaattcttaatttttgtgggtaaataagtgtatacattcatggtatacacgagatatattcatacaggcatgcaatgtgtaataatcccatcataaagaatggtgtatacatcccctcaaccatttatcttttgtgatacaaataatcaaattatatttagttattttaaaatatacaattaaattagtattgattatagtcaccctyttgtgctgtcaaatagtaagtcttattttttctttctaatgttttcttacctattaattatccccacttcccccatgccctcccactccctttaccatcc

SEQ ID NO: 625966 - DNA, 566 bp, Homo sapiens
atgtcttcttttgagtaacgccttttcaaatattttgctcatcttttgattggattactagatttttcctatagagttgtttgagctccttatatattctggttattcatctcttgttagataggtagcttgcaaatattttctcccattctctgagttatctcttcaatttgtttattgtttcctttgctacgcagaagctttttaacatgatatgatcgcatctgtccatttttggtttggttatctgtgcttgtggggtattactcgaaaaaggtttgcccagayaaatgtccttgagagatttcccaatgttttcttttagtagtttcatagcttgaggtcttaagtctttaagccatattgatttgatttttgtatatggcaagacacaggggtccagttcattcttctacatatgaatatcctatttttcctaacaccatttatttaagacattgtcttttcccagtatatgttcttggcatcattgttagaaacgagttcactgtcagtgtgtggatttttttctgggttctctattctgtttcattggtgtacatgtc

SEQ ID NO: 625967 - DNA, 566 bp, Homo sapiens
atgtcttcttttgagtaacgccttttcaaatattttgctcatcttttgattggattactagatttttcctatagagttgtttgagctccttatatattctggttattcatctcttgttagataggtagcttgcaaatattttctcccattctctgagttatctcttcaatttgtttattgtttcctttgctacgcagaagctttttaacatgatatgatcgcatctgtccatttttggtttggttatctgtgcttgtggggtattactcgaaaaaggtttgcccagacaaatgtccttgagagatttcccaatgttttcttttagtagtttcatagcttgaggtcttaagtctttaagccatattgatttgatttttgtatatggcaagacacaggggtccagttcattcttctacatatgaatatcctatttttcctarcaccatttatttaagacattgtcttttcccagtatatgttcttggcatcattgttagaaacgagttcactgtcagtgtgtggatttttttctgggttctctattctgtttcattggtgtacatgtc

SEQ ID NO: 625968 - DNA, 622 bp, Homo sapiens
ctgcttttgctgtactaggttttggtatgttgtgtttccattatcatttctttcaagaaatttttcaattttcttcttaatatctgcactgacccactggtcattcagaagcatattgyttaatttccatgtatttgtatagtttacaacattcttcttatatcaatttctagttttattcccttgtggtcagaaaaaatgcttgatattatttcaattttttgaatgttttaagacttgctttgttacttgctttgctatgtgttgaggaaaagaatgtttagtctctttagctcttggatgaaatgttctgttaatgtctattagatccctttgttctatagtgcagacagactaagtccaacgtttctttgttgattttctgtgtggatgatctgtccagtgctgaaagtggactgttgaaatctccatttgttattgtattggagtctgtctttttagctctaatgatatttgctttatatgtctgcgtgcttcacagttggtgcaaatatacttaaagttgttatattctctttctaaatagacccctttatcattatatagtgatcttctttgtctcttcttaaagttttttctcaaaatctattttgtctgatat

SEQ ID NO: 625969 - DNA, 618 bp, Homo sapiens
gaatatctttttctatcccttaattttcagtctgtgtgtgtgtctttatacgttaagtgtatttcttgtaggcaacagctcattgggtcttgtttttttaatccattcagccactctctggcttttgattagtttagtctatttacatttaatattattgttgataagtaaggacttctsccattttgttattggttttctggttgttttgtggtttttctttccttcctgtcttccttcaatgaaggtgattttctgtggtgttatgatttagtttcttgatttttatattttgtgtatccattgtatgtgtttttggttttaggtgaccatgaggcatgcaaatattatcttataacccattactttacaccaataacaacttaacactgtttgcataaataagcaaacaaacaggaacaaaagttataaagcctctaagccttgtgttcatctccccgcttttcaatattttgttgtttctatttttgtcttattgtactgtgtaggtcttgaaaagtttttgtagttcttatattatttttgactcattcacatttagtctttctatttaagataaagtgaacttacacaccacagctacattttagtaatatc

SEQ ID NO: 625970 - DNA, 429 bp, Homo sapiens
tttaatccattcagccactctctggcttttgattagtttagtctatttacatttaatattattgttgataagtaaggacttctccyattttgttattggttttctggttgttttgtggtttttctttccttcctgtcttccttcaatgaaggtgattttctgtggtgttatgatttagtttcttgatttttatattttgtgtatccattgtatgtgtttttggttttaggtgaccatgaggcatgcaaatattatcttataacccattactttacaccaataacaacttaacactgtttgcataaataagcaaacaaacaggaacaaaagttataaagcctctaagccttgtgttcatctccccgcttttcaatattttgttgtttctatttttgtcttattgtactgtgtaggtcttgaaaagttttt

SEQ ID NO: 625971 - DNA, 479 bp, Homo sapiens
agtgttagtcaagtgaaggaatgtaagaagtgggttctagacagaggacttatcttgaataaagatgtaactgaataagcagttttccatggtgtcaaccacttattttcttatccattctttccagttctwttcctgtggcttccatccccttaccaactagttccgtttagattgggctatcgcatagcctctcagagacctttctatcttcaaatctccttgaactgctgtctcagatcactgtagtgcagtgtgcataggtcagccagaatctttctggagtatttggatgtcattccactgttcagatactcaaggtagttagtgctcaaattgaactgaatcataggacacccagttgatgtcagagaataggtgcaggaatagaagatccaaacttatgtgtcaaagtcctctctagctaacccctccttactgaacttccttcagttcctgctagtgtcttccctcagctt

SEQ ID NO: 625972 - DNA, 561 bp, Homo sapiens
ggttgccgctgctggctcaagtggccagcttttattcccttatttggctttgcccacatcctgctgattggcccattttacagactgctgattgrtctattttacagagtgctgattggtccattttacagagtgctgattggtccattttatggagtgctgattggtgcatttacaatcatttagctagacacaaaagttctccaagtccccaaccgacacagaagctcagctggcttcacctctcaatcccccctctaaacaggacatcccaactgctgttaggaattgggcaatgactgctctagctacttcctgctggataggggtgaagaaggggtcctgcagttgtactgtcttccaaaggggaactctttaggctagtgaaagggccagtggtttggtccagggggtccttggtagaagcttttagttgagctcatttggggttccatttgtaagaccatctgtagcttgatggcctccatactagaggaaacaaatttgacaaggaggttaaaaatacagggcccaaaggcaagtaatagcaagatggctgcc

SEQ ID NO: 625973 - DNA, 561 bp, Homo sapiens
ggttgccgctgctggctcaagtggccagcttttattcccttatttggctttgcccacatcctgctgattggcccattttacagactgctgattgatctattttacagagtgctgattggtccattttacagagtgctgattggtccattttatggagtgctgattggtgcatttacaatcatttagctagacacaaaagttcyccaagtccccaaccgacacagaagctcagctggcttcacctctcaatcccccctctaaacaggacatcccaactgctgttaggaattgggcaatgactgctctagctacttcctgctggataggggtgaagaaggggtcctgcagttgtactgtcttccaaaggggaactctttaggctagtgaaagggccagtggtttggtccagggggtccttggtagaagcttttagttgagctcatttggggttccatttgtaagaccatctgtagcttgatggcctccatactagaggaaacaaatttgacaaggaggttaaaaatacagggcccaaaggcaagtaatagcaagatggctgcc

SEQ ID NO: 625974 - DNA, 489 bp, Homo sapiens
tgggcaggggtcaatgctcgtaggaggataaaaggacaaatagaggccagacgcatttgttcaggcctgcaatcccagcactttgggaggacaaggcaggcagatgacttgagcccagcagttccagaccagcctgagcaacgtggtgaaaccccatctctataaaaatttcaaaaaattagccaggcatggtggcaggcacctgtaataccagctactcaagagactgaggcagaagaattgcttgaacccaggaggtggaggtttcagagagctgagatcgcgccactgcactctggcctaggtgacagagcaagaccttgtctcaagaaaaagaaaaaagaaaagaaaagaaaaaatcgaaagacaaatagacaccatgcctgcccacaaagaacttccatgcagtggaaagaccrggcaatgctcaaagaaagagtggttgattctgaggatgatgagtgataaggagggcttcatggaagaggt

SEQ ID NO: 625975 - DNA, 573 bp, Homo sapiens
ggccaccttgcagattgcaacacttcatgagaaataaacctcttatttcaaaatttatgaacctcaccactcgttagttgacaagagtattaacctaagcatggggcccctcttggagcagggcccttatgactgcataggttgctgcccatgaagctagctagccctgctgaccttgttgctggttttccaggagtagatgccgagactgtgcttggtgtacagagtatttattaggaatcaacatccgtggatgagaggaggaggaagcagtcttgggcagagggaaaagtcaaaatgtgatgcaattgtgacaaagctttggccattcctatgggatgttctggaccatacacggcccatcagagatgctagattaagccaaaatgtctgtgtctttataccttrcttctatcagtcattggatgtgaactgccccaactttgggaggtgggattagcagaaagtttccaggtctcaaatcctttagagtttgtttcagttgcagagagctaactcaaccaagggcatgaccctcccaggctgagcaacatcctgctttctcttctgaag

SEQ ID NO: 625976 - DNA, 573 bp, Homo sapiens
ggccaccttgcagattgcaacacttcatgagaaataaacctcttatttcaaaatttatgaacctcaccactcgttagttgacaagagtattaacctaagcatggggcccctcttggagcagggcccttatgactgcataggttgctgcccatgaagctagctagccctgctgaccttgttgctggttttccaggagtagatgccgagactgtgcttggtgtacagagtatttattaggaatcaacatccgtggatgagaggaggaggaagcagtcttgggcagagggaaaagtcaaaatgtgatgcaattgtgacaaagctttggccattcctatgggatgttctggaccatacacggcccatcagagatgctagattaagccaaaatgtctgtgtctttataccttacttctatcagtcattggatgtgaactgccccaactttgggaggtgggattagcagaaagtttccaggtctcaaatcctttagagtttgtttcagttgcagagagctaactcaaccaagggcatgrccctcccaggctgagcaacatcctgctttctcttctgaag

SEQ ID NO: 625977 - DNA, 550 bp, Homo sapiens
catttagatttaatggaattactaatatgtttgcatctaaacctactttcttctttttgctttttgtttgtcccatcaagtctatgttttccttcctctcctttttttttttcctttcttttggattaactattttttattatttcatttcaccattagastggtttttactatccttttggtggttatccaaaatgtcaataatgcagaggctaagaaaccctgactaacctcttattttctctaaactggcagtaaaatctagaggtttgattggattcagtttattttttggggggtggacagaggtcttcacagatgaacctatattgtacaccgtattatatgagaaggcaataatgtcccatgcatagatgcacagattgataagtgggcttaggtgtttcagtcagatccatctattataaagttctccattcgcctttcatctaattgtgttagcatccattggtgatggctacctagactcattatgtcattaagggttgccagacggtgactcctctatcacttgttctcctatttgctg

SEQ ID NO: 625978 - DNA, 550 bp, Homo sapiens
catttagatttaatggaattactaatatgtttgcatctaaacctactttcttctttttgctttttgtttgtcccatcaagtctatgttttccttcctctcctttttttttttcctttcttttggattaactattttttattatttcatttcaccattagactggttyttactatccttttggtggttatccaaaatgtcaataatgcagaggctaagaaaccctgactaacctcttattttctctaaactggcagtaaaatctagaggtttgattggattcagtttattttttggggggtggacagaggtcttcacagatgaacctatattgtacaccgtattatatgagaaggcaataatgtcccatgcatagatgcacagattgataagtgggcttaggtgtttcagtcagatccatctattataaagttctccattcgcctttcatctaattgtgttagcatccattggtgatggctacctagactcattatgtcattaagggttgccagacggtgactcctctatcacttgttctcctatttgctg

SEQ ID NO: 625979 - DNA, 575 bp, Homo sapiens
tgacatgcccagcaagaacaacctcaaagtacactcgtaagtccccatattgcatgtggagctctgtgaagggttgcacgatgaacttgagagagacacagttcctaccttcatggccttgttttctaagactaggtcagaggactctccacatttatgccctctcttttctattgtattgtattttattgtattktattgtattgtattgtattgtattgtattgtattgtattgtattgtatttatttatttatttgagacagggtctcactctgtcacctaggctggaatgcagtgcctatttatgggcatgatcatagctcactacagtcttgacctcctgggctcaagcaatcctcccaactcagcttcccaagtagctgggactacaggtgtgtaccaccacacccagtgaatttcttattttttgtagagacagcagttttgccatgttgccatggctggtcttgaactcctgggcttggcctcccaaagtgctgggattataggcatgagccactgcacccagcctgtcccttttctagctagtagttttctttcagaggaaatcaa

SEQ ID NO: 625980 - DNA, 550 bp, Homo sapiens
agcattcccagtgctttgaggtacagaagcagagccttggcttgggaaaagatctgcatttgaaggactccaatcagggccaactggatggattttagagcctaaaatacagaaaagcagctacaaataactcagcattctaaagagatttttaatgatttttactgctaagacttttaatctctaaaaacagctttaaattccagactcacaacaccccaataaatttacttagaaaatactgtattatattttatatttctaatttaagattcttccactttactcargcaatttaaaattagtcacagcaagtctgcttgaaccagcaaagacacattattcttcactgtgttagaaaacatcaccatcacatccagaaaatactttccaattcaagagacctaagggtctaaggtgtattttataaatgatattttaagtgatacatgcacaacacaaaagtaaatatgtggatccttaatccaggacttcaactgcactctttcacaaatcagtatattcaggtttttttctacactgatactta

SEQ ID NO: 625981 - DNA, 530 bp, Homo sapiens
agccctgactcagatccctcaggccacagaggctgttgcaactcagcccctggctccccaccctgacgctctgggttatagccttggcgctgtgaatctcctcttctactggcaaaggctcagtctgcacctggctcctttcaggagattggactccccagcccctttccgmtctgttcattaaaaaccaccactgcagcggctgggctccccggggcagccaccacagaggctgctgcgtttgttctgatgtgagctggattcggagagctggttgggttcatttcctgtgcttccagcctccttctccattggcagcacgcactcaccatggtaacgctcaggccgctttttggaaaccctcacttctccttgcttaaaactattcaaagaaaaatccatccaagcccgtcaaggaaaaggtacttattaaatacctttcccaaagttaaaacatctccaacaaggagctgtctgaggcgccttcgaagttgtgtgtccctgagacacatgcataattaggttaaaca

SEQ ID NO: 625982 - DNA, 562 bp, Homo sapiens
gcccatgaatcaaggagtcattttgatttttgagttttattatttaagaaataaatttcatagggctttagccgccatacatagtaattcctctgatagatctgggcagttgaaaaccatctgaataggagtcaccattcaacatgcattaagaatgtgattcatgggaaaaggtaacatatgaagattaacaggagtttggaagaagttgattccaaccctcatgcatgactttgaggggttcaggacttcagtggaggaagtacagatgtgacagaaatagcaagagaactacaatgagaacatatggacacagggagggaaatatcacacactggggcctgttggggatggggggctgggaaagggatagcattaggagaaatatctaacktaaaaaaaaaaagaaagaaaggcttcctttactctgaggtttttgtctttctagattcagtttaaaatcttgctgggaggtcctatctttgaggcttctgattttatatatgtatatgtatatgtgtatatatatgtatatatatttctgagtcatttgagagtaagt

SEQ ID NO: 625983 - DNA, 644 bp, Homo sapiens
taatcaaaactagaataaaatgggtaaattttctgccactgagcagaaatgaggctcgagagasataaagttgaattatggaaaaataaagtcacatttctagcatccctgaggatgtggtttgaagatatcagttttgctactcgtgtattggctgacagtggcaacaatattgaggctcggaatatgttcaaattggtctaaaatatctctctcaggagtggcatttgcaaagaaattccgaccactaattaatcggtaaggctggtgtcttaatgaaagtaatattttctctagacaagtgcattactttgctaggactgccctaacaaagtaccacagactagattaaacaacagacatttattttctcacagttctggaggctaaaagaccaaaatcaaggcatcagttggattggttccttctaagggccatggggggtggatctgtttttccaggtctctctccttggcttctagatggctatcttctccctctgtcttcacatcatcttccctttgttcaggtctgtgtctaaatttcctcttcctacaaaaataaaagttacatcatattagggcccatcctaacgacctcactttaatcacctctataaagactgtatttcaaaaaaagagtca

SEQ ID NO: 625984 - DNA, 502 bp, Homo sapiens
tgtatttgtgctaaacatcatccagaaaaaacatatagaccgtttccattttctccagaaacttttcttgtacccacgtttagtcagctcagtcactctccagcaatcaacaacctgttgatggacatttggatcatctccagattttgattatgaataagtttgctatgaacattcttgtacaagtctttttgtggtcatatgttttcagttatcttgggcaaattastaggagtgtaattgctggccttgggccaattatatgtttatttttctaagaaactgccaaacagttcaccaaagtggttgtaccattgcacattctcaccagcagtgaatgagagctctgattgttccacatcaccaccagtacttggtattgtcagttttttttttgtttgtttttttagctattgcagtgagcatgaaatggtatctgcattttggttttaatttgaatttccctttgaataataatgagcatctttttattttgtattgg

SEQ ID NO: 625985 - DNA, 563 bp, Homo sapiens
cataatattaaaaaaaatcaaaaaaaaaagaagaaagagaaagctttcttttcaataatgttagaaaatagacattataatgtcatcaaacaaatagtaattgggtattctaccagatactgaggatatcatggtaatcaaaagaaacaaattgcttactctcatggtacttatagtctggtgggggaagggttcttatgttaaatggcctttccacttacttcttaattcttcacttataagagatcaacagatatcattaaattcatgaccttgagagccaaatgctaaaggatgtgggacatgtttatttgttcaactgaagtaggtggactttttattaagtcttttattaagagatcctrcccatattccctggtatttacttactgtcttcattcaggtcagtggtgtccaactgtcagaaactgtgactctccacctgagggcatttttggggtaagctgagatggccagagctaggaagtcaacactctcagaggcagacttcagacaggcctcagccaccttgctcctttactgagatcattctaaagggttcc

SEQ ID NO: 625986 - DNA, 629 bp, Homo sapiens
tatatacacacatatataaatatatacatatccacatgtaaatatgyttatataaactagaagagaattgacttttatttagtattctttctatccatgagaatctctttcattttatttagctaataattaatctttcaattaagttttattattttattattttatctatacagctctcatatttagtaatttttattctcaaagtatcttttttgtaattataaatactttttcataattatattttctagctctatttgctttatatgttcttatatgctttgtatattacttgtgtacccagtaaacttaatgaactcttttattaattctaacattcttcagattgtttcgagtatctgataaaggtagagagctaatccatatcactcagctttttttggtctttctatttgttataaaatttattttttgtttttgccctattgctctaaggctctcagttaaatgttaagtatatgtgattatagtggtcactaccgatcttaaagaaaatactctaactttgaatatgatgttttcgtagaaacttttaaaatatactttattgagttaaggagattctcacctattattagccaagttttgcctgttgtaacagagat

SEQ ID NO: 625987 - DNA, 645 bp, Homo sapiens
tctggattggaacccctttccagtaacatctttctgacgacccagaggggactatagtgtggaaactcccaactcaaaggctaactttggttaagtgttggggtctgataacatctttctcatgaaccacaagtgggacaatactgaaaatacttctcaacccaaaggaaacagactgcagcactaattggccaactttgggtaattggggtacccaagtaaaggatgggattgggttagaggtgcaacttaggggagttagagtctctcctgaaacagagtgggttagagactcatcttaataaaaggcaagaacgcttaaccaaccttgggttagaggcccaaattagaagagttatcccttctaagatttagggagttagaggcctctctcagtaaagtccttctyggctaagaatgggtttgacactattaactgctattctctttcaaataatctgccttgcactctttgctgacagctatgggtgacaggattaggcatgaacaggatcgtgggacatggggagctttttcttccctaaaaggggaaacttgagagctgatgggactgctgaaaaatatcccttcacagctgacaagcggccacctgaacttttgattcagtgttgctggaatgggtgg

SEQ ID NO: 625988 - DNA, 552 bp, Homo sapiens
gttaagttgatcaccagtagccaatggtttartcaatcatgcttatgtaacaaagactccataaaaaccccaaaaatcagtgttcagaggtttttcggatgactgaacacatggagattcttggagggtggtgtattcagagagggcctggaagctccatgccccttccctcaccccatgccctatgcatctcttcatctggtgttcatcattattcttcgtaatatcctttataataaaccagtaaaggttagttaagtgtttttctgagttctgtgagctgctgtagcaaatcaatcaaacccaaggaggggtttttgggaaacccgatgtatagcttggtcagtcagaagcacaggtaaaacaacctggagcttgcaattggcatctgaatggaaaacagggcagtctcgggaattgagtcctcaacctgtggaatctgatgctatctccaggtggatagtgtcagaactgagctgatttagaagacacccaactggtcaggattgattgattagttgctggtgagaagaaacccctacacattttggt

SEQ ID NO: 625989 - DNA, 552 bp, Homo sapiens
gttaagttgatcaccagtagccaatggtttagtcaatcatgcttatgtaacaaagactccataaaaaccccaaaaatcagtgttcagaggtttttcggatgactgaacacatggagattcttggagggtggtgtattcagagagggcctggaagctccatgccccttccctcaccccatgccctatgcatctcttcatctggtgttcatcattattcttcgtaatatcctttataataaaccagtaaaggttagttaagtgtttttctgagttctgtgagctgctgtagcaaatcmatcaaacccaaggaggggtttttgggaaacccgatgtatagcttggtcagtcagaagcacaggtaaaacaacctggagcttgcaattggcatctgaatggaaaacagggcagtctcgggaattgagtcctcaacctgtggaatctgatgctatctccaggtggatagtgtcagaactgagctgatttagaagacacccaactggtcaggattgattgattagttgctggtgagaagaaacccctacacattttggt

SEQ ID NO: 625990 - DNA, 561 bp, Homo sapiens
ggtgagctgagaaggagtctagaggagagcagcaagtgcagagcctggcattctctgggaatcccaacaggactgtatttctggaatggaggggacaagagtgagaaagttcccacagacggttaggtcagggattttgaatttctgctgctaaaggtgctgaggggaattttataaagctgtaaggagggtgccgtaagagattcaccatcagaggagtacttggaccagatagcctttaagggtccccaggaaatgccatgattcctggttgttgtaagrtgcactttagtctctgagcaggcgtctttaacttcaaaaccagtcaggaaaaaacaacgaaaagtcaaattcaaagttgctccctctttttttttttctttttttctggcttctttttttcttttttatttttttatactttaagttctagggtacatgtgcacagtgtgcaggtttattacatatgtatacatgtgccatgttggtgtgctgtaccccttaactcgtcatttacattaggtttatctcctaatgctatccctccccccttcccccacc

SEQ ID NO: 625991 - DNA, 561 bp, Homo sapiens
ggtgagctgagaaggagtctagaggagagcagcaagtgcagagcctggcattctctgggaatcccaacaggactgtatttctggaatggaggggacaagagtgagaaagttcccacagacggttaggtcagggattttgaatttctgctgctaaaggtgctgaggggaattttataaagctgtaaggagggtgccgtaagagattcaccatcagaggagtacttggaccagatagcctttaagggtccccaggaaatgccatgattcctggttgttgtaaggtgcactttagtctctgagcaggcgtctttaacttcaaaaccagtcaggaaaaaacaacgaaaagtcaaattcaaagttgctccctctttttttttttctttttttctggcttctttttttcttttttatttttttatactttaagttctagggtacatgtgcacartgtgcaggtttattacatatgtatacatgtgccatgttggtgtgctgtaccccttaactcgtcatttacattaggtttatctcctaatgctatccctccccccttcccccacc

SEQ ID NO: 625992 - DNA, 548 bp, Homo sapiens
aagtaatacaaagatccatagatttacaggtttggaaaaatacatatatattggttggatttcgatcctgtaaggttataaagaatgtgtttccatagtccatctgtttttagattttagtcaattaattccatccacacatgaatctccacagcagaactaataagaaagcaacatctgctggttatagtagggtgaaatatagcattttttgtttttacaaaacttgagtttttaaaaaatctacaaaattaaaattaacactgaaggagcagcataagacctcattattgccacaccactactttaagaacaaaaccagacatactcaagacctttttcatcaaagactagggggttccaaatttactaaaacctaatagatgccaaagttaaaatagtttaaattcaagattgcatgcatttttgctatttctacctcctgcttttgagagtaaaagctatttatatgtacgtgatatttaaatctctggaaaagctccagagaaacattgaaacaaygaataaaggctttggtgttttaatta

SEQ ID NO: 625993 - DNA, 576 bp, Homo sapiens
atggtaatgctttcatgggggttatatatatcaaacttaccaaactgtatactttaaatatgtgcaatttcttgtatgtcaattataccataatgaaaaagatccctatataaacctcactcccagagattctgattcagttggtccagggtgggatcttggcatgaaaatatttaaaaatctcctgaaatcacagcccaggtgccaagggatgtgcctgtagtctcagctacttgggaggctgatgtggaaggatcacttgagcccaggagttcaagactagcctggacaacacagtgagatcccattgctatgaaaaaaaaaattcaccaaataattaagaatgtgcagccagggttaaggtatagaatcttgcacgccacagtaatgactttgttaatgatctgcaataagattgaaagccagttaacattgcaagaaattcaaatcaaaacttccctgccagccccagtgccttttgagaatatgggccccttataggcaarcagttacaaatgaaacttttatgaactctgatcaagagtctgcaggaccatttctacaatgaagtatatc

SEQ ID NO: 625994 - DNA, 577 bp, Homo sapiens
ggccccctcctaggattcgtcttggaaaaaggctttgacaatactaacacaaaagagcacatccatatgtgccaagtttctctgcatcactgtggcataagcagtgacagaacctctaatttttaacaggggacaagtaccctgagcaaagactgtatttccgagcatcccatatggctaagtgttgtcctgaggccaagttctgaccaatgatgtaggagcagacgtgcaggacatctaggatggatgttgccttgaagggtggttggcacttctgtttttcccctcmtccaccctggatgtgatgactggtgtccatgaatgcaaggaccatgtagaagggatgtaaaaagatgagctggaaggggcctggctccctgaggacttactggaataaagccatcatcccagtcctggactacctacctctggtcttgtaagtcacagggaaatagaatcccatgatgttgaagctgctgttattttgggtttctgttacagccaaacctaaccctaactgataaagctatcatggggattttttttttctctttttcttttttgacggaggatcaca

SEQ ID NO: 625995 - DNA, 566 bp, Homo sapiens
ggatgatcagagtatacgcgtccattactcctattatctactcaccttaaactctgctgcttggttaaagttttggaacctttatcgagtcacttccctgttcaaaaacctttgatggcttccagttttctagagcctaagtagccactgtgtgtcatacataccaagaaactcccatccagcatttacagcaaacatcagtaatccatcatggtgatttttttttttctatttggttgtagttttatcaataaatcaaaaactggcacttgaattgaaacacttttgtcatcgttgacctagtwtgctgtatagaaacactggttttggacttagacaaacttgggttcaaatttcagctctctgccactcattggtggggtgatcctggccaagtcatttcacctatgggagcctcactctcttagcatataaaatggagataatagaaactattcaacagagtttttaggtaatgcaggtaaacaatttggcatagtacctggtatatattgcttagtaaattaaagttattatttttatcactgttaccataatgttcatta

SEQ ID NO: 625996 - DNA, 560 bp, Homo sapiens
tgtgtcacatgggcaggcattctgcttctatcatagtttctagcccagtaccatgtctggagttattttttttaaaggcacatgtttcatcagcatattgcatggttttgatccacgctggaaagtgagaacggtaaaactgggttaatttacctcacgggagtcatcayaaggatcagagtagataaggctggtgaaagtattataccatcacaacattattgttgcagaaaagattgttactttggatgttgcttggaaatacattcgcggtgagcagagacttaatttttttttattctagccttttgatgactatggtattacttataaaaggattttatctcaagcaaaacaaaaaagcaatgtttaacaatagctctagttgaagatactgcttagaatctaggccgggcgtgatggctcacacctgtaatcccagcactttgggaggccaaggcaggcagatcacgaggtcaggagtttgagaccagcctggccaacatggtgaaaccccgtctctactaaaaatacaaaaattgctgggcatggtagcacac

SEQ ID NO: 625997 - DNA, 560 bp, Homo sapiens
tgtgtcacatgggcaggcattctgcttctatcatagtttctagcccagtaccatgtctggagttattttttttaaaggcacatgtttcatcagcatattgcatggttttgatccacgctggaaagtgagaacggtaaaactgggttaatttacctcacgggagtcatcataaggatcagagtagataaggctggtgaaagtattataccatcacaacattattgttgcagaaaagattgttactttggatgttgcttggaaatacattcgcggtgagcagagacttaatttttttttattctagccttttgatgactatggtattacttataaaaggattttatctcaagcaaaacaaaaaagcaatgtttaacaatagctctagttgaagatactgcttagaatctaggccgggcgtgatggctcacrcctgtaatcccagcactttgggaggccaaggcaggcagatcacgaggtcaggagtttgagaccagcctggccaacatggtgaaaccccgtctctactaaaaatacaaaaattgctgggcatggtagcacac

SEQ ID NO: 625998 - DNA, 560 bp, Homo sapiens
tgtgtcacatgggcaggcattctgcttctatcatagtttctagcccagtaccatgtctggagttattttttttaaaggcacatgtttcatcagcatattgcatggttttgatccacgctggaaagtgagaacggtaaaactgggttaatttacctcacgggagtcatcataaggatcagagtagataaggctggtgaaagtattataccatcacaacattattgttgcagaaaagattgttactttggatgttgcttggaaatacattcgcggtgagcagagacttaatttttttttattctagccttttgatgactatggtattacttataaaaggattttatctcaagcaaaacaaaaaagcaatgtttaacaatagctctagttgaagatactgcttagaatctaggccgggcgtgatggctcacacctgtaatcccagcactttgggagrccaaggcaggcagatcacgaggtcaggagtttgagaccagcctggccaacatggtgaaaccccgtctctactaaaaatacaaaaattgctgggcatggtagcacac

SEQ ID NO: 625999 - DNA, 442 bp, Homo sapiens
ctctctgcagagaggacatatgggaacccaggtgcatgatccagggcagcatcttcttagctcagaggaggggttgagctgtcttggagggctgggtagagtcaggacccagtcagcaaaaacctgcatcatctgggtgccacccatgccaggaacagttagcagtagccacctgccctttctcccttagggyagctatgggctgacacctgaatgctccctagagcctctagacctgaggccaccctcaagagcagtgtcttctgaggggaataagtgaccaaaagggatagaagcctggtaatggcctgtaatcagtttttacactaaagggaaaaagtagtttaacctaaggtcttcctacttcttcatccaccaaggctgaaaaagtaaatattatttcattagggttttaagttgacctgaagaaaggaggaccaaa

SEQ ID NO: 626000 - DNA, 596 bp, Homo sapiens
gagagtcaggaggtctgggtttgagtctttggttcaggcctcatcaccttagtcacttcccctctctggcatcctcaatttcctcattttgaagtgaggggcctgagtgagataacaactaagatccctgctgagttaatgcaatattactttaaaaaagaagagagaaagaagggatggaaggagaaaaaaatgggagggaagaaggaaggaaggtgggatcagcaagtagagtagtagaatagaattaatttaactataagtgacaggaaactctaaataacagggacaagcaagtttgaggcttatttttctttcacatgaaagtctagagattggctaaaagggagggtcagggacccaagtttcttctatcttgttactctgtccagcatggcttccattgccaagtttgtatcatgatccaagatggtggccagccatctacttacactccrttgatgagaacttagtcttatggccacacctgtctgcaaggggatctatcatatgtagtttttgttctaattagccatggggctcctactgctgaggagtaggaggaagacagatattaggggatgtgtaacaggccc

SEQ ID NO: 626001 - DNA, 493 bp, Homo sapiens
agccagatgcctagaattttctttcttattgtagcctatacctgagattccttgtgttatcatttctgtgtctgaggttgctggagaatcacaaaagaggagaaggataaaagaggttagaaaaaccaaggcctttagtctcatggttgtagcccaaagagggcatccctgccttccttccccaccttccacaagctgtgaaaaagagtggaggagctggtgcccagaaagctaggagatgacaagtgaaacttgcagcagggaagagagggcctgacacctccacaggtgctcatctgttacgaagcttcggctcccttacatatacttctgcattaggagggagacacccaaaccaacatcccaggcagaggaaagagagtaaagccacttgagagaggcccatcttcaccattcaacaatcgcttctgaccatggtcrcatcctcacccacctctcagttctttataacttcagagaggaaatcacaaag

SEQ ID NO: 626002 - DNA, 443 bp, Homo sapiens
aggctgcacatgagaaagtgawgcagaaacaggtcaagtaactttaacttgtctgatgtcaccaagctggcaagtggaattcaaattcacataggcctgattccaaagccagagctcttttctaacactccaacgaactaacatccttatttgaaggttggaactagtaaggcatataatcgtggagaaggcaattaagtatctctgaacctggggtttcttcacaaatgaaggtggactagatgaatgctaaggtccctttccctaaaatgctctctttctattgatctagggctagtggactctggagggagagctcacaccaatctcaagcaacagcagcaagtaaatcaacaataaatatttatttagtgcccactctatatgagacaaattatagctttattttaattattctaacaagtctgtgagggcctgattat

SEQ ID NO: 626003 - DNA, 443 bp, Homo sapiens
aggctgcacatgagaaagtgaagcagaaacaggtcaagtaactttaacttgtctgatgtcaccaagctggcaagtggaattcaaattcacataggcctgattccaaagccagagctcttttctaacactccaacgaactaacatccttatttgaargttggaactagtaaggcatataatcgtggagaaggcaattaagtatctctgaacctggggtttcttcacaaatgaaggtggactagatgaatgctaaggtccctttccctaaaatgctctctttctattgatctagggctagtggactctggagggagagctcacaccaatctcaagcaacagcagcaagtaaatcaacaataaatatttatttagtgcccactctatatgagacaaattatagctttattttaattattctaacaagtctgtgagggcctgattat

SEQ ID NO: 626004 - DNA, 443 bp, Homo sapiens
aggctgcacatgagaaagtgaagcagaaacaggtcaagtaactttaacttgtctgatgtcaccaagctggcaagtggaattcaaattcacataggcctgattccaaagccagagctcttttctaacactccaacgaactaacatccttatttgaaggttggaactagtaaggcatataatcgtggagaaggcaattaagtatctctgaacctgggktttcttcacaaatgaaggtggactagatgaatgctaaggtccctttccctaaaatgctctctttctattgatctagggctagtggactctggagggagagctcacaccaatctcaagcaacagcagcaagtaaatcaacaataaatatttatttagtgcccactctatatgagacaaattatagctttattttaattattctaacaagtctgtgagggcctgattat

SEQ ID NO: 626005 - DNA, 689 bp, Homo sapiens
agtaactttaacttgtctgatgtcaccaagctggcaagtggaattcaaattcacataggcctgattccaaagccagagctcttttctaacactccaacgaactaacatccttatttgaaggttggaactagtaaggcatataatcgtggagaaggcaattaagtatctctgaacctggggtttcttcacaaatgaaggtggactagatgaatgctaaggtccctttccctaaaatgctctctttctattgatctagggctagtggactctggagggagagctcacaccaatctcaagcaacagcagcaagtaaatcaacaataaatatttatttagtgcccactctatatgagacaaattatagctttattttaattattctaacaagtctgtgagggcctgattattatcctcctttttatagaggaggagaccaaggctcagagaagttcagaagcatacccaaagtcacacagttaataagyaaacccaggaatgtctgactttttaagtccacgctcctgtgtccaccactttatatttgtaaggaaggtggggaaaggatggagggcaggtattgtaagagatggtcatttaaggccagagaaataccttacagagtggtcacctggcagagtggtcagaggtaaatcagttgagataagcagaggtgcttagaacaggtaatt

SEQ ID NO: 626006 - DNA, 639 bp, Homo sapiens
gtcaaggaaagcaatctctatatatcaggtatttttctggatcctgcaatatagaaaccaaagttacaatcttgcctttacaaagctcaccatcttcttgaagaaagggactgccaacaggcaccatgatgcagcatgtggaggtaggcccaggacacagtagagcacccaggcagacaccaacctagatcygggaagtgagttgtgggagaggaagttgggaaggatttatagaaagaggcaagtgactccagggtggaatttaaaaagatgagtagaaattagccactcttccgtatattcaataaatattcaaagagtaccctctgcaccatatactgagataaggcattctaagtacagagttggtggaaacagaaaaagtccctgctatggtttgattgtgacccccaaagttcaggtgttggaaacttaattttcaatgcaacagtgttgagaggtaggccctttaagaagtgattaggtcatgagggttccacctcatgcatggattaatgtcattattgtgcagggtgggtttgttctaaaaggaagtttagtccctctcacgtgcacacatgcttgctctcttacccttctgccttctgccatgggatcacgcagcataaatcctcacca

SEQ ID NO: 626007 - DNA, 639 bp, Homo sapiens
gtcaaggaaagcaatctctatatatcaggtatttttctggatcctgcaatatagaaaccaaagttacaatcttgcctttacaaagctcaccatcttcttgaagaaagggactgccaacaggcaccatgatgcagcatgtggaggtaggcccaggacacagtagagcacccaggcagacaccaacctagatccgggaagtgagttgtgggagaggaagttgggaaggatttatagaaagaggcaastgactccagggtggaatttaaaaagatgagtagaaattagccactcttccgtatattcaataaatattcaaagagtaccctctgcaccatatactgagataaggcattctaagtacagagttggtggaaacagaaaaagtccctgctatggtttgattgtgacccccaaagttcaggtgttggaaacttaattttcaatgcaacagtgttgagaggtaggccctttaagaagtgattaggtcatgagggttccacctcatgcatggattaatgtcattattgtgcagggtgggtttgttctaaaaggaagtttagtccctctcacgtgcacacatgcttgctctcttacccttctgccttctgccatgggatcacgcagcataaatcctcacca

SEQ ID NO: 626008 - DNA, 497 bp, Homo sapiens
tgtttatcctttcaaagaaccagctttttgtttcattgatcttttgtatttttttgtttcaatttcatttagttctgctgttgtctttgatatttattttcttctgctagctttgaatttggtttgttcttctttctctagttmcttgaggtgtgacatttgcttgtcagtttgtgatcttccagactttttgatgtaggcattcagtgctgtaaactttcctcttagcactgcttttattgtatcccataggcttcataacttgtgtcactagtatcattcattttgagaattttaaaaatttctatattggttttatttttaatccagaaataatttaggagcagattgtttaatttccatgtacatgtatagttttgaggatttcttttggaattgatttctaattttattctgctctgctctgagaagatactggctgtgatttcaatttttaaaaatttattaaaacttgttttgcaacccatcgtatgatc

SEQ ID NO: 626009 - DNA, 598 bp, Homo sapiens
tagtacatttagaactttatgcatttcctaaggccaacactgactactattcaggaactctttaaaacaccagtattataaaacaaataggacataggctgtttcctaaaagagctcacagtacaacatagaaatgcaaaaattcttcttctttcaaaatatagccatacagagagataagtggcggcacaatgaagaagtaggtaaattttgttggagagtccaggaaagcttcacagaagttgaccttgaagaagagacttaattggagatattcccagctgggtgtagaaatggggaaggagaggagaattcaattcaggaatgataatgcaatatgaacagatgtacagatgtataatctgrgagctggaagaagtgtattatggttagagtgtggaatgtaaatgtgatacagcaacagataatagtgtccagatcgtggaaaaccatgtgctaatgggtctggactttacctgtaaggagaagctattgaaaggattgaagccattgattaaaatgtctcctaaatatatacaaatattgtgtttcaattaaaacacaaaataatattttcattttaaaacagatcaccatg

SEQ ID NO: 626010 - DNA, 520 bp, Homo sapiens
aggttagagaaaaaaaaatttatttcaaataggctttcccctaatgagcagattgcattaatttccttaaaaaatttacatgaatacttccccccaaaaaagtccatatattttttatgccatttgtctttgtagaaagtggcattttatgcaacttgtctttggttctatttccaaatatatgctctaaaattagcatataaatttattaagtgctcaatggcatgtaaatccactagataaattataaagaaaatgaaagatatatttacagttacattcagttytgaattttaaaaccaagagaaaaaacaagacaaaacaattaaaaatattcaaaaagggttacacaaaaatctaagaaaacagtgcaatgcagaacgaactataagaaaaaaaaaatctatgccaattaaaaaaaacaatgggactcttttattgtgcctacacgtgaactcaacttcaagagacactgaatgcattttagcaaatttgtcaaaattggtccaattgttcaatt

SEQ ID NO: 626011 - DNA, 482 bp, Homo sapiens
agggttctcccctcacccactagaaatatccagtgatagttcggcaattatcacattgcctatctgagagtgataatctagcagagccagggagtggccatttcctgctggtccacatctttaacaccaaaatgctaactgaacacagacccctgggagaagaaactttctgggcatgcatattaagaaacaaaaatggcgaagtatgatctcctgggtacactccactggaargagtaagaaagcctcagctgggcatgtgtataactccctaaacatgctgcacgtgctcacttcccaagggtaaggagggctctgcgcatgtgggcagcccaccctaagggaagaatcatggaaaagaggtgaggttataaaacccttaggatcagggttaaatggagcacttgaccttctctttttaaccttcatgtgcctgcttgggtctcttccaagttcaccttcctttctttcctgttttaagg

SEQ ID NO: 626012 - DNA, 527 bp, Homo sapiens
atgtagctaaaatgcacatgtattcccctctcagggattttttttcagaccatggttgaaaaatatctgctctttaaattattccattgctttacagaggaagtattaattacatgactgtaagcatagatcaggctgggatgtaattacagggcttactttgtctctgttgtccaacagaattaggcaggaagcattcatgatgccagcaatttaaggtgttttgcagcccattatgtttctggttctctcaagaacctaagcatggatcaaatgacatttctgttgcccagttgtctggaaaaagaacaaagcaagtatgaccaaaaatacatttttataagttttatgtttgtacattgctagaaaatgttacatacaaccttaaaaatgtagtcttttatagcatcattctggttatctaatttttctctaatttgtggtagagtgagtccattattagckttacatttggttatcatattaaacaatgtagttgaggagataaatacgtggttgtattatat

SEQ ID NO: 626013 - DNA, 399 bp, Homo sapiens
gcagtgatgtctcattgtagttttgatttgtttttctttgatgattcactttgttgaacattttttcacgtatttgttggacatttgtacatctttggagaaatgtttattcaggttttgcccattttaaaattgcgttatttatctatttgctgttgagttgggtgcattccttatatactttggatattaatcccttatctgatatatggtttgcaaatagtttctcccattccayaggtttccttttcattttgttggttgtttcttttgctgtgcaaaagctttttaacgcttttcccatttatccctgagaatacttgccagcagcacttatgtctgcatcatttaccccgagataactttgccatgaaatatctggcttttattactatttca

SEQ ID NO: 626014 - DNA, 546 bp, Homo sapiens
ttttttcacgtatttgttggacatttgtacatctttggagaaatgtttattcaggttttgcccattttaaaattgcgttatttatctatttgctgttgagttgggtgcattccttatatactttggatattaatcccttatctgatatatggtttgcaaatagtttctcccattccacaggtttccttttcattttgttggttgtttcttttgctgtgcaaaagctttttaacgcttttcccatttatccctgagaatacttgccagcagcacttatgtctgcatcatttaccccgagataactttgccatgaaatatctggcttttattactatttcacatctctctagtgtatcgactttggaaacaaaatacattgttctatttatagcattctggttttagtagtggtatttccatttacaaaatatagtgaatctygattgctgaaaatgtcaaatcctagaaaatgcagcattcctatacgttgttaacattgttctctaacagttgttggcagatttatttgatgaatctgatttttcc

SEQ ID NO: 626015 - DNA, 479 bp, Homo sapiens
gaattcaggaggttgttattaagctaatcagggaggcatcagagaaaggtgaatctcaatgcaaggaaatccaaaaaacaatacagtaagtgaagggaggaatattcaagaaaatagatagcttaaaggaaaaacaatcaaaaattcaggaaacattggacacacttatagaaatgcaaaatgctctggaaagtctcagcaatagaattggatgagtagaaaaaagaaattcagagctcaaagacaaggtctttgaattaacccaatccaacaaagacaagaaagartaaaaatatatgaacaaagcctccaagtagtctgagattatgttaaataaccaaacctaagaataagcggcagaaagaggaagaaaatacatctaaaagtttggcaaacatatttggaagaaaaatggaggaaaacttccccagccttgctaaagacctagacatccaaatcaaagaagcacaaagaactcc

SEQ ID NO: 626016 - DNA, 479 bp, Homo sapiens
gaattcaggaggttgttattaagctaatcagggaggcatcagagaaaggtgaatctcaatgcaaggaaatccaaaaaacaatacagtaagtgaagggaggaatattcaagaaaatagatagcttaaaggaaaaacaatcaaaaattcaggaaacattggacacacttatagaaatgcaaaatgctctggaaagtctcagcaatagaattggatgagtagaaaaaagaaattcagagctcaaagacaaggtctttgaattaacccaatccaacaaagacaagaaagagtaaaaatatatgaacaaagcctccaagtagtctgagattatgttaaataaccaaacctaagaataagcggcagaaagaggaagaaaatacatctaaaagyttggcaaacatatttggaagaaaaatggaggaaaacttccccagccttgctaaagacctagacatccaaatcaaagaagcacaaagaactcc

SEQ ID NO: 626017 - DNA, 571 bp, Homo sapiens
ccaaacccaaactcagcagaagaaaggaaataacaaagatcagagcagaaataaatgaaattgaaataatacaaaagataaatgagacaaaaagcttgttcttggaaagataaataaaattgatagaccattggcaagattaaccaaaaaaagaagagagaaaatccaaataacatcactaagaaacaaaaagaagatattacaactgataccactgaaatatgaaagatcattcagggctactttgaacaccttcatgcacataaactagaaaacctagaagagatggataaattcctggaaaaagacaaccctcctagcttaaatcaggaattaggtaccctgaacagaccaataacaagaagcgagatagaaatggtaatttaaaaattaccaacaaaaaaggtccaggaccagatgaattcacagcagaattctaccagacattcaaagaagarttggtaccaatccttttgacactattccacaagatagagaaagagggaaccctccttaattcattttatgaagtcagcacgaaaaccaggaagggacataaccaaaaaagaaa

SEQ ID NO: 626018 - DNA, 526 bp, Homo sapiens
attccacaagatagagaaagagggaaccctccttaattcattttatgaagtcagcacgaaaaccaggaagggacataaccaaaaaagaaaactacagaccgatattcttgacgaacatagatgctaaaattcttaacaacatgctagttaattgaatccaacaacatatcagaaagataatccaccatgatcaagtgggtttcataccagggataaagagatggtttaacatatgcaagtcaataaatgtgatacaccacataaacagaattaaaaacaaaaatcacatgatcatctcaatagatgcagaaaaagcatttgacaaaatccagcattgctttatgattaaaactctgagcaaaagtggcatacaagggacatacttcagtgtaataaaagccaactatgacaaacccacagcmaacataatactgaatggggaagagttgaaagcattgcctctgtgaactggaacaagacaaagatgcccatgctgatcactcctcttgaagatagtactggaatt

SEQ ID NO: 626019 - DNA, 526 bp, Homo sapiens
attccacaagatagagaaagagggaaccctccttaattcattttatgaagtcagcacgaaaaccaggaagggacataaccaaaaaagaaaactacagaccgatattcttgacgaacatagatgctaaaattcttaacaacatgctagttaattgaatccaacaacatatcagaaagataatccaccatgatcaagtgggtttcataccagggataaagagatggtttaacatatgcaagtcaataaatgtgatacaccacataaacagaattaaaaacaaaaatcacatgatcatctcaatagatgcagaaaaagcatttgacaaaatccagcattgctttatgattaaaactctgagcaaaagtggcatacaagggacatacttcagtgtaataaaagccaactatgacaaacccacagcaaacataatactgaayggggaagagttgaaagcattgcctctgtgaactggaacaagacaaagatgcccatgctgatcactcctcttgaagatagtactggaatt

SEQ ID NO: 626020 - DNA, 533 bp, Homo sapiens
ataacacataatatatgtgtgcattaaaaaatatatatagttgaggctgataaggtaagaataaattttacaaatggtatatagattgatatgattgttgaaatgagtgttctatttaacttccttaaaaaggaataatgttatagaacttcctgctgccttagtttattaataccatgaaaaggtagtgtccagtttgttttcaatttaattttaaataacaggcactaagacaaaataaacattctagctgttagaagatgatttaccaggagagttgtggaaaagtaccattttaaatctccaattatgtgtttctgtgtttaccaaagcttgtacttaacacagataaagagatatgctctactgaggaagtggctttcaaaaayaaatttgataataaattgaagtgatcatttcaaaccatgttccctttctttttgccactcccttgaagttgtatcttatctccttcccccagctttgatgaatttttgtaatctttgaacttccattaccttcaaatatgattc

SEQ ID NO: 626021 - DNA, 524 bp, Homo sapiens
tgttttggctttttgctcatagcacacacgtacctacttatttcgcctccaccttacttttgggggacattgttattagcastcttgtgtcctggtgatttcaagtctttaagaaaatggatattagtcctttttcaaaaaaaaattgaacagctcatcttagatctttctaagtggctcttgaattcttctatggcataattttctatacacttcagaaactttcatatctgttcctttattttttgtttcagaagtattttgcagattatttccaaagagctctataaaaaatcctcctattctaccacctcttagtaatgtggctttatcagtctttttttttaatattttaattttcaggttcaggggtacatatgcaagtttgttatataggtaaactcatgacttgggggggacgttgatgtgcagattatttcatcactgaggtaaagcatagtacccaatagtctttttctctgaacctctccctcttctcatgctccaccctcaagtaggcccca

SEQ ID NO: 626022 - DNA, 542 bp, Homo sapiens
gccatctatacataattatattatctttatttttagtgttcattattttcccttactgcacttcttggatctcgagaacaatgttgagaagtagtcatggcgtttcagtcaagacttggttgcaaatagcatatattaaacttagctaaacagtggaagttattatgagattcacacagttgcagaaagaagagtcattgtagcttggcctgaagaacaatctaaattagtaactgaaattcagccagcacttgtctcaatagctcaatttttaattttccctctattttggcctccgttctacagctgctgacttcccctctactgacggagatcatagatacagagctcttcatgtttcatatctcaaaacttttgctaccacttgggattgaatctctttcttcagcttcagttcgaaaataatccagaaaagaataatgattttcttggcttacctaagagttttagccttaaacaatgacctagagattggtggcacccttcacycctaccatatacttgtcttgctgtggggagaa

SEQ ID NO: 626023 - DNA, 516 bp, Homo sapiens
tcttcgcatcaaaaaaaaagggccacattgtataacactaagtaacctgtttaatatatgcagtccctgtttcttgtttccaaactgccctagacatgtggttatatttctaacttcttgacacatcagtaatcaggmcctaaactggatacctcccatacctttcatcaaactaaataacagattcacaatctccagacacccctgcattaacaattgcctacatttcagtgtgtctgtttatgcaactagatgtttatctagcttgtcttcacgagaactgggtcctgtctgtattaaacattggccttcccctaacatctagaagggagcctccttctctaatgggtagaacctgtacacccacaactcactcgcacatccactgggctgcattcctagaaggactgtcaaactgaagggtgtgtgtgtgtgtgtgtgtgtgtgtgtgtgtgtgtgtgtgtgtgtgtttaaatcagagatgaccttatgtgcatacagaatgtaggtacaaga

SEQ ID NO: 626024 - DNA, 561 bp, Homo sapiens
ttatatctgtttttacatcacaatcttttggtcatgcactttgaaagaatattttacctatgcatggcttgtggtattggtcataaggaaaatatatcagtttgctaagttatgcagctctttcagatgttaacacatttcattatgtaatataaaaaatcacactcattaatatcatcacggatmttgacagaaaagtcttgaagtatcaagaagctgttaagatcctggtggtgaatacaagtttttaaaaattccaatttttattcaaaaagctcaaattttatcacaggcaacaaacactatcagttgttttccttgaagtgacagattcttgttcatcttcaagaaaatgtctgccaaatatccatgtatgcaaaaccgtatttagtctgtcaggcattctttcaaataaaaagatacatagagcattgagtcagcttgtcattctaacaatcacacaggtgcttttcctggggatatcacccatacttcagtggtggcagaagtgtgtaaaagcccattttatcacacagaatattacaaatacactaacttaag

SEQ ID NO: 626025 - DNA, 640 bp, Homo sapiens
cttctttctgccaacttcattcttagtttcttcttcttctgctagtttcctgaagtgtaaaattagggtacttatttgaggtcttcttttttaatataggcatttatcactataaatgtccttcctagtactacttttgttctgtacatttttttctgcaatatttttatttttgttagtctcagggtattttctaatttccttattacttaaaaaaagtgtktgtgtgtgtgtatgtgtgtgtgtgtgtgtgtgtgtgtgtgtgtgtgtgtgtgttttagaagaagacatatgtgttatattgcgtaggctggtcttatacccttgaacttgagtgatcctcctgcttcagcctcccagtagcttggactacaggcacatgccactgcatcacctctgattattttctttgacccaattttgatcaaaagtacattgtttagtttccacatatttatgaatttttcagttttcattcagctattgattcctgagttcacttaatttcttcaaaaaagatacctattatttcaatatattaaaatttgttaagacttgctttgtgacttagcatctgatctatcctagagaatactccatgtgcatttgagaagaatggatattctacttattatttaaa

SEQ ID NO: 626026 - DNA, 520 bp, Homo sapiens
cttcttctgctagtttcctgaagtgtaaaattagggtacttatttgaggtcttcttttttaatataggcatttatcactataaatgtccttcctagtactacttttgttctgtacatttttttctgcaatatttttatttttgttagtctcagggtattttctaatttccttattacttaaaaaaagtgtttgtgtgtgtgtrtgtgtgtgtgtgtgtgtgtgtgtgtgtgtgtgtgtgtgtgttttagaagaagacatatgtgttatattgcgtaggctggtcttatacccttgaacttgagtgatcctcctgcttcagcctcccagtagcttggactacaggcacatgccactgcatcacctctgattattttctttgacccaattttgatcaaaagtacattgtttagtttccacatatttatgaatttttcagttttcattcagctattgattcctgagttcacttaatttcttcaaaaaagatacctattatttcaatatattaaaatttgttaa

SEQ ID NO: 626027 - DNA, 640 bp, Homo sapiens
cttctttctgccaacttcattcttagtttcttcttcttctgctagtttcctgaagtgtaaaattagggtacttatttgaggtcttcttttttaatataggcatttatcactataaatgtccttcctagtactacttttgttctgtacatttttttctgcaatatttttatttttgttagtctcagggtattttctaatttccttattacttaaaaaaagtgtttgtgtgtgtgtatgtgtgtgtgtgtgtgtgtgtgtgtgtgtgtgtgtgtgtgttttagaagaagacatatgtgttatattgcgtaggctggtcttatacccttgaacttgagtgatcctcctgcttcagcctcccagtagcttggactacaggcacatgccactgcatcacctctgattattttctttgacccaattttgatcaaaagtacattgtttagtttccacatatttatgaatttttcagttttcattcagctattgattcctgagttcacttaatttcttcaaaaaagatacytattatttcaatatattaaaatttgttaagacttgctttgtgacttagcatctgatctatcctagagaatactccatgtgcatttgagaagaatggatattctacttattatttaaa

SEQ ID NO: 626028 - DNA, 560 bp, Homo sapiens
ctcaatttgcaattggtttacattttgataaacctatcataagtaaaaataccaaaagtttaaaatgcatttactatctcaataaacccatcataatattaaacaattgtcartcaaatttttattaagtccagatgctccttaagttatgataggcattcttccccataaacccatcagaaagtcaaaaactcataagtcaaaccaccataaattggaactatctttatatatttgtaattattatgtcttcagagtaaatgagactttttattaaataatgtccttctatctttgccagtttttaactaaatgtctattttgtatgatataaatattgccatcctgctctcttttggttgacatttgcatggaatttttttttcatcccttcacttttggcctgtgtgtgtcataaatctaaatgagtttcttatagacagcatagagtggggtcttttttattccattcagtctcatcactgggaaatttaatccacttacacttcaagtaattgttgatagggaagaattagctacttgccattttgttacctgtg

SEQ ID NO: 626029 - DNA, 560 bp, Homo sapiens
ctcaatttgcaattggtttacattttgataaacctatcataagtaaaaataccaaaagtttaaaatgcatttactatctcaataaacccatcataatattaaacaattgtcagtcaaatttttattaagtccagatgctccttaagttatgataggcattcttccccataaacccatcagaaagtcaaaaactcataagtcaaaccaccataaattggaactatctttatatatttgtaattattatgtcttcagagtaaatgagactttttattaaataatgtccttctatctttgccagtttttractaaatgtctattttgtatgatataaatattgccatcctgctctcttttggttgacatttgcatggaatttttttttcatcccttcacttttggcctgtgtgtgtcataaatctaaatgagtttcttatagacagcatagagtggggtcttttttattccattcagtctcatcactgggaaatttaatccacttacacttcaagtaattgttgatagggaagaattagctacttgccattttgttacctgtg

SEQ ID NO: 626030 - DNA, 562 bp, Homo sapiens
atattggaaattaagtttcagtatatgagttttgggggtgaaaccaatgttcagaccataccattccactcctagctttccaaaatttgtgtccttctcacatgcaaaatgtattcattccatcacaatagccagtatcagctcaaaagtctaaagaagtccagagtctcatctaaatgtcatctaaatcagatacagataagattcaagaaatgattcatcctgaggcaaatttgtctcaagctgggagcttatgaaatcaaacaagttatgtgcttccaaaatacaacagtgagacasgcataggatggagattcccattctaaaagggatacataggaaggaagaaaggggtaactattaatagtcccaaataaattcaaaaccctgttgggcgaacattaattatcaaggcttgagaataaacttatttgactccatgtctcatgttctgaaagaattggctgagggtttagactcccaaaactctgagtggccacacctcatggcatttaggcacagcccatgagttgcacaccagtggccccacaaatcaaggagg

SEQ ID NO: 626031 - DNA, 520 bp, Homo sapiens
cacactggaaactgtcatttacattcttttctgaggtcaggtgcctccttactaatttagttacctgtaatctgacaaatacatttttcacaaatgatagctgtaaagatgttgtctttagaaatctgtgcatccatgtgaaaactgtcacctcgctcttaaacatatcttcatctgagagaagaaaatgattctaaaattacaatgctttctgtcagttgggaagtaaggcacatagcagaagcatttaattattctgactgttatctcctcaaccagttaattttcctaaagcaggaactcagctccctcgtgactttggttttacaaatggcagccttcctgacctcaggctccttgcctgccccggggatctccagcttccacagagcctgcggacagtgccagcggtattgcagagccagccttctctgcatcctcacsaagacctgtcagtttccagttctgggctgcacccatccccagagagggccactctgcctgcaggcttccctttggc

SEQ ID NO: 626032 - DNA, 211 bp, Homo sapiens
gtataggataaaaaagattcagagataaataaacttccaagatacatttctataataactggacattcaattcagaactatrtaaccatcagctcagataactgagttatctacaagccacagtgaatacagaaaatggagctactctccaagaccattgtcttagaacctgtggcaagatataacccaaaattcattttttaaattggca

SEQ ID NO: 626033 - DNA, 623 bp, Homo sapiens
gtgttttgtcatagcagcataaaatgaactaagacacccccctctttagagatctttaatgggacaggtgtgaggctcaaatatgaaatgtactcaaacagaggaaatcatccatacattaaaagtaagagagaatatctacaagaatcagattaatcctgttattacatctcaggaattggcaccagctactgccatctccctgggtgattttcaaaggccaagagtttctgcccaatagccccatcgttagtcaaggaccttcatcgttcccatcccctatccatgtactgatcctkctttcccaacaagtccatcccccaaatcaaaatgtacttttccttttttacaaattaaccatacctagactgtttagataaattgtctgtgaattgtctgtaaaggtggaatgaagctcaatccttctggggttaagctactccagtcttctctattcaccatcttttgagaacatcagattgtgtgcatgccaatctgtcaacctaaccccactttatttatctgccctggaaattcctctttatccttaaatacacagttaaagtttcatctttcctctaaagtatcccaggatgccccaagcaaagttaatcacttctcct

SEQ ID NO: 626034 - DNA, 566 bp, Homo sapiens
cttgaacctggggggtggagtttgcagtaagccaagattgtgcaattgcactctagcctgggcaacaagagcaaaactctgtctcaaaaaacgaggaaagattccaggaatttttcttaaacatcacaaatcttttcccatgaggcagatttctccatcagcagttgtaacatataccacctgcatttcctgggttggtatacctctattttcatatttaagatgatcrtttaatttagtatttaaaagttttgcatgcagcatcaaggaaattgttgatctgaaaattatctattacaatttacataatggattattttccttttcaaatatcctggaaagaaaaagggaaataaatacatttgttaagtatatttaaattctatattatatgaatggatttgaacaattaggtttacctagagttttgtaatatactcaattctgttcatagtcacttttaacatctttttatgatttaaatgattcaattttgttaagaagccagggcaataatagatcatctagatctttccctgttcagtgttccattcaccacatcaggc

SEQ ID NO: 626035 - DNA, 566 bp, Homo sapiens
cttgaacctggggggtggagtttgcagtaagccaagattgtgcaattgcactctagcctgggcaacaagagcaaaactctgtctcaaaaaacgaggaaagattccaggaatttttcttaaacatcacaaatcttttcccatgaggcagatttctccatcagcagttgtaacatataccacctgcatttcctgggttggtatacctctattttcatatttaagatgatcgtttaatttagtatttaaaagttttgcatgcagcatcaaggaaattgttgatctgaaaattatctattacaatttacataatggattmttttccttttcaaatatcctggaaagaaaaagggaaataaatacatttgttaagtatatttaaattctatattatatgaatggatttgaacaattaggtttacctagagttttgtaatatactcaattctgttcatagtcacttttaacatctttttatgatttaaatgattcaattttgttaagaagccagggcaataatagatcatctagatctttccctgttcagtgttccattcaccacatcaggc

SEQ ID NO: 626036 - DNA, 566 bp, Homo sapiens
cttgaacctggggggtggagtttgcagtaagccaagattgtgcaattgcactctagcctgggcaacaagagcaaaactctgtctcaaaaaacgaggaaagattccaggaatttttcttaaacatcacaaatcttttcccatgaggcagatttctccatcagcagttgtaacatataccacctgcatttcctgggttggtatacctctattttcatatttaagatgatcgtttaatttagtatttaaaagttttgcatgcagcatcaaggaaattgttgatctgaaaattatctattacaatttacataatggattattttccttttcaaatatcctggaaagaaaaagggaaataaatacatttgttaagtatatttaaattctatattatakgaatggatttgaacaattaggtttacctagagttttgtaatatactcaattctgttcatagtcacttttaacatctttttatgatttaaatgattcaattttgttaagaagccagggcaataatagatcatctagatctttccctgttcagtgttccattcaccacatcaggc

SEQ ID NO: 626037 - DNA, 506 bp, Homo sapiens
gtcatgtggagtgaaatgtactgatgagcatgtgagcatcagctttcttatggtgcagaaggtggcacactctcctagcaacatctagaagctaaaccagccctgccagcaccattaaaatmctggattgtttgtaaaatgagagaaatttcccagaaacaaggaatactgtgggcccaccagtcaaagctgaattctgagtcctctattgtactctttgctgatgatataggctgcccatttccttaacaagctggatttgttcattggaaaatgtaacaaataatttcaaggttatgtcactgttggcaagtgcagtaatgctggtgaaaaaaggaagttttcagaacaaggcagagactgaatcttgtttggaaccaccagcctacaaagcctgcagtagggccatgttgttcaaattcacaggactgtctgatgctcacagatatgaaatgtcaactggcttttataatgatataaattaaaagagattaatttgttcaaat

SEQ ID NO: 626038 - DNA, 594 bp, Homo sapiens
cttaaacacgaatttaaggacacatacaagcagattcatttcttccaaggaattttaaactctgatccttgcgcacaaccaccaggctattagcaatgcaagtaaaccacagcttgctccattaccaaaaaaaattccatttttctaaggctctgtcagggcatattattctgacagataaaatcacattacaatcaactctaattatgtacaaaatatgattgtttatgctttcgattgtaaccaggacttgggaattattttttagagactttttctgttcatagggtattctgtaatttgaccactgctggcttaattataacagcatttgccagaaacatagactagagtgacttcytatatctacacgctaaatgaatacatgacctcccttggctaagaggaaccatcaaatgcatgattttgacaaaagaaataaatgttttcactttaacatttagtgttagccaaggggaaaaaacattaattttctttttctagtcttggcaagaaacagggaagggaaacaagtgcctaaaaaagatggaaaaaaaataccatctttgttcgtttggcctacatgtcctcatg

SEQ ID NO: 626039 - DNA, 571 bp, Homo sapiens
atgcttacagacatacatgtgtacctcaacctcaatgcagcttttatacagtcatgcactacataatatcatttcagtcaacaacaggttttatatrtgatgatggtcccataagattttaattttttttttctttttgagacagagtctcactctgtagcccaggctggaatgcagtagccggatctcggctcactgcaagctccacctcctgggttcacaccattctcctgcctcagcctccccagtagctgggactacaggtgcccaccaccacgcccacctaatttttttgtatttttagtacagacagggtttcaccgtgttagcccggatggtctcaatctcctcacctcatgatccgcccgccttggcctcccaaagtgctgggattacaggcatgagccactgcgcctggccagattttaatatttttactatacatttcctatgcttagatatatttagatgcacaaatacttgccattgcattacaattgcccatacagtaacaggccaggtttgtagcttaggagcaatagggtatattgtatagccgaagtgtgcagga

SEQ ID NO: 626040 - DNA, 571 bp, Homo sapiens
atgcttacagacatacatgtgtacctcaacctcaatgcagcttttatacagtcatgcactacataatatcatttcagtcaacaacaggttttatatgtgatgatggtcccataagattttaattttttttttctttttgagacrgagtctcactctgtagcccaggctggaatgcagtagccggatctcggctcactgcaagctccacctcctgggttcacaccattctcctgcctcagcctccccagtagctgggactacaggtgcccaccaccacgcccacctaatttttttgtatttttagtacagacagggtttcaccgtgttagcccggatggtctcaatctcctcacctcatgatccgcccgccttggcctcccaaagtgctgggattacaggcatgagccactgcgcctggccagattttaatatttttactatacatttcctatgcttagatatatttagatgcacaaatacttgccattgcattacaattgcccatacagtaacaggccaggtttgtagcttaggagcaatagggtatattgtatagccgaagtgtgcagga

SEQ ID NO: 626041 - DNA, 571 bp, Homo sapiens
atgcttacagacatacatgtgtacctcaacctcaatgcagcttttatacagtcatgcactacataatatcatttcagtcaacaacaggttttatatgtgatgatggtcccataagattttaattttttttttctttttgagacagagtctcactctgtagcccaggctggaatgcagtagccggatctcggctcactgcaagctccacctcctgggttcacaccattctcctgcctcagcctccccagtagctgggactacaggtgcccaccaccacgcccacctaatttttttgtatttttagtacagacagggtttcaccgtgttagcccggatggtctcaatctcctcacctcatgatccgcccgccttggcctcccaaagtgctgggattacaggcatgagccactgcgcctggccagattttaatatttttactatacatttcctatgcttagatatatttagatrcacaaatacttgccattgcattacaattgcccatacagtaacaggccaggtttgtagcttaggagcaatagggtatattgtatagccgaagtgtgcagga

SEQ ID NO: 626042 - DNA, 539 bp, Homo sapiens
gtgatgatggtcccataagattttaattttttttttctttttgagacagagtctcactctgtagcccaggctggaatgcagtagccggatctcggctcactgcaagctccacctcctgggttcacaccattctcctgcctcagcctccccagtagctgggactacaggtgcccaccaccacgcccacctaatttttttgtatttttagtacagacagggtttcaccgtgttagcccggatggtctcaatctcctcacctcatgatccgcccgccttggcctcccaaagtgctgggattacaggcatgagccactgcgcctggccagattttaatatttttactatacatttcctatgcttagatatatttagatgcacaaatacttgccattgcattacaattgcccatacagtaacaggccaggtttgtagcttaggagcaatagggtatattgtatagccgaagtgkgcaggaggctagaccaactaggcttgtgtaagtgcactgtttgatgttcatgcaatgataaaatcgccta

SEQ ID NO: 626043 - DNA, 579 bp, Homo sapiens
actttgtatgcaataaatgatgagtgaaggaggaggtaaagagagttacttttaaaattaatgttaaagatgctggcaatagtttccacattcattcatagaccttacagctaggcttattgctccacagatatttgaaataagatctttataagaaaagtgaggatctgtgactgcttgagttttggttttctacccatatggtatgtattcctgtccttcccatcaccctgcactgaggcctgagtcacagacacacggcactatgtggctgcagtagctgcagccaaatcactcacctgtttgarctcaattttctcacactgaaatgagaacattaaatagatgctttcaaggagtttttaaaatgcagaatgcatttaatctataccatggagtaaactggggcataacaaagaacaactgtaaaactgagacaaatttttgatgaatatgcaaaagctataaatatgaatgagtgctattataaaaataatactaatactacaaataagtagtatcaagtggccaaacctaagtggttctaaccttatgctatagattattccaaggtttata

SEQ ID NO: 626044 - DNA, 570 bp, Homo sapiens
attttaccttaggtatgttatatcttaaaggattttttaaaacccaaacaaaaagaaacaattttaatcaagaagtcacttctgacccaggagcagaaaaaaacaagtctcaaggcaatggcaactcacaggagaactgagctgtgtgaaacttactctaggcatgcccagttagaagagtttcccattgcctaagggaaggtaataaacaaaaccacacctcccgcaagtcattatcacacctaggtccaaaataaacagtttcacctctaagagtttaggcaaatctcaactaatttatttttctttttaaaagtttttaaacttctaggtaattgaaacgtgrcattaaactctgatgacctatttgatgattctttaaataggcagtctgcatttctaattgcctctatttccaattttcatggtagttttctcaattaaaaaatataaattttgtcagaattatttaagtaaacagctacatagggtaagctctttccagaaatgaaagacaaatgaccaaatcatttattctgcctccaaaatagctaattagcaactaattac

SEQ ID NO: 626045 - DNA, 476 bp, Homo sapiens
gaattcagtaaattgtccaaggtgaccaattgtatttgtctgttttcacactgctgataaagacatactggagaccaggcaatttaccagggaaagaggtttaattggacttacagttccacatggctggggaggcctcataatcatggtggaaggcaaggaggagcaagtcacatcttatgtggatggtggcaggcaaaaaaaaagagcttgtgcatgcaaaccctgtttttaaaaaccatcagatctcctgagacacactcactatcatgagaacagcatgggaaagacccgcccccacgattcaatcatctcccactgggccccctcccacaacacatgggaattacaggagctacaagatgagatttgggtggggacacagagccaaaccatatcactattggaatcaatgtgaggtgaggagaagatttctttttcttcttctttgyttgttttttttttttcacccaggc

SEQ ID NO: 626046 - DNA, 572 bp, Homo sapiens
aaagatcttgctttgttgcccaggctggtcgtgaactcctggcttcaaggcatccttccacccttgcctcccaaagtgttgagawtatgagcgtgagccaccatgcccagccaggatagtatttcatgtccatgtgactttcaagtgtgagtgcttaacgctgtgtagttcatcactttttggaatgtagcattttaattaatgacaaataaaaagtagaggtaaatttgtctcagatggtaggataaataaattctagctacatttttcttaaacaatcagaattttcttgaaaagaaagccagaggcctggcacagtagcttatgcctttaatccctacactttgggaggccatggccagggatcacttgagctcacaagttcaagaccagcctggacaatgtgatgaaaccccatttctataacatatacaaaaaatatatattagctgggtgtggtggtgcatgcctgtagtcccagctactcaggaggctgaggtgggagaatgacttgaacccaggaggtgaaggttgcagtgagccgagatcacaccactgcaatcctgtacacg

SEQ ID NO: 626047 - DNA, 614 bp, Homo sapiens
gttacagcttagcagcctggtaacaaaagaaaaatttgttggtttgattcagtrcttatttagtgcatccacaggaaggccagatagtctgcctgcagttaaacaaaccagcgagaattttattcgcattccattctattctaagcatggagatctaactaggttcacatctgtgtacaggtggcctgagccagagtgaaatgtccttatatggatatctgcacttctacctttagcaattcatttcttttgggaaagcatcatcttttctttgtagtcctcttttaaattgcaaataatctatgcaaaagaacactttgtttttctaatagagtcttaggggaaataaatttaatatttcacttttttcctccactttttcccccttcactttgtgaaattcctgtgactacttaatcttggtttccattacatatctatttccaaagtcaattcttaactctttaagtttctcaaagtgaacaatatatgcctaaggtaatttttataataataatttggaaagccatactaaacctagatgcaagttcacttaatgatgagtggtaaacatgatgcaatagtgtcatactcatacatttttttctgcgtta

SEQ ID NO: 626048 - DNA, 595 bp, Homo sapiens
tcccctgtgttggaggtggtgcctggagggaggtgattggattatggggctagatttctcatgaatagtttaccatcatcctcttggggctgttcttrtgatactgagtgagttctcttgagatctggttgtttaaaagtgtatagcccctccccgctctctctctgttgctcctgctcccaacatgtgagatgcctcgctccctctttgatttctgccctgattggaagcttcctgaggcctccccaggagcctggaagataccagaatcacacttcctgcacagcccatagaaccttaggacaattaaacttcttttctttataaattacactgtccaggtattttttatagcaatgtaagaatggactaatacaggcttcattatggaagcgatcacctctttatatagtcattggactgctgtgattagaaaattcacagcaatgagttggtctcattttgtatatattttattgagtgtttgccatatttaggttacctctgggatggggtgcaattctcatacacaatatacagaccgtttacttattagaaggatgtctgtgtttgtatcaggagtgggaggacagtg

SEQ ID NO: 626049 - DNA, 446 bp, Homo sapiens
ctccccgctctctctctgttgctcctgctsccaacatgtgagatgcctcgctccctctttgatttctgccctgattggaagcttcctgaggcctccccaggagcctggaagataccagaatcacacttcctgcacagcccatagaaccttaggacaattaaacttcttttctttataaattacactgtccaggtattttttatagcaatgtaagaatggactaatacaggcttcattatggaagcgatcacctctttatatagtcattggactgctgtgattagaaaattcacagcaatgagttggtctcattttgtatatattttattgagtgtttgccatatttaggttacctctgggatggggtgcaattctcatacacaatatacagaccgtttacttattagaaggatgtctgtgtttgtatcaggagtgggaggacagtg

SEQ ID NO: 626050 - DNA, 348 bp, Homo sapiens
tgtatagcccctccccgctctctctctgttgctcctgctcccaacatgtgagatgcctcgctccctctttgatttctgccctgattggaagcttcctgaggcctccccaggagcctggaagataccagaatcacacttcctgcacagcccatagaaccttaggacaattaaacttcttttctttataaattacactgtccaggtattttttatagcaatgtaagaatggactaatacaggcttcatyatggaagcgatcacctctttatatagtcattggactgctgtgattagaaaattcacagcaatgagttggtctcattttgtatatattttattgagtgtttg

SEQ ID NO: 626051 - DNA, 616 bp, Homo sapiens
atttgtgttttgtgcctggcttatttcacttaacataatgtcttctgtagcacattcatgtagttcctaatgaaataattttattctttttatggctaaagagtattccattgtgtatatatatcacattttctttatcagttcatctgctggtggacactgaggttgattccatatcttgactattgtgaatatggttcccataaacatgggagtgcagatagctcttcaacataccaatttcattttctttgaatatctacccagtagtggaattggtggatcatatgggagytctatttttaattttttgagaaaccttcatactgttttttaaagtggctgtacgaatttacatttccaccaacaatgtgtgtgggttcacttttctccacatcctctccagcacttgttattttaagtctttttaattatagccatactaactgcattgaggtgatatctcattgtggttttgtttttcatttcccagaacattagtactgttgatcttttttttgtatatacctgttagacatttatgtgccttcttttgagaactatttatttaggtattttgcccatttttaaatcaggttcttggtgtttttttgtt

SEQ ID NO: 626052 - DNA, 494 bp, Homo sapiens
tacacaaatggaataaaataattttccaccaccttttccccagcagtatttaaataaaaataaccaggagaacttgggacatgktattagtctttccttaagcagcaccagatctgtcccagatcaatacttgtaatgagcaaaaaatcttaccaccaagctctccaaatcatgaaatttaggaaagaaaattactataataacgacacttggatatctttattcagtcaacaaaagattaatgagtgaatgaaaaaggttaatccaaaaacaaccatgtcatttttcaagttctcaaatgttcaagattctacactgctattcaattttagtctgtctacatatttataaggtaatatcttaaaaatataataagatatttgggaaattaaataaggtactttttattatatttattatgccaattacaattacaaataataatagaatatttttctcaagatgataaatacttaattctacatgttctatat

SEQ ID NO: 626053 - DNA, 529 bp, Homo sapiens
ggagtgcaaagtgcttctctacatgcacttcccacctccttacggtctgtttgttctatggcatattgacatttacctacatttactccttctccagtcaacactcacatgtctaaggcaagcccagatctagccacagacaggctcatctctatgctatacagagttattaccctgatgtttaacttcatcactgacaacctgagaaacacagaggtaaaaggagcctcagaaaggttttatgtcattgaacatgtttatagaaaccataatttaaaatataatagaatgactcaatgttccacttttaattcatagaaaaagtaattttctattgatatatagaatgyatacctacataggcgtataaatttatagaaaatacatatacatataacttcagttatatctatttatatgtatatgtatatttctatttgtgtacattgggaacttaacatttatcagccaaagtagactttttttttttttttaagttctggggtacatgtacaggatgtgcaggttt

SEQ ID NO: 626054 - DNA, 623 bp, Homo sapiens
atattctgtcactttttcctgaacacatggagactttagagtttgcccaataattttattcagtagagcacgatttttctccaatgaaatctaaataacgtaatgaggttcaaccccagagtagatacctcattatcacaatgctgtaagtgaatgaacccagcctattaagcaagggaaaatttatcacacacactacttctctccagctcacattcacataccaacaaataaatggcacaaaatacacaaaatgttttgtgatatttgcatgtatgatgtgcacatgcacatataggtaaatatttgtgtatatgcatatataagtattcgaagttatgtacatatttttggaaaatgttggaatatatattatgacatatatttatgtgagggtattgtgcatattgctttatgaatattcttcacataaagagtacagaattttggagacaatgagactgctaggaagaaggcaggaataagagggaagggaaaattggagtggaggtaagtatgaaaaaycagtaaaatctgagatgctctagaagatggttctggagtacagaagtgatgttgcatgttgaaactactagtgtttcagaaatgcaaacaccttccta

SEQ ID NO: 626055 - DNA, 548 bp, Homo sapiens
tctccaaaagtaagcaggttttgaggagtgcgaktggaaagggaagaggaaagagaagataaattccaataaaactggcctggtgtgtggttcacacctgtagtcccagcactttggcaggctggggtgggcagatggcttgagcccaggagtttgaaaccagccttggtaacatagtgagacctcgtttctacaaaaaatacaaaaattagccggcctgtaatcccagctacttgggacgctgaggcaggagaatcgctggagcctgggaggcggaggttgcagtgagccgagattgtgccactgcactgcagcctgggtgacagagccagaccctgtcataatgaaataaaaataaaaataagaaaagataggactacttgagattattatattctaaggtaaggaattattttgttgttaagtagtcgataagggagaaattttagatttctgagagaggaagtagtatgtgacataccccagttttagaaagccagccctgaaggcatcatagaggatgaattcagagggagacagtatttgtc

SEQ ID NO: 626056 - DNA, 548 bp, Homo sapiens
tctccaaaagtaagcaggttttgaggagtgcgattggaaagggaagaggaaagagaagataaattccaataaaactggcctggtgtgtggttcacacctgtagtcccagcactttggcaggctggggtgggcagatggcttgagcccaggagtttgaaaccagccttggtaacatagtgagacctcgtttctacaaaaaatacaaaaattagccggcctgtaatcccagctacttgggacgctgaggcaggagaatcgctggagcctgggaggcggaggttgcagtgagccgagattgtgccactgcactgcagcctgggygacagagccagaccctgtcataatgaaataaaaataaaaataagaaaagataggactacttgagattattatattctaaggtaaggaattattttgttgttaagtagtcgataagggagaaattttagatttctgagagaggaagtagtatgtgacataccccagttttagaaagccagccctgaaggcatcatagaggatgaattcagagggagacagtatttgtc

SEQ ID NO: 626057 - DNA, 548 bp, Homo sapiens
tctccaaaagtaagcaggttttgaggagtgcgattggaaagggaagaggaaagagaagataaattccaataaaactggcctggtgtgtggttcacacctgtagtcccagcactttggcaggctggggtgggcagatggcttgagcccaggagtttgaaaccagccttggtaacatagtgagacctcgtttctacaaaaaatacaaaaattagccggcctgtaatcccagctacttgggacgctgaggcaggagaatcgctggagcctgggaggcggaggttgcagtgagccgagattgtgccactgcactgcagcctgggtgacagagccagaccctgtcataatgaaataaaaataaaaataagaaaagatrggactacttgagattattatattctaaggtaaggaattattttgttgttaagtagtcgataagggagaaattttagatttctgagagaggaagtagtatgtgacataccccagttttagaaagccagccctgaaggcatcatagaggatgaattcagagggagacagtatttgtc

SEQ ID NO: 626058 - DNA, 548 bp, Homo sapiens
tctccaaaagtaagcaggttttgaggagtgcgattggaaagggaagaggaaagagaagataaattccaataaaactggcctggtgtgtggttcacacctgtagtcccagcactttggcaggctggggtgggcagatggcttgagcccaggagtttgaaaccagccttggtaacatagtgagacctcgtttctacaaaaaatacaaaaattagccggcctgtaatcccagctacttgggacgctgaggcaggagaatcgctggagcctgggaggcggaggttgcagtgagccgagattgtgccactgcactgcagcctgggtgacagagccagaccctgtcataatgaaataaaaataaaaataagaaaagataggactacttgagattattatattctaaggtaaggaattattttgttrttaagtagtcgataagggagaaattttagatttctgagagaggaagtagtatgtgacataccccagttttagaaagccagccctgaaggcatcatagaggatgaattcagagggagacagtatttgtc

SEQ ID NO: 626059 - DNA, 494 bp, Homo sapiens
agaggagaaaaaacaggtcccttccctgtttgcttctcctggtctttttggtgaagttctagaacttctagtattttgacttttgattttaaataccccaggatgattggaatttgccttattcttattttcagtctgtcaaattaagtcatgtatcattagaagcaatactgttgtatgcgccagagaactggttttatgatctatttgtagtagaagggctgccttgtcattatcaaaggttactcttcagaaaagttgcttgccttattagctatgtattctaatagcataacgactataccaactttgttttgtttaatttttcatggtatatatttttccatcttcattttgggtgttttcttcgtgttcatttgagaatgtgttaagtgtaatacagttttgttttttaacaaaatcagtcagtctttrtgctttaatttcagcactttagttgcctttaatttaatttcagacacatttgtgtttgc

SEQ ID NO: 626060 - DNA, 381 bp, Homo sapiens
ttattactgcatttttaaatcccatacattttggtatcttgtatactcattttgtttgtctcaagatatttttaatatcccttttattttctatttgaaccgctggttgtttcaaaacatggtgttgaatttccatatatttgtgaattttctgatatttattctcttcctgatttctagttttatattgtgtactcatgaraaatgcttgatagtatttcagtcttttaaaatgctaaggcttgtgttgtggctaaacacatgatatgtcctgtaaagggtttcatgtgtgcttgagaataatgtgtattcttctgctattgaatacataatatacattctgtataagtgtgttataatttaatctaaattgtagttcat

SEQ ID NO: 626061 - DNA, 381 bp, Homo sapiens
ttattactgcatttttaaatcccatacattttggtatcttgtatactcattttgtttgtctcaagatatttttaatatcccttttattttctatttgaaccgctggttgtttcaaaacatggtgttgaatttccatatatttgtgaattttctgatatttattctcttcctgatttctagttttatattgtgtactcatgagaaatgcttgatagtatttcagtcttttaaaatgctaaggcttgtgttgtsgctaaacacatgatatgtcctgtaaagggtttcatgtgtgcttgagaataatgtgtattcttctgctattgaatacataatatacattctgtataagtgtgttataatttaatctaaattgtagttcat

SEQ ID NO: 626062 - DNA, 489 bp, Homo sapiens
tgtgatccccattcaatagatcaagtatgttggaaaggacttcattgagttggaagataatatataacaatttaaaaagcaaaaccaaagaaaaacctcttcagatccagggttaaaaaaaaaaaaatacagagcactcccaaatttctatcctacttggatgaaaattggctcaggatagatagatgggaatctgggcatagccctcattattatcaaatgtgctaaagttaaagagtcttgcaagatttttccataaggtcagaccatttttcagaacaattgtgttgtctgctgcagttgacacagaattatattgtttaggttgtattgaggggatagtaacactcaggcattggagagattccaaaggtgtggacttttgtaggagacaggtayaattagaattcacacgtgctgaatttctgaccagttaaggtggctgtgtcccaggataaatttaggccataatattaagtctgagtacaa

SEQ ID NO: 626063 - DNA, 564 bp, Homo sapiens
actggtggaatgtttgataacagagaccaaacaaaaatggggaattatgtctgtaggacagatcataatgctgtaagacttggcaaaatgaaataatcatataactaataaaaagtgtgaattgagggaggaatggtggaaggaagtataagtgttaatttccatgtctttcaaaggattgcattaataaatattaactaaacataaaataggttaattgaaaaggaatcctaagcacagtttacagaacaaccctatgtgttttgttttgaaaactgtattagtctatttttacactgctataaagatactacctgagactgggtaatttataagcaaaagaggttgaattgattcatagttccacatggctcaggaggcctcagaaaacttataatcatggcagaaggcaaagggaagcaaccaccttcctcacaagaaggcaggagaaatagagagagcacaggggaaactgccacgtttaaaaccatcagatckcataagaactctctcactatcacaagaatagcatgggcgaaactgcccccatgatcaaatcacctc

SEQ ID NO: 626064 - DNA, 564 bp, Homo sapiens
actggtggaatgtttgataacagagaccaaacaaaaatggggaattatgtctgtaggacagatcataatgctgtaagacttggcaaaatgaaataatcatataactaataaaaagtgtgaattgagggaggaatggtggaaggaagtataagtgttaatttccatgtctttcaaaggattgcattaataaatattaactaaacataaaataggttaattgaaaaggaatcctaagcacagtttacagaacaaccctatgtgttttgttttgaaaactgtattagtctatttttacactgctataaagatactacctgagactgggtaatttataagcaaaagaggttgaattgattcatagttccacatggctcaggaggcctcagaaaacttataatcatggcagaaggcaaagggaagcaaccaccttcctcacaagaaggcaggagaaatagagagagcacaggggaaactgccacgtttaaaaccatcagatctcataagaactctctcactatcacaagaatagcatgggcraaactgcccccatgatcaaatcacctc

SEQ ID NO: 626065 - DNA, 608 bp, Homo sapiens
aaatcaacattaatttgagatttagtaagttttcagtttctcttcagtaccttctagtaagtttttaaaaatgtacagtgacaaatttcatcttgctcaagacataggctttcaartgatctctgaatatgaatattacatatagtcaaaattttctctgaaaatctcataagaaagtgcatggcagtgaaagtcacttgctgagtgagctcaacacagccaatttaatctccagctttggaggagattgctgatttttcagttgattactggataaacttaatgcctactgtggtctttgaggtcatattatgcaaagaataattttaaataccagagcccatattcagtgcagtgaaatgcttgcattgtaaaaggtacactgtcattgaaagtgaatggagaacaatagatgaacatctcattcatgctcattgtgtgaggtgaatgtaagttaaattgtctacattatataaatttttaattttcctctctgtctctctttctttatctatcctagtgtatgactgtacatgtgtaagttaaataaatgcttaaataatatgactccactgaaatatttttattaaaaatagcaggtaatataa

SEQ ID NO: 626066 - DNA, 608 bp, Homo sapiens
aaatcaacattaatttgagatttagtaagttttcagtttctcttcagtaccttctagtaagtttttaaaaatgtacagtgacaaatttcatcttgctcaagacataggctttcaaatgatctctgaatakgaatattacatatagtcaaaattttctctgaaaatctcataagaaagtgcatggcagtgaaagtcacttgctgagtgagctcaacacagccaatttaatctccagctttggaggagattgctgatttttcagttgattactggataaacttaatgcctactgtggtctttgaggtcatattatgcaaagaataattttaaataccagagcccatattcagtgcagtgaaatgcttgcattgtaaaaggtacactgtcattgaaagtgaatggagaacaatagatgaacatctcattcatgctcattgtgtgaggtgaatgtaagttaaattgtctacattatataaatttttaattttcctctctgtctctctttctttatctatcctagtgtatgactgtacatgtgtaagttaaataaatgcttaaataatatgactccactgaaatatttttattaaaaatagcaggtaatataa

SEQ ID NO: 626067 - DNA, 608 bp, Homo sapiens
aaatcaacattaatttgagatttagtaagttttcagtttctcttcagtaccttctagtaagtttttaaaaatgtacagtgacaaatttcatcttgctcaagacataggctttcaaatgatctctgaatatgaatattacatatagtcaaaattttctctgaaaatctcataagaaagtgcatggcagtgaaagtcacttgctgagtgagctcaacacagccaatttaatctccagctttggaggagattgctgatttttcagttgattactggataaacttaatgcctactgtggtctttgaggtcatattatgcaaagaataattttaaataccagagcccatattcagtgcagtgaaatgcttgcattgtaaaaggtacactgtcattgaaagtgaatggagaacaatagatgaacatctcattcatgctcattgtgtgaggtgaatgtaagttaaattgtctacattatataaatttttaatttycctctctgtctctctttctttatctatcctagtgtatgactgtacatgtgtaagttaaataaatgcttaaataatatgactccactgaaatatttttattaaaaatagcaggtaatataa

SEQ ID NO: 626068 - DNA, 540 bp, Homo sapiens
tctatttctccaccatgcattcttttatgtgtgtgtggtatatatttatgtaagtatgtgtgtctagagagagagatatgtgcttgtgtgtgcatgtatgtatatgtgtgtgtacatatatgttacacatatgcttatrttaatacctatatctacatgtagagagatattgatttagctgttttatctgaaatgatgtccactacgtgttaacaatgcttatttcaagtaggtgggatttaactatctcatttttttctcttttttacaatttttattttactttatgttcctggatacatgtacggaatgtgcaggtttgttacataggtatacatgtgccatggtggtttgctttacctaacaacctgtcatctaggttttaagccccacatgcattaggtatttgtcctaatgctctccctcgccttgccccccatcctccaacaggccctggtgtgtgtttttcccctccctgtgtccatgtgttcttattgttcaacttctacttatgggtgagaacatgtggtgtttagtttt

SEQ ID NO: 626069 - DNA, 627 bp, Homo sapiens
agctatcattgtaattagtttcttcttcattgatacttatttcatcttgtggttctttaattggttatttttttccttttgtttttagtwgatatgtaataactgtacatgttcaagggatacaaagtgatatttcaatacatgtatataatatgtaatgatcaaatcagggtaactatcatgtcaatcatcttggatatttattattctttaatgttgtaaacattcaaaatcctctcttctagctcttcggaagtgtacagtaaattactattaactatattcattctacagggctacagaacacgagaactaatttcatcgaggtgtaacttggtatccattaactaaactctctctctcctctcctggctaccctccctaccctctcataattatgattctactttctacttctatgaactcatttttttttttttttagtttccacaggagtgagaacatgcagtatttatctttctgtgcctgaattatttcacataacataacgtcccccaggctcatccatgttgccataaatgacaggatttcatttttaaatggatgaatagtattccattgtttatatatacaccacattttttatccattcatttgttgatggac

SEQ ID NO: 626070 - DNA, 441 bp, Homo sapiens
ctgtttttttttaataactatactaatttacattctcatcaacagtktgtgagagtttccttttctctgtatcctatgcagaatttgttgtttttttttttttggtctcgttgatgatagccactctaactggcataaaatagctccttgtggttttgatttgcatgtttctcatgattagtgacattgtgtgtgatgtgcatttttccatgtatttgttgtgcatttgtatgtcttttgagaaatgtttattcagacctttttgtcatttttaaattattatttttttgctattgagttatttaagctccttaaatattctaattattaatctcttatgagatgaatagtttgcaaatatttccttccattctatgggctgtccctttacttttttgctcgttttctttgctgtgcagaaggtttttaacttgatttaat

SEQ ID NO: 626071 - DNA, 392 bp, Homo sapiens
tgatgtgcatttttccatgtatttgttgtgcatttgtatgtcttttgagaaatgtttattcagacctttttgtcattttwaaattattatttttttgctattgagttatttaagctccttaaatattctaattattaatctcttatgagatgaatagtttgcaaatatttccttccattctatgggctgtccctttacttttttgctcgttttctttgctgtgcagaaggtttttaacttgatttaatcccatgtgtttatttttgctttgattgcctgtattttagaagtcttacccaaaacgtatttgcccagaccaattttctagagcttttctctaatgttttactataggtgtttcatagtttcaggtctcacatctgagtctttaa

SEQ ID NO: 626072 - DNA, 392 bp, Homo sapiens
tgatgtgcatttttccatgtatttgttgtgcatttgtatgtcttttgagaaatgtttattcagacctttttgtcatttttaaattattatttttttgctattgagttatttaagctccttaaatattctaattattaatctcttatgagatgaatagtttgcaaatatttccttccattctatgggctgtccctttacttttytgctcgttttctttgctgtgcagaaggtttttaacttgatttaatcccatgtgtttatttttgctttgattgcctgtattttagaagtcttacccaaaacgtatttgcccagaccaattttctagagcttttctctaatgttttactataggtgtttcatagtttcaggtctcacatctgagtctttaa

SEQ ID NO: 626073 - DNA, 392 bp, Homo sapiens
tgatgtgcatttttccatgtatttgttgtgcatttgtatgtcttttgagaaatgtttattcagacctttttgtcatttttaaattattatttttttgctattgagttatttaagctccttaaatattctaattattaatctcttatgagatgaatagtttgcaaatatttccttccattctatgggctgtccctttacttttttgctcgttttctttgctgtgcagaaggtttttaacttgatttaatcccatgtgtttatttttgctttgattgcctgtattttagaagtcttacccaaaacgtatttgcccagaccaattttctagagcttttctctaaygttttactataggtgtttcatagtttcaggtctcacatctgagtctttaa

SEQ ID NO: 626074 - DNA, 330 bp, Homo sapiens
ataatttagtttgtagggaccttgatcacctttcccttttacagcatatcacactggtccattacattgacaatattatgctaattaggcttggtgagtgagaaataacaacaactttagatttattgggaagatatttgcatgtcaggccatgaaaaatctgactaaaattcaggggcctgttctctccrtaaaatttctaggggtccagtggtgtggatcatgtcaaaatatcccttttaaggtgaaggacagttgttgcatctggcctcttttacaaccaagaaagagacacaacacctagtgaaccaatttggatttgagcggcaa

SEQ ID NO: 626075 - DNA, 618 bp, Homo sapiens
ctggctatattgggcttctgatgcctctgagtcaacaggatatggaggggagttatggtgttggctggggtaattgatccagaataccaagagggaattggactactactccataatggaggtaaggaagagtatgtctgcaatacaagagatcccttagggtttctcttagtattaccatcccctgtgactacggtcaatgaaaccacgataacccaatctaaataggtctatgaatgacccacacctttcaggaatgaaggtttgggtaactcygccatataaaaagcaccagctgaggtgcttgctgaaggcaaagggaatatagaatcagtagtagaaggtagttataaatacaagtagtgaccacatgagcaattaaaaaaacaggctataattgccatgagtatttcctccttattctgttaaaatatgtttgtgcctatatatacatatatcaagcaaatatctttgattttgttcctttcttattcttttatcatgtaacataagatgtaatgagttcatatcagtatttaagtattattaattttgcatcacagtacttaagttatgggatattaggagaagagtaaacatcactcagggacttcactt

SEQ ID NO: 626076 - DNA, 618 bp, Homo sapiens
ctggctatattgggcttctgatgcctctgagtcaacaggatatggaggggagttatggtgttggctggggtaattgatccagaataccaagagggaattggactactactccataatggaggtaaggaagagtatgtctgcaatacaagagatcccttagggtttctcttagtattaccatcccctgtgactacggtcaatgaaaccacgataacccaatctaaataggtctatgaatgacccacacctttcaggaatgaaggtttgggtaactctgccatataaaaagcaccagctgaggtgcttgctgaaggcaaagggaatatagaatcagtagtagaaggtwgttataaatacaagtagtgaccacatgagcaattaaaaaaacaggctataattgccatgagtatttcctccttattctgttaaaatatgtttgtgcctatatatacatatatcaagcaaatatctttgattttgttcctttcttattcttttatcatgtaacataagatgtaatgagttcatatcagtatttaagtattattaattttgcatcacagtacttaagttatgggatattaggagaagagtaaacatcactcagggacttcactt

SEQ ID NO: 626077 - DNA, 572 bp, Homo sapiens
ttccttaagagagacttctggaaaaattactgattttgctagccaaacagtactttaaagatgtttagaaaatgttgtcaagatgtccatgaaggacatgtcattcatttaatctatgaaaattatattaaattttatttatttttttccagcttcttggaagcattattgacaaacaaaattctataaatttaaggtatacaatgtgatgtttttgtatacatatacgttgtgaaatgattaccacaattaacctaactgacatatctactacctcacatagttagcattgtgtgtgtgtgtgtgtgtgtgtgtgtgtgtgtgtgtatggtgaaatcactctagatctactcttttaacaattttgagtacaaaatacattattaactacagtcatcatgctgtacaggaagtccccagaacttactcatcttataccagaaggttttatgctttaactaacatctccccaacattcacccccgagccactggcacaccatartactctgtttttattagtttggctattttagagtccacagataagtgagattatgtagtatttgtctt

SEQ ID NO: 626078 - DNA, 654 bp, Homo sapiens
agcaagctcctcttgtttctaacttctgagtatgttctgctcattctcagagctcaaagtttgagtctggattctataacttgaagaacttgatgggtgttccaaagaaagcctcagaagagaggcctcttaagatttcttaaaaatttcttccctaatgttctttggacgcstcatagatttaaagtagaattcatggaaacaaaaagactctccttgaagactcagctggggactctccatattaaaacctgttctcatagagaataaagttcaagggaacaaggcaaggtaattgaagtagaccaaagaggcactccagcctctatagccttaacagtgtggactctggagtcagaaagcatgggtttgagtcttatctctacaacttattagctgtgtgatcttagataagacataatcctctttggtggtaaaaataatgtcatcttcataggattactgacgattaaatgaactaaaacactaacaatactgcttccaaagtagcattttctatttatatattcttgttattgaggctgttattaatattatgtccacattgagagaagtagacaatggatgtttggaaaataactactaaaacacattaagtgcctacaatttacccatactatgctaagcactcac

SEQ ID NO: 626079 - DNA, 654 bp, Homo sapiens
agcaagctcctcttgtttctaacttctgagtatgttctgctcattctcagagctcaaagtttgagtctggattctataacttgaagaacttgatgggtgttccaaagaaagcctcagaagagaggcctcttaagatttcttaaaaatttcttccctaatgttctttggacgcgtcatagatttaaagtagaattcatggaaacaaaaagactctccttgaagactcagctggggactctccatattraaacctgttctcatagagaataaagttcaagggaacaaggcaaggtaattgaagtagaccaaagaggcactccagcctctatagccttaacagtgtggactctggagtcagaaagcatgggtttgagtcttatctctacaacttattagctgtgtgatcttagataagacataatcctctttggtggtaaaaataatgtcatcttcataggattactgacgattaaatgaactaaaacactaacaatactgcttccaaagtagcattttctatttatatattcttgttattgaggctgttattaatattatgtccacattgagagaagtagacaatggatgtttggaaaataactactaaaacacattaagtgcctacaatttacccatactatgctaagcactcac

SEQ ID NO: 626080 - DNA, 565 bp, Homo sapiens
ctttggtggtaaaaataatgtcatcttcataggattactgacgattaaatgaactaaaacactaacaatactgcttccaaagtagcattttctatttatatattcttgttattgaggctgttattaatattatgtccacattgagagaagtagacaatggatgtttggaaaataactactaaaacacattaagtgcctacaatttacccatactatgctaagcactcactattcaaggacataaaaacatatgtataaatgtgaacaagagacaaatcccccatkcagaataattccaaataatttaggtagatactttgccttcagggaggtagaacacatctccttactgcttgaatataaactgtataaagtgatttccttccaaagaatacagtatggaagtgggtggggagcaagtaaatacaatgaagaaatctgacaaacagtaacttagctagctgtctgaggtcaccaccaacagtatgaaatcatgttaactgtataaactcaaaccccagtcaactcatgaggaaaacagacaaatccccaatcctcgaaactg

SEQ ID NO: 626081 - DNA, 623 bp, Homo sapiens
taaactgtataaagtgatttccttccaaagaatacagtatggaagtgggtggggagcaagtaamtacaatgaagaaatctgacaaacagtaacttagctagctgtctgaggtcaccaccaacagtatgaaatcatgttaactgtataaactcaaaccccagtcaactcatgaggaaaacagacaaatccccaatcctcgaaactgtcaaggcatcaaaatcaaaaaaagcctgagaaattatcacagcaaagagaagccaaagaagatatgacaactaaatgctatatggtagattctggaacaaccaccacaaaaaaaaaagacataaggtaaaaactaaagaaacatggaaaaaatatggattttagttaataataatatatcagtattggttcattgattgtagcaaatgtaccatactaatgtaagatattaataataagatgagctgggtgcaggatatatgggaactcacttatggtatatttgtaatttttctgtacatctaaaatagctccaaaaagtaaagtttattttagaaagaaaaaaaaagagaagagcttggctcacgaggaactcccaatgtaatgtggaagatgaacaagtaattaaattataaatt

SEQ ID NO: 626082 - DNA, 565 bp, Homo sapiens
ctttggtggtaaaaataatgtcatcttcataggattactgacgattaaatgaactaaaacactaacaatactgcttccaaagtagcattttctatttatatattcttgttattgaggctgttattaatattatgtccacattgagagaagtagacaatggatgtttggaaaataactactaaaacacattaagtgcctacaatttacccatactatgctaagcactcactattcaaggacataaaaacatatgtataaatgtgaacaagagacaaatcccccatgcagaataattccaaataatttaggtagatactttgccttcagggaggtagaacacatctccttactgcttgaatataaactgtataaagtgatttccttccaaagaatacagtatggaagtgggtggggagcaagtaaatacaatgaagaaatytgacaaacagtaacttagctagctgtctgaggtcaccaccaacagtatgaaatcatgttaactgtataaactcaaaccccagtcaactcatgaggaaaacagacaaatccccaatcctcgaaactg

SEQ ID NO: 626083 - DNA, 623 bp, Homo sapiens
taaactgtataaagtgatttccttccaaagaatacagtatggaagtgggtggggagcaagtaaatacaatgaagaaatctgacaaacagtaacttagctagctgtctgaggtcaccaccaacagtatgaaatcatgttaactgtataaactcaaaccccagtcaactcatgaggaaaacagacaaatccccaatcctcgaaactgtcaaggcatcaaaatcaaaaaaagcctgagaaattatcacagcaaagagaagccaaagaagatatgacaactaaatgctatatggtagattctggaacaaccaccacaaaaaaaaaagacataaggtaaaaactaaagaaacatggaaaaaatatggattttagttaataataatatatcagtattggttcattgattgtagcaaatgtaccatactaatgtaagatattaataataagatgagctgggtgcaggatatatgggaactcacttatggtatattwgtaatttttctgtacatctaaaatagctccaaaaagtaaagtttattttagaaagaaaaaaaaagagaagagcttggctcacgaggaactcccaatgtaatgtggaagatgaacaagtaattaaattataaatt

SEQ ID NO: 626084 - DNA, 567 bp, Homo sapiens
cctttggtatctttggatagggttgtcttgagttggttggagggaagaaaaagggggaaaaaaactttcctgagaagttggagccatagtctgttctaaaacagatttgcaggcttggtttacattgtctaggtggtctatgggaccccaagcttctgaatttggttggaggtgggtcagagtgtattgctratacttccaggcacctgaagctatcagacataaatcctctttggagaagtctagtcttcaaaggattcccattaatattgtttcaaggacattatcagtacctagtaaacaaataaacacataaggaaataagtaagaaccgaagaaaaactgacagtagaaacaggctctcaaaattataattattagaactctaagacagattgtaaagaagaaataagaatataataaagtaaaatatatgaatgttcaaacatttattaggtatttaaagtcaaatattttatatacaagttacattaaatgtcacttcttaggaattttttttaataattggatgggtactcagatgagtactatgtgtatgcccagaag

SEQ ID NO: 626085 - DNA, 599 bp, Homo sapiens
ctgcacatttctttttagtttttgctctttgtatttttggtgtttattatgattgcatatgtggtagcttgattactgattatctctggtatgtgaagaatgattgcatattattgtgtatttattttgaagctagctaccttacttattctcttaacagttccagaagttttccagggcttcacagaaaattataaatttttaaaaattatataaaattttattggctggaaataattttgcatccttcctttaaatatgtrtacctcttacttcatttctttaatagcattggcttgaggttcagaaaaatattaaattattatgatgatctaagacatctttatttctgactttaatggaaatacttccattatttcttccctgagcatagtgctggccttagatttgcaatatgcatttaaaaaatatattcaggtgggatatatccaatcctatttcacagtttgttatttttaaaaccaggaatagatttggaaatagacaaatgttggcagctaagaaagtatattaattgacttactaatataatatctttgcagtctagaatgattaatacgtttttgcaatctaaaatc

SEQ ID NO: 626086 - DNA, 643 bp, Homo sapiens
attgtaacattaaaatgttttaattatacatttttacatttgcataattattacattttaactrtaatattaaaatgtaacataaccggatttagcacgcggaaacctcccggtcagaactacatctacttcataaattgagagactcctatagtgcagcattttaaaagtaccttcctgcttttctgtaaatattctttccaggttatatgtgaacatatatgccaacatttcagaaatagaaaaagcaataggtgaattatttatgggctagtgaatgttttgcctctatatttcacatatgagataaaatataaaagacagttttgttttgagaccaggtctttctctaccacccagtctgaagtaaactggtacaatcatggctcactgcagccttgaactcctgggcaagcgatccacccatctcagcctcccgagtagctagcactataggcatgcaccacgattcccagctaatttatttatttattttttgtagagttggagtcctgctttgttgcctcagttggttttaaactcctggcctcaagcaatcctcctacctcagcctcccaaagcgctagcattacaggtatgagccaccatgcccagctaaaagatgcctttgaaattatgcagt

SEQ ID NO: 626087 - DNA, 561 bp, Homo sapiens
ctcccggtcagaactacatctacttcataaattgagagactcctatagtgcagcattttaaaagtaccttcctgcttttctgtaaatattctytccaggttatatgtgaacatatatgccaacatttcagaaatagaaaaagcaataggtgaattatttatgggctagtgaatgttttgcctctatatttcacatatgagataaaatataaaagacagttttgttttgagaccaggtctttctctaccacccagtctgaagtaaactggtacaatcatggctcactgcagccttgaactcctgggcaagcgatccacccatctcagcctcccgagtagctagcactataggcatgcaccacgattcccagctaatttatttatttattttttgtagagttggagtcctgctttgttgcctcagttggttttaaactcctggcctcaagcaatcctcctacctcagcctcccaaagcgctagcattacaggtatgagccaccatgcccagctaaaagatgcctttgaaattatgcagtgatcctcagttggcacagcacaat

SEQ ID NO: 626088 - DNA, 537 bp, Homo sapiens
attgctatttgtgtgtatcacatccaattctttatttgcaacaccaagaatcttgcacttcacaatatcagccagtaacagagagggactctctacaagaaaatgatatttattggtgaatagagcattgcagtgggaatatgtgtgccataataaaccatrtgcttattcagaaaggtaagggaatgcaaaggtttttaaaggaaaaatgcaggagggattatataattgtcttgagataatcatccttggctgcaaggatcaataacaagagtgataccagttcaaggttggacaggctgttgtgtggcagatgtccttgcagaagtgttttttgtgtgaggttgcaatggcatttatgcaatgttatggttttctcagagtctttgtacatggctgtgattttttcacaagtatttttgtgatagttttgttatcaggcatacaaggctctcttcatagccttccacagctctatttttcagatttttaaaaaatgtaagtgaatccattttgattctgacaactttcacagaa

SEQ ID NO: 626089 - DNA, 635 bp, Homo sapiens
ttcagaaaggtaagggaatgcaaaggtttttaaaggaaaaatgcaggagggattatataattgtcttgagataatcatccttggctgcaaggatcaataacaagagtgataccagttcaaggttggacaggctgttgtgtggcagatgtccttgcagaagtgttttttgtgtgaggttgcaatggcatttatgcaatgttatggttttctcagagtctttgtacatggctgtgattttttcacaagtatttttgtgatagttttgttatcaggcatacaaggctctcttcatagccttccacagctctatttttcagatttttaaaaaatgtaagtgaatccattttgattctgacaactttcacagaatcacctgcctcccacacactaagcacacctcagcacatcgtgcagtggttttgtcacatgtagaacagaattggatacatgttgtattcacaggagaatactaggttttcaaatgataataaatgytcctaagatacctttctctctacccttatgattattcttttcagctagctgattaccagagatttcttattacctaaattatcaaggtttatctgtggcagtatgtcagatgtggtctacatgtaattgtaataaacaaa

SEQ ID NO: 626090 - DNA, 379 bp, Homo sapiens
cttaaccaactaatcatggataccatctattgagtgggtagtagttgctttgtggtagaaactatgctaagcccyttgcatgcattagttcatataactgtcataatacccctgtgatacctatttaacagataagaaattcaaagatttacccaatccaccattgatgggcacctaagtcgattccatgtcttcgctattgcatggcaatgaacatgtaagtccatgtgtctctctggtgtaacaatctatattcctttgggtacattcgattgctggatcgaatggtagctctgttttaagctatttgagaaaacttcagctgaaatttacaaaagaaaagaaattcaaagcttaaaaacgttgtcacatctaaagt

SEQ ID NO: 626091 - DNA, 601 bp, Homo sapiens
aatatatgtgcaaatgtaaatacgtattttccttcttgagttctttaaaatatgtattaccattaaaaatataaatgataacatcattttatgggattttaacaaatgctgatgaaattcatatgacaactataacataaaggttaagctagtgagggacatgaatgtacccatacaagtgcaatgattttacattttacttgaagtggtacagtattaaatatmttttaaaaacaggaagaaattggatatgtgtagtataatctttagggcaaccactaaaaaattataaatacatatagaaaaagagctgataaattaaaattgaatgctaaaatatattcaaattatccaaaaaagggcaggaaaggaaggggaacaaaaaacacaggttaacaaataaagtatcagacttaaatccaactatctcaatagttacactaaatgttaattatctagcctaggtgcagtggctcacacttgtattcccagcactttgggaggtggaggaggacagatcacttgaggccaggagttcaagaccagcccggccaacatggtgaaacctcacctctactaaaaatacaaaaattagccaggt

SEQ ID NO: 626092 - DNA, 562 bp, Homo sapiens
taaggaaatctcagtttttgctcctaaggcttttcaactgattggatgaagcccacccacattatggagatgcttcgtttaaagtctacagactgtaagtgttaattacatccacaaatacctttacagcaacacctagactagtgtttagctaaacaactggrcaccatagcctagccaagttgatgcataaaattaaccgtcacctacaacacatcaacatttgggagataatatactaaagtagttattagaagagaatttataactttaaatgcctatattaaaaataagaaatatctaaaatattatagtgttccaccccaatagtaagttagaaaaaagtagaattcaatgaaatagcaaatagacagacaacagagaaactttgaagccaacaactatttttagaatatcaataaaattgaaaaacttttagctagactaatcaagaaataagagagaacatgaacaaccgatacaataaatgaaaaggaggttatcaccgcatacattaaaaggataataatagaatattagaaacaaatttgtgctaacaatt

SEQ ID NO: 626093 - DNA, 562 bp, Homo sapiens
taaggaaatctcagtttttgctcctaaggcttttcaactgattggatgaagcccacccacattatggagatgcttcgtttaaagtctacagactgtaagtgttaattacatccacaaatacctttacagcaacacctagactagtgtttagctaaacaactggacaccatagcctagccaagttgatgcataaaattaaccrtcacctacaacacatcaacatttgggagataatatactaaagtagttattagaagagaatttataactttaaatgcctatattaaaaataagaaatatctaaaatattatagtgttccaccccaatagtaagttagaaaaaagtagaattcaatgaaatagcaaatagacagacaacagagaaactttgaagccaacaactatttttagaatatcaataaaattgaaaaacttttagctagactaatcaagaaataagagagaacatgaacaaccgatacaataaatgaaaaggaggttatcaccgcatacattaaaaggataataatagaatattagaaacaaatttgtgctaacaatt

SEQ ID NO: 626094 - DNA, 549 bp, Homo sapiens
aaaaaaaaggaaattgatccttatctcacaccataaacaaaaatttactcaaaatggatcatagacctaaatgtgaaatctaaaactctaatactgtaggaaaaagagaaaatatctttgtgaccttgaagtagacaaaggtttcttaaatagaaaacacaagactgggtgcagtggttcacacctgcaatcccaacactttgggaggccaaggcaagtggatcactcgaggtcaggagtttgagaccggcctggccaacatggtgaaactccgtctctacttaaaatacaaaaattagccagaccttgtggcacatgtctgtaattccagctattcaggaggctgaagcaggagacttgcttgamactgggaggcggaggttgcagtgagccgagatggtgccactgcactccagcctgggcgacagagtgagatgctgtctcaaaaaaaaaaaaaaaaagaaagaaaagaaaaagaaaacacaaagcatgaaatattaaaattataaattgatgaactggaattcatggaaatgaaaaactttttct

SEQ ID NO: 626095 - DNA, 542 bp, Homo sapiens
atccagcctgggcgacacagcgagactccatctcaaaaaaaaaaaaaaaaagatttataaattggagtaatactggatgagtgcaaaaaactgaagagcaagtaagcatgctctgggatgactgggctcaggggtgcttcgggcctccccacagtagataagcattcctaccagggttccctaccccatctaccttctgtgttcaggaaataaattactgagcaggataatccaatgccctaccttggacyacatgactatatctataatcagagggaaaaagtctgctgattaaaacctcactgaagccacacagactaagaaggatggatctccctaaaggaaagaggcacaattactagaacaagagaggggatgcttggcagaaaaaaacagattccatgcccagtcctgcaagttctgcaagttgtcatcaatccttctagagagtcattttttaaaagttctagccaatggcactacctcctcactcatattcttgcccagacctttcctacccacccacctgcctgcctgttggg

SEQ ID NO: 626096 - DNA, 608 bp, Homo sapiens
gaagaaaagaaaaagattgtaaggctgaaaaaatagtaaaagaaattatgatgtaaaatttccccaaactaycaaaagacatcaatctatagagaaaagaaactgagaggaagccaaacaggataaaaagaaaccttcatcaagacataccatggttaaacttctgaaaactaaagacaaaacaaaacaacaacaacaaaaaaaaaaaaaaagaaagaaaaagaaaaaaaacctcttgaaatcagccagagagaaatgatgttttccctatttacctaaaggggaaaacattttgaatgaggcagatttctcatcaaaatccacgatggcaagaaaaaaagtggtacagcatttttcaagtcctgaaaggcatgaactgtcaatccagaattctataaccagaaaaagcatacttcaggaatgaaaggaaaattaagatattctcagatgaaaaccaactaaaagaacttgtcaccagcagacctactgtaaaagaatggcaaaaggaagttctgtaaacagaaagaaatgataaaagaaggaatcttgaaacatcatgaaggaagaaagagcatagaaagataaaaaatatgaataaatacagtaaa

SEQ ID NO: 626097 - DNA, 608 bp, Homo sapiens
gaagaaaagaaaaagattgtaaggctgaaaaaatagtaaaagaaattatgatgtaaaatttccccaaactaccaaaagacatcaatctatagagaaaagaaactgagaggaagccaaacaggataaaaagaaaccttcatcaagacataccatggttaaacttctgaaaactaaagacaaaacaaaacaacaacaacaaaaaaaaaaaaaaagaaagaaaaagaaaaaaaacctyttgaaatcagccagagagaaatgatgttttccctatttacctaaaggggaaaacattttgaatgaggcagatttctcatcaaaatccacgatggcaagaaaaaaagtggtacagcatttttcaagtcctgaaaggcatgaactgtcaatccagaattctataaccagaaaaagcatacttcaggaatgaaaggaaaattaagatattctcagatgaaaaccaactaaaagaacttgtcaccagcagacctactgtaaaagaatggcaaaaggaagttctgtaaacagaaagaaatgataaaagaaggaatcttgaaacatcatgaaggaagaaagagcatagaaagataaaaaatatgaataaatacagtaaa

SEQ ID NO: 626098 - DNA, 493 bp, Homo sapiens
caaaccatatcactaagctacttgagaattctatcactgctttaaaatccattaatatgtagctactccccttctctttcactggcagtcagtcagccttcttycatcttggatacctatctcctttttagtattagaacctttacaacatagaacaagctaattgctccacccaatatttacctataaatagcactgccctattgacattctcctgcttagaaattctgagtgcattgaggccactatgagacagggttggagctgggagatagtcttgaccccccagcttcaggagagcaggtagagtctcctcctccacacgctgaccaggtagacattgtggcactgaaagggagtctggcaggtaaaaaggagctcataaccttcgggaggacacctgtgttgaggaattgcttatatctaaaaacagcttctgtagcaacataccaaactctggctttgtatagtctgtcttaattaaacttcagtt

SEQ ID NO: 626099 - DNA, 493 bp, Homo sapiens
caaaccatatcactaagctacttgagaattctatcactgctttaaaatccattaatatgtagctactccccttctctttcactggcagtcagtcagccttctttcatcttggatacctatctcctttttagtattagaacctttacaacatagaacaagctaattgctccacccaatatttacctataaatagcactgccctattgacattctcctgcttagaaattctgagtgcattgaggccactatgagacagggttggakctgggagatagtcttgaccccccagcttcaggagagcaggtagagtctcctcctccacacgctgaccaggtagacattgtggcactgaaagggagtctggcaggtaaaaaggagctcataaccttcgggaggacacctgtgttgaggaattgcttatatctaaaaacagcttctgtagcaacataccaaactctggctttgtatagtctgtcttaattaaacttcagtt

SEQ ID NO: 626100 - DNA, 644 bp, Homo sapiens
ttcacatgttagagaaattgggagtggggagtgttgtcagtttagttatctggctgctgtctgtgctcmgtttcccctctcttcaccctgcagctgcatgcgtctcgaccactttccccaaagtgggcaaaccacttcccttaaaccccccataattgcttgttagatagtccaaagctttgtgaaggcttaggggtttcagaagtgaatcacaacagagaatgcaaaaaggattccagacatggcagttttcaaagctcctctgtgaggctatctactgggtgtacctcttttacagctctcaaaaccacccacgcattacccaaccactcaccgtggactgcccttgagcacatctctcttacctggaggctaggcccacagaccctaaaggcctccaaatatccacatttcctcactccccttcctggatgattgggaatagtcattctcttttccctgacaggaaaaggccacagaaataagggtttccctgaaggcttcagaataaatcagaacaatatacattttcccaattcagcccattcaatctttgataacacaaactgtggaataaagagctcaggttcaggatgggctgccttctccagacctgttttttcttttccttttatttctttttg

SEQ ID NO: 626101 - DNA, 571 bp, Homo sapiens
aaagtaaaagccctttgataaaaatgcagtaatttcatattatatatccttacaaattaagaggaatgaatgaacaatacaaaggaaaatgagtaaaggatatgaataggtccttcctgggagaaatgtttctgtgtatatttatgtgtctgtaaatagggcattataaatccatacttaggacttgtaatgagtgggtatatacccagttttattcataattaaagaaatgtaaatgaaaataatacartacaatttttacctattagtgaatattgggtattggcaaggacattggaaagcaaaaacttgtaagcagtattgttgggagcaatccgacattacctaccaaaatttacaatttatatacttcttaagcctaggattccagtcttctaagatatactctcacaggtacacaaagatggatgtacaaataacttaactacagcatggcttgtaatgcaaagtaagtggaagttatctaatggtcacttatgagaagactctcatggtatggtctgcccaaacactatgcagtccttaaaacagtgaatttggtctggtgtat

SEQ ID NO: 626102 - DNA, 571 bp, Homo sapiens
aaagtaaaagccctttgataaaaatgcagtaatttcatattatatatccttacaaattaagaggaatgaatgaacaatacaaaggaaaatgagtaaaggatatgaataggtccttcctgggagaaatgtttctgtgtatatttatgtgtctgtaaatagggcattataaatccatacttaggacttgtaatgagtgggtatatacccagttttattcataattaaagaaatgtaaatgaaaataatacagtacaatttttacctattagtgaatattgggtattggcaaggacattggaaagcaaaaacttgtaagcagtattgttgggagcaatccracattacctaccaaaatttacaatttatatacttcttaagcctaggattccagtcttctaagatatactctcacaggtacacaaagatggatgtacaaataacttaactacagcatggcttgtaatgcaaagtaagtggaagttatctaatggtcacttatgagaagactctcatggtatggtctgcccaaacactatgcagtccttaaaacagtgaatttggtctggtgtat

SEQ ID NO: 626103 - DNA, 571 bp, Homo sapiens
aaagtaaaagccctttgataaaaatgcagtaatttcatattatatatccttacaaattaagaggaatgaatgaacaatacaaaggaaaatgagtaaaggatatgaataggtccttcctgggagaaatgtttctgtgtatatttatgtgtctgtaaatagggcattataaatccatacttaggacttgtaatgagtgggtatatacccagttttattcataattaaagaaatgtaaatgaaaataatacagtacaatttttacctattagtgaatattgggtattggcaaggacattggaaagcaaaaacttgtaagcagtattgttgggagcaatccgacattacctacyaaaatttacaatttatatacttcttaagcctaggattccagtcttctaagatatactctcacaggtacacaaagatggatgtacaaataacttaactacagcatggcttgtaatgcaaagtaagtggaagttatctaatggtcacttatgagaagactctcatggtatggtctgcccaaacactatgcagtccttaaaacagtgaatttggtctggtgtat

SEQ ID NO: 626104 - DNA, 566 bp, Homo sapiens
ggaaatgataggattctcatgagaggatgggaggctaaggacctggaaagtttcactattgataagtcactgccctaaaggaaaagcagaagggagctctgttcagctttgctgctggtgaagaggactctccaagctccactaggcatagagggcagctgtctcttgcctgcagattttctcatttcagggatatgtccttgataattcactctccactgttgcagtgacttttatttgaggtgcacagttcccagagtgtggtaaaatataagctaggtgctgcgtgtgtgtgtgtgtgtctctstgtgtgtgtgtgtgtgtgtgtgtgtgtggtgtatgtgggctgtcaacaagaaaaacgggcaccaattctattatttcttttttgggtcatcaagggagactcctcggttcagatggcttggctgggaaggagcagactcagtctctctcaatgtgatgctgtgatacacctacatgctcacagtatagtgtgtgtttgtaggaaaagaaagagacagtgaaggaaagaaatagagttagagatactctgagaaagagag

SEQ ID NO: 626105 - DNA, 566 bp, Homo sapiens
ggaaatgataggattctcatgagaggatgggaggctaaggacctggaaagtttcactattgataagtcactgccctaaaggaaaagcagaagggagctctgttcagctttgctgctggtgaagaggactctccaagctccactaggcatagagggcagctgtctcttgcctgcagattttctcatttcagggatatgtccttgataattcactctccactgttgcagtgacttttatttgaggtgcacagttcccagagtgtggtaaaatataagctaggtgctgcgtgtgtgtgtgtgtgtctctgtstgtgtgtgtgtgtgtgtgtgtgtgtggtgtatgtgggctgtcaacaagaaaaacgggcaccaattctattatttcttttttgggtcatcaagggagactcctcggttcagatggcttggctgggaaggagcagactcagtctctctcaatgtgatgctgtgatacacctacatgctcacagtatagtgtgtgtttgtaggaaaagaaagagacagtgaaggaaagaaatagagttagagatactctgagaaagagag

SEQ ID NO: 626106 - DNA, 625 bp, Homo sapiens
ttttcctgtcagatagttatatccaatctatcatatcttccagctgcatgggagtggaactacacagatagagacaggagagtgtaagactgttaagaaagaatgtaattgtttccaatccagtttctaaaatgactagcctttgaatagagtcatgggctcaggctggcagttcatggagaggaagagagcgcagagcagcatrgaaagaaagcttgggggcccaactcccaactccagctgcacagggaatggtgagccacccccaagtgccttccactgcacagcgaccctgtccagtagtgtcctggaatctggaaatcagaccaatcccagtagtcaccctgcttccagtggtgttaagcaatgggaaggggaagaagtgaagaaggtgtgtgtatatggggtggaggagtagaaggaggctttagagatttccctcttccctttaggcttcttggggaccttagaaattatctagctcaatccatatattttagagatgagaaaatatgtttaaattaggtgaatcctaccaactgagccaggattagagccaaggtctttggtctggaaactcttccagctttgctaaaccacttctatatgtgaaagccgcaaaggc

SEQ ID NO: 626107 - DNA, 612 bp, Homo sapiens
cagatttttggggtataagttctgaactcaccacttcttaaaggaccttgggcaagttatcccttttgtgctacagttttctcacttgggatagattttacacacctcaaagaataggtgagcattaaataagagcatgggaataaaattactaagcacagagcttggcacgtactaagctcagtaagtgctggtggttaaatatcctagcttctggtacattacataaattttaaaacattagcttcatttcccttcctttctgccttgaatccaacagtctgcttctcttaggattacattgctagtgataacactaattattgtaagctaatgaaatgattttatgtccaatatgcatcttttatattttttggtttatatcaccaattaaacacaatttttttctgtgacaaaaawtgtcatatttccccagtacgagcaacagaattcctgactgggacaagagagtctaagaggctcttccacacgttaatatttaaaataatacattatattggaatctttagggtatgggacagtcaagggctcttttcattagaattacttggaaatacagcttgacattaatttaaacgaggacccggccct

SEQ ID NO: 626108 - DNA, 544 bp, Homo sapiens
ctggttaccttaaatgaaattaatgaaaccagactcaaagataactcttttgttctaactggtccattcaccaatatgtactcagtgcctactatytgccaggaacacttctaggcacctgcgacacattactgacacattaatgggtaagataaagaagacttgggctcttcttatactctgacttgtaatctggactctgaaatagagaatcatcctgaattcccacagaggaatgaagtttgctagtttgaaactgcaatggagatggtccaatgacttgattgcttttgtagcctacagtgaaatttcctcttcattccttgagtttaaataaatgtcaggaatactgaaaaggttgaaactgacatatttctattagcgaattcatagtggttggatgtagtgagataaaatgggctcagaaatcacccactctccaggtatgctgctctgcttgtatcatttgtgacctatgttgatgctttttgtactcattggattcttaaagtgtcacagatataagtacaaatgggatgcatta

SEQ ID NO: 626109 - DNA, 571 bp, Homo sapiens
ttggggtatgtgttttgggtgggtggaggcttttatcttcaacctgttgccaaatgctggtagtataattgacaagtcctgggacaactgaaatagtcttagatgtacaaatttgaacaaagatttctcttgcctactatatttcagtttgtgaatcctgcaggaattatataataaatttgaattaaaaagtcttacctggttaccttaaatgaaattaatgaaaccagactcaaagataactcttttgttctaactggtccattcaccaatatgtactcagtgcctactatctgccaggaacacttctaggcacctgcgacacattactgacacattaatgggtaagataaagaagacttgggctcttcttatactctgacttgtaatctrgactctgaaatagagaatcatcctgaattcccacagaggaatgaagtttgctagtttgaaactgcaatggagatggtccaatgacttgattgcttttgtagcctacagtgaaatttcctcttcattccttgagtttaaataaatgtcaggaatactgaaaaggttgaaactgacatat

SEQ ID NO: 626110 - DNA, 544 bp, Homo sapiens
ctggttaccttaaatgaaattaatgaaaccagactcaaagataactcttttgttctaactggtccattcaccaatatgtactcagtgcctactatctgccaggaacacttctaggcacctgcgacacattactgacacattaatgggtaagataaagaagacttgggctcttcttatactctgacttgtaatctggactctgaaatagagaatcatcctgaattcccacagaggaatgaagtttgctagtttgaaactgcaatggagatggtccaatgacttgattgcttttgtagcctacagtgaaatttcctcttcattccttgagtttaaataaatgtcaggaatactgaaaaggttgaaacwgacatatttctattagcgaattcatagtggttggatgtagtgagataaaatgggctcagaaatcacccactctccaggtatgctgctctgcttgtatcatttgtgacctatgttgatgctttttgtactcattggattcttaaagtgtcacagatataagtacaaatgggatgcatta

SEQ ID NO: 626111 - DNA, 589 bp, Homo sapiens
acaagggacgtacttctaatgattaattttcttgtcaccactagttaactaggcaataatcatggtaaagtaactagaaagcacattccctgagggtaaagaattttatgcattttgtttactgctgtatcctcagcacatagtagactatctggtgaataagagttgctcaatatttgttgattgaattaattgtatgagtaaataaaatagttggagaaagtagtgctacaggaaagaataataaaaacatggacttaaacttagaatctcctttctagtctcttgcttctaggactcctagatcccatcttctaaaatagaagaaaagaaagtaaggcacttactagcrtgaaccagaaggagtctgtgttagacaagtaggttaaagacaaaaaggcagggagcaccatactgtcttttgtaactgggaacagagagatgagtctagggaatcaaatcagcttaaagactgtggttcttgtggccactaccattttcttcagcttccatcatagttcttgacctctttattctgttgcctccacacagcagagggcaagactgatgagaactccaggatagtata

SEQ ID NO: 626112 - DNA, 588 bp, Homo sapiens
ctgtttgggattttagatgtagaccttaactctagaaattcagtagcccartaaggatctatgaaaagtgtgcttctcctgtatttataataacactctacttattgtcctggagagacacacaggttgcactgtttttatcacatctattttgaaagaatggttggcagattaaagtggtaaaatagccaaaaaatagccagggtgtattctgattaagcaaactggtgagccctattttatttaatggaaacagaagggagaaggctatattttccttatagtaaaaatttatgtaaagtgaccaaacatccttgttttcatcttcttgtctcacctgctttgagatttgagctcctaccaagaacagcataatacgaggagagcaagtcctgtttttatcaggagaatgatgaataaaaaaataagatgttgagttatgcagtcaatagacatccatggtattggaaacacccagtattcctcaatctcttcttcacttgatattctggctgtccctagattaggttctatgctgccagataacagactttatatagggcttctaggtccgtttcccttccccca

SEQ ID NO: 626113 - DNA, 600 bp, Homo sapiens
gatgtagtagaaaggctgacagagaggcttttgacttacagagggaagaactattatctactagtggtgcattaaaataagaaagttacagtatagattcctgccaccaatacgaattaaactggtcaagattaaacaaaatagaggaaagtgaaagaaatcagccaagagtgcaataatctacagttactcagtacaaatgcatttatagagtatggaaggtttgccaaatagccatgggggatactcagcctttctcaagtcacttccttttctgaatcatagaacacagaaactgatttgggtgactattttgtcaatttttctatggatgatacagaacactctatacgcatatgmaagttaatttataacatacaatagatggcttagggaattagaggttaattcttccagggtaggagaaggttctcactgtgtttgtactgcatgtttcagtgatgggggtagtgatatagctcacagttggcaatgcttgtttggtaagggaatagggtatgttctcctccctcttctgacttcctactcagggcagtttttgatcttcatataaactgtaaatttgcatcagttcactct

SEQ ID NO: 626114 - DNA, 599 bp, Homo sapiens
agttaatttataacatacaatagatggcttagggaattagaggttaattcttccagggtaggagaaggttctcactgtgtttgtactgcatgtttcagtgatgggggtagtgatatagctcacagttggcaatgcttgtttggtaagggaatagggtatgttctcctccctcttctgacttcctactcagggcagtttttgatcttcatataaactgtaaatttgcatcagttcactctaaacatatctgttaatctcttgtcctattctaggcactgtgccaagagcaggacataaaatggtgaataagaaacaaataaaaacaaataagtgatgatcagtgatgatcagggcatagcactctatgttgaggaaaaactctagaacaccagaagagaaaaaaaaataatgagtttgggagtatggatggggagagtgttcagaaataggcaacttcccaaaaagggaagttactaagaggaatgttcttacagygatgttaccaagcacatacaaacattgcctcggcttggctgatgcaccggtctggcatgtagtgatacccattcaggcaacattatgcatttatgcaaagaaaa

SEQ ID NO: 626115 - DNA, 623 bp, Homo sapiens
aatgacattcataggagacaaagttcatacatttgakgcccagtttcacaaaaagttttacaagtgataccattgtctcatactacactacataacaagaatgcttgcaatgaggttctggtaagtgaaatgaacagtccaggactaacttaccccattattgtggaaccactgaaatgaagccttctacaattatggggttaagaagaccatctctatatgaaacgaagtgctttacattagtaattagagctcataatagttttgatcatggatgttttgggattttttttaaaaatagatgtacataaaagttattttcttttactcaaatattccattaaagcacaataaataatatttctctatcttatggagagtattcattataaacatattaacttggtaaaattcttgcttgttaaaatactaatcaagggtgtattcttaccacttctgcacagcacagtaaaatggtgggggcatgtgattgttgattgggttcgggctctgaagattatcaatccaaataaatgcccaatccctcctacaatgtatttgtaataagtccctactccatagcttcaattataaaaatgtatggtaccatcaaatgaaagctt

SEQ ID NO: 626116 - DNA, 623 bp, Homo sapiens
aatgacattcataggagacaaagttcatacatttgaggcccagtttcacaaaaagttttacaagtgataccattgtctcatactacactacataacaagaatgcttgcaatgaggttctggtaagtgaaatgaacagtccaggactaacttacyccattattgtggaaccactgaaatgaagccttctacaattatggggttaagaagaccatctctatatgaaacgaagtgctttacattagtaattagagctcataatagttttgatcatggatgttttgggattttttttaaaaatagatgtacataaaagttattttcttttactcaaatattccattaaagcacaataaataatatttctctatcttatggagagtattcattataaacatattaacttggtaaaattcttgcttgttaaaatactaatcaagggtgtattcttaccacttctgcacagcacagtaaaatggtgggggcatgtgattgttgattgggttcgggctctgaagattatcaatccaaataaatgcccaatccctcctacaatgtatttgtaataagtccctactccatagcttcaattataaaaatgtatggtaccatcaaatgaaagctt

SEQ ID NO: 626117 - DNA, 623 bp, Homo sapiens
aatgacattcataggagacaaagttcatacatttgaggcccagtttcacaaaaagttttacaagtgataccattgtctcatactacactacataacaagaatgcttgcaatgaggttctggtaagtgaaatgaacagtccaggactaacttaccccattattgtggaaccactgaaatgaagccttctacaattayggggttaagaagaccatctctatatgaaacgaagtgctttacattagtaattagagctcataatagttttgatcatggatgttttgggattttttttaaaaatagatgtacataaaagttattttcttttactcaaatattccattaaagcacaataaataatatttctctatcttatggagagtattcattataaacatattaacttggtaaaattcttgcttgttaaaatactaatcaagggtgtattcttaccacttctgcacagcacagtaaaatggtgggggcatgtgattgttgattgggttcgggctctgaagattatcaatccaaataaatgcccaatccctcctacaatgtatttgtaataagtccctactccatagcttcaattataaaaatgtatggtaccatcaaatgaaagctt

SEQ ID NO: 626118 - DNA, 623 bp, Homo sapiens
aatgacattcataggagacaaagttcatacatttgaggcccagtttcacaaaaagttttacaagtgataccattgtctcatactacactacataacaagaatgcttgcaatgaggttctggtaagtgaaatgaacagtccaggactaacttaccccattattgtggaaccactgaaatgaagccttctacaattatggggttaagaagaccatctctatatgaaacgaagtgctttacattagtaattagagctcataatagttttgrtcatggatgttttgggattttttttaaaaatagatgtacataaaagttattttcttttactcaaatattccattaaagcacaataaataatatttctctatcttatggagagtattcattataaacatattaacttggtaaaattcttgcttgttaaaatactaatcaagggtgtattcttaccacttctgcacagcacagtaaaatggtgggggcatgtgattgttgattgggttcgggctctgaagattatcaatccaaataaatgcccaatccctcctacaatgtatttgtaataagtccctactccatagcttcaattataaaaatgtatggtaccatcaaatgaaagctt

SEQ ID NO: 626119 - DNA, 604 bp, Homo sapiens
ccatagcttcaattataaaaatgtatggtaccatcaaatgaaagcttgtgtaacttggacaggtcataacacaaattataaacagacccacaagtgccatagacatcacactttttttttttttgagatggagttttgctcgtgtcacccaggctggagtgcaatggctcgatctcagctcactgcaacctccacctcccgggttcaagcaattctcctgcctcagccttctgagtagctgggactagaggcacctgccaccatgcccggctaatttttgtattttcagtagagacagagttttaacatattggccaagctgatctcaaactcctgacctcaggtgatccgcccacctcagcctcccaaggtggtgggattacaggtggacatcacacttttaatagtaaaatatagcaggttttgaatagattattccttctttcaccctctgccaacaaactttattcagatataatttacaaaagtgtttttgactgaattaagcttttgcttcactcttcaaattaatttacacatatgcagtgcatagacccaggaaatgsaaggaactttgacactgtggaggcatgctgtgttgcag

SEQ ID NO: 626120 - DNA, 573 bp, Homo sapiens
ctattatgggatagatacttcaggatggatccacaagcaatgcctcaactgctgctggaagagcctgtcttgttattttcagtggttgatttagcctatggtccacagaatactagaaggactggaagtgttggaggggccctgaagggactgactgagatgatgctgtgaatgtgcaagggactctatggtgttgctcagctagggaggactctgagaatcaggggacactggggagggcttaggctggtatttctttccagtgactgcagtctgcgctgagagagagctactctggagcccaagctacttcttccgtggccaagtaaagyctgttttagtcttgaggcctggagtaataaaccatcttctctctttattaggaacccttattttgtttttatctcttaagttctgtagttgctcttcttcattaatgagcacaattagtggacagttttacatttaaagtgctggcctctttggaggatgtttaacagtgataggctattgtcaactcaaactgaatctgggaattatgcttcttgacccaaagctaagaagctaaaactt

SEQ ID NO: 626121 - DNA, 573 bp, Homo sapiens
ctattatgggatagatacttcaggatggatccacaagcaatgcctcaactgctgctggaagagcctgtcttgttattttcagtggttgatttagcctatggtccacagaatactagaaggactggaagtgttggaggggccctgaagggactgactgagatgatgctgtgaatgtgcaagggactctatggtgttgctcagctagggaggactctgagaatcaggggacactggggagggcttaggctggtatttctttccagtgactgcagtctgcgctgagagagagctactctggagcccaagctacttcttccgtggccaagtaaagtctgttttagtcttgaggcctggagtaataaaccatcttctctctttattaggaacccttattttgtttttatctcttaagttctgtagttgctcttcttsattaatgagcacaattagtggacagttttacatttaaagtgctggcctctttggaggatgtttaacagtgataggctattgtcaactcaaactgaatctgggaattatgcttcttgacccaaagctaagaagctaaaactt

SEQ ID NO: 626122 - DNA, 584 bp, Homo sapiens
aataaaaagaatgaaaaataggaaaaagagaagcctgtttatattcaaagaaacaagaaaatggccacaactccagcctgcaatctrtgaggtattcctgccccaaagtgtattctcgacctgaagaagtaggaacaggacagcagaggcatacagattttcctcaaacctgtagccccatcctacaattctaaggatttgtagaatatcgatggctgtgtcaggactcaggttactaagtgaggaatacccctgtggagttccagtttagtgattttcaatggcagggatggcatctctaaaaaaggaacctcactgacactatttatggtctaagatccatctcaccaggagcagtatggagagcagggaaaccatgttcatctacccacaatatagaaaggacttgattgtcagctgcactaaagcttcaagggcaaagcattaggtccctccatctgcgaacttgccctctggcagatctcagcagccatgccttccctctctgcatctatgttgcccttgccatggctcctcaggtcctggtgcaggcggaggcactggggaaggagcagagcagtcaa

SEQ ID NO: 626123 - DNA, 584 bp, Homo sapiens
aataaaaagaatgaaaaataggaaaaagagaagcctgtttatattcaaagaaacaagaaaatggccacaactccagcctgcaatctgtgaggtattcctgccccaaagtgtattctcgacctgaagaagtaggaacaggacagcagaggcatacagattttcctcaaacctgyagccccatcctacaattctaaggatttgtagaatatcgatggctgtgtcaggactcaggttactaagtgaggaatacccctgtggagttccagtttagtgattttcaatggcagggatggcatctctaaaaaaggaacctcactgacactatttatggtctaagatccatctcaccaggagcagtatggagagcagggaaaccatgttcatctacccacaatatagaaaggacttgattgtcagctgcactaaagcttcaagggcaaagcattaggtccctccatctgcgaacttgccctctggcagatctcagcagccatgccttccctctctgcatctatgttgcccttgccatggctcctcaggtcctggtgcaggcggaggcactggggaaggagcagagcagtcaa

SEQ ID NO: 626124 - DNA, 621 bp, Homo sapiens
aaaagaagacctcaaaactatacayactaaacaatctgctcagaatgatttttggattaacaatgaaagatggaaatttaaaaatttttcaaatgaatgatcacagtaacacaaattatcacaactgctgggaatatggcaaaagcagtgctaagaggaaaattcacagtgttgaacaactacatcaaaaagacagaaagatgacaaattggcaacctattgtcacacctctgggaactagagaaacaaaaacaaagtaaacccaaccctggccaaaaattaaaaaaaaaagcgaaggtcagagcagaactaaacttaattaaaacaagaaattaattaatacaagagaccagtgaaacaaaattgttcatttcaaaaaatgaaattgatagaccattagttagattcatcaaaacagaagacagaagattcaaataagctcaattagaaatgaaaatggagacattacaactgataccacagaaatataaaagatcatttgagactactatgaatatctctatgtatacaaactagaaaatctacagtaaatgaatatacctctggatacatacaaccaccctaccttgaatcaggaagaaacaaaagtgctgaacagac

SEQ ID NO: 626125 - DNA, 559 bp, Homo sapiens
tggggaaatcctctcagttgctgaagttatctatttcaactctacaatcggtaactgggaaaataatcccaggaagggtttcgagtcctgtaggattttccaaggtatgaatgagggttaaaatttcactgatcatttgattgaccttgtaagttcctacattggtagggacacctcactagcactctacctaccctggaatttgtgttggtctagatccaaatacagcatttcttaaaagacttggttttcctgttttatgggacagacactcatacaagaacagtcacatgtatctgagattagagtactgataatacacacttgtattgttacagaagtgttcctccttaggagtactcaaaatctcctctctagctgtgcctgagttgtagayggactcaagagtgggaatggtttaaatttaaagatataaagataaaaatacaaagatgaaaagatacataaatctatataattttatactactgtggcaactcagttgattcctcttttatttatttatttatttgcattacaggtttttaatttgaatttt

SEQ ID NO: 626126 - DNA, 611 bp, Homo sapiens
aggtgtgacaagataaggcatcttaggcaagcatagtggtggtgaaatagctataagtaagtttttttttgcatatacgttgtagttatattagttacaacaaagttcttagacattctaataactctactatttaacataagccccagagattcctcatgatgtttcctactccttgtgaaggatagaagaatcattttctcacaaataaacctataaaaataagataatgacctaaaccaaagaaatatatatacattcttgggtgtgtaagtatacatatgagtgcacacacatacacctatatatatatacacacatacacgtatatatgtaatatattgtatacattacatatatacaaatatatatacatatatatttacatatatagattcactgaatatatatgcatactgaaatcaggggaaatcaatgaagcacattttttggatatgatatcaatatatacagataataaaacagtcccaaacaaactgatagataggctaaatgctgaaagtgttttctccttcactaagaaaggtatactatttaagaattgctaaatgtattacctttataarttagactacttatagcaggtattc

SEQ ID NO: 626127 - DNA, 562 bp, Homo sapiens
ggagtctcaccagtggtttcccagaacactgtgactgtacttttaccagaagaaatatattagtgtaacagatgttgactctactgtagaagctgtgtgytaaacctaacacatgcctaccaagtaaaagtaactagttttgctgttttgttttctcagtgctattggagatttcggaaaacattttgtgtgtgtgcttaatttttatggattgaaaactttaaacaagtaatatgggccaggcgcggtggctcatgcctgtaatcccagcactttggcaggccaaggtggtggatcacctgaggtcaggagttcgaaaccagactggccagcatggtgaaacccccatctctactaaaatacaaaaaattagccaggtgtggtggcaggtgcctgtaatctctgctactcaggaggccgaggcaggagaatcacttggacctgggaggcggaggttgcagtgagccgagattgcaccactgtactccagcctgggcaacagagggagactctgtctcaaaaaacaaaacaaaccccaggtgttggcatggccacgctgcct

SEQ ID NO: 626128 - DNA, 562 bp, Homo sapiens
ggagtctcaccagtggtttcccagaacactgtgactgtacttttaccagaagaaatatattagtgtaacagatgttgactctactgtagaagctgtgtgctaaacctaacacatgcctaccaagtaaaagtaactagttttgctgttttgttttctcagtgctattggagatttcggaaaacattttgtgtgtgtgcttaatttttatggattgaaaactttaaacaagtaatatgggccaggygcggtggctcatgcctgtaatcccagcactttggcaggccaaggtggtggatcacctgaggtcaggagttcgaaaccagactggccagcatggtgaaacccccatctctactaaaatacaaaaaattagccaggtgtggtggcaggtgcctgtaatctctgctactcaggaggccgaggcaggagaatcacttggacctgggaggcggaggttgcagtgagccgagattgcaccactgtactccagcctgggcaacagagggagactctgtctcaaaaaacaaaacaaaccccaggtgttggcatggccacgctgcct

SEQ ID NO: 626129 - DNA, 583 bp, Homo sapiens
taagtcaacttttttttgagtcagggtcttattctgtcacccaggctggagtgcagtgttgtggtcatggctcagccccaacttcccaggctcaagcaatcctcttacctcagcctcccaagcagctgggactacaggcatgcaycaccacaacaacctaattaaaaaaaattttttttagagatggtgtctcattatgttgcccaggctgatctcaaacttctggcctcaagtttcccaaagtgctgggattataggcatgcgccactgcacccagcctaaatcatcttttggctataaagctctttaaaaaatttttcaaaactcttatcagatttcagccagaacaaacagccttattcctacttctttttttctcctttttaaaccaaagataccttttcaagtgagtcatccaagccaatacgccttaactgaggttatgacttaattaaggactcaccaggcatctccaaagatgtgcaatgcaatcctcaaaagatccagaaccaccccaaagacagctcaaagaaaagaaagtttcactagctgcaagtgaggtacaacccacaactgcctgact

SEQ ID NO: 626130 - DNA, 583 bp, Homo sapiens
taagtcaacttttttttgagtcagggtcttattctgtcacccaggctggagtgcagtgttgtggtcatggctcagccccaacttcccaggctcaagcaatcctcttacctcagcctcccaagcagctgggactacaggcatgcaccaccacaacmacctaattaaaaaaaattttttttagagatggtgtctcattatgttgcccaggctgatctcaaacttctggcctcaagtttcccaaagtgctgggattataggcatgcgccactgcacccagcctaaatcatcttttggctataaagctctttaaaaaatttttcaaaactcttatcagatttcagccagaacaaacagccttattcctacttctttttttctcctttttaaaccaaagataccttttcaagtgagtcatccaagccaatacgccttaactgaggttatgacttaattaaggactcaccaggcatctccaaagatgtgcaatgcaatcctcaaaagatccagaaccaccccaaagacagctcaaagaaaagaaagtttcactagctgcaagtgaggtacaacccacaactgcctgact

SEQ ID NO: 626131 - DNA, 583 bp, Homo sapiens
taagtcaacttttttttgagtcagggtcttattctgtcacccaggctggagtgcagtgttgtggtcatggctcagccccaacttcccaggctcaagcaatcctcttacctcagcctcccaagcagctgggactacaggcatgcaccaccacaacaamctaattaaaaaaaattttttttagagatggtgtctcattatgttgcccaggctgatctcaaacttctggcctcaagtttcccaaagtgctgggattataggcatgcgccactgcacccagcctaaatcatcttttggctataaagctctttaaaaaatttttcaaaactcttatcagatttcagccagaacaaacagccttattcctacttctttttttctcctttttaaaccaaagataccttttcaagtgagtcatccaagccaatacgccttaactgaggttatgacttaattaaggactcaccaggcatctccaaagatgtgcaatgcaatcctcaaaagatccagaaccaccccaaagacagctcaaagaaaagaaagtttcactagctgcaagtgaggtacaacccacaactgcctgact

SEQ ID NO: 626132 - DNA, 457 bp, Homo sapiens
tcacccaggctggagtgcagtgttgtggtcatggctcagccccaacttcccaggctcaagcaatcctcttacctcagcctcccaagcagctgggactacaggcatgcaccaccacaacaacctaattaaaaaaaattttttttagagatggtgtctcattatgttgcccaggctgatctcaaacttctggcctcaagtttcccaaagtgctgggattataggcatgcgccactgcacccagcytaaatcatcttttggctataaagctctttaaaaaatttttcaaaactcttatcagatttcagccagaacaaacagccttattcctacttctttttttctcctttttaaaccaaagataccttttcaagtgagtcatccaagccaatacgccttaactgaggttatgacttaattaaggactcaccaggcatctccaaagatgtgcaatgcaatc

SEQ ID NO: 626133 - DNA, 517 bp, Homo sapiens
gaaaggtcaagattcatacaagtaaattaaaacaaaataatttttatatgtttctctcccaractaaagataccctttaggaaaaggaatttcctgatggattttaagaacttgaactctgtttcaaactctgatgtcagctggaacattgcttagcttattctccggatgttaatatttcaatgacatggcaagatttacatctccaacggactaagaaaagcctgcaggcaggttgggaatttaaagggtttttctggggagttaaaggagagctctctaaaacaattttttttcaaattccttatcaccagggcaaaagaactcatctttattcacctttcagtttaaaactaaggaatttgtcataaatgaatatccaagtctatattttaaagaacaggaaacatcttcaattttaaaagagtgccatgtaaaggaaaaaaatctatgcaaaacttccagtaccttcatccagacctccaggccctaaggcagaggtggaaaaggcagttta

SEQ ID NO: 626134 - DNA, 517 bp, Homo sapiens
gaaaggtcaagattcatacaagtaaattaaaacaaaataatttttatatgtttctctcccagactaaagataccctttaggaaaaggaatttcctgatggattttaagaacttgaactctgtttcaaactctgatgtcagctggaacattgcttagcttattctccggatgttaatatttcaatgacatggcaagatttacatctccaacggactaagaaaagcctgcaggcaggttgggaatttaaagggtttttctggggagttaaaggagagctctctaaaacaattttttttcaaattccttawcaccagggcaaaagaactcatctttattcacctttcagtttaaaactaaggaatttgtcataaatgaatatccaagtctatattttaaagaacaggaaacatcttcaattttaaaagagtgccatgtaaaggaaaaaaatctatgcaaaacttccagtaccttcatccagacctccaggccctaaggcagaggtggaaaaggcagttta

SEQ ID NO: 626135 - DNA, 560 bp, Homo sapiens
tgcaattttggctcgctgcaacctctgcctcctaggttcaagtgattctcctgcctcagccacccaagtagctgggactacaggcacaagccaccatgtgtggctaatttttgtatttttagtagagatggggtttcgccatgttggccaggctggtctcgaactcctgacctcaggtgatccacccacctcagcctctcaaagtgctgggattacaggcgtgagccaccgtgcctggcttccatactgttttccatagtggttgtactagtttacattcccaccagcagtgcagaagtgttcccttttcaccacatctacgccaacatctattttttaattttttaattatggccattcttgcagtagtaagacggtatctcattgtagttttgtgtttccctgattagtaatgttgagcattttttcatgtttgttgcctgttygcacatcttcttttgagaattgtctattcttatcttttgcccaatttttgacgggattacttgctgatttgagttccttgtagattctggatatttgtccttttttggatgcat

SEQ ID NO: 626136 - DNA, 611 bp, Homo sapiens
gctaggcacataattaaattgtctcctgcagaatagaggtgatggatgccatttcctgagcagagcttttaagagagggtgcatcctcaaccctctgtttcttcttgcactgactagatgcatgtaatgtaagayccttagggagagtagagacccaagagaaaagaaaccagttccctgagtcacagcatggaagaaagcctccagcctatccaaacagctgcttagactgttaactgagcacaatgtaagcctctatagtttttcagtcattatgtaatggcatctatttgtacagtgcttagttatcctattataatgagatgtaacctagaatggttaagtaacatacacaaaaccatacagaaatgtggtgtcctgatcatgattattactaaggtctaagtctaaaatctaaactcttaatgcattagtctcctaagtgggacacaagataactcaacattgaggaagatattgttaactaaaaaattctattcatatttgtatctttattttgtgtatatttttaaatgtacataccatatcagtagagttgtatatgaatataatttacaaataaaatacatatattggtggtatgtgtttga

SEQ ID NO: 626137 - DNA, 581 bp, Homo sapiens
tctatttgtacagtgcttagttatcctattataatgagatgtaacctagaatggttaagtaacatacacaaaaccatacagaaatgtggtgtcctgatcatgattattactaaggtctaagtctaaaatctaaactcttaatscattagtctcctaagtgggacacaagataactcaacattgaggaagatattgttaactaaaaaattctattcatatttgtatctttattttgtgtatatttttaaatgtacataccatatcagtagagttgtatatgaatataatttacaaataaaatacatatattggtggtatgtgtttgaaatctttttactgatggggtaaactatctaaatttgcctaagctgtcctggcggtgaaatggaggtgaacacgaactgatggttttgtcccaccatttgtcacctattacattcatatttcacatcagaggagcctttgtggatgtcatgttttcattgattactgattaatctttcccatcaagtctctatcctttgcaatttagacagagaacagaaaaaacttcttttgcttttcctactttgtttatcctc

SEQ ID NO: 626138 - DNA, 573 bp, Homo sapiens
agcctagcctaccttagatgtgatcagaacacttttattagcatatagatgggcaaaatcatctaaaacaaagcctgttttataataaagcattgaatatctagtgtaatttmttgaatactatactgaaagtgaaaaacagaatgattatatgggcactgaaagtatggtttctaccaaatgtgtattgcttttgcaccatcatataattgaaaaattgcaagtcaaaccatcgttagtcaaggattgtctatagtaaaagcttcccagaacagacaactgagctcatcatcttcagatgaggtgtttgcctcataagagagtaaggcaatgggagaaggacctcccaggagaagaaaactgcataaaagtgtggaagggagggaaagcaaccatgtgccccacaaggttggccacaagtagggcccaggggtggtggaagagaaacaggggatgagtccagagaggcaggcatgactgttggatagatatgaaagggccttgaatgccatgtgaggagcttgggctgaaccctgcaggggaaagatctgaagcaggggagttttataaagg

SEQ ID NO: 626139 - DNA, 278 bp, Homo sapiens
agccgagatggcaccactgcacttcagcctgggcaacagagtaagactccttctcagaaaaaaaaaaaaagaaaaaaaaaaaaagacatagctggagataggcttctctgacctagcaagaccttccttccatgagctgcagcacaaacagctagacacctattagggacttkggggacccagggcaagtgttatcaagacaggtttccttggcttctgttgcgtgggacctctgcatatcagctgcatggttgtgtctttttaaaaatatattgaga

SEQ ID NO: 626140 - DNA, 278 bp, Homo sapiens
agccgagatggcaccactgcacttcagcctgggcaacagagtaagactccttctcagaaaaaaaaaaaaagaaaaaaaaaaaaagacatagctggagataggcttctctgacctagcaagaccttccttccatgagctgcagcacaaacagctagacacctattagggacttgggggacccagggcaagtgttatcaagacaggtttccttkgcttctgttgcgtgggacctctgcatatcagctgcatggttgtgtctttttaaaaatatattgaga

SEQ ID NO: 626141 - DNA, 634 bp, Homo sapiens
attacttaataaataactcaagtacaaaacattccacatttttccttctctttcttcttcttttttcttttaatttgaggtcaataaaattttktcctcattagttctatgaataagtgattagccaataccttaacaatttcctgtgtgtgaaccaatagatcctctagtattttttcaaactcataaattttataactcaatttatatttgcccatttgaattcaccacagagacaaggatgtgattaacagaataaaatttctaactaagatcaaagaattatatattattactttaggtaactctaagtactataagcaaaaaacaaaatgaaacaaaaaaaaactaatgagtttattgagtcaacatagcaaggtttttcattcttattgaaaaacaaggttattaaattttttcttacaaaaacaacctaagaataatgaaattatggttatcatatagagtacagattaaattagcttcaaattttatcaaatcacatccaaatgtagctactaaaatccagcagccaagagagaaaaaaactggggatactaacccttggctgttttagctataatacattttcccccacattattatccagtaattgggatatataaatgtaggc

SEQ ID NO: 626142 - DNA, 575 bp, Homo sapiens
gaattctttagttactgggggaaattcagcccctgatatttcaacgtgggtacttttctattttccctaaatgtcggccagtctgagaaataaagggaaagagtacaaaagagagaaataaagctgggtgtccggggcagacatcacatgttggtaggttctgtgatgccccataagctgtaaaaccaacaagtttttattagtgattttcaaaaggggagggagtgtacgaatagggtgtgggtcacagaratcacatacttcacaaggtaataaaatatcacaaggcaaatggaggcagggtgagatcacaggaccggggtgaaattaaaattgctaatgaagtttcaggcacgcattgtcattgataacatcttatcaggagacagagtttgagagcagacaaccagtctgaccaaaatttattaggcgggaatttcctcgtcctaataagcctaggagtgctactggagaccggggcttatttcatcccttatcgacacccataaaagacagacgttcccaaagcggccattttagagacctctcattgggaacacattctctttctcagg

SEQ ID NO: 626143 - DNA, 352 bp, Homo sapiens
agatcacatacttcacaaggtaataaaatatcacaaggcaaatggaggcagggtgagatcacaggaccggggtgaaattaaaattgctaatgaagtttcaggcacgcattgtcattgataacatcttatcaggagacagagtttgagagcagacaaccagtctgaccaaaatttattaggcgggaatttcctcgtcctaataagcctaggagtgctactggagaccggggcttatttcatcccttatcgacacccataaaagacagacrttcccaaagcggccattttagagacctctcattgggaacacattctctttctcagggatgttccttgctgagaaaaagaattc

SEQ ID NO: 626144 - DNA, 586 bp, Homo sapiens
agatgaaccaggtgtgtggttgaatgcagcaaggtcagtgagtgagctgctttagttttgaccctgatccacagttgctaactaaataataatttgagccattattatatttttaggataaaatctgtatcacttattcctatctaacgtacttttttttttttatacagagtctcactctgttgcccagactggagtgcagtggtgcgatttcacctcacccagcctctgcctcccaggttcaagtgattctcgtccctcagcctcctgagtagctgggattacaggcatgcaccaccatgactggataatttttatatttttagtagagatagggttttgccatgttggccaggctggtatcgatctcctggcctcaagtgatctgcccacctcagcctcccaaagtgctgggataacaggtgtgagccactgcgcctggcccctatctaacatactttgaatgacattgtcraaatatgacactgttgaaatcgctatttctccttcagcaccacagagctttcttttagggggcaaatcacttcttagggatgctttctccgtgtgcctttattatatgttg

SEQ ID NO: 626145 - DNA, 532 bp, Homo sapiens
aatagcctacatcaaaaactgacagcgcaagttatacatatacacatttcatctacctttccccagaatgtaaactctttgaacagagagactgtgcattattctgtaacccatagggcttaaccctctgccctatacagtaatagcagccacatttattcactgactaggttaggcactgtactcgtgtcagccaccattctgggtctctgacatgcattatttcatcaaatccttgcaactcttcaagggtaacccgtgaataatacccattgcataggtgatgaaaccgagggcacataagtacacaggaagtaatgggaytggatttgaactgagctctatatgccccaaagcccttcttctgttgtattaattgtctgattacagtgcagattaacaataaatatcaatgaataatcaagtctacttcatctttgtgtttccaggcaggattatgcaacaatccctgagacatgaagatttatgttattataatagagtcatgtcaacatagtcctcccaggataaa

SEQ ID NO: 626146 - DNA, 559 bp, Homo sapiens
aatgaaatgggagctcagacagaagcaaaatgagaaaccaggcatccagtaatggatagtggcaatgtggaaaggggagatggccaaggtccagttcctgagaggcccatctgtacctttggtgactgggtgccacaggagcccccagtgccttcatagctcctccccctttttttaaacctgagctcccagtgggcttcttgccttgaaatgattcccgcccaggctctcagagtctcaaaacagagctatgataaaatgaatggattttgcttgtctttgcctttctgcttccagggttaatttttgtttttgttgttattttttgttttgagatggagtctaactctgttgcccagactggagtgcagtggcgkgatctgggctcactgcaacctccacctcccaggttcaaacaattctcttggctcagcctcccgaatagctaggatcacaggcacctgccaccatgcctggctaatttttgtatttttagtagagataaggttttgccatgttggccaggctggacttgaactactgacctcaagagatctac

SEQ ID NO: 626147 - DNA, 533 bp, Homo sapiens
gctcagacagaagcaaaatgagaaaccaggcatccagtaatggatagtggcaatgtggaaaggggagatggccaaggtccagttcctgagaggcccatctgtacctttggtgactgggtgccacaggagcccccagtgccttcatagctcctccccctttttttaaacctgagctcccagtgggcttcttgccttgaaatgattcccgcccaggctctcagagtctcaaaacagagctatgataaaatgaatggattttgcttgtctttgcctttctgcttccagggttaatttttgtttttgttgttattttttgttttgagatggagtctaactctgttgcccagactggagtgcagtggcgtgatctgggctcactgcaacctccacctcccaggttcaaacaattctcttggctcagcctccygaatagctaggatcacaggcacctgccaccatgcctggctaatttttgtatttttagtagagataaggttttgccatgttggccaggctggacttgaactactgac

SEQ ID NO: 626148 - DNA, 545 bp, Homo sapiens
gctcagacagaagcaaaatgagaaaccaggcatccagtaatggatagtggcaatgtggaaaggggagatggccaaggtccagttcctgagaggcccatctgtacctttggtgactgggtgccacaggagcccccagtgccttcatagctcctccccctttttttaaacctgagctcccagtgggcttcttgccttgaaatgattcccgcccaggctctcagagtctcaaaacagagctatgataaaatgaatggattttgcttgtctttgcctttctgcttccagggttaatttttgtttttgttgttattttttgttttgagatggagtctaactctgttgcccagactggagtgcagtggcgtgatctgggctcactgcaacctccacctcccaggttcaaacaattctcttggctcagcctcccgaatagctaggatcacaggcacctgccaccatgcctggctaatttttgtatttttagtagagayaaggttttgccatgttggccaggctggacttgaactactgacctcaagagatct

SEQ ID NO: 626149 - DNA, 563 bp, Homo sapiens
aaggcttgctgtctcccaactcccaggggatagtctcggcacctccatttggccattcctactttctgccttgtgtgacagttctgtgcatctggtcctgtcccttactagcatgtgaggtccttggggacagaagctggcttctgctcacctaaccagtttggctggattgcctgatgtttagaccatatggttttgacgaatrtagcctcataggtgttcacacaaagccatggcatcaaaaccaagtctccagaatgctctggagtatgactgggcgcaacttcctgtttttgtaaaggaggacactgaggctgagggaagtcactgagagatgcaccttgactttctgcattcctgatacagctaatctcacttctctgagaagtcatctcagacgctctccgttgacataaacatctcccacctcccagcctagctctgtgagatgttattccatgtaatgatggccaagggaggcattccagataaagaattaagaagaagccccagttcttcactagtgaaactggtgggttcccctagtttgacagatctgctca

SEQ ID NO: 626150 - DNA, 557 bp, Homo sapiens
acacatgcacacacaccccagccagagcaaggcttgctgtctcccaactcccaggggatagtctcggcacctccatttggccattcctactttctgccttgtgtgacagttctgtgcatctggtcctgtcccttactagcatgtgaggtccttggggacagaagctggcttctgctcacctaaccagtttggctggattgcctgatgtttagaccatatggttttgacgaatgtagcctcataggtgttcacacaaagccatggcatcaaaaccaagtctccagaatgctctggagtatgactgggcrcaacttcctgtttttgtaaaggaggacactgaggctgagggaagtcactgagagatgcaccttgactttctgcattcctgatacagctaatctcacttctctgagaagtcatctcagacgctctccgttgacataaacatctcccacctcccagcctagctctgtgagatgttattccatgtaatgatggccaagggaggcattccagataaagaattaagaagaagccccagttcttcactagtgaaa

SEQ ID NO: 626151 - DNA, 585 bp, Homo sapiens
catgcgcgcacacacatgcaaatccagagtggacaataaccccaggcgtgttggagtgtttgatgggaygaccgcgggaaagcaagccaggagccagttctaaaaaacaatatttatttattacaattggcagagcaatggagaaaattgccacttagataggattttacattttgcaaagcgttttgtaatcagcacaatttctcccaacagttctcgagggcaagttgtttttgtcattcccatttgcaggcaaggaggagatagtaggagagaatgagggaagtactgtgcttctacttacacagacctcaagaggaaaggagaactctggcttaactgaatataagcattttttttttagaatatctactatgtgctgggcaatggggaagacctgcataagattctgggccttagctcaccactgatttctctgggggtgtatgccctttgtctcatccagagaagaaaacaatatgtaatcttacattgcctccacttagtgctttgcttggccacctctcttttggaaattcacataagttacatcaggctaggtaatgctgctgtaacaaataatcc

SEQ ID NO: 626152 - DNA, 374 bp, Homo sapiens
ggcttttacagccacctgggtcaggtcaggtcttcctgcgagtctcatcctccttacctccaccctctgtcaagaccccacagagattcccctggagagtcgactcycctcagggctcccagcacctgcaaggtctgcccccaggtctttggcagcctcagggacctgggccctccctcatctccagctgctttcttcactcatcctttatcatgctgttccttctgcctggaatgctcttccctcacctgtttccccagcctggttaattcctgctcatttccgtgtgctcaagtgtcacctccctcaggaagccctcccacccagcctcgggaagtggcccccgttgtgcacctgtgacatctgtcacatgc

SEQ ID NO: 626153 - DNA, 418 bp, Homo sapiens
gaggtattcatagtagtctcaaaagatcttttgtatttctgtggtgtcagttgtaatggctccatttgcatctctaattgagattaatkgaattgtctccttttcttggctagcaagtggtctatcaattttgtttatcttttcaaaaaagtcttcaacaaactaggcataaaaggaacatacctcaaaatttaaaaagctatatacaacaaacccacagccaacatcatactgaatgggaaaaagttgaaagcactccccctaagaactagaaccagacaaggatgcctactttcaccatttctactcaacatagagctggaagtcctagccagagcaatcaggcaaaagaaagaaataaagggcatccaaatcagaaaagagaaagtcaaactatctctttttgccaatagtataa

SEQ ID NO: 626154 - DNA, 568 bp, Homo sapiens
gtggcttgaacagatccaagcaagccaaagatagataaggtattgacaagagataatacattatgcatattaaaaataagagaggggtctgagaatttaattgtatcttgatactctgtaaatattttggcagcagggagtctaaattagctatcttggttatgaggcaatttgccttcttactatagtccaaggaaaatttactcctgagtacatgagataagtgagtgggccacagaaaaatgttgttttctgcctctgccatgatcggctcagcaagatgaacttcaatatgggttgccataaatggaagatttggtctctttttggttgtttcatcttttgcatgaaggtagggaccacataatggcccatcaaaaaattctgctgcagacaactgcagaagacaaatggaacagcttaggaaaagggctgatatgattcagaactttcacgagtaggaaaaatggacacyacacccatttcagttatcaagttcaagcaaagtgggcagggggcaaatctaaccatgatgcaaagatacttccctttcccccgtctttgtaat

SEQ ID NO: 626155 - DNA, 610 bp, Homo sapiens
attttacatttcaccagtgatatgtgagggttctggtttcttcacattcttaccaacacttgttatcatcggactttaaaaattatagtcatccttatgggcattaagtggtatgttattggtagttggattgcatttccctaatggctaatgatgctggttatcttttcatgtgccacttgtctataaacacatcatttttggagaaacggctattcagataagttttccattttttgaattgagttgtttgtattcttattattgaattgtaagggattttttatatattcttgatacatgtcccttattagatataggatttgcaaatattttctaacctcagattgtgtgtaaaatggggaaatgggtgacctttgctctgtgggcttgacctgccattttgtcattagccattttggatccctatgtccacatctgaaaaagaagtgytcaaaattcatgctacatggtggtatcttatgggtacttgtggcaaaagttaaatataccacatattctggaggcagccattttactaaaacaattcaggcagataacattctatcaaaataatattttggttttacaaattagcattgatcctcac

SEQ ID NO: 626156 - DNA, 597 bp, Homo sapiens
tactttttaaatgtctgttcactcccacttgttgttatagacgtcactgattacatctttatatattgcgtatccattaacatagttttctagctatcattatttaacatgttgtgcctttaaaggtggcgggattctaatgattatggctacataaaagttatacatatttctagtgtacgtgtgttgttttgataaaggtatacaatgtataatgatcaaatcagggtaactgaagtatccatcatctcaagcattttatatttcttaatgttaggagcattccaatttcacttttttagttattttaaaatatacaataaattattggtaattatggttaccttattgtactaccaaatattagatcctatttattctatcaaactgtatttttgtacccattaaccatccctactttatcccccsatccactaccttttccagcctctgataatcatcattctatgctcctatttttatgaattcaatttttttagatccttcatgtaagtgagaacgtgtggtatttgtctttctgaccctggcttatttcactttacataatgttgtccagtttgattcacattgttgcaa

SEQ ID NO: 626157 - DNA, 520 bp, Homo sapiens
caatagatagatatactaggcttttttaaaaaaattactggctctggactggcctatacgggtataggaaattattggtgtcgaaagccatgcttttactttatgggcattatctgggtggagacatgaactacagttttgtaaaagcttttcatagtgctatatgaggcaccctatttctctaatggtacgggggtaacgaaaagggtgttaagctaacaatttcttgcaaccttttatctggtccattggcttgaaggtacatgagaagaataggtgaacatacttttaagggtgttgaaaaagtctgaactccaaactcctatatgcaactgcctgcttggcgtcttcattagaatgttgaataagcatctgaaacttaacatgtccaaatataattccayctcctcattccctttcccacctcctgcaaaattgccatctctttctcaatcttccccatgaaactgattggaattaaattttctcaagttaatttatttactcaatttaatattct

SEQ ID NO: 626158 - DNA, 520 bp, Homo sapiens
caatagatagatatactaggcttttttaaaaaaattactggctctggactggcctatacgggtataggaaattattggtgtcgaaagccatgcttttactttatgggcattatctgggtggagacatgaactacagttttgtaaaagcttttcatagtgctatatgaggcaccctatttctctaatggtacgggggtaacgaaaagggtgttaagctaacaatttcttgcaaccttttatctggtccattggcttgaaggtacatgagaagaataggtgaacatacttttaagggtgttgaaaaagtctgaactccaaactcctatatgcaactgcctgcttggcgtcttcattagaatgttgaataagcatctgaaacttaacatgtccaaatataattccatctcctcattccctttcccacctcctgcaaaattgccatctctttctcaatcttccccatgaaactgattgkaattaaattttctcaagttaatttatttactcaatttaatattct

SEQ ID NO: 626159 - DNA, 505 bp, Homo sapiens
taattgctcttgctgggactttcggtactatgtgttttyaccaggaagggatgttgaactttgttaaatgctttttctgcatctattaaaatgatcatatggcctttgtccttgtttctgttattgtgatgtatcacatttattgatttgaatgtaaattggtatgaccattatagaaaacagtagggaaattcctcaaaaaatcaaaaatggaactatcatatgattcaggaatcccactactgagtgaatatccgaaggatataaaatcagtatgttgaagagatatctgcactctctgtttattgcagcactatacacaatagccaagacatagaatcaacctaacagtccaacaacagattaatgaatgaagaaagtatgatgtatatacatgatggaatactattcacccataaaaaagaatgcaatcctgtcatttgtgacaacatggatgaacttggaggtcatgacattaagtgaaataagccaggcacagaaagac

SEQ ID NO: 626160 - DNA, 636 bp, Homo sapiens
tttgggtgtctagcccagccctctcttctgaattccagactcatctactcagctgcctgctcagtgcctctgcctgcatggctagtgggtgtctccaagacagcgtgttcagatcccatccttcccctccagtctcttcctcctgctgtctcccccatctcaattaatggcagatctatctttcatctgctcaggccatgtacttgaggattgttcttgacactctggcactccacatccaaatctagtggcaaatcttgttggctcctaccttcaaagcagctccgaatcagactgcttctcacccccaacctgtcagcacccttacccagtgctcccttgcctcagtgttctccacctgttctccctgcttcttttcttgcccctacaccctgttttcaacagagtgatgcttttataatgtgggtcaaatcctggcactactctcctgcaagccatttattcattcattcattcattcattttttttagacagagtcttgctstgtcacccaggctggagggcagtggcacaatctcagctcactgcaacctccgcctcccgggttcaagtgattctcttgcctcagcctcccgagtagatgggattacaggcatgtcccaccacacctggct

SEQ ID NO: 626161 - DNA, 565 bp, Homo sapiens
gcctactatgtgcaagacactctgatagatgctgggcataaaacataaataagacacatgatctctgctttcaaggaatctggagaagacctctgggagatacatatttttgagtaaagcttcaattcaaactgtgctaartgttataaacagaggtatgtatgtgtaaatttgagatagagttagccacttgaggaagttggggacacttgaattgattattgaagaaagatttcatttacaaagccaaaaagaggtgaaagggaacctaagatgtcagaaacttctgggtatggtagcatgtgcctgtagtcccagctacttgggagactgaagcagggggattccttgagtctcgcagttcgagtccagcctgagtaatatagtgagaccccgtctttatgaaaagaagaagataccagaaatcacatatacataggcgtagagggatgaaaacatcttgtgcttgaggaattgagagtgattgtatgtttctgggctggaagagtgggaaagtaggtttagctaaagctgaggagccttctaatcatactgaagaatttga

SEQ ID NO: 626162 - DNA, 621 bp, Homo sapiens
gaaactgagagaagaccatcaggcccaaagcaaaaggaaagaaaaataatccaaactaaagctggagagacagcagagggtaaagcttataatccaagctttataagccaagctaagaaattttggttttattccaagcacaatgagaaaccactaataagtgttgattagattatttaccttatacaatcactgtagctacggcattactggaaggcagaggaggtggtcagaatcaacgtgcggagaacagctaaactatcacaacctccctcmagtgtctcttaagtaaaaatatagcctaacaaatacataaacataaatgtacagagcagagctgaccttacacagagggaagaatgatgagaaaaatcagcatggccataatcaagagttttatagcccttgttctaaaaattataaaccgtgggaataccgtgatgacttctttttataaatatatatctgaatttactttcaaatgcatacttaaccttctttactgtggtttcccttgttttcaaaagttatatttgagtctcccttcaaatgtcattattcccccattttcacaaaatctgctttatgaaagcaaaccactttttgaatgtataagtattc

SEQ ID NO: 626163 - DNA, 344 bp, Homo sapiens
tccttttttcctcagtccacacatccagcctatgtgcaaatcctttcaattctaccttcagaacacaccccaagtgcatttgcatttctccatctccattgcttcctctgcagtccaagctaccaccatttctcacatggaataytgcaactaactttaagaatctatttcccacacagcagctagaagtacatttttttaaatgcaaattaggccatgtcatgcccatacttaaaacccatcaatggcttcccattgcacttagaatgaaagtcaacctccttatgccagctttcagagactttcctgcatcctcccaactctctatccttgtcttgtacctg

SEQ ID NO: 626164 - DNA, 573 bp, Homo sapiens
agaatttcatgaagaaccttttcttactgagcactaggcaaaatgtagaaggttcatatgasggggcatatgctccagtacttcaagattttaggtcattaaatgattcaacaaatagaacaaagaaacacacagctcatttctcaaaaaaaggggaggaagaaaacttggaaggcttgggaaatcaaaccaagcaaattgtagagaaatatgcatgcaccacaaggatatctcctaatacaagccagcagaattttgtcacgcaacgtagtaagagagctttgaaacaattcagactcccactagaagaaacagaacttgaaaaaaggataattgtggatgacacctcaacccagtggtccaaaaacatgaaacatttgaccccgagcaccctcacacagatagactacaatgagaaggagaaaggggccattactcagtctcccttatcagattgccttacgaggagtcatagcatccctcaagcaaatagatctccattacccattgcaaaggtatcatcatttccatctattagacctatatatctgaccagggtcctattccaagaca

SEQ ID NO: 626165 - DNA, 444 bp, Homo sapiens
aatatgaaaacatatgaaaggataaaactcactagtaaaaataagtacattgtcaaatccaaaacactctagtagtgtaatggcagtgggtaaattaattatatctttagtrtaaaagataaaagacaaagaaagctattttaaaaactaaagctataataatgtgttaaggaatgcaaattattaaaatatgtaaactgtcacatcaaaaacataaaataggctgggcacagtggctcatggctgtaatcccaacactttgtgggggccaaggtgggaggatcacttgagcccaggcatttgagactaacttgggcaggatagtgagatctcatctctataaaaaatttaaaaattagtaaagcatggtggtgcatgcctgtagtcccagctactcaggaggtggaggtgggaggactgcttgagcctgggggggtcaaggct

SEQ ID NO: 626166 - DNA, 444 bp, Homo sapiens
aatatgaaaacatatgaaaggataaaactcactagtaaaaataagtacattgtcaaatccaaaacactctagtagtgtaatggcagtgggtaaattaattatatctttagtgtaaaagataaaagacaaagaaagctattttaaaaactaaagctataataatgtgttaaggaatgcaaattattaaaatatgtaaactgtcacatcaaaaacataaaataggctgggcacagtggctcatggctgtaatcccaacactttgtgggggccaaggtgggaggatcacttgagcccaggcatttgagactaacttgggcaggatagtgagatctcatctctataaaaaatttaaaaattagtaaagcatggtggtgcatgcctgtagtcccagctactcargaggtggaggtgggaggactgcttgagcctgggggggtcaaggct

SEQ ID NO: 626167 - DNA, 553 bp, Homo sapiens
agccattagagataatggtatagagatgcctcaaaaattaaaaatagatctatcatattttctagcaatcccactactgggtatataccaaaaagaaatgaaatcagcatgttgaagaaacatctgcatccccatgtttatgacagcattattcacaatagtcaagatataaaatcaacttaaatgcccatcaatggatgaatggataaagaaactgtgatatagatacacaatggaatactattcatccatttaaaaaagatgaaatcctgtcattttcaacaacgtkgatgagcctggaggacattatgttaagtgaaataagccaggcagagaaagacaaatactccatgatctcagtcctatgtacaatctttaaaatttgatctcatagtagttgagattagtgattctaggaagataagggggaagtgggagatggggagagattggtcaatgggtacaatgttacaggtagatagaaggaataagttctggtactctattgcacagtagggtgacaatagccaacaataatatattgtatatttca

SEQ ID NO: 626168 - DNA, 564 bp, Homo sapiens
gtaaatttggttttgaacatgtgggttttttgagatatctaggtggagatgttgagaaagtgattggctgtatgagcctggagttccagaagaggtcagsaggggagacagaagaaggagcagtctgagaagtaggagaaaaaaacccacagagatgttggcacagaggccaagggaagagagagttttaaaaacgaatgaatggtcaacaggtgcaaataaagactgaaaaatgtccattggatttagcagcatgatggtgattggtgaccttggcaagagctgttggtttgatagtagcccaatgttcttgataaatttgtttacaagtcaaggtagcaataaagtgtctaaagtcaatttgtccattctgtcctagcaagtgttttccatttcagattctctacttcatagccataggtgtcttattcctactttacaggtctgattggatgccacaggaaatcagtctattggcatgtgattggaatgggcaccactcctgaagtgcactcaatattcctcgaaggtcacacatttcttgtgaggaaccatcgccaggcg

SEQ ID NO: 626169 - DNA, 557 bp, Homo sapiens
ccaagtagaattcagtccagggctgcaaagctgatataatatttgraaatcaactaatgcgctccatcatattaacaggctaaaaaaaaatcacccaataatcatataatcatatcagttgacacaggaaaagtatttggacaaaatttaatacacattaaattcctcaatttgatacagagcatctacaaaaaacctacagctaacatacttaatggtgaaagattaaatgctttacgctaagatagggaacaaggcaagattctgctctcactttttttttttttttaaaagagacagggtctcattctgtcacctaggctggagtgccatgctgccatcatagttcactgcatacttgatctcccaggtttaagggatcctcctgggtagctgggcctacaggtgcacaccacgatgccaggctaatttaaaaaaaaaaattttttttttagagatggggtcttgctttgttgcccaggctggtctcaaactcttggcctcaagccatccttccgcctcagcctcctaaagtgctaggattacaggcttgagcc

SEQ ID NO: 626170 - DNA, 576 bp, Homo sapiens
taaggacattttccattatgccaagctaactctagttaatttacggaattatgctgacctcaattcatgagtatttcatcttactttctttcttcttttattagcagcttaataagttcctagagcttacaaacttaaagtctctggaataagtaatgttctgctgttagctctgatattgtctgaaatagtctaagaacttaataaatttggaaaatttggtaaatgttaaaatagtaattttatttattacatttttatacatagcattcatcaatgtcttttggaatataaacaaaagatatctaaaaatcctcaaaatagcaatccaggtaagacttctgatagtaaactactcttggtggtgctaccataaggttatggaaatgttgatcatacaatagcaattaaaaaagcaatgtggaaataggatgtgtttacatatatacatatgtgtgtgtgtacatatatatatatagctttgattcaattttttagtttataawtcagaattagttataggtagtttataatctcagaaaaatattatctgaaaaaatatgtttttaattatgg

SEQ ID NO: 626171 - DNA, 649 bp, Homo sapiens
tttgtaactgaacagtattccactgtgtatatgtaccacgttttctttattcattcatycattgatggactcttaggttgacttaacatcatggctattataaacagtgctgcaatcaacatgggggcacagatatctctacaacatactgattttatttcctttggatatacacccagtagtgggattgctggaccctatggtagttgtatttttaatttcttcagaaacccccataatgttttccaaaatggttgtacgaatttatattcccaccaagagcatgcaagggtttctttttctccacatcctttctaaaagttgtccttttgaaaatagccactctaacgggtgtgagcttatctcattgtggatttgattttcattttcctgatgattagtgatgttgagcattttttcatatacctgttggtcatttgtatgttttcttttgaaaaatgcgtatttaagtgatatggtttggctgtgtccccacccaaatctcatcttgtagttcccataatccccatgtgttgtgggagggacctggtgggaggtaattgaatcatgggggcgattacccccatgctgttctcgtgatagtgagttctcacgagatctgatgattttataaggggctttttcactt

SEQ ID NO: 626172 - DNA, 649 bp, Homo sapiens
tttgtaactgaacagtattccactgtgtatatgtaccacgttttctttattcattcattcattgatggactcttaggttgacttaacatcatggctattataaacagtgctgcaatcaacaygggggcacagatatctctacaacatactgattttatttcctttggatatacacccagtagtgggattgctggaccctatggtagttgtatttttaatttcttcagaaacccccataatgttttccaaaatggttgtacgaatttatattcccaccaagagcatgcaagggtttctttttctccacatcctttctaaaagttgtccttttgaaaatagccactctaacgggtgtgagcttatctcattgtggatttgattttcattttcctgatgattagtgatgttgagcattttttcatatacctgttggtcatttgtatgttttcttttgaaaaatgcgtatttaagtgatatggtttggctgtgtccccacccaaatctcatcttgtagttcccataatccccatgtgttgtgggagggacctggtgggaggtaattgaatcatgggggcgattacccccatgctgttctcgtgatagtgagttctcacgagatctgatgattttataaggggctttttcactt

SEQ ID NO: 626173 - DNA, 540 bp, Homo sapiens
acagaaggacaaataccataagattttgctcatgtggaatctaaaaaagttgatctcatagaagtagagagtagagagccasgcatagtggctcacacctgtaatcccagcactttgggaggccaagatgggtggatcacctgaggtcaggagtttgagaccagcctgaacaacatggtgaaatcctgtctctaataaaatacaaaattaggcaggcatggtggcacgcgcctgtaatcccagctacttgggaggctgaggcaggagaatcacttgaacccaggagatggaggttgcaatgagctgagatagccccactgcactccagcctgggcaacaagagcgaaactctgtctcaaaaaagtaaaaggaagtagagagtagaatagtggttaccagaaaccagggagagtaagatgggaggggatggggagaggttggtcaatgggtacaaagatacagtgtttcatttttattataactattttaaatggtatgctgaaaaattgtgggtttcaatagttcatttcttatacctac

SEQ ID NO: 626174 - DNA, 608 bp, Homo sapiens
gctttgggtagtatgggcattttaacaattttaattcttacaatccatgaacacaggatacctttccatcctttttatrtcttcttcaattttttttcagcaatgttttctagttttcagtgtagagatctttcatctccttggttaaatttattcctaagtattttaatttttgtaaatattataaatggaatttttatttatttttctgatagtttgctataaacgtataaaaatgctactgaattttgcatgttgattttctatcctacaactttattaaatgtgtttattagttctaacattttttgatggaatcttcagggttttcagtatttaagattgtgtcatgtgcaaacagggacaatttaacttcctcctttccaatttggatgccttttatttgtttatcttagctaattgctctggctaggacatccagtactatgttgactataagtggtgagagtaggcatctttgtgttgttccaaatcttgaaaagctttcaacttttcccacttttagtgtattagctgtggatttataatatatagcctatattgtgttgaggtacattccctctgtacttaatttgttgagggttttt

SEQ ID NO: 626175 - DNA, 604 bp, Homo sapiens
cttgtaaaattagtttggaggtatcagtttgttctcacattgctataaagaaatacctgagactgggtaatttataaagaaaagagatttaattggctcacagttccacagactgtacaggaagcattatgctggcatctactcagcttctggggaggcctcaggaaacttacaattatggcagaaggcagaggggagcacacatatcacatggctggagtaggagcaagagagagaggggaaaggtgctacacacttttaaacagccagagctcacaagaactcactcactatcacaagaacagcaccaagtggatgtaacaaaccatacatgagaaatctgcctctgtgatgtagtcacctcccaccaaacaccaacttcaacattagggattacaatttgacatgagatttggacagagacacagatccaaaccatatcacccctcttcaattttttggaagagtttgagacttcaagttactgtttctttaaacgtttggcaggattcagctgtgaagtcatcatgtcctgggcttctctttgatcrgaaactatttgttactgagtcaatctccttattcataattagtctatttagat

SEQ ID NO: 626176 - DNA, 576 bp, Homo sapiens
agaggtgaatgggagtggcagggagatatcacatgcttggaagaaaagaaatcctgtttcatgccaccatttctgattatttttctccatttcatttctgaaaaaaaagtgtgaaaggaatacttcrtggtggtgaagagataatgtaagaaaaatagaggaaaaaaactactatttaaaagctgctgtattgttattttccagatttttacgttacttatgctattgagatgctgtccattttaaaagtatttatgacagatgatggaattgaacagctaaaaataataaaatttaagcaagtcccatcaactcacacaatgatactttatacctacatagcactttactgttctcaaagcactttttcatgcattaaaacctcacaacaacctcatgggattaccattattatcactgcttcaagatgatatttagtaaagtgaagagattcacccaagttcataaaagtagtgtgcagagacaaaacttggacttgaaccaatatattccaagcagtattctttacaccatgacacagttatcttgaaagaaaaagaatgaatcgttactagc

SEQ ID NO: 626177 - DNA, 576 bp, Homo sapiens
agaggtgaatgggagtggcagggagatatcacatgcttggaagaaaagaaatcctgtttcatgccaccatttctgattatttttctccatttcatttctgaaaaaaaagtgtgaaaggaatacttcgtggtggtgaagagataatgtaagaaaaatagaggaaaaaaactactatttaaaagctgctgtattgttattttccagatttttacgttacttatgctattgagatgctgtccattttaaaagtatttatgacagatgatggaattgaacagctaaaaataataaaatttaagcaagtcccatcaactcacacaatgatactttatacctacatagcactttactgttctcaaagcactttttcatgcattaaaacctcacaacaacctcatgggattaccattattatcactgcttcaagatgatatttagtaaagtgaagagattcacccaagttcataaaagtagtgtgcagagamaaaacttggacttgaaccaatatattccaagcagtattctttacaccatgacacagttatcttgaaagaaaaagaatgaatcgttactagc

SEQ ID NO: 626178 - DNA, 621 bp, Homo sapiens
taaatctgaaaaatatctcaaagaccagttctttaggtttcacaatagtgatgtcatctataggagtagttagtgaagttagaaatcttgtgacccctagtaacgtgactctggggcagtaagcaacttataggaaaacatgctaagcaatggmaggtgattgtttaactctgcccattctttagcaaagttcaagcccctaccataattttaaacttgccttatgaatgtggcatcaatctttaaataaggagggggtcagtttcctttgtctcaaagtttaactgtaaactaaattcctctcatagttatcttggcctctgtgctagtataagaaaaaaaaattagcttgtgacattagaaacaagatggagtggagtcagtcatgttagatttctctcattacttataattctgcaaaggtggttttaagaattaatggtgagagactgaatgctttcccccaagatcaggaacaagacaagggtgtcttctctcaccactcctattgaaaattgtattggaattactagttaatgcaataaggcaagggtaagaaataaaaggcatacagactaggaaagaagaaataaaattgtctttagtcccagatgacatgat

SEQ ID NO: 626179 - DNA, 631 bp, Homo sapiens
tgtgcccctgcacttcaggccatacatttcaatccctgtatctttaacttccttgttaagtttgtctcttccagaatcaaagctgtaaaactacaaattgttcttcaaatggagcccagatgcagtccatgactaagatctacttcggacccctggacsggcctgctagcccatgctccaatgctgatgacatcaaaggcacccctctggaggaaatctcaacagcttgacccctactatgccccaatatgctctaaatgcaggaagcatttagagcggtcgttggccaacctccccaacagcacttgggttttcctgttgagacgggggactgagagacaggactagctggaattcctaggccgactaagaattcctaaacctaggtggggaaggtgactgcacccacctttaaacatggggcttgtaactcagctcacaccccaccaaccaggtagtaaagagggctcactaaaatatgaattgggctaaaagcaggaggtaaagaaatagtcaaatcatctatcatctgagagcacagggagagagacaatgattgggatataaaccccaggcattcgagctgggtggggcaaccccctttgggtcccctcccttgtataggagctct

SEQ ID NO: 626180 - DNA, 569 bp, Homo sapiens
tgataataaatgaaccaaactgtgttacaaaagaataacataaccacactgaaggagatagagaagaaaagtcctaatctaagtatcctcagaattagtattttgactggataccataaggctaaagacaaaaagagctacatacaagtattgtactctagttagtaaacctggttatcacggacatatgggttggtaattctgaaattattttatataaagtctagggttgaacaaaaaagtaagtatattttaggtaatgggggtcacttttctcaatgtcagagttccaaataaggaaagtgttagaatgaacyttgtggtgttggattggaattggaggtaggtatcagaaggaactcatggtttttaacatacacatacagatagctagatacataaataaatccatatatgtgcacacacatgggttagtatacacacatatattttctagctctatctaccgagagatcatagaagcagtgataccccagtatttaccgcattcaccgcatactgtatttatagtatttaccgcaattactgtccaggtcctgttttctgaa

SEQ ID NO: 626181 - DNA, 267 bp, Homo sapiens
tactatgcttatataagacattaacgttagaggaggcaaggtgaggtatgtaactgaactatttgtagtatttttgcaacttccctgtaagtctaaggttatttcaaaataacatgttaaaataatctcgtgtgtgtgtgtgtgtgtgtgtgtgtgtgtgtgtgtgtgtgtaggcagtagaragaaagagatgtcacaagagtcaccagagatgtatgacagtgatcaaatatgacatgagcaccagtaaatgctaacatcctaaat

SEQ ID NO: 626182 - DNA, 544 bp, Homo sapiens
accccttcaatcccagcagctctgattatgttatgttgttatgttatttgatattacatataggagggagagagagaatgtttctgtggttcacaattttaggcaaagtcagtggtagaaaattctcatattctcatccttggaaagttttgatttaggaaacaaagttaatcaaacccaagtccaatggacatggtgaatgactctggtgtggggaacaggattgcttcttcttaaaatggtttttagaaaatggtgtgagaggatgagaggaaaatgaagaatgagatgggattgaaaggaagtggatgactcttatgactatttcatatagtarccccaccactgtttccaacagcatagttttaaacatatttgggtcaatgaaagcatcttcagaattagtgtttatttggtctttcaatgtgactattctgaaacataacactcatttggacattgaaattctatctgggattcgtaaggtcaccatataatctatcacccccaaaaggggtacttttgagtgtgaaaagtgtgctaa

SEQ ID NO: 626183 - DNA, 544 bp, Homo sapiens
accccttcaatcccagcagctctgattatgttatgttgttatgttatttgatattacatataggagggagagagagaatgtttctgtggttcacaattttaggcaaagtcagtggtagaaaattctcatattctcatccttggaaagttttgatttaggaaacaaagttaatcaaacccaagtccaatggacatggtgaatgactctggtgtggggaacaggattgcttcttcttaaaatggtttttagaaaatggtgtgagaggatgagaggaaaatgaagaatgagatgggattgaaaggaagtggatgactcttatgactatttcatatagtaaccccaccactgtttccaacagcatagttttaaacatatttgggtcaatgaaagcatcttcagaattagtgtttatttggtctttcaakgtgactattctgaaacataacactcatttggacattgaaattctatctgggattcgtaaggtcaccatataatctatcacccccaaaaggggtacttttgagtgtgaaaagtgtgctaa

SEQ ID NO: 626184 - DNA, 575 bp, Homo sapiens
ctaacatgacagaaaatattttaaacaatggcataaatggatcagtgttctcttgtttaaaactaaaatctattctttttctttttttcttttttaagmgaaaagacatttaagacaaaagcctttaggggtcctttcaaattctcaaatgtctgactagggtttcaaataacaatggattagagaagaaacctcccccaactataccatacttaaacacattaattattacactaggctgaacaaactaatcctgaatgctcaacaatgttattagtactagaggcagcactatttgaaagctttcacttttcccctagtacttatgcctgattacaggtgtaagaaagtttcctatagtatgtgtctcacaaaatccactgtgaatgtttgccacatttcatatcatgtgaaacattaggcatgtgtatagatagggtagaactcagcatgcagcactgatcagatgattataaagcatgaggcagaaaccaaataggtgggcagttttttactaaccacacagaactgcttcataagattactcccaagagtccaggttctagtaaaattat

SEQ ID NO: 626185 - DNA, 609 bp, Homo sapiens
cacatacaaatattaatcccatgggggcttcagggtaaaaaacagtcgtacttttatcatttagctctcctgggtgaagctggctcaatgacattcatccccttaaactgggcctggtaggttttattacaatagctcaggtccataaattaaggattagaaacaaatgtttcctttggagaaaaataggctccctcttttcctcttttgggggaatatactacgtagggtatgctaatcttggagctttgttggagatctaggttgygtgggaccttggctcaaatgacagtggaaatgatggacagatatatcttggggtagggaacagatatttgtactaaagcaatggaactgatgggaaaaggaagagaaagtagcagaatcaacaatcatagatgacaatggcttcataagtataagtctgagccagaaaataccaaaaattttggatattgagggaggaagaggggagaaaagaagaagggaaaggaaaaatagggagaagtagaaatagcagagtaaggatgggaagcattactatgatcgatacttggaggtaattctacagaaatacattcagaaattaaaaggtggagagtaagaaac

SEQ ID NO: 626186 - DNA, 582 bp, Homo sapiens
gcagctttgacagaacctgtctgaataaggaaaaggtggagcagtcagtgagataggatcttcagctcggtcccaaggcttggagtcctgaccactcccatcccatggggagaaatgatggtctcatttcttggagctcctgacaaaacaagaatccttcccaccccacaccaatagtcatagggtaataataataccagcaataaaagaaagataggtatttataaaacaaggcatatgtaaaatgactcctaattggaagagttttcataacttttcagcagagaaatacacacaaatcacttcttagcactggaaattagctgatttagtacataatcgtagacaatgactatatgaggagtcagtcaaatcagtctcatttatacataaccgtgtttcaaggcatctctcaaattatatgagaaaatagtctgatgtgtgactatgtaacttaaagttcttattgtattatatacacatttaaagttttctgtatagtatgctgttttgacatcttttacaaaggaaaccaacaacaacaamaaaaaaaacacgaacaaacaaaccccaatctttctg

SEQ ID NO: 626187 - DNA, 564 bp, Homo sapiens
ttatgagtcttcatgattgctctttgctttaaattgtccacttaagaggtctttgatggtaatattcrttaaatacctacttcctttcccaatgaccagttgattattattatttgtaatctagtaggagataattttgagcaatgtaactggacttgtacaactgacagacaacaaaaaagtttcctttcatagcttcttttttttggtttctgtgaaattaagggcatcatcaacaccctggagcatctgaaaacaaatttccttttttgaggctttggtggttatcaaatagggtgtgaatttaccatgcttcattgcgctgaaggagacccgtgtttgatggtcttgccaggcatttacacattgtataatgctgcctccacttacagttcaaagcaagcattgtctcctgggttttcacttagcttatattgccgcttctcatttattttgagataacagttgacttcaaactagataatcttctgatcaggaaaatgaaaagctagttcctttccttcataaaacaaccttttctttgaagacacagttcagtaaatc

SEQ ID NO: 626188 - DNA, 550 bp, Homo sapiens
ctgtaaaatcgagctgcagacatagacaagcaagctggaagcttgtgcaggcgaatgccggcagctgtgccagtaggaattagctacctgggactagacatgttcaaaatggcagctccttcttgtcttctccttgacagccacgtgtacggtaaggagcagagaagactgcactggccaagtggaaagtccatttgcataataagattaggttggggtgggcagccttccccatgcgctacgtaaacatcacagctggttgaacctatctgtgggccctacgtaaatcagacaccacctcctcaagcctgcctataaaatctatggtccaccacagacggactttctccttttggaagcctctctgtcgcaagagagagagagagagagctgctttcctctctcctttcttctgcctattaaactttttgcttcttaacccacccatatatttctagygtccctgatcttcttggcacaagaaaacaaaccccgggtatttaccccaaacaatgatgctgcttcagtatcacggctcactgcaatctca

SEQ ID NO: 626189 - DNA, 551 bp, Homo sapiens
ttaaggggatttgatttgatttggcatggtccctttttaattttatgtatgaggcaaataactgaaatgtccctgattgtcataagtgaaaaaatatcattaaaatatttgaattttgttcaaggagattaatctctataaaycaatgttttgtattccctaattagaattatggtagtcaccagtatgatcaatgctaagtgtttatttggtaattaggaagtgcaagctctaaattttgataagattgatgaaatggcctcttctcatattttcattatgtccgtataaacataacttagaagttggaaatatgaattttgtctacataacagtggacatgctacaacaaacaaatatatagctacaaacaaagctatatatttacattgatatccccttgattatttttctcaatgagcagacattcaagagatttttttcccccacaaaatgtgatgtgaaacatctacaatgtatacttgccaagtgcataactattaacttactccaggtaccagatggtcttattaagatactaattaatgtca

SEQ ID NO: 626190 - DNA, 623 bp, Homo sapiens
aaaatgttgcttatctgaaattccaattttactgagtgtcctggattttgtcttgcaaccctagctgtaaagggaagaaggagctttgtrgggtagagccaagcattggacaaaggcatggatggaggagcgatcggtgtccccagtccagttcagtaatatggagggcggagggtggagattacaagaattacaagcaaagatgggggccgtagaattccatcttctacctttaaagaatttgcccttttttttttccctttaattgatttttccctctgtttttaagttgttctcttttgaatactctgcttatagatttatttcctaaacaagtgctgttaaatggcctccacttcacaggctccatggaggagcagagctctcctctctctatgccgatgctttcagcatcctcagaatagcagctggaaggcagtaggttttatggggataactgtgcactcaccagtttagatgtgtggttgctaagagtcacggtatttgtttgcaaacctgttggtaccattggtccatgtttagctttgtttaatatacataaacaaaaaagtgtaactggaagctatggtattttatttttcaattagctatggaaagtacaa

SEQ ID NO: 626191 - DNA, 458 bp, Homo sapiens
tctcttggcagctaatggaaccccacaaaattgccttcagactattgagtctgttttatttctaattaaaacagatgctaacttccttccttacagtacgtttgctcaaatattgacatatcttctgctaaacatttaactatacatagccaaatacatacgcaggcacgtatatacctatgcatatatacatacatatacacacttgaaattcattttcattctttatcagggctccctcaaaacaataaaagatgacctttgacaaaytacttatagccccatctcatcatttctgggtttttcttattctgatactagtggttatgccttccagaggcctgcttcaggtgtggattagattttaccttgtgttattttcattggcaaaaccagaacgacgctgtacctccctccattctccccaaattggaaaacagaaggaaaaataaatctct

SEQ ID NO: 626192 - DNA, 576 bp, Homo sapiens
gccttttttatatctgcaacaaccaccatctctagctaaggtccatacaggtaaacctaggatacagcctctgaattgattcagtgtgacaattgccataccctatgtaatgaacattttgaagaccacacttagaaggtcatgctttgatttcagcactatccaacgtgctgctccctgacatgctagaagctctgaactggctgaaaattaacaaggcatttaaaagagcagcaaatcaacaactgggtcacttgccctcccctgcactgagtactgaacacatcttccagggaggggcccacagcatgctgctgaactctgcaaccagamcaggcacacacaaatgccccatccagtcacccaggaatgtgagaagagaactttccattgagaatttaagatcttatgaaggaaacagtgttgtgagactatggcagtaaaaacagcacatttacatcaatccaataacccaatactagtactgtaattactattaggtactgtaaaattagtttccacttgctaaccattcctctaggagatgcttgtcactttctcggtctttgcttctaa

SEQ ID NO: 626193 - DNA, 494 bp, Homo sapiens
atgccccatccagtcacccaggaatgtgagaagagaactttccattgagaatttaagatcttatgaaggaaacagtgttgtgagactatggcagtaaaaacagcacatttacatcaatccaataacccaatactagtactgtaattactattaggtactgtaaaattagtttccacttgctaaccattcctctaggagatgcttgtcactttctcggtctttgcttctaatgacagcacagtgagagacttttttttttttttctttcctgaccttttaaccaaacaattcatgttttgttatgattgcctcaragttgttagtcctgcctctcaggccccatcttcaaggtctcggagacactaagcagagcttggatatgtggccgggaagaaagcttgcagtgatctttctctgacatttctcaacacccttcctaacacccagggccctgctgacttagatctccctgtggtgtcagcatgaaagagcag

SEQ ID NO: 626194 - DNA, 590 bp, Homo sapiens
tctctcagcttgagtgtattagggtaaagtattactgagattagtttgagaagtgtggggttgaaaccctgctctgggcaaagaagtccctgtagccactgctgtgagttctgtaggggccagaccccaaggccctggtgtgcagcaattaaacttaattggctagctggacttctttgggggattgtggaggagcctaattagcagcaagcagttgattttccaccaaggtgctctttcacttcctcccacatttagatattgaactggwtgaaagtttagaggtgaattttccctctaatggtatgaattttgatgtggaatgatcaggtaggaggttactctctccatgatggaaacattcattctaattctgtaacacatatgcagttatctggcgattacctggagagtttcatgtgtttagtttgtgaaaagtggttttgtgagttgtttccctactcatgactccacccttctagagaacaggaccaaggaaataggcaagagagaggctacttgatatatttaaggaactggttacagacatttagtcaaactttgatttttttaaatttaatgtcaaccat

SEQ ID NO: 626195 - DNA, 620 bp, Homo sapiens
ttacaggagtatttaaaatgtgtttactgaatatgaagcactgtcaaactgctttgtgaaagaaatgtttcatgccctggaggagcttatcactcatgtagaaagaatgtcaaagaaatagaatattttggtcaatagaattttagatgaacattttatttaacatctggaagcagaagttttcttcttttccaaggcatttcaacactacatacatttatctttctaaaagaaaattttgattttgttattctgttgctcaaactcaactccttcaaagcttgctccttaccctgtacacagaatgttagatgttttttggaaagctttatctgaaccctccatccctgcctaagaacttgatatattcttccttgaaccttgcccttgtcttttcatagcaaatgtgycctggccttgtttaattttctctgttacttaactgtactttccaaagaagcagatatcctacctatcctatgcatttttgtattcctagaaacaaactcactgtgtgcctcatcaagtatttaaaaaagatttctggagtatatgtatattaatacctctaactggtagcacatcagcaggcaacaaagcaaaaccaaaaagaaaagttc

SEQ ID NO: 626196 - DNA, 620 bp, Homo sapiens
ttacaggagtatttaaaatgtgtttactgaatatgaagcactgtcaaactgctttgtgaaagaaatgtttcatgccctggaggagcttatcactcatgtagaaagaatgtcaaagaaatagaatattttggtcaatagaattttagatgaacattttatttaacatctggaagcagaagttttcttcttttccaaggcatttcaacactacatacatttatctttctaaaagaaaattttgattttgttattctgttgctcaaactcaactccttcaaagcttgctccttaccctgtacacagaatgttagatgttttttggaaagctttatctgaaccctccatccctgcctaagaacttgatatattcttccttgaaccttgcccttgtcttttcatagcaaatgtgtcctggccttgtttaattttctctgttacttaactgtactttccaaagaagcagatatcctacctatcctatgcatttttgtattcctagaaasaaactcactgtgtgcctcatcaagtatttaaaaaagatttctggagtatatgtatattaatacctctaactggtagcacatcagcaggcaacaaagcaaaaccaaaaagaaaagttc

SEQ ID NO: 626197 - DNA, 631 bp, Homo sapiens
tttggtcaatagaattttagatgaacattttatttaacatctggaagcagaagttttcttcttttccaaggcatttcaacactacatacatttatctttctaaaagaaaattttgattttgttattctgttgctcaaactcaactccttcaaagcttgctccttaccctgtacacagaatgttagatgttttttggaaagctttatctgaaccctccatccctgcctaagaacttgatatattcttccttgaaccttgcccttgtcttttcatagcaaatgtgtcctggccttgtttaattttctctgttacttaactgtactttccaaagaagcagatatcctacctatcctatgcatttttgtattcctagaaacaaactcactgtgtgcctcatcaagtatttaawaaagatttctggagtatatgtatattaatacctctaactggtagcacatcagcaggcaacaaagcaaaaccaaaaagaaaagttctatttctcttttgtgtggacacctacaatcttgatttgttatgtgtagcttgtagaggggagtggtagaatatctaggcacaccatatctccacattcagattcagccatagtaataaggagatcaatgaatgccaa

SEQ ID NO: 626198 - DNA, 600 bp, Homo sapiens
aataaggagatcaatgaatgccaacagataaaactaaatcatttatttaaatgtggagctggctgggcatctctcctttctttccccatatctttgcttccaaaggtatggaggaaagaaaggagagatcactatgagtttcccccattccttttcatgccctatcactctgtctggtaggtttttaggaccagttaaagcataacttttccctcatgtttcatttgaggctcttctattccaaacaaacacataggcacacacacccaatctttctctcttaaacttcccactcccccacttcatcaatacacatacccacagggctctctatcagtgaatccctgtaataatttccstataacgtgatcagtgaaagtaatacattatttaatccattgaaataagtttctacctcttatttacttttctatccttcacagttaggaaacaacctaacggttagttatttcctagactgcttaatggttgaaaggaccatttagatgattgagtaaatggatgagtggatggatggatacatgtagagactggagcagtaactctttttttcattcattgtctgtcaacttggattat

SEQ ID NO: 626199 - DNA, 541 bp, Homo sapiens
tcatacaaaataatgtactttaatatcttttcatagagagtrtcttctctaacaaaagttgactattaccttttctctatcgattattacctcctgctctcagggaatggcttcctgcaaggtcaaatgtgcctctatagtaacaattcacacaacaaaatgtctgaggattctctccatgttccttgaaataagactagttattttctactctttgggtggtcgttaggacacagttctttacaggcttttcacatctttgcccattttgcaagcagaggcactgactgctttcgttttggtgcaatttttcgagaatatttgtatagcgaacaaccttggaaggaggcatagtgtctttctccagagcagaagataggcatgtttactgcccactataaaagattcaggtactctaagcttagattttctcttttgaaatgcaagctgcagagtttacaagtatcacctggccctctgagcatcaccctgtggaaactggggcttgaggttgctgattctctggttactattattagta

SEQ ID NO: 626200 - DNA, 541 bp, Homo sapiens
tcatacaaaataatgtactttaatatcttttcatagagagtatcttctctaacaaaagttgactattaccttttctctatcgattattacctcctgctctcagggaatggcttcctgcaaggtcaaatgtgcctctatagtaacaattcacacaacaaaatgtctgaggattctctccatgttccttgaaataagactagttattttctactctttgggtggtcgttargacacagttctttacaggcttttcacatctttgcccattttgcaagcagaggcactgactgctttcgttttggtgcaatttttcgagaatatttgtatagcgaacaaccttggaaggaggcatagtgtctttctccagagcagaagataggcatgtttactgcccactataaaagattcaggtactctaagcttagattttctcttttgaaatgcaagctgcagagtttacaagtatcacctggccctctgagcatcaccctgtggaaactggggcttgaggttgctgattctctggttactattattagta

SEQ ID NO: 626201 - DNA, 575 bp, Homo sapiens
atttacattttgaacatcctttagtatgccttgcacactgtaagaactcaataaatacatgtataagcagtgaaaaaatggttctatacttgttcaaaatcatgtttaaattttagagagaactcttcaatttcaacataataatgctaattaatattattactgaaatatattaaccttgtacttctgacttatgctcgtcatttttctgatttgcctattttcctaccaaggaactgccagcatcagcaattggtagctaagtgatgagcaggtttactgttctcaggagatgatcagtagtcttataaagctgtgtcttggcaattcagcttaatgtcagtgacaaaacatcacacctccatgttcgtgtaaatgtaattatatttcttaaagttgttcaagctagaaacataggaattgtctctgacacctgttttttctctgatcacttatgttgtgtgtttgtgcgtgtgcacatgcacatatgygtgtaaattcttttttttattttctaatttcacaatggtctttttcattctcactcttatttttccagcttagggctttataac

SEQ ID NO: 626202 - DNA, 624 bp, Homo sapiens
actttaaaggagaggacataaaatccagctgaaattatcatctctcatagagacctgaaagttcaatatatagtctttcctattagagtaggaaactgatacccattagtaatgtcaatttatagtcagggataatttagtaagtttcatatagtttaattgtaaattgtccaattgcatcagcaaataattattaagccatgttagcaatgaaataggtgaaataaagatataaaactttgaaaagaaagtaaatgggatataataggcatatgagtaatatgaccttgttgttctttattttaccaaggaaactggttataatttagattctttataagagtctgttatataactacagagtaatatagaatatagaaaaactgagaatatcctcatataaatctcattcttgatttaattttcyacttgtgcaaatcatattttccaaccatctcaaatatgtcaccgagtcttgtcaagtctgcctactgagtatatctagaatacattccatcatttctttatctccactgctgcctacctatccaacctcatccccaagtcctctactcacattagcaatatcaatatgcctgcaatttctggaaaatgctagggagc

SEQ ID NO: 626203 - DNA, 479 bp, Homo sapiens
ttccagaagcatcaagaccatccagaaaacatgagctcaatacacgaactaaattaggaaccagtgaccaatcccagagtgacagagatatgtgatctttcagacagagaattcaaagtagctattttgagggagctcagtgaactcaatataacacaggaaaggaattcagagttctatcagagaaatttaacaaagagattgaaatatttcttgaaaatcaaggaaaaattctagaactgaaaaattcaattgagaaaccaaaaaatgcatcatagtttatcaacagcagaattaagcagaaraaagaattagtgagttttaagacaggctgtatgaagatacacagagaagaagaaaggaaaaagaaaaaaggaaatgacgtgaagcatatcgattagatctggaaaatatcctcaaaaaacaaatctaagggttatagattttaaaggcaaggtagagaaagagattggggcaga

SEQ ID NO: 626204 - DNA, 534 bp, Homo sapiens
agtcttagtttcctcatatttaaaatatgaataaaaatattgactatctcatagaataataaccaaggagataatgctcagaaagtttctgacacgtatttctgaagtattttaactattattggttaaaatcctcaattattttaactgttatggtgtttttcccacaaatcttttatgacattcttacttggatgtcatacaatcaaatcggcatttttttttwaaaaaaaagaacattgtttagcacttgcatcaagataaaatatgatacttttgcttaaattatgcaagtaccagaattaagttcttattaatttttttatcctacctttaatgatgaagtataaacagcagtagtttcttaggttaatagtggggtctcatgtagatttaaatgctctatattgtctttgaatatgcctatgaaattactatgacaggaaagttaaggaaaccatatctaaatgttctacatatctctaaaccttttttttatgtattgattttcctaaccctgtttttttaatggat

SEQ ID NO: 626205 - DNA, 571 bp, Homo sapiens
gccacattagccaggctggtctcgaacttctgaccccagatgatctgcctgccttgacctcccaaagtgctaggattacaggcataagccactgcgcccagctggcccactataatttgatcacgactgcctttggtacaagttgaaagaaacatacaaactgttgaaaattttgaaaatttaaataaatcacttgtttcacatgtactgttggtcaaaataaaaaatattttaaagtactttatatcaactgtgttattctcactttcagtgaatatgaaaacatatttaaatgtatatgtgtgtattaatatgtatatgtgtgaatatgtatttataattgatagaatggttcagtaaggcaattttggccaattataaataaaacatcctagtctttaataaaatatcttagtyaacacaacttacatataaaataatcatttacaaaggtataacttctgtttgtgttataaataatctgcaattctatctcatctgaaagaggaaaaatgacactgtgaaacacagagagaaaatgtttataatattatttgtataaatcaaatgg

SEQ ID NO: 626206 - DNA, 666 bp, Homo sapiens
cttaatttagtctctatttaaatgggaaacttcaaattattctcggagaaaaaatagacttttgaagataaaaggaatcttggaaattaaaatcacattcccacttttagatatgaaaagaaaaaaatctcagttatttcctcagatcacaaggctagtaagtgaccaagstggtcagagcagtgcttttcccacgtgggctccctactctgacagaacagtgtagtcctctctccaattaagaactgttctgaggtctggaatctaaactccaactaatcctcaaatacccagacacaatccctttcatcaggtatttcaattttctctttacagtcagtttgcaacttctttctcgttaccatagagcaagactttatatttaatgattgcctctcaagttttctctaatgatgtgaaagaagacacaaattaaactttcactacctagaaacagtaggtgcttgatagtacctaaaaaaatacggctggtgtcaaaatgtcttgttgaaaattggatgttaaatgacctctaataggatcccagccaaagaccctcaataacaatacctacctcctcaactcactcccgccctaagtgacaattctaggtattctgattaaataaaagaaaagaaaacaattgcaggtttttgaacacttatc

SEQ ID NO: 626207 - DNA, 666 bp, Homo sapiens
cttaatttagtctctatttaaatgggaaacttcaaattattctcggagaaaaaatagacttttgaagataaaaggaatcttggaaattaaaatcacattcccacttttagatatgaaaagaaaaaaatctcagttatttcctcagatcacaaggctagtaagtgaccaagctggtcagagcagtgcttttcccacgtgggctccctactctgacagaacagtgtagtcctctctccaattaagaactgttctgaggtctggaatctaaactccaactaatcctcaaatacccagacacaatccctttcatcaggtatttcmattttctctttacagtcagtttgcaacttctttctcgttaccatagagcaagactttatatttaatgattgcctctcaagttttctctaatgatgtgaaagaagacacaaattaaactttcactacctagaaacagtaggtgcttgatagtacctaaaaaaatacggctggtgtcaaaatgtcttgttgaaaattggatgttaaatgacctctaataggatcccagccaaagaccctcaataacaatacctacctcctcaactcactcccgccctaagtgacaattctaggtattctgattaaataaaagaaaagaaaacaattgcaggtttttgaacacttatc

SEQ ID NO: 626208 - DNA, 605 bp, Homo sapiens
tgcagtatttccttcctattcaatacttccccatctgttgccatcaagtttccactgaacattttttttaaatttaaaataggcttgtgtttcttataatttgtggaattaaaaaaaagatgtcgttttggttatgaccagatgcagctctgtatggcagaaagcttgaaagaacgtggcttaaatatgatgggaagcttatttgtttctcacataaagaattccagggaaaagcagtccatagcaggtatggtgactccatggtcagtcatcaggaacccatgctccttctagatctccactctgccaccctgaggkcgaagctgtcatccttgtggctccccatgtagtcactcccacagaacttctcatctgtatttcaggggatagtacagagaaatggatgaagaacatattttttctttcctaatgaggctttctggaagttccacagaacactttcatttatgcagaactttacacacatcttactggccagtacgtagagataaagaaaattggaaaacatagactttcagctgactgcaatttgtgaaggtcaaaattaggactctattattttgaaagataagttaagaatgtga

SEQ ID NO: 626209 - DNA, 605 bp, Homo sapiens
tgcagtatttccttcctattcaatacttccccatctgttgccatcaagtttccactgaacattttttttaaatttaaaataggcttgtgtttcttataatttgtggaattaaaaaaaagatgtcgttttggttatgaccagatgcagctctgtatggcagaaagcttgaaagaacgtggcttaaatatgatgggaagcttatttgtttctcacataaagaattccagggaaaagcagtccatagcaggtatggtgactccatggtcagtcatcaggaacccatgctccttctagatctccactctgccaccctgagggcgaagctgtcatccttgtggctccccatgtagtcactcccacagaacttctcatctgtatttcaggggatagtacagagaaatggakgaagaacatattttttctttcctaatgaggctttctggaagttccacagaacactttcatttatgcagaactttacacacatcttactggccagtacgtagagataaagaaaattggaaaacatagactttcagctgactgcaatttgtgaaggtcaaaattaggactctattattttgaaagataagttaagaatgtga

SEQ ID NO: 626210 - DNA, 604 bp, Homo sapiens
ttttgcaaatctccttaatattgggtctaatagaggactgctggattattgtaactgcttctacatccaatcttttttgatatgttgctctgtttgaagtaaatgaagaaactccagtcttgcatacatgtatgtagtttaaaatggaggaatattttaatagcttttaaagatagctgtgaatagtcttctttggaactacatccaaacctggctatagtagtttcttcaaggttaattgtaatgtagaatctaaaactatctcaataaacttctcatgacattaaaatccactggtctattgtgtgatgtgaatgttgattctgtaatatgatgcattgaacacttagagaatattgttatgctgagttatacaggtcttccaaatgttgatgaayttcattacacaatatcaaaaatttcattcattaatatcactaccaaaattcatcaggcaactctttaagtgttggaaagctgtcaagctaatggaagctttcacttgaagcttaaattgtgctattggcaataaatactgtcagttgttttccttaagtgacaggctcattttgttcatttttgaggaaatgtctgccaaatatcc

SEQ ID NO: 626211 - DNA, 610 bp, Homo sapiens
ttattgattgctacgtttgttcatattaaaaaattgaaacccttttaggggaattctctcaaattcttgccactgcacctttaaatttatctatatttatgtttattttttaactttctctttccattatagtgcaataagagtccttcctcaacttaaacactcattctgcagcagtgctatgccttcacgaggtatttactctgttagttttacccactgcctcctctcttattcatcttcttcctcaactggagccttccccttaacctttaaacctgtacagggtggctaatattttaatgtaaaggtatttgtttccaactctcattgctctatcttgttctttttcttagaaccaccaatcctccttcatctggctaatggctcatcactaaagattctgtttagatgtcactttatcgagaaatacttctstaattactgcaattctgcctagatgcctttctactgcgtgcggttccttagaaaactgctccttcttgttaaagcatgtatcatgctggaattgcctcattgcttgctggtgtctccaaaaatattgcaaactctttcagggtaaggaacctgtatttatctcatttactat

SEQ ID NO: 626212 - DNA, 491 bp, Homo sapiens
ttgttaatattgtgttttcactctgctaggccatgtccagtttattcaatctaatgtagataatgaacatgaaatctttagggtggctaaggacatttcctaatgaatataggaaccttagaaggggaaatgatgataatggatggagcagtgttctttgaatcactagactaaataarttggacatgacataatagcttcctgtttttgccagagactcactctggctccttagagagaaattcaatcatttctgtttcggtcaactctttatcagctgttaaactatttgatgaatagctccagcgaatatcccggggcctggaatttttatgaatagcttaaggtgcttgtctatataacagaagaatttagaatgttttggctaagcatattttccttgccaaatcttgtatccaaaattaattgtaatcaactgatgtgcctaattggtgtcttttgagagttgcattcattttcatttttatatt

SEQ ID NO: 626213 - DNA, 609 bp, Homo sapiens
aatttttttaaaatttgcttaagatcctagagtggtggttttcaaccttggctgcacattggaatcaccttgagagattaaaaaaaaaaatctcaatgcccaggtggcttccaggccaattatatcaagtctccacagatgattccaacgtgmagccaaagttggaaaccactggcttggcaggagggagaggtgactttgacttaagttggtagggaagtgtttatggagaaagtagtttctgagtaggatttgaaagatgggctgaattttgataagaaaaaacttagaagcatttaaagtgatataataataccggtttcagagactaaagagtagttaatacagagggagagcgaatcagaagtataggatgacattacaaatcagaaataaatttaaatttcaaattctggccctatcatctactacctgcataaaggtggccaagttacctcatctctaaatctttttatttccatctataaaatgagaaataaaagcacccactgataaggtttaataaaggtcaaatgaaaaaattcatagaaagcacttccatcaatgtcaggtaatagaaagtgctcaatacatggctaataccaaaac

SEQ ID NO: 626214 - DNA, 403 bp, Homo sapiens
ctgggaatgctgatctaaggagtgctaagtagccactaccaagtaaggcaactgaagtgggcaaagtcttcctcaattgacagcatagtctggtatgtccctacttgagaggcagaaacaggtgtgtggtagtttttaagtactctgggcaagagagaaaaacactgggggtagggagtgataaaggaattttaaatgagttctgctcttgatactatcattaaatgacaccagtatgctcttttttactctaaaatgwcaattatacaatttgattaaacattggaaaagatggtactgcagatctcaaaataatcaactgcttgtttaaattcttagcctcttgacagttgcaagaagaggcagtcaatataattttttaacatcctcaggatagtgaaag

SEQ ID NO: 626215 - DNA, 403 bp, Homo sapiens
ctgggaatgctgatctaaggagtgctaagtagccactaccaagtaaggcaactgaagtgggcaaagtcttcctcaattgacagcatagtctggtatgtccctacttgagaggcagaaacaggtgtgtggtagtttttaagtactctgggcaagagagaaaaacactgggggtagggagtgataaaggaattttaaatgagttctgctcttgatactatcattaaatgacaccagtatgctcttttttactctaaaatgamaattatacaatttgattaaacattggaaaagatggtactgcagatctcaaaataatcaactgcttgtttaaattcttagcctcttgacagttgcaagaagaggcagtcaatataattttttaacatcctcaggatagtgaaag

SEQ ID NO: 626216 - DNA, 637 bp, Homo sapiens
atttacattcccaccaacagtgtaaaagtgtttcttcttctccacagcctcaccagcatccattatttcttgrctttttaataatcaccattctgactggcgtgagatggtacttcactgtggttttgatttgcatttctctaatgatcagtgatgttgagctttttttcatgtttgatggctgcacacatgtcttctttcgagacgtgtctgttcatatcctctgcccactttttgatgaggttatttttttcttgtaattttttttaagttccttgtagattctggatatagtatttttaaagttttctacagcaaattaaaaaaatatttaccgggacagtgtcatatgaaaagaaaccacaaggtggcgccagagtacctaaagttactgtactgttttattctcttctaagaaaacgatagggtaatgttcttttaaaggatatttttagattttcatgtaaatgacttaaaaacaggattaaaaatttaaatttcaaatattttctgggtctgggtactattttgctgtcaaatgtgagagcacacctggtaagcattttaaacgactaaactgaggagcaaatcagaaagggagggccgaagaagggatgtgtgatcatagcattccaga

SEQ ID NO: 626217 - DNA, 637 bp, Homo sapiens
atttacattcccaccaacagtgtaaaagtgtttcttcttctccacagcctcaccagcatccattatttcttggctttttaataatcaccattctgactggcgtgagatggtacytcactgtggttttgatttgcatttctctaatgatcagtgatgttgagctttttttcatgtttgatggctgcacacatgtcttctttcgagacgtgtctgttcatatcctctgcccactttttgatgaggttatttttttcttgtaattttttttaagttccttgtagattctggatatagtatttttaaagttttctacagcaaattaaaaaaatatttaccgggacagtgtcatatgaaaagaaaccacaaggtggcgccagagtacctaaagttactgtactgttttattctcttctaagaaaacgatagggtaatgttcttttaaaggatatttttagattttcatgtaaatgacttaaaaacaggattaaaaatttaaatttcaaatattttctgggtctgggtactattttgctgtcaaatgtgagagcacacctggtaagcattttaaacgactaaactgaggagcaaatcagaaagggagggccgaagaagggatgtgtgatcatagcattccaga

SEQ ID NO: 626218 - DNA, 548 bp, Homo sapiens
ggtacttcactgtggttttgatttgcatttctctaatgatcagtgatgttgagctttttttcatgtttgatggctgcacacatgtcttctttcgagacgtgtctgttcatatcctctgcccactttttgatgaggttatttttttcttgtaattttttttaagttccttgtagattctggatatagtatttttaaagttttctacagcaaattaaaaaaatatttaccgggacagtgtcatatgaaaagaaaccacaaggtggcgccagagtacctaaagttactgtactgttttattctcttctaagaaaacgatagggtaatgttcttttaaaggatatttttagattttcatgtaaatgacttaaaaacaggattaaaaatttaaatttcaaatattttctgggtctgggtactattttgctgtcaaaygtgagagcacacctggtaagcattttaaacgactaaactgaggagcaaatcagaaagggagggccgaagaagggatgtgtgatcatagcattccagaggctgatgaaaatgtgact

SEQ ID NO: 626219 - DNA, 637 bp, Homo sapiens
atttacattcccaccaacagtgtaaaagtgtttcttcttctccacagcctcaccagcatccattatttcttggctttttaataatcaccattctgactggcgtgagatggtacttcactgtggttttgatttgcatttctctaatgatcagtgatgttgagctttttttcatgtttgatggctgcacacatgtcttctttcgagacgtgtctgttcatatcctctgcccactttttgatgaggttatttttttcttgtaattttttttaagttccttgtagattctggatatagtatttttaaagttttctacagcaaattaaaaaaatatttaccgggacagtgtcatatgaaaagaaaccacaaggtggcgccagagtacctaaagttactgtactgttttattctcttctaagaaaacgatagggtaatgttcttttaaaggatatttttagattttcatgtaaatgacttaaaaacaggattaaaaatttaaatttcaaatattttctgggtctgggtactattttgctgtcaaatgtgagagcacacckggtaagcattttaaacgactaaactgaggagcaaatcagaaagggagggccgaagaagggatgtgtgatcatagcattccaga

SEQ ID NO: 626220 - DNA, 560 bp, Homo sapiens
tgatgtaatgtatcatgtttattgatttgcatatagtgaatcaacttcgcatccctggcataaatcccacttgatcatggtagaatcaagtgggattaatgtcagggatttattgataataaattgataattaagaaaaataattatcttataattattacattataaataattctaagaataaatcaagtggaatttattatctttttgatgtggtatttaatttggtttgctagtattttgttgagtaattttgtgtctgtatttatctgaggtatcattctgtagtttttttttttttgttatgtacttgaatggttttgatatcaaagtaatgctatacctgcagaatgagttaggaagaattctctcctttcaaatttgraatagtttgaggataattggcatttgttcttcactgcatatttggtagaattcatcagtgatgccatctagtctgggcttttctttgttggaagacttttttattactgatttaatctcattactcattattggtctaaacaggttttctatttttccctgattcaatcttgata

SEQ ID NO: 626221 - DNA, 556 bp, Homo sapiens
aaatattttttaactttgggcttctcttcacattttggaacaccccaaattcaaatatttggtttcttaacatgtcccatatgtcacttatgctttgtttkttcttttttattctttattctttaattctttcttctgcttgatatagtctattgttgaagctgtcaaataaatttttaaaaatttcatttattgaattatttaatttgagaattcctgtaacggttctttttttttttttttcttttttttcctgagatagggtctctctctgttgccccagctggagtggagtggcgcaatcttggcccactgcaacctctgcctcctgggttcaagcaattctcctgcctcagactcccaagtagctgggattacaggcatgcacgaccaggctcagctaatttttgtatttttagtagagacaaagtttcaccatgttggccaggatggtctaaaacccctgacctcaggtgatccacccaccttgggctcccaaagtgctaggattacaagcatgatccaccatgcctggcctgtttggttctttattatg

SEQ ID NO: 626222 - DNA, 588 bp, Homo sapiens
ttggtttcttaacatgtcccatatgtcacttatgctttgtttgttcttttttattctttattmtttaattctttcttctgcttgatatagtctattgttgaagctgtcaaataaatttttaaaaatttcatttattgaattatttaatttgagaattcctgtaacggttctttttttttttttttcttttttttcctgagatagggtctctctctgttgccccagctggagtggagtggcgcaatcttggcccactgcaacctctgcctcctgggttcaagcaattctcctgcctcagactcccaagtagctgggattacaggcatgcacgaccaggctcagctaatttttgtatttttagtagagacaaagtttcaccatgttggccaggatggtctaaaacccctgacctcaggtgatccacccaccttgggctcccaaagtgctaggattacaagcatgatccaccatgcctggcctgtttggttctttattatgatatctgcctcttgggtgaatttctcatttataccctcaatttttttttttttatttctttgcattatttatctctgtcctcttgtatct

SEQ ID NO: 626223 - DNA, 543 bp, Homo sapiens
gctgtcttttctaatgaaagatttcttggattttctagtctttgataatgcttttatatctgtaaatttctcatctgtttatgaacattttacaaatataacccataatcctcaaaacaaccccttgaaatagctattagtttgcagacaagcaaactgaggttggataatttaaatcagtggtctccaacctttttggcagcagggactggttttgtgggggaaccctggtttcaatcatttacctaaagccacacttttaatttttagtgacaggactgtaatgccaaccttctaattctaactccagcgcatagtccactgtacaatggctgcctctcctttcttctgaatccctgtaattccgcacttgtaccagtctagtctttggggcttattcaattctattatacattttaaacattgttcttsttatgccatggttctttctgtactgtaagctccttgaagtcaggcaacttctcttaatttaacttaaaaaatttcccacaacgtcttaatttctcagttatgcttcactgg

SEQ ID NO: 626224 - DNA, 647 bp, Homo sapiens
cctcctggtgattttaattattttattttaagtacagaagtagttttgcaaaaatcaaaaaaagtttaataatagtgaaaatgtccattggtccacttttatttccatgaatatgtctttccaggtgtgtatgtgtgtgtgtgcagatgtttaaaatacactcatgctaactcactattttgcaaattattactatttttcaygccagaatatataatggatcctttctgtgttaatacatagcctccatcttccagatgcctcaggcttcaggctgacttttttgcaaaacttcctcagcaagacttgccttgtttatatttattatatgttcttgtccaaccatctgggaagagtgtggacaaaggtgaagcagtgcatgtggcgatatctgctttacctgcagctccctggtgaagcatcacgcattgtcctttgacccatgttgtatgagtgcaaaatgatatttccttgtgatagacttatcaccttaatattagaacataagctggaaaacaaactagagcatttttctttttaattaacgatcactgagtcataccagcctctgaatgcttctctggtgatttgaaagaaaacctcattagcttgtctctgtattttcattttataacaataactagtgg

SEQ ID NO: 626225 - DNA, 606 bp, Homo sapiens
tcataccagcctctgaatgcttctctggtgatttgaaagaaaacctcattagcttgtctctgtattttcattttataacaataactagtggttttttaccagcttatatatttttaaagccacatatataaatataatcaaattaattagaacatttaacaaatcttctgggttgatgctcatttaacatattcaagtattcttctwgttttttttttttttttttgaggtggagtctcgctctgtcacccaggctggagtgcagtggcatgatcttggctcactgcaacctcagcctactgggttcaagtaattctcctgcctcagcctcccaagtagctgggactacaggcgtgcaccaccatgcctggctagttttttgtatttttagtagagatggggtttcaccatgctgaccaggctggtcttgaactcctgacctcgtgatcctcccgccttggcctcccaaagtgctgggattacaggtgtgagccactgcacctggcccataaataatattaaaatttcctctccacttgactaatcaagatgtgaagatttttcttttccttcatatctccctacctacatatgtatatacacata

SEQ ID NO: 626226 - DNA, 473 bp, Homo sapiens
atataaaatactctgagtaaataggattatgtataaaagagtgcataatctattatgatgttttataatatattaaaattattctaaattatagactgcaccatgtgatatacttccacaaaatataattctagtaacaaacacatttagtttattgtttcacttgtgaatgttggttttacctgggaaattctgctttaaaagtaaaacaggtcttacctagtgaagcgtcttatstaaatgttgtttgaaaccctttgtgttctataataacatgacataaaacaatgtgaatttaaacagctgtttggcttttctgcgtttagttttgaaccatgtagacatgtgttatcaagcttcaaaagtttacttgacattatcatataatagcatatcattggcatgaaatgttttatatataaatcgcatcattttacattttatttaaatgtgtaggtttgccaagggccaca

SEQ ID NO: 626227 - DNA, 473 bp, Homo sapiens
atataaaatactctgagtaaataggattatgtataaaagagtgcataatctattatgatgttttataatatattaaaattattctaaattatagactgcaccatgtgatatacttccacaaaatataattctagtaacaaacacatttagtttattgtttcacttgtgaatgttggttttacctgggaaattctgctttaaaagtaaaacaggtcttacctagtgaagcgtcttatctaaatgttgtttgaaaccctttgtgttytataataacatgacataaaacaatgtgaatttaaacagctgtttggcttttctgcgtttagttttgaaccatgtagacatgtgttatcaagcttcaaaagtttacttgacattatcatataatagcatatcattggcatgaaatgttttatatataaatcgcatcattttacattttatttaaatgtgtaggtttgccaagggccaca

SEQ ID NO: 626228 - DNA, 554 bp, Homo sapiens
tattattattattattattattatttacatggctggttggaaacattggccctgtcccttgttctcatccaagttatgtatcagaagcacctgggaagcttttttaaaaaaactcttacactgatgttacgtctttgatggttgtgatttagtgcatctgagtggatcagagtggcgctcaaaaaggcatattttgataattcttccacatgattctagtattcaccctagttgttgatcattagcctaaaatggatastgctgtgttctcttcatgagcgagcagacagaagacagagttgtgataagaaagttgaaaaagataatgccataagtgagtaatgttgatatcttgaattagtagtagctgatttgaattttaggaatttgagatttaagtgtcagaatcagggatataatattagggaaagtgatttttgcctctctgaaaggaagctggctttttttttccggagcgtttataaaggagctaaagtgccctcaagtggccaatctctcaattacatcttagtgaaaaaattttctgtgaaaaa

SEQ ID NO: 626229 - DNA, 458 bp, Homo sapiens
agtctccccatctgccttgtccggcctcaaggaagtttatgwatcacagaacttgtacttaattattttctttctgggagaaattcatgaagatacattcagctacagggcagaaaagagactggaggaaaggtgcattcagttaacggctattgggtctttggaaataaatccagtgtttgccatatctttcagctttgtccagggaaaatgtatgactgcagatatcacataagtttgtaggtatctcagtgctgaatataccatggaataattttcccacggcacagccagcaaggtaacaagagtctcttggaatatcagaatcatgaattatcaatggttgcatgaaggacttagtggacctgcttgagggtagtatcatagctttgcacacccaagcatgttgatgaagggattttaaaagttagtgtatttacaatgaaaatgggaaagca

SEQ ID NO: 626230 - DNA, 554 bp, Homo sapiens
tattattattattattattattatttacatggctggttggaaacattggccctgtcccttgttctcatccaagttatgtatcagaagcacctgggaagcttttttaaaaaaactcttacactgatgttacgtctttgatggttgtgatttagtgcatctgagtggatcagagtggcgctcaaaaaggcatattttgataattcttccacatgattctagtattcaccctagttgttgatcattagcctaaaatggatactgctgtgttctcttcatgagcgagcagacagaagacagagttgtgataagaaagttgaaaaagataatgccataagtgagtaatgttgatatcttgaattagtagtarctgatttgaattttaggaatttgagatttaagtgtcagaatcagggatataatattagggaaagtgatttttgcctctctgaaaggaagctggctttttttttccggagcgtttataaaggagctaaagtgccctcaagtggccaatctctcaattacatcttagtgaaaaaattttctgtgaaaaa

SEQ ID NO: 626231 - DNA, 318 bp, Homo sapiens
tggaatgataggcatgaaactaattasagaccaaaggataccctgccattctgtcttcttctgggtacagcacactctaggagttttctgacacagaagcttgagggggaacatatggctgagatactcattcttcaataagtcaatacaaaacgaagcccaacattttgcccctagttttttgaattttaacaaaaagcctgaagaaacaagaggaagttaaaaatattctacacagaacttttagaagtgatcatggcggcaatctttaataaagtaataaatatcttgcttggcttaatatttttaaataagtaa

SEQ ID NO: 626232 - DNA, 561 bp, Homo sapiens
ggacatacttactttgtattaaggagacatgccatcatttgcatcagtttaaaatggtgtcaggttagttttatgtttggtaaatggtaaaacactatagattttttaagcagttaaatatttaatagctattgacgttagctccagaaaagcactgttgattcatagatcgatttctaagatactagtacacagtgatgccgcagccaaaagaagctagtgtgatttttgaatacaaagcgatatatattctactcagatttttcttaaggctatacaattgcatagagaccggtataaactttcaggctcaaaatgctgtaaattagaaaaactggatagaaataaaatctagatacataaattccttaaygtcatgaatgaagtaaataactttttttacaaaaaattatcaaatgctagaaaaatgcacatatttaaaatgttatcaataaaaaatgaacttttacttgatatagtcaacagaatttcataaatctaaaggttaatagtcatagagaatacagtttaacaaaaggagttaatgatttttgcctttaa

SEQ ID NO: 626233 - DNA, 530 bp, Homo sapiens
gccacatgagaatacaaaagttattgccttaggactaaacaatagttttttgattcattaaatgttctgagacttaggctagttaattttagttcttctaaaacgttcagttcactctgatttagtaactgttattacaaaagtgtctaatattctgcaactgtgcaattatttggctgacaaactccaagattgactgcaatgctgtcccagcctcgaaaaagtggcttagctcatactccttcctggtgtccaaaccttargtttgctttcatctgcctgctttttactagcaaaggaaggtggagcgctacagcttttccagagtagtctgttgctcagcaaccgggcttgtcctcttaggaaacaggtcaggaaaaaggaagagagatgagggggttattaaatgtttgtctgccatctctgataaggcagatatcctctgaatggaaattgttacagacatatctccaactcaccgggaaacaaattaatctcattaggcaaggggttaatatctatttgctaga

SEQ ID NO: 626234 - DNA, 558 bp, Homo sapiens
ttttatatagtagacattatttagtcattcaggacactttaaatataacaaaatctaggttctttttaatgacaaaaacttactgaaacatcttmtatttcttacttaaaaatactgattgatagtatttctcaggaaatattctaaatacaaaactgcattgcagaatcatgaatacctctaattacaatttttgagataggaaaatgcttcttttaaataaaattttcttttgtattgttaggactctgaaaacaataccccaaagtatgatgctttggcctgatgaggactttgagctgaaggacattggaagggcctcagaagtgaagtctcttcctgattctttcttgcctttctttcccctgctccccttccttccccaaggaaggccatagaaactggaaatattactctctccttcctccatctttctgtgtaggagctggtcataaagaaattatctgacctaccttgtttgctggtagattataagaccctcattccagaagggtcttgccttatacccgggagcaagaaatgccacacaaagaggcc

SEQ ID NO: 626235 - DNA, 558 bp, Homo sapiens
ttttatatagtagacattatttagtcattcaggacactttaaatataacaaaatctaggttctttttaatgacaaaaacttactgaaacatcttctatttcttacttaaaaatactgattgatagtatttctcaggaaatattctaaatacaaaactgcattgcagaatcatgaatacctctaattacaatttttgagataggaaaatgcttcttttaaataaaattttcttttgtattgttaggactctgaaaacaataccccaaagtatgatgctttggcctgatgaggactttgagctgaaggacattggaagggcctcagaagtgaagtctcttcctgattctttcttgcctttctttcccctgctccccttccttccccaaggaaggccatagaaactggaaatattactstctccttcctccatctttctgtgtaggagctggtcataaagaaattatctgacctaccttgtttgctggtagattataagaccctcattccagaagggtcttgccttatacccgggagcaagaaatgccacacaaagaggcc

SEQ ID NO: 626236 - DNA, 558 bp, Homo sapiens
ttttatatagtagacattatttagtcattcaggacactttaaatataacaaaatctaggttctttttaatgacaaaaacttactgaaacatcttctatttcttacttaaaaatactgattgatagtatttctcaggaaatattctaaatacaaaactgcattgcagaatcatgaatacctctaattacaatttttgagataggaaaatgcttcttttaaataaaattttcttttgtattgttaggactctgaaaacaataccccaaagtatgatgctttggcctgatgaggactttgagctgaaggacattggaagggcctcagaagtgaagtctcttcctgattctttcttgcctttctttcccctgctccccttccttccccaaggaaggccatagaaactggaaatattactctctccttcctccatctttctgtgtaggagctggtcrtaaagaaattatctgacctaccttgtttgctggtagattataagaccctcattccagaagggtcttgccttatacccgggagcaagaaatgccacacaaagaggcc

SEQ ID NO: 626237 - DNA, 463 bp, Homo sapiens
tgttgagttacgataataaaataacaaaataaaataaaatgtaggggatagttaatggaaggtggagtttcctcacagggaatagcaaagartctacccaggacactgtgggtatttataaatatgtcttgatatctctgccagaatctaaaactaggtctatgcatctctttgtttacaattcatttattcattcatttactattcagcttttaaaaggctaacaagaaatatgaataaattaatttagcaatgatttactgcctttaatcttgttttctcagtacacaatctattggctttgagatttgaagacagctaagcaatttaaaaccaatagaaaaatatggagtgagattcagccctttcatattcatgatgaactcaatatattacaaatccaaaaatcaacctccattttactttgtattctataaaatggggttttaacatcatcttacat

SEQ ID NO: 626238 - DNA, 591 bp, Homo sapiens
catttatatttacatatatattttatgtattttgtagtttagcttaagtagttatgatttttaataatggaaaatttttatcacaaacacatattatgtgtgtttatatctatctatctgtctgtctatctatctatctatctgccatgaccctgtggatttagctcaacaggttataattgttatacttttggttaatatctctatctctatatttatatttagaactggaacatttccagtcacgtcatttttactcctactttttaggtctcgtacttgcagtaaaacccctgagaatcagagagcagaggcattctatccacttccaagaccattatatgaacccctgtattattgcttaacttttatcactaaaatatagaggccacattctacatgagggatgacattcctcataattcccaaaatttaagactgattttccatagrtatttatattttaacatgatctggttgaatttagctggggaacaaaaatggcaagaatatgttatattatttaggcacaatggactttttaaaaaaataaaaaaaaacaaggcaaagtcagctaacttttgcagcgat

SEQ ID NO: 626239 - DNA, 655 bp, Homo sapiens
tcttgctttataagtttgttcacaactgtaatagactagcagtgtatcaaacaatttgcatttaaacgtgataataaggaaaaagagattctttaaaatataaagctcagatcaagaataaattgtacatgcaaatgtgctgatttatatgcagaggatgaattctaacagtggggcaagtaaagaaattaaggctaacgcttttcctgagtgcccagtaatgttgaattacaatwgaatacctatagaaatgagtgtgacatccaagtggttaccaaatgaatatgttatgctctgtgatggttcactgaattctaaacgagttcagaatgatgacataccaagaggtgctgaagtacttcagacacactcagtcaaatgtgtgtgtggttaaataaaagtccacggaatgttccttacataaaattagtttttcctattcagagggaaattagagcaatttattttttccttatagtctcatcacaagtagaagtttaataaactcacttttgtttttagagaaacttgcaatttgaaagttactttgcaatgctttggaaccataatgcactaaacttgtgatcttgcctttagtgtgccctacagcattaagtatgctaacttctctgtttaatatgaaaataagtagtca

SEQ ID NO: 626240 - DNA, 581 bp, Homo sapiens
tgcccctgtagtcccagctacccgggagcctgaggcaggggaatcacatgaacccaggaggcggaggttgcagtgagccgagatcccgccactgcactccagcctggagacagagcaagactccattttaataataaataaataaataaataaataaataaataaataaayaaacaaacaaacaaaccagacaagaggcttgtaaaaacattaccttctcaaagaggcagagaaagcatttacaattacaagatgttttccaagtaaatgctctaagaaaagggaagtcagggtctagagtctaaagtcaagtaaagctgaggggaatgttaaggccctcttggtcatcaaacataaaactaatttcccttaggaccacctaaacttaggggcactttacaatgagagattgcttttatttttcccatttgccttgctgacatgtcgtccttttggctagcttgaaggtttgcctggcctaatggtatatttattttctcatctttgtctctaaaatgtcacagagtgtgctttcctaagttaacagcacagtaagtcatgcaggctctttgaccatcatc

SEQ ID NO: 626241 - DNA, 581 bp, Homo sapiens
gctggtaaggcgttaattgttctcaatgctttgataggaactgagctcatctcttttctgctgaaaggcaggcccaggtgatttgtcttttggtgagtatgaagggctgccccaggtgtgtctatgaaggtgtttctggaggagattggcaatggggaaaatctgccctcaatgtgggcgggtacgatctgtctggggtccaggatggaacaaaaaggtggagaaagggcaaattcttgctctcttttccagagccagaatgcyctctcctgctcttggatttcagaactcctgactctgttctttagattctgggactcacagcagtggcccactcaggcccttgagactttggcttcggactaagagaccattggaatctgtagttctgaggccttcagacttgacttggattgagccacgcttctggcctccccgtttctccggcttgcagacggctcatcgtgggacttccctgtttccataattgggtgagccaattcctctaataaatcccttttcatatatctctctctacatataacttattcattctgtctttctgaagaagcctgattaaa

SEQ ID NO: 626242 - DNA, 548 bp, Homo sapiens
gtttttcataggggctgcaccattttatattcccaacaaaagtgcacagaggtttcaatttctccatgtccttagcaacacttattattttctgttttgttttgttttgtttgacagtgaccatcctaacagttgtcaggttatatctcattttgttttgactcacacttctttaatgtaagggaggttgagcatcttttcatttgcttgtttgccctttgtatttttattttgggagaaatgtctatttttgttctttgcccakttttaaattagatttttttttctgttgctgttgagttgtaggaatttcttccatttttaaagttgccttttcactctgttgtttcttttgctgagcagaagattttttgatatacccacttgtatttttgcttttcttgccatatacaagaaattgccaaatacaaagtcttgaagtttttatctattccgttttctctttagagttttataatttcaggtcttgtgtttaggtctttaatgtattttgagttcacttttgtatatggtgtgaggttagggtc

SEQ ID NO: 626243 - DNA, 548 bp, Homo sapiens
gtttttcataggggctgcaccattttatattcccaacaaaagtgcacagaggtttcaatttctccatgtccttagcaacacttattattttctgttttgttttgttttgtttgacagtgaccatcctaacagttgtcaggttatatctcattttgttttgactcacacttctttaatgtaagggaggttgagcatcttttcatttgcttgtttgccctttgtatttttattttgggagaaatgtctatttttgttctttgcccagttttaaattagatttttttttctgttgctgttgagttgtaggaatttcttccatttttaaagttgccttttcactctgttgtttcttttgctgagcagaagattttttgatatacccacttgtatttttgcttttcttgccatatacaagaaattgccaaatacaaagtcwtgaagtttttatctattccgttttctctttagagttttataatttcaggtcttgtgtttaggtctttaatgtattttgagttcacttttgtatatggtgtgaggttagggtc

SEQ ID NO: 626244 - DNA, 595 bp, Homo sapiens
tttggtttattagtattttacggaagatttttttacatcaatattcatcagggattttgrtgtgtagttttcctgtaatatctttgtctggttttggtactatggtattgctggcctcataagatgagttcagaagtgtttaattatcttcacatttttggaagagattgaaaagaattggtgttaatttgcctttaaaagtttggaggaattctccagtgaagccacctgatcttcggattttcttccttgggggttttttgattactaattcaatttcattaattataggtcttttcagactttttatttcttcatgattcactcttggcaggttgtacatttctaggaatttacccatttcttctatgttatccaatttgttggcataaaattgttattagtataatcatagtagtctcctatgaacttttttatttctgtgacactagtcctaatgtctcttctttctgtttttatttgagtcttttgtcttagattagataagggttttctgattttattaatcttttcaaaaaagaattggttttcctctttcatcagtgtttgaagtcaagtcaagtgagacagaaaa

SEQ ID NO: 626245 - DNA, 524 bp, Homo sapiens
acttgaactcgggaggcagaggtcgcagtgagccaagatcgcgccactacactccagcctaggcgacagagtgagactctgtctcacaaaaaaataaaaataaaaataaaaaaataaaaaataaaaaaattctatctgaacattgttagattatctgtgtttctctagctttcctctacagacaggagatggagactcaacattctgttgtaattaagccatcagcaatgtgggggcttgtagtcttacattagcttggtcaaagtcaatgtacccactgggtttctaagcttgcacagagggcaccttacccacasccttcttgcaaaaaagttccagaattggtggagcagttccccttggccacttagaaggcatgtactaaaatgttctgtgggcttaatctaaatttgttccaaagttattgtaagaattatttactgatgataaaggaatttttttttccttgccattttccccggactgtaattccctaaaatgtttttctgcttccacggagaagc

SEQ ID NO: 626246 - DNA, 524 bp, Homo sapiens
acttgaactcgggaggcagaggtcgcagtgagccaagatcgcgccactacactccagcctaggcgacagagtgagactctgtctcacaaaaaaataaaaataaaaataaaaaaataaaaaataaaaaaattctatctgaacattgttagattatctgtgtttctctagctttcctctacagacaggagatggagactcaacattctgttgtaattaagccatcagcaatgtgggggcttgtagtcttacattagcttggtcaaagtcaatgtacccactgggtttctaagcttgcacagagggcaccttacccacagccttcttgcaaaaaagttccagaattggtggagcagttccccttggccacttagaaggcatgtactaaaatgttctgtgggcttaatctaaatttgttccaaagttattgtaagaattatttactgatgataaaggaatttttttttccttgccattttcccyggactgtaattccctaaaatgtttttctgcttccacggagaagc

SEQ ID NO: 626247 - DNA, 621 bp, Homo sapiens
taaaagaagagagaccatatctgtggatagaaagataaaatattgcaaatatatcagtttttcccaaatcaatttcccatctccagtcaaaataccagtggtatgacaaatagattctaaagctgagagggaagaataagcagcaataagagaatttaagaaaggaaagttaggggtgtcttgccctatgagcgcataaaacatacatctactaaaactggaaaggtcttgtatttgcaaaagaagtgacaggacagcagaacagatgggaaagccctgaaacaaggaatttaatgtatgataaagaaagaatcatcaatcactgggaaaggcattattaaacaaaaagtattggagtttcactcctaggtagatacccaagagagttaaagatgtacatccacacagaaacttgtacatgaatgtttaaatgtccatcaactgatacatggataataaaatacagtgtactaatacattgggatattagccaaaaaaaaagtcaggaggtactgattcatgctgctacatggatgaattttgaaaacattatgctaagtgraagaagccagatatgaaagaccacataaatgattccattaacaggaaattcccagaata

SEQ ID NO: 626248 - DNA, 502 bp, Homo sapiens
agaccagtgctcactgtggtttcccatgcttcacttttcatcttctaaatgggagtgttcactgtggttatcccacttctgttcaatcagtgtcttagttcattctgtgttgctataatggtatgccacagacttgtaatttataaacaaatttcttccttagtcctggaggctgggaagtccaaggtcaaggggctcgcatctggtaagagccttcatgctgtgtcatcccaaagtggaaggcaaaagggcaagagagtgcaagaaagcaagaaggwaagagagcaagagagggccagacttgctttcacaaaaacccactcctgcaatatcaaaccctctcccaagataacattaatccattcatgaggatgggccctcttcacagtcctacctcttaataccatcactatggcaattaaatttcaatgagttttactgggcacattcaaaccacagaaaccagtacatacattgtgtgttgagggcaaataactgttaa

SEQ ID NO: 626249 - DNA, 629 bp, Homo sapiens
ttcagtatttctctttcataccacggtggaaagtcagtacatgggaggctatatgtatgcactcccttttgatctttaaaataaatattgttttttcttaattgcaagaaaacaattaatatctacagtaataagtttgctaagaattgaarggcaagataaggcatatcgataacggaaacttacagcaatggtggtgactcttatacaagtgtgtcttggaagtacatgctctgttacacaatatacggcaagctctccctgccacttacagccatcttgagtggagtggaaggaggttcatgatactctgcacgggtatccataaactggacatacacaatcctcaaataacacaaactcataaaccttatgtttggaagtggtctcagaatttaatcttttcaatctacccaactgagggaatccccttaatacaatgcctaggagttggtattcatagaagtctctggcagaaaaaaaaaatgtatgaaagagttagcagggtggaaagaagatttcgagagcttagagtaaagcttctcccccattttccctgaggaaaccaagaaagtttataaaaatgaggttggagaaagattttaaagaaaattagaaaatcatttagc

SEQ ID NO: 626250 - DNA, 629 bp, Homo sapiens
ttcagtatttctctttcataccacggtggaaagtcagtacatgggaggctatatgtatgcactcccttttgatctttaaaataaatattgttttttcttaattgcaagaaaacaattaatatctacagtaataagtttgctaagaattgaaaggcaagataaggcatatcgataacggaaacttacagcaatggtggtgactcttatacaagtgtgtcttggaagtacatgctctgttrcacaatatacggcaagctctccctgccacttacagccatcttgagtggagtggaaggaggttcatgatactctgcacgggtatccataaactggacatacacaatcctcaaataacacaaactcataaaccttatgtttggaagtggtctcagaatttaatcttttcaatctacccaactgagggaatccccttaatacaatgcctaggagttggtattcatagaagtctctggcagaaaaaaaaaatgtatgaaagagttagcagggtggaaagaagatttcgagagcttagagtaaagcttctcccccattttccctgaggaaaccaagaaagtttataaaaatgaggttggagaaagattttaaagaaaattagaaaatcatttagc

SEQ ID NO: 626251 - DNA, 629 bp, Homo sapiens
ttcagtatttctctttcataccacggtggaaagtcagtacatgggaggctatatgtatgcactcccttttgatctttaaaataaatattgttttttcttaattgcaagaaaacaattaatatctacagtaataagtttgctaagaattgaaaggcaagataaggcatatcgataacggaaacttacagcaatggtggtgactcttatacaagtgtgtcttggaagtacatgctctgttacacaatatacggcaagctctccctgccacttacagccatcttgagtggagtggaaggaggttcatgatactctgcacgggtatccataaactggacatacacaaycctcaaataacacaaactcataaaccttatgtttggaagtggtctcagaatttaatcttttcaatctacccaactgagggaatccccttaatacaatgcctaggagttggtattcatagaagtctctggcagaaaaaaaaaatgtatgaaagagttagcagggtggaaagaagatttcgagagcttagagtaaagcttctcccccattttccctgaggaaaccaagaaagtttataaaaatgaggttggagaaagattttaaagaaaattagaaaatcatttagc

SEQ ID NO: 626252 - DNA, 601 bp, Homo sapiens
cttttagaatgaaaaagctaatattattgtttagggaaactttcagaactgtttgataataggcacatactttaacccaacacttgcacttgcacttctagaaatgaattttaaggaaatagttaaggatatgcaaaatttgtggcaaacatattcactgtagagtagctcaggcaaggcatggtggctcaygcctggaatcccagcactttgggagggcaaggctggtagatcacttgagcccaggagtttgagaccagcctgggcaacgtggtgaaactccatctctataaaaaatacaaaaattagctagacatggcagcacatgcctatagtcccagctgcttgtgaggctaaggcaggaggatccctggaacctacggtaggggatggagagctgagaggggtccactgcactccagtatgggcaacagagaaaaactctgtctcaaattaattaataattaaattaagttggtcaaaaaacatttataaacaatcaaaatgttcaacaatcagtgattacttaaataaattatgtcatttttaactttttattttgaaatcatgttagacttactgaacagttgtttaatagtac

SEQ ID NO: 626253 - DNA, 601 bp, Homo sapiens
cttttagaatgaaaaagctaatattattgtttagggaaactttcagaactgtttgataataggcacatactttaacccaacacttgcacttgcacttctagaaatgaattttaaggaaatagttaaggatatgcaaaatttgtggcaaacatattcactgtagagtagctcaggcaaggcatggtggctcatgcctggaatcccagcactttgggagggcaaggctggtagatcacttgagcccaggagtttgagaccagcctgggcaacgtggtgaaactccatctctataaaaaatacaaaaattagctagacatggcagcacatgcctatagtcccagctgcttgtgaggctaaggcaggaggatccctggaacctrcggtaggggatggagagctgagaggggtccactgcactccagtatgggcaacagagaaaaactctgtctcaaattaattaataattaaattaagttggtcaaaaaacatttataaacaatcaaaatgttcaacaatcagtgattacttaaataaattatgtcatttttaactttttattttgaaatcatgttagacttactgaacagttgtttaatagtac

SEQ ID NO: 626254 - DNA, 576 bp, Homo sapiens
gtcctagctactcaggaggctgggccaggagaatggcgtgaacccgggaaggggagcttgcagtgagccaagattgtgccactgcactccagcctgggtgacagagtgagactccgtctcaaaacaaaacaaacaaacaaacaagaaaaacacagctgtattcccttacaattctagaggtcagaagtctgagaacagttttactgggccaaaatcaaggtgtcagcagggccacactgcctctagagactctaaggaagaatctgtttccttgccttttccatcttttggaactgcattccttgcattcattctttagtttgtggccctttcctccatcttcaaagtcagctttttatgttagagaactttagtcagtatgtgattgccttcatctgcagtcctttcccttttataagaacatttgagatgataattagggtcaattcggctaattcaggataattttcccatstcaaaaaccttaacttaatcacatctgcaaagtttcttttgccacagaaggtaacatttactagagccagggattaagatctggatagctgtgcaggccat

SEQ ID NO: 626255 - DNA, 576 bp, Homo sapiens
gtcctagctactcaggaggctgggccaggagaatggcgtgaacccgggaaggggagcttgcagtgagccaagattgtgccactgcactccagcctgggtgacagagtgagactccgtctcaaaacaaaacaaacaaacaaacaagaaaaacacagctgtattcccttacaattctagaggtcagaagtctgagaacagttttactgggccaaaatcaaggtgtcagcagggccacactgcctctagagactctaaggaagaatctgtttccttgccttttccatcttttggaactgcattccttgcattcattctttagtttgtggccctttcctccatcttcaaagtcagctttttatgttagagaactttagtcagtatgtgattgccttcatctgcagtcctttcccttttataagaacatttgagatgataattagggtcaattcggctaattcaggataattttcccatgtcaaaaaccttaacttaatcacatcygcaaagtttcttttgccacagaaggtaacatttactagagccagggattaagatctggatagctgtgcaggccat

SEQ ID NO: 626256 - DNA, 651 bp, Homo sapiens
aaaatactacatatagttacaayagggaattttcccaagcacttaaacaataaacaatgccctcttatacaaacctttcccagtaatagaaaagtagggaaaacgtcccaatttgttttacaaggcttgcataacattgatacctgacaaagctatcagagaaaggacagttataggccactttctctcatgaatttagatgcagaagtttgaggtcagggatgtattaaaaagtccagtcttatgggttccatctcacatctgttgaatcataatctctgagcatggagtccagtgagatgagttttcataattcttagtaattctgatgcattttgaagacaagcatttgtaaatgtttgtttttcaaactttctaggtaactgagataggggaactaatgaatagactattaatatgcaacacagacatttctttttaaaatacaaattgaaaaaacgaatttgagacatagtatttgtttccaaatttggggaagatatagtggaaattcttgggacatatgcccaggccataaacctgttcccctcttaacttcttggggaacatcctatgcccatctgctggggtggtccctaagggccatatttttctacaggctaaagaacagtatttgctgctagtagccag

SEQ ID NO: 626257 - DNA, 432 bp, Homo sapiens
ctaatgaatagactattaatatgcaacacagacatttctttttaaaatacaaattgaaaaaacgaatttgagacatagtatttgtttccaaatttggggaagatatagtggaaaktcttgggacatatgcccaggccataaacctgttcccctcttaacttcttggggaacatcctatgcccatctgctggggtggtccctaagggccatatttttctacaggctaaagaacagtatttgctgctagtagccagggatccctcctcttgacagcacttgatccccaacaaatcagttcacaaccctgcatctcatcaattaccttagagagaattaagtctgttagcaaggatgcatagaaaaaggaaaagtcaatacttcacatttaaattactaaataattttttaaacatatagaataaataattgttt

SEQ ID NO: 626258 - DNA, 501 bp, Homo sapiens
aaaatctcagtttcataaaataaaatatataatctataaccttcaaacaaatgaaagttaatttttccaacaaaatctacatgccatattctaagcaggaattacctccaccttatgttttttatttttatcctcactatttcctaattatattttgtaacaccagccaaaatctgtacttaatacccagattcttcttgaatatcttcatagaacactataaagacaaataaatatrtaagtatatatttatatctataaatatatttctgctaataaacgtatgaaatagatttctgttaataaacatgaaaactttaagtaatcacattatagtaaacaaaatgtctcagagattttcactgttttaataatcacgcagtgcatttcttacatcctaattttaaattttaaacagtaaaagaaaataccttaccccaaaagttttctggccatggactccctaaacttgttgtgttattagccataatatccacaaga

SEQ ID NO: 626259 - DNA, 581 bp, Homo sapiens
cttccaaaatgaggttgtttctgatcagtctcatttttttgtgaatttaagtataaatttattagaaattaaaatataaatcatctaagagaattataaaacgtcatagaaaatttagagaattcactgagcaaatataaagactcacctctataatattcttgctaaagtttattttcaaataatccagtaaataaaagctcctactattacttaacagacaaaaagggcttacatttcaacagttgtctttacttttcaatattgttaacaaagttcataaaaatagaaaattaaaagaacatgttatttctgaagaaaatgtaatctggatgaaagtatattgaaatactaatcactttactgttctaaaagcatcgagtacgattcttaattactaaatgtatttttaaatacacattttgcattattaaaggytacctgattgcaataaatcctaatttcaaaggtgtatataatttcctaaacactgcatagattgcattttccttaaaataaaccaaaatgagtggaatgggtaactgacattgtctcaactgccttctgtgcagaaacagagc

SEQ ID NO: 626260 - DNA, 580 bp, Homo sapiens
aatcctaatttcaaaggtgtatataatttcctaaacactgcatagattgcattttccttaaaataaaccaaaatgagtggaatgggtaactgacattgtctcaactgccttctgtgcagaaacagagctcattccatttcagggctgggatacaggctgacacttcctttcattgttctatgttgaactatgcagattttctcccawtgggttttcatttttgcagatggccacaacccagtcaaaactctaaagaaaatgtgtttcttaaatcagtttatgacctaggaatagcttgcttgtggacagcactggctcttgtctgtgtatgtaatttgcttggtaagggttcatacctttccctggcatggatctatctaagtgaatgtttatgtctacgtgatttttgagtcccatgacttgtcatgccacaacaggaacttgatttttatctttacaaaactgttaggtttgcttttctactgctcattatttcataacctgggtctttaggtctgggttctccagtggtcataaagtacattgagaagtttgttcttgcctcagatattcacatgac

SEQ ID NO: 626261 - DNA, 602 bp, Homo sapiens
cagggtacataaaaatgctttgcttttttggttgtgttttgtctcttccaccagcaataagtttcatgaggataggagctttattgattttgttcacaaactgaactccagtggctgaaatagtgcctggcatgcaataggctcttcataaatatttattaaatagggaaatgaaataatttgaagggatctcaagatgaaagtattttggacactccaagttaataaaagtgtcactggacmctaaaaaacaagttaaaaatctctattcacatgcattttaatagttttacattttaacttataacaatatcaaatgatacaaaagaacatcatcacatttaagagaaggtacatatttgacattgaatttccttttttagctttatattttaaaactataataggttttatcttcccaatattaaattgacccaaacagtttcagtaaactgggagtactgtcaaaacctataagaactccccacaaaaaattaaaattttaaatctgttttttaattcaagtttttagaaagtaactaggaggatgactaaaaatatgaacatgtcattttaacagagttatgccttttttcttcttt

SEQ ID NO: 626262 - DNA, 584 bp, Homo sapiens
acatctctcaaaagaaggcatacaaacagccaacaagtgtatgaaaaggtgctcaacatgattaatcatcagggaagtgcaaatcaaaaccacaaggagatatcacctcacacctgttggaatggctattatcgaaaagacagaagaaaacaagtatcagtgaggatttggagaaattgggatccttgtacactgttggtgaaaatgtacattggtacagccattatggaaaatggtatgaaagttccttaaaaaataaaaaatagaactaccatattatccagcgactccgctagtgagtacacagccacaggaaatgtaatcagtatctcaaaaagattcctgcactgccatgttcattgcaagcattatgcaaaatagccaagatacgaaaacaacctaartgtccattgacacctgaatgagtaatgaaaatgtggcacatatatacaaaagaatattattcaacctttaaaaagaaggaaatattagcatttgtgacaacagagatgaacctggaagatgttatgctaagtgaaataagctaaagaaagacaaatactgtataatctcgtttttaggtg

SEQ ID NO: 626263 - DNA, 594 bp, Homo sapiens
acacgcctgtaatctcagctactagggaggctgaggcaggagaatcacttgaacccagaaggtggaggttgcaatgagctgagattgcaccactgygctccagtttgggtgacagagcgggactctgtctcaaaaaaacaaacaaaaaataagtaaataaaataaaataaaacagtcaaactcatagaagcagacagaatggtggttgccaggggttgaaggaagggcaaatgggagatgttggtcaaagagcacaaagttttggttatacaagatgagtaagttctggaggtctaatgtacagctttggctatagtaaacgataccgtactgtacactcgatatttgttaagagggtagatcttaagagttctcatgaaagaaaaacatggtagctgtgaaatgatggatctgctaattagcttgattgcagtgatcattttataatgcatgaatatatcaccttaaatacataaaatttttatttgtcaattatatcttaataaagttgacaaaaattgtttgaggtgatatttaccctaagaaccgcgctgtgagacttcaggctgcaactatagtttagtcagtggcatt

SEQ ID NO: 626264 - DNA, 617 bp, Homo sapiens
ggttcctccatgtctcatttctgttcctatagcagaatacttgggtagtttattttaaaaagagatgctttggatcatgcttctggagcctgggaagtccaaagagcatggtgccagtgtctggggaaggcccactgactgcatcatatcatggcagataagcggaaggagaagtggctgcatgcaaaagggggacaaaccaggagaggcacccttgcttataacaacccartctcgtgggaactaatgcattcccatgagaactaaccccgtagcacctgaaagaaattaatccatcttaatgactcttaaagcacctcccaccactgccaccttggggaccaagcctaaacatgagttttggaagggccaatccatagtcaaaccacagcactccattatcttttcgtggcttgataattcatttcttcttcactttttttttttgagatggggtctcactcttatcatccaggttggaatgcagtggcgtgatcttggcttcatttcttcttatcactgaataatattccattgtctggatggaccatagttcatttattcattcccctattgcaggacatcttagttgccaccaaattttagcaattatggat

SEQ ID NO: 626265 - DNA, 590 bp, Homo sapiens
tggctatttcattttgctttccctccaagaataaatgagaattcttattgmtccccatccttgtcattgtttggtattgtcagtgttttgtatttaagcatttgaataggtaggtagtggtatcagttttaatttgctatttcctaatgacatatgatgttgagcaatttttacatatgcttattagccatctgtacatcttctttggtgaagtgtgtgttcccctccaaaaacaattttttaactgggttattccttttcttattgttgctttaagagttcttcgtatattttgatacagtactttatcagatatgtctttcacagatgtttttccccagtctgtggcttgtcttctaattctcttgactgtgcattacacagaagtttttaatttgaatgaggtccagcttatcaattactttttttatgtgagtatgccattggcggtgttgtatttaaaaagtcattgccatgcccaaggttatctagcttttctcctatattctagaaattttataattttgtgtgttacatttaggtctatgatccattttcagctaaatttgggggaagatgtaagatctgtg

SEQ ID NO: 626266 - DNA, 591 bp, Homo sapiens
gttttaaaccttttccatttcctaggctcttgaacagttccatgatatactgacctaaatgaatgttggctagattgtgttgaaattacaaagtagcctttaaataacaaagcatgaagaaaatagtgacttgagtttcttgaagaaccatagactttctaagggatattagtgctgtatatgcaacaaatgagaacattaagaaggatgtttattttatcagctatgttgcctgttgatcctgttaaagaaaattatgttcataaagtggaaaactgtattttatgtatctttttctgaactcctttcaaatcaagagtacgtcttrtagcagtttcaaaggttaggcattagtttttcacaacacaaatacttaactcactaaaatatttgtttaaaataattttttagagttaatattattagtctaattataaatgactgtgtttaaaattcaaatacttggagatgtcattcttataaatcacactgatacttactcagtttcaacttaaagttgtcttacaagaaaaatatgcttttgtgaaaaagaggaaaatgagttaaattgttatcttacatatcctttat

SEQ ID NO: 626267 - DNA, 582 bp, Homo sapiens
tgttcagttccctgctgtgccatttaccagatgtttaattttggcgaggtttgggcatcagtttcttacttgcagaataaacaccataatatctaccacaaagaggagttgtgagattagagataatgtatgaaagaatcctttgtaaactaaaaacacattttcattaagtggagatattgcatattcttacgttatttttggaacttgtttttacctgaattaatcttagtcccatatatcttttgacacatttcttgctaagaatctcttgttttacagtgtattccacaaaagagcctaaccttgctgttttattagaaggcaacttataaatacatacttggctaacttctggcccatgtgccacaagacagaaacatcagtctacttttgaaatgagtcctgtccagagtcacttcctgcttggactccattctgtgttcccttttctgaggctgcaatgtgccttttcaactcactgccttatgggcagatgagaacactgctgtctggtgagcaygagtaggtgcctcatgactgggatttcccagcaaagcacacataaaaccatggcttcgg

SEQ ID NO: 626268 - DNA, 506 bp, Homo sapiens
agggtggggcaaaatgccaccagtctctttgctaaagcatagcaagagtgacctttgcccagttcccaggaagctcctcatctccatctgagaccacctcagcctggacttcatcrtccatatcactttcagcattttggtcaaagccattcaacaagactctaggaatttccaaactttcctacatcttcctttcttcttctgagccctccaaactattccaacctctgcttgttacccagttccaaagtaatttccacattctcaggtatcttatatcaatgccaactactttggtaccaattatctgtattggtccattctcacactgctataaagaaattacccatgactgggcaatctataattataggaaagaggtttaattgactcacagttctgaatggctggggaggcctcagaaacttagaatcatggtggaagaaggagaaggagaaacaagcaccttcttcacaaggcggcaggagacagaatgaacacaggag

SEQ ID NO: 626269 - DNA, 506 bp, Homo sapiens
agggtggggcaaaatgccaccagtctctttgctaaagcatagcaagagtgacctttgcccagttcccaggaagctcctcatctccatctgagaccacctcagcctggacttcatcgtccatatcactttcagcattttggtcaaagccattcaacaagactctaggaatttccaaactttcctacatcttcctttcttcttctgagccctccaaactattccaacctctgcttgttacccagttccaaagtaatttccacattctcaggtatcttatatcaatgccaactactttggtaccaattatctgtattggtccattctcacactgctataaagaaattacccatgactgggcaatytataattataggaaagaggtttaattgactcacagttctgaatggctggggaggcctcagaaacttagaatcatggtggaagaaggagaaggagaaacaagcaccttcttcacaaggcggcaggagacagaatgaacacaggag

SEQ ID NO: 626270 - DNA, 442 bp, Homo sapiens
atctcatcttgaattatgacccccatgtgtggacggagggacttggggggaggtgattagatcatgggggctgttcccccatgctgttcttgtgatagtgagagagttctcctgacatatggtagtttaataagtgtcaggcatttcctctttgttctgtctctctcctgctgccatgtaagatgtgccttgcttttccttcatcctctatgatgattataagtttcctgaggcctccgcagccatgcataactgtgagtcaattaaaacttcctttataaattacccagtctcaggtagtttctttatagcagtgtgaaagcatactaatatactcatgttgagatataatcccctgtgttggaggtggggccttrtgggagatgtttgggtcatggggacagatccctcataacttggtgctgtcccactgatagtgagt

SEQ ID NO: 626271 - DNA, 637 bp, Homo sapiens
acaatgacaactaattttttaattgcacctgaggattctaacagtttattttctacattggcccagcttttaatgggtttaacatattaaatatcctctgaagattatttaatttttatcttgaaatttctcatatgaggcataaaattaggttcttatctgagaagttatatttccttcaaactcttagtttcaagtttcctttgaaaggatagattttctaaaataagaaactgaacttgcacttgaaaatgtgtcctgaatttttaaaatgtttagcctaacaagtttcttcctgttcaccatatgtcacaaaaatcatcatatttctattctttatattgattagatttcaaatagggcctgagttttcatcttttcattatgttgcctggatttttatcaagcccatattcccttgtcattaattaactcaraattatatttgaatgtctttccacgtgcatctgatggatggaatttgtttcccattggaagcttctgttgggaaacaataaataagctcagaataaaacttcaaaattaattaaaatgtatggcttgtcttgggggcagtagcaccatggtataccaagcagacttttcctattatatttctatttttttctctagatag

SEQ ID NO: 626272 - DNA, 412 bp, Homo sapiens
agagaagaaaagcaacagagaatccagaaaattttaggccaaagaagtcaaagttgctattaaaagccctcagcgaccaaaagctcttcatgaaacaggtttgctaatatttaatttgaaactgtttctgttgctatgataccattcttaccttttcatcttcttcagtaacatttaataaaccaatttcttgggttgaaaggtgtgtgtgtgtgtgtgtgtgtgtgtgtgtgtgtgygcgcgcgcgcgcgcgcatgcatggtgttgttttgtttcacattattttttctcaaaagcaagaagtgggcttattttcaagtccagactgacataattcagggcaaaaattgcatatataagatgccaaaaaggcccactaaacaaggaagtaaatgtttcaaccatgagaata

SEQ ID NO: 626273 - DNA, 655 bp, Homo sapiens
tcgcttacaatttttttttttttttttgagatagagtctctctctgttgcccaggctggagtgcagtggcacaatctctgctgactgcaacctcctcctcccgggttcaagtgattctcctgcctcagcttcctgagtagctgggattacaggcgcccaccaccacgcctggctaatttttgtattttttaatagagatggggtttcgccatgttggtcaggctggtcccggactcctgacctcaagtgatccgccctcctcagcctcccaragagctgggattacaggcgtgagccaccgtgcccggccaacgatatgtattttgagtctttcgattcatgaacctgattggtatgtttttctattagacatttgatttctctcaacaaggttttgtagttttcagtgcacatatctgatagatactttgttatatttatccacaagtattttatacatcatatttttgttgatggtttgtatttaacctcaatttacaactgttcattattagaatatagaattacagtttttttgtgtgtacaaccttgtcttctgcctactaaattcaattagttttattatttttttgtgtgtagattccttaagactgtctaaatatataattacattgcctaaaataactttttctag

SEQ ID NO: 626274 - DNA, 588 bp, Homo sapiens
ccatgtcttagggctccacactcaaatcccagcacctccttatcatcctttctaactttgctgtagattccattcataatgtttattaccgccatttctcaaactcttgattccatgtcttccaggcctgtcacctgaatggtgaacggctttttccttttaatctttctaattctttaacatcctgaaaataactatggatattttttgttcattttgtttaaaagaaattttatgataatgtgaaaacaaggttgataaattttaacaaacattgaggacctaaaaggctcataaargccaggtgtggcggttcactcctgtaatcccagcactttgggaggccaaggcaggcggatgacctgaggtcaggagttcgagatcagcctgaccaatatggagaaacccccgtctctactaaaaataaagttagctgagcgtggtggcacatgcctgcattcccagctactcaggaggctgaggcaggaaaatcatttgaacccgggaggcagaggttgcggagagccgagattgcaccattgcactccagcctgggcaacaagagcaaaactccctttcaaaaaaagc

SEQ ID NO: 626275 - DNA, 588 bp, Homo sapiens
ccatgtcttagggctccacactcaaatcccagcacctccttatcatcctttctaactttgctgtagattccattcataatgtttattaccgccatttctcaaactcttgattccatgtcttccaggcctgtcacctgaatggtgaacggctttttccttttaatctttctaattctttaacatcctgaaaataactatggatattttttgttcattttgtttaaaagaaattttatgataatgtgaaaacaaggttgataaattttaacaaacattgaggacctaaaaggctcataaaagccaggtgtggcggttcactcctgtaatcccagcactttgggaggccaaggcaggcggatgacctgaggtcaggagttcgagatcagcctgaccaatatggagaaacccccgtctctactaaaaataaagttagctgagcgtggtggcacatgcctgcattcccagctactcaggaggctgaggcaggaaaatcatttgaaccygggaggcagaggttgcggagagccgagattgcaccattgcactccagcctgggcaacaagagcaaaactccctttcaaaaaaagc

SEQ ID NO: 626276 - DNA, 608 bp, Homo sapiens
atattataccacctgctccaaatggctagcctttcttttcctctatcttcttgctgtaaaattaatgaaaaacatgtcttctgcaaatcaacctaaatggccatcaatgatagattggatgaagaatatgtgatatggatacaccatggaatactatgcagccataaaaaggaatgagatcatgtcctttgcagggacatggatggagctggaagccattatccttagcaagctaacacaggaacagaaaaccaaacaccgcatgctcccacttataattggagctgaacaatgagaacacatggacacagggagggggacaacacacaatggggcctgttgggaaggtggagcagggggagagagagcatcaggataaatagctaatggatggtgggcttaatatctaggtgatgggttgataggtgcagcaaaccaccatggcacacatctacctatgtaacaaacctggacatcctgtgcgtgtaccccggcatgtagaacaaaattaaatacaaaataacaacaacaaaacatgtcttctctgtgtttcagaatacagatacacaytgactagcaatctagataaacatcacaaatttaaatta

SEQ ID NO: 626277 - DNA, 626 bp, Homo sapiens
tatagattttagggagacaggaattgtaggaaaaactataaattagtacatggaagatatacattgattcagccccacaaggtgggataccttgaagcaagagtttacaggttgtaggtggagtcacagkttctttaatttgcagtttgttcaaagtgttaagctttgtctaaaggcttgaagtaagtacaaaggaatgcttaaatgctggtcagttgtgcctaaactccaaaaaggagtgggtgtaacaagacaagtcctacctccctccagtcatggctggacatttagtttttaaggtttttcttgggtccctttggccaagagggggtcccttcagtcagttggggtgcttaggattttatttttaattgagtgagtgagatcagagtgttgacatatgagatggactctccttgcctttattagctttgaagacggagaaagagagacatgacccatgaaatacaggatgtttctaggatataaaaatgtgtggaaaaactatctcacctagagctagaaagaaacacagccctgttaagctcttgaattcatcctagtgtgacctgtgtcagactttggacctaagaactataagataacatgtttgcattgtttaagct

SEQ ID NO: 626278 - DNA, 626 bp, Homo sapiens
tatagattttagggagacaggaattgtaggaaaaactataaattagtacatggaagatatacattgattcagccccacaaggtgggataccttgaagcaagagtttacaggttgtaggtggagtcacaggttctttaatttgcagtttsttcaaagtgttaagctttgtctaaaggcttgaagtaagtacaaaggaatgcttaaatgctggtcagttgtgcctaaactccaaaaaggagtgggtgtaacaagacaagtcctacctccctccagtcatggctggacatttagtttttaaggtttttcttgggtccctttggccaagagggggtcccttcagtcagttggggtgcttaggattttatttttaattgagtgagtgagatcagagtgttgacatatgagatggactctccttgcctttattagctttgaagacggagaaagagagacatgacccatgaaatacaggatgtttctaggatataaaaatgtgtggaaaaactatctcacctagagctagaaagaaacacagccctgttaagctcttgaattcatcctagtgtgacctgtgtcagactttggacctaagaactataagataacatgtttgcattgtttaagct

SEQ ID NO: 626279 - DNA, 616 bp, Homo sapiens
gtattgttattagatactgccatttgttttcataggagtgactgactttcttggttcgttttcaagaaaatagctgtcaaacacccaagtatgaaaagtctagctgtctgcgagtctttagaataaaaataacgatcaatgaaaaagtagctaattcaatgcagaaagcaaataatcactcgtgttttcccaaaaacaactgtcatatggtatgcagcagcagttctttatgttttcttccattttgttcctcaaagaataatgtaaaaagatgtatttaagggtatagatttaataaaactaatgttttgtactgttttaatgaagggcattcttaaatgaaacaataaaatagtaatttaaaaaataattctcagtgtgcggcagtaaataataaaatgattttcagaactgtttggtgctactggcttaatttgtgccaaggggcaagaaattttacccagtgtcactttkgcactattaatgcaaatttccacatagtgacaaaggaaaaaaaagttaatataattatgaatatattttgatcccacagacctcctgaaaatgtcttgcaaattcctagggactgtgggtcacattttgggaactgttgtct

SEQ ID NO: 626280 - DNA, 564 bp, Homo sapiens
tactggcttaatttgtgccaaggggcaagaaattttacccagtgtcactttggcactattaatgcaaatttccacatagtgacaaaggaaaaaaaagttaatataattatgaatatattttgatcccacagacctcctgaaaatgtcttgcaaattcctagggactgtgggtcacattttgggaactgttgtcttaagtaattagaagaaacagaaaattcaaagctgacatttatgaaatccaaatacctgccagggatrgtacttataggttttaaaattttactgtatatgatgactttcttatatttggattctacagatttaattaatttcaccccaaattgaacatgattggagggaagcaaggtccacagttctcagttaagtggcttacgcctgtaatcccagcactttgagaggccgaggcagaacgatcacttgagctcaggagtttcagaccagcctgagcaacattgtgagacccccacctctactaaaaataaaaaaatatagctgagtgtggtggcatatgcctgcagtcccagctacaggtaggaagtt

SEQ ID NO: 626281 - DNA, 564 bp, Homo sapiens
tactggcttaatttgtgccaaggggcaagaaattttacccagtgtcactttggcactattaatgcaaatttccacatagtgacaaaggaaaaaaaagttaatataattatgaatatattttgatcccacagacctcctgaaaatgtcttgcaaattcctagggactgtgggtcacattttgggaactgttgtcttaagtaattagaagaaacagaaaattcaaagctgacatttatgaaatccaaatacctgccagggatggtacttataggttttaaaattttactgtatatgatgactttcttatatttggattctacagatttaattaatttcaccccaaattgaacatgattggagggaagcaaggtccacagttctcagttaagtgrcttacgcctgtaatcccagcactttgagaggccgaggcagaacgatcacttgagctcaggagtttcagaccagcctgagcaacattgtgagacccccacctctactaaaaataaaaaaatatagctgagtgtggtggcatatgcctgcagtcccagctacaggtaggaagtt

SEQ ID NO: 626282 - DNA, 599 bp, Homo sapiens
gtcacattttttgaccaagttagacatgatgtttttacttgaggcaaagttggctgcccaaagatgtattgagttaatttragacaatgtgtgactatatatttcacgtgctttttaaaaacatgttgatgtgatggtacttgtacagaacaatggtcaagtagagatatataatgaaatagaatgaacagtaagaaatattcttgagaaagcaagggagctatagaacaaattcaggcatcagccatacagatgaactaactggagactatcgggattcctcctctagctgtgtgtattatagtcctagtgtctgaagccttcatctgtgttccccactatccaacacactgtgtgatatggagtaaataagcaaacaaataaaaagcatctaaggacaaagcaaagaacaaaactccagagaaggtaatatttttggagatggcagagcaagcacataatgaatggcgaaggtaacatcccaggaatagtatgaaatagtctcataataacttgattctagaaataattttaaaaattatgcaggcagtattataaatgaatggtgaagggatactttgtatgctaatgttaggaaa

SEQ ID NO: 626283 - DNA, 613 bp, Homo sapiens
ggttaagaggcaacaggaggctgaaatggatcataatgacaattacaaaaagcaaagacagtgattattttagaaattaacaaaaactgagaattgatttaatggagggattgagccaaagtacagtgttcattcatccctcaggtgtcacattttttgaccaagttagacatgatgtttttacttgaggcaaagttggctgcccaaagatgtattgagttaatttaagacaatgtgtgactatatatttcacgtgctttttaaaaacatgttgatgtgatggtacttgtayagaacaatggtcaagtagagatatataatgaaatagaatgaacagtaagaaatattcttgagaaagcaagggagctatagaacaaattcaggcatcagccatacagatgaactaactggagactatcgggattcctcctctagctgtgtgtattatagtcctagtgtctgaagccttcatctgtgttccccactatccaacacactgtgtgatatggagtaaataagcaaacaaataaaaagcatctaaggacaaagcaaagaacaaaactccagagaaggtaatatttttggagatggcagagcaagcacataatgaatg

SEQ ID NO: 626284 - DNA, 336 bp, Homo sapiens
gattattagagccacattctatcttaaactctttacattcacgttctcattaaattactattttcaaaaattaaaaaatggagaaataaagacagtaatatctgaggtaaaatctttgttagtaaatatgtttgaattaaagctcaagagaattttttttttccaactktaaaatgttgaaaattgacaccactcagtgtgagcgggtgaaagaaacattccaatttatttctcttataagggtaaattagtgtcatttttatttttaattatttatgtttacactaaatgcataataaatattggcactttatatttattataaaaacattaata

SEQ ID NO: 626285 - DNA, 559 bp, Homo sapiens
acaactttggaatccaccagttgacaatggcagagatcgagttcctgaataattgtgtgaagtaggccttgactgacctgaaatgttacttgaaaaacaagttaatttcttatactctaaatcactaaatgttgggaattaatttgttattttagcttagtctttcaaaactgacacaggattgtagtgaggattaaattatataatacataatgaagttcatggaacaaagactggcacatagtaagcactcactcatagctttttttattcatattatttttaattgataaattacagcagtgtacatttatggggtacagtgttatcttttgatatatgtatacaacgtgaaatgattaaatgaagctagttagtatctattatctcacatctttttttgtagtgacacatttgaaatttacatgcttagttattttgaaatrcacaatacatcattattgactacagtaaccttgctatgcaatagatctcaaagttttattccttctgtttaactggaactttgtagcctttgacaaacatctcctattcccat

SEQ ID NO: 626286 - DNA, 631 bp, Homo sapiens
acttgggtttgagattaaggaatatgtgttaaatattagcatagtaattattcacgaaattgaaaatccattaaaataaaatgattgtgccaagagaagaatgaataagaaaggtggttgcattcatgaaaaaattggaaaggtatttttcaagcagaaaaaggtagatgatagtgcagaatttcagctattttagagtgtaacagagttaaaatgtatttgcccttctttgacttaactcttggctatacagctctgctacgtaaataatatatatcttatagtaaastctagcatgatttggggtaatctcttaagggtaggaacaaactcatcaagatggattattaaagcagtttgaacctattcataaaatatgttttatagacagaaaacattaagggtatttccctttggcaatctttgtggagctggttctgtgctgcttgtggaaactgtgaaatgaagaaaccatctatgctagttgtgggggatgggcatcttggctcatttaatctggggtatgttatattttgtgattaagggtatgaagggaggagaaatatgcattcaactatgtctagtattttatattcaaacatcattaaatatttcactattttaatgaaat

SEQ ID NO: 626287 - DNA, 575 bp, Homo sapiens
aacttgggtttgagattaaggaatatgtgttaaatattagcatagtaattattcacgaaattgaaaatccattaaaataaaatgattgtgccaagagaagaatgaataagaaaggtggttgcattcatgaaaaaattggaaaggtatttttcaagcagaaaaaggtagatgatagtgcagaatttcagctattttagagtgtaacagagttaaaatgtatttgcccttctttgacttaactcttggctatacagctctgctacgtaaataatatatatcttatagtaaagtctagcatgatttggggtaatctcttaarggtaggaacaaactcatcaagatggattattaaagcagtttgaacctattcataaaatatgttttatagacagaaaacattaagggtatttccctttggcaatctttgtggagctggttctgtgctgcttgtggaaactgtgaaatgaagaaaccatctatgctagttgtgggggatgggcatcttggctcatttaatctggggtatgttatattttgtgattaagggtatgaagggaggagaaatatgcattcaa

SEQ ID NO: 626288 - DNA, 575 bp, Homo sapiens
aacttgggtttgagattaaggaatatgtgttaaatattagcatagtaattattcacgaaattgaaaatccattaaaataaaatgattgtgccaagagaagaatgaataagaaaggtggttgcattcatgaaaaaattggaaaggtatttttcaagcagaaaaaggtagatgatagtgcagaatttcagctattttagagtgtaacagagttaaaatgtatttgcccttctttgacttaactcttggctatacagctctgctacgtaaataatatatatcttatagtaaagtctagcatgatttggggtaatctcttaagggtaggaacaractcatcaagatggattattaaagcagtttgaacctattcataaaatatgttttatagacagaaaacattaagggtatttccctttggcaatctttgtggagctggttctgtgctgcttgtggaaactgtgaaatgaagaaaccatctatgctagttgtgggggatgggcatcttggctcatttaatctggggtatgttatattttgtgattaagggtatgaagggaggagaaatatgcattcaa

SEQ ID NO: 626289 - DNA, 566 bp, Homo sapiens
aattgtatttttcttgatttgtaacattgtttatatttattatattacagttttcaggtagttgaaataacatatgtgatttttatttaacaatgaatattttattcaagtaagaaaatgttctctatgtgttatgccaaaatgtttactgcattttcaataataaaatagagcattttctataatgttttaactccattttcaaattcatgtattagtttttaagagaatacaataaagtgattttttaaaattaaaagttgcatcatcatagaagctataaaggactttatatgcacattttctgctagtaaataatatttctctaatagtaattgagtcgtataggaagayaggatgttgcaccatgcaaattctacccttttgaaaagttgaaggcatactcagattttaaaaagttgttactgtattataataaacagatggaagattaagaataagtggaaacaatggaatttaaatgactttttaaaaattgaccagctttctggttacagtcttcagataattattgcatttcctgagataataactgcaaggctgct

SEQ ID NO: 626290 - DNA, 462 bp, Homo sapiens
taatacaataaattcttatcaggtcaaaggtcaaagctctttgtaaaaagcgttgtttattttgtaccccaagttctcaatatgttttagataaccatgtaaaacaaacaattaccatcaattttgtgtatacctggttgtatttatataattaagcatttgaagtagcaaaactcatttacttatatttgaataaatcttgtaagttccaagcaaaatatcactttaaaaaacattctcctaagaaaaggataggataatatatctagaaatttttgtgtctaccaataattatacaaattattaagaagtttctacagtcacagattcgattgcagcaatatttaatgccatgatgaaaatgtaaaatatttgmagttattgtttataaattattatcaatgagatttagacatgtatttttttatgaattattcttatcttggcaccaaaaaagccatt

SEQ ID NO: 626291 - DNA, 462 bp, Homo sapiens
taatacaataaattcttatcaggtcaaaggtcaaagctctttgtaaaaagcgttgtttattttgtaccccaagttctcaatatgttttagataaccatgtaaaacaaacaattaccatcaattttgtgtatacctggttgtatttatataattaagcatttgaagtagcaaaactcatttacttatatttgaataaatcttgtaagttccaagcaaaatatcactttaaaaaacattctcctaagaaaaggataggataatatatctagaaatttttgtgtctaccaataattatacaaattattaagaagtttctacagtcacagattcgattgcagcaatatttaatgccatgatgaaaatgtaaaatatttgcagttattgtttatwaattattatcaatgagatttagacatgtatttttttatgaattattcttatcttggcaccaaaaaagccatt

SEQ ID NO: 626292 - DNA, 558 bp, Homo sapiens
tatggctgatgaaccaacattgatacattatgattaactaccgttatcctcaacattagggttcactctttgtgttgtacattcaataggattttacaaacatcttgtaacttgtgtccatcattacacaatcatacaggatcatttcactgccctaaatactccatgctccaactatttatcctttccttccccactatgaacctctggctaccaatgatcattttattgtctccattgttttgcctttcacagaaagctgtataattgaatttacacagtataaagctttttcatattggcatcgttcacttagcaatatatttttaaggttcttcatctcttttcctagcttgatagcttatttctccttatggctgaataattctccaytgtatggatgtgtcacaatttatttatccatcttggctgcttctaggttttgacagttatgagtaaaattgctataaacattcatgtgcaggtttttcaaatcatttgtgtaaataactatgattgtgattgttagattgtgtggtttagctttgaaagaaactc

SEQ ID NO: 626293 - DNA, 481 bp, Homo sapiens
taaatatttatttttatttgattaaaaatcaaattataagtatttgaatttataaaagttgaagctatctagtataatttatcaacgttttaaatcacctaaaattattttgattttctcaccggtaatatctattaattcataaaattagagttgccatgtttagctaatgaaaacacaggataccagttaaaatggaatttcagctaaacaatttttatttagtgtaaacattttctaactgtgcccaaatttaactgggcacatttatcctgyatatttcgtggcaaagttaactaaatcttattcatagtaaattttttgacaaatattgcaaacatgtttttaacagtttcttgaatatttcttctctggtggatttttcttctctcctattattttctagtttagtaaaatcagcaattcaaagggaaacgtatgcttttgagtgccaacagccatcccagattattacaacgtg

SEQ ID NO: 626294 - DNA, 550 bp, Homo sapiens
atagaaaaaagtccttatttctttcggtctaattgaggctttgggccttttgacccttatcttccctttcccccatacccctccagcctctggtaaacacttagaaagtttaacatatcagatctatgtatttgcaattcacattaatttttcagactcctattgataaatattggcctgtttgtggtctaggattatatagttttttgggaaataagcaatggatcaatttcacctaagtgaccaaattcttccattcataaactttcagttttgaatttattttgttattttttaaaaaacacataattgttatgaacayaaatttatgagatttgtacattttatattttacctttttgtaaaacaaaaccatacttatgtagttacaagggttagttttgaaaatttctatttttttctaataatatttttgccttttttgtaatatataatagaaaaaattatgtttttctgggcaaaattgcaaagtgaattatataaaataatctctgataatacttctttcatacagtacaggacttttata

SEQ ID NO: 626295 - DNA, 504 bp, Homo sapiens
tagctaatactactttcattttgattagaaatttttgtataattttacattattttactttcactcctttgctattttatgatttgattgtaatttttaaaataattcctagatttttatttttatattataattgaaagttattccttttacattcatttgatatatttggactatgttttatatgctaattatttcctttttgttttttattttctgcatttttttaataaagagattttttagagattttactttgtatcaaattacaatatacagacaaaaatgcacataagtgtacaacttattacatttccacaaattgaacgcaygcatatgcccagccctcagataaagaaacagaatatcaaagggccacaggaaaacttgtttcttgccctctaaaggttcactgaaagatcaactgaaaaaaaaagattaataggagaaaagacacacaaatttcttaacatgcctgagagccatacaacatatcagaactcc

SEQ ID NO: 626296 - DNA, 627 bp, Homo sapiens
gtatttttatggattgctttcactaaaaactaatttaattctatattaagaactacagagtttattttataagtaggatttgcagaacatttctaaaaatgttttatatacattataaaaaattatgcttgcagggtgtttttttttctttggtgtgtaaatattccctgaacttcaaaattttaaaatccaagtatattaggaccaaggatagaaagaaatttgaaaagagaaataatgacacaatgagattttctttttaaaggcatatattagagttacaggtcaggactttatggattttaagtatcttctggaggggcacagtggctcacgtctgtaattccagcagtttgggaggctgaaacaggaggatcacttgaggccaagagttcaaaatcaccctgggcaagaccccgtatttacaaagaattaaaaaataagccaggcacagtggtgtgcacctgtagtccaagctaataaggaggctgagaaaagawcacctgagcctgggaggtcaaggtcacaagtgagccaacatcacgctacttcactccagcctgggagacggagcaagactctgtctctccctctaaaaaaagaatcttctattaggttattaataag

SEQ ID NO: 626297 - DNA, 575 bp, Homo sapiens
ttcatttgaatataatcataattattaaaattgctatacatcacttacaatttactaatgtgttatgaaattttgtatagttatagagtaactattttatactttagaagaaagaatttaaaaataacatagcaattttttyctcatttgtcatggaaaactatttagcagctagttaacaatatgtaatgaacagaaaagatgaagtcattctgaatattgctggagtatttaaacagaatttgtaagaacacagataatgatagtaggatgaagcgactaatataatgtgagattcaagaattcaatggcaaaaagaaatggtagaaaaaattatgagccttgtgtttctaactgaacagaattaaagatttaagcctgtcagaaagtcagatataacgcggataataataagtataaaatggaccatttaatgaattttactcaatagttaattcttattttatcagtatttgttttgtactgatatattaacaagaattattagaagaatttatggagttcataaatttacaaagactttagctcttttgttattttcacttaaagtgttt

SEQ ID NO: 626298 - DNA, 629 bp, Homo sapiens
actttacactttgttatctctcactttggactttcaggttgactgtcctggctattgtgaataatactgcaatgaacatgatagagaagatatctccttgaaatattgatttcatatgccttgattatatacccagtaataggattgctggatcttatggttgttctatgttaaataacctctttaatcaacgacacaacgtttttcccctacattgttcttaaagtggtaataataaaatcactaataacatagtaattgccaaagtcaatagccatgttttgacctttatcttcatggacattttgcagtgttccmccatagttaatggttcccttctttcagacactttttcctttgttaccttcctgttattgtacctgcctagctctcttttcatgcgtatgaaaattctcagtctccttcataggacaccttttctctgccttttcctcatattttggtattctgagtttcatcctgagttcacagttcttaataattctgtataccataactatgtgaatttgcctactcaaatggatgcaagttccacataaataataaaaaattcaaaatctttgcctctgaccagacttctctttcagattttatttttaagtacgact

SEQ ID NO: 626299 - DNA, 571 bp, Homo sapiens
cttcctccagggtatagggaggactttttctggggagagtcttagaacccacaatcagaaagatggggaaagattagagtcctgccttagggcaggtgaatggactgcaggagagattctgtttcctgaggcctgtccctgaagcctaaaagatccctcattctaagtaaagactgtaagatgggctattggagttatgaactaggaactgtgcacaaagccagtgtatattataataccgcacagagactctgtcctgtagtaaaaccaaatagcttatagttawacaccaaatatcttcttgacccctggctttaatcctgatgttttatttgccaggagtgcttttctacatattcatcttttggcttatttcaactcatccatttagcttcagcagaggcaacaatgcagttctacaggatttattatctaaatctttcatggtgggttcagagacatcttttcatccatttgttaaatcatatttgtacagtgatcattgtatttatcccattaaatgttgtaacaatattatttacaagacgaaaagggtgtaagagcagaaata

SEQ ID NO: 626300 - DNA, 690 bp, Homo sapiens
gcttttctacatattcatcttttggcttatttcaactcatccatttagcttcagcagaggcaacaatgcagttctacaggatttattatctaaatctttcatggtgggttcagagacatcttttcatccatttgttaaatcatatttgtacagtgatcattgtatttatcccattaaatgttgtaacaatattatttacaagacgaaaagggtgtaagagcagaaataggaaattatagagcttaattcatattttcagcacaaagcacagatcttctgataggtttaacagccattaaatgaaaacaaacaaacaaataaataaggagcagggaggcatgtaacacaggtgaaagagaacctggcatagaattaggtctgggaagacagattagagattcactatgcaggatgagggagcaggaacaaagacagactcaaataagagaaagaccatggccaattttggtatctggagatactcaatagaactgatgtttagaatataacttagcrgctagaattaaaggagatgaagcagcaaataaaagcagaagcaatgtcatgtaaggcctagcataacattttgagatgttacccttttaatattgaaatattacaaagaaacaacaacaaaagagacgacaaattgaaattggacaggggtctctccattcactttctaagtct

SEQ ID NO: 626301 - DNA, 658 bp, Homo sapiens
atcattactcttcttctttattataaatactgctcaaatatttggagttacttgcatctatttttcccatatttaatttcttatacctttgaacataaattaaaccttaaaacttaaatcatgtttgctgttctctttattccttcttcttgaatagttctgctgatgaggtttttacaaaccgcttatagcatatggggcctcaatagttacttcatgtactgataataggaaattctccttaatatccaacatgtgtttatttataatattaatatttacaatacaataacagcagcaaaatgtagaatatatttggttctagttcagagttacacatacaaattgttccaaaatgcaccaaaaacggaaggctgagttcatttttaaaaagcttaatggtgaaagacttgacttagaattgaaggaagcatgagaggcataaatgggatgcttcaatggggcagagcagggatgaattaattggacattcacwttcataatggagaattaacacaggtcaaaaagtattatgtttcagagaagaaagagtaaaatctagacagttattattgctttatggacaccaattcttgacctgtgggctagagcacatgctattatttctttctgaattatagtgaggttagaatgtatg

SEQ ID NO: 626302 - DNA, 488 bp, Homo sapiens
cacctaatgctaaatgacgagttaatgggtgcagcacaccagcatggcacatgtatasatatgtaactaagctgcacattgtgcacatgtaccctaaaacttaaagtataataataataaaagaaaagaaaagaaaaatggtaaataaatagaacaccagttaaaaaagttaaaacaaaaatgtaaaattcatttggaaatctttgttatctataaatataaccagttattttttaagtaaaataacatgtaatttttaaagtgtctaacagcttctccaatctagtttgtcttccacgtggtccaaatataacaaaaacacattgtattatatcttaaatgaatatttacaaaacttcagtggtgagtcaagttaaagtatgagtgaagaatcctgggaatggtacagtttgcatgagggaatgaacagattacagagcgaaactttattagaaggcaattttgtccagaaggaggcttgagctaaa

SEQ ID NO: 626303 - DNA, 621 bp, Homo sapiens
ttataattataattagattatataaatttatataatctatataacatataagtaataaatatttcaattaagtagcaaagatatattttacttaaatttaacgtaattattgttatagttgagttagttacattatttggcaagttaatctctatcggtcacatttttttctttctatgtctcttctttcctgttaataccttggttaatgtattattttaattattacattccagttattctatagtgttgctatatttcctrgcaaccttttttattttattattttattggttgctttcaatgatttatatatgcattcttaatttatcatcaacagatagtcagaatggctatgtaaatactagacagaatagactttaatataagaaatttataagatcttttaaaataataagagggccgactcatcaaacaggtctaacaattccaaaaaaaaaaaaaatgcacctaagaatacagccaatacatgaaacaaaaactggcaaaataaaaggaagatatggccattaaacaataatagttggacacttaactactccattttcaataatggatacaatacctaggtaagcagatcaacaaggaattagaagacct

SEQ ID NO: 626304 - DNA, 637 bp, Homo sapiens
aacaattccacatacaacagagtccagaggatttaaaacaaaagaaaacaaaacaaaatacctcttacaaataaatttaatcaatatgctgaaatacccctaaaacctacaaaaatttgttaaaataaattaaagaaaacacaaataaatggaaagatattccatattcatggactrgagaatttaatatcttaagatgccagtattctccaaggcaatctagagattcagtgcaactattattcaaattccaatggccctttgtcagggatagaatagacaccccaaaaatgtatgtgaaacttcaaggggccccaaatggccaaaataaaattgaaaaagggaaaacatgaaggcaaactcacacttcttaatttcaaaatgtattttaaagttaaataataaaaatcatgtgactctagaatgagaatagatacattaaccaatgaaatagaattgaatccaaatataaacccaaacatttaaagccaattgattttcaacagtagtgccaatactattaaatagggaaagaattttctcttcaaccaacggtgtttgagactactgaataacaacatgcaaaataaagttcaatacctatctcacactgcatacaaaaattaacttaaaatgc

SEQ ID NO: 626305 - DNA, 637 bp, Homo sapiens
aacaattccacatacaacagagtccagaggatttaaaacaaaagaaaacaaaacaaaatacctcttacaaataaatttaatcaatatgctgaaatacccctaaaacctacaaaaatttgttaaaataaattaaagaaaacacaaataaatggaaagatattccatattcatggactggagaatttaatatcttaagatgccagtattctccaaggcaatctagagattcagtgcaactattattcaaattccaatggccctttgtcagggatagaatagacaccccaaaaatgtatrtgaaacttcaaggggccccaaatggccaaaataaaattgaaaaagggaaaacatgaaggcaaactcacacttcttaatttcaaaatgtattttaaagttaaataataaaaatcatgtgactctagaatgagaatagatacattaaccaatgaaatagaattgaatccaaatataaacccaaacatttaaagccaattgattttcaacagtagtgccaatactattaaatagggaaagaattttctcttcaaccaacggtgtttgagactactgaataacaacatgcaaaataaagttcaatacctatctcacactgcatacaaaaattaacttaaaatgc

SEQ ID NO: 626306 - DNA, 571 bp, Homo sapiens
tttggtatgttgtatttccattattatctattgtaagaaatttttaaatttttttaaatttttatattgactcaatgatcattcatgaacatattgtttaattttcatgaatttgtatggtttccaaaattactattgttattratttctagttttattttatggtggtcagagaaaacactttatattatttcatttttttgaatgttttaatacttattttatgacctaacatatggtttagccttgagaataattcacttgctgaggaaaagaatgtgtattctgtggcctttgcacaaaatattctggaaatatctattagattcatttggtgtatagtgaagattaagttcaatgtttgttgttgctgttgttgttgttgttgttgttgttgttgtagattttctgtctggaagatctgtctcttgctgaaagtgaggtgttgaagtgtctggctattactatattggggcttatttctctcttcacctctaataatatttcctttttatatctgggtgctccaatgttgggtacatatatattttaaattgctatatcttcttac

SEQ ID NO: 626307 - DNA, 571 bp, Homo sapiens
tttggtatgttgtatttccattattatctattgtaagaaatttttaaatttttttaaatttttatattgactcaatgatcattcatgaacatattgtttaattttcatgaatttgtatggtttccaaaattactattgttattgatttctagttttattttatggtggtcagagaaaacactttatattatttcatttttttgaatgttttaatacttattttatgacctaacatatggtttagccttgagaataattcacttgctgaggaaaagaatgtgtattctgtggcctttgcacaaaatattctggaaatatctattagattcatttggtgtatagtgaagattaagttcaatgtttgttgttgctgttgttgttgttgttgttgttgttgttgtagattttctgtctggaagatctgtctcttgctgaaagtgaggtgttgaagtgtctggctattactatattggggcttrtttctctcttcacctctaataatatttcctttttatatctgggtgctccaatgttgggtacatatatattttaaattgctatatcttcttac

SEQ ID NO: 626308 - DNA, 595 bp, Homo sapiens
gagatcttctaagtattagaaaaataaataaaagcaacctaagcaatttggtattatctgctttactgttccctttgttcttgtgatgctttaaaaatgtggagttttagtccccagtatttttttgtaacgggccacttttaagaaaacatgytattaaagaggcaagtaggcctttatttatatgtctcgctcgttaaaatctgatcaagattgcaacccaattgcttatgccccaatgagattggttgatttgaaggctttcattgccaccttgtggataaatgatggcagaggtgtactatgtgagagtactttcatatattatctgtgaaatatgctaaaactttaatccttctaacttatggagttttaattcaagtttttttttctagtaccataagtaagattacaatacatgtcacagtaagtgccctgctttgtcttgttagaataaatagttgaagaataagaccgttttgttgctgatgacagcttgcactggttattgatttaaaatgcacatcctatcaaaattaccacatcaaaagtttctgctttaatagtataaaaggagtgccatttagaaaagctg

SEQ ID NO: 626309 - DNA, 550 bp, Homo sapiens
agattacaatacatgtcacagtaagtgccctgctttgtcttgttagaataaatagttgaagaataagaccgttttgttgctgatgacagcttgcactggttattgatttaaaatgcacatcctatcaaaattaccacatcaaaagtttctgctttaatagtataaaaggagtgccatttagaaaagctgagtttcagtgaaagatctgttactgctagtttctgtcaccccacgagggctatcagtaatttttacacataagaactaggaattttttgctttcaagactgttaagtgaaatatttaaaattatttggtaaaggttttggagtcaaatgtcaastctttagagtggcatgtcacattatgtattctgaatgatactctcagtaaaaacatctaaaatactgaataaaataaaaaataaatgcatcgatgaaatacaaagtaaagcatactcaaagattaaatggtaagtgtaaagaggaacccagacagatcatctgggcactaaaattacttttcaccttgatggcatttgccaagcctg

SEQ ID NO: 626310 - DNA, 360 bp, Homo sapiens
ataagaactaggaattttttgctttcaagactgttaagtgaaatatttaaaattatttggtaaaggttttggagtcaaatgtcaactctttagagtggcatgtcacattatgtattctgaatgatactctcagtaaaaacatytaaaatactgaataaaataaaaaataaatgcatcgatgaaatacaaagtaaagcatactcaaagattaaatggtaagtgtaaagaggaacccagacagatcatctgggcactaaaattacttttcaccttgatggcatttgccaagcctggacactttgattttcatggtttttttttttttttttggaggaggggagaaaggtaaaggtgacaaac

SEQ ID NO: 626311 - DNA, 588 bp, Homo sapiens
atgaagcttccattcaggctgctcacaatgcccaggcccaacctcaaattaatataactgcagaccaacttttgggggtcagcatctgggctggtttagatgcacaagtggccatgcaggatgatgccatagaacagcttagaagagtgtgcattagagcttgggaaaaaaccacttcaggtggaaaacaatacccttcctttagtgctgtaaaacagggaccctaagaaccatacacagattttatagcttggttacaggagtctcttaaaagagtgattgcacatttggctgctcaggatatagtgttgcagtcattagctttcaacaatgctaatccagagtgccaggctgctctgtgacctattagagggaaagyacatttagttgattatatcaaggcctgtgatggtatcggaggtaatctgcataaggctactctgctagcccaggcaatggcaggactgagagtgggtaaaggaaatactctgtttcctggagcttgttttaattgtgggaagcatggtcatactaaaaaagaatgtagaaaaaatcagtgagttaggctgccagatgggggaaaaaaga

SEQ ID NO: 626312 - DNA, 484 bp, Homo sapiens
ttccagttcatcttatatttcccatttctcattccttgaatcagctgtttctcctaggcatcatggttactttcattagagaatatgggtgytagacatttgacttgatattagattttattgcttctaggcattacagtaaacagagctaagaaatgtatgtgtagtaattcatgtatacaaatatctatatttatttatttgtgtatatgataaaataaatgtgagcacataaatttgtaccaaagtctccaattccaacttagcagcataggatacactctacatcattttcttgcttatttgtaatccttttctttcacagagagaaaccaggtcattgttatcttcaggaaaattatgtattaaacattagtatatatgtaaagtaattttagaatttatgaactaaatacctgtgagaaacgcatttttttactaacgttttctgtttcaggatccgctctaagatgcacattgtgtt

SEQ ID NO: 626313 - DNA, 529 bp, Homo sapiens
catgctcttgcacttatcactagttccttcatttctattgctaagtagcatttcatttggtagatgtcccactgtttgtttattgattcacctgttgaaagacaacatacttgtttccagggatactgtgaataaggcttttatgaccattcatattcagggtattttgtgaacgtaagttttatatttaaattgggtttcttgtcatagcatgtagttaggtcttgggtttttttgttgttatgttttaataatctctcttattttttaaggaaattcacatgttttcacttttctgtattatagtaaaatatacttaatgtaaaatttaccatgttaatcatttttatatgcacagttctatggcattgagtacattcacattagcgtgcaaccattaccaccatcaatctgcagaattattttatcttccwcaactgaaatgctataccaattaaaaactaattccacatttctttccctgcagccccaagaaactatcattctactttctgtctctatgaatatt

SEQ ID NO: 626314 - DNA, 577 bp, Homo sapiens
ttcagtgcatctcattgatttgctgagcatacttctcagatgtaatggtattgctgggattcagaaagctgcagtgaatcagactggcagcagaccaccaaacagtgaccatgacctttttttggtgcaaatttggctttgggaagtgcttcggagctgcctctcagtccagccactgagctggtcattgtataaaaatccactttttgttgcatgtcacaatcagatcaagaaatcgttcattgttgttgcataaaataagagaagaygacacttcagaacgatgatttttaaaatttttgctcagctcatgaggcatgcacttatcaaagtttttcacctttccaatttgcatcaaatgctgaatgaccatagaatggttgacattgagttctttgacaatttcttatgtagttggatgaggatcggctttgatgattgttctcaatatgttgttgtcagcttccaatggccagccactatgctcctcatcttcaaggctctcccctcctttgcaaaacttgttgaaccaccactgcactctctgttcattagcagttcctcagccaaatgcatt

SEQ ID NO: 626315 - DNA, 663 bp, Homo sapiens
cctgaggatgtaatagaaaaggaaaaaaaaattgctggggagaaattcaagctggctgcagaaatttgcataagtaacaaggagccaaatgttaatcaccaagacaatgggaaaaatgttttcagtacatgtcagaggtctccatggctgcccttcacaccactgtgctcctggaaaagccacagacactcaatgcccacccatgaaagcagctgggatggrggctgtcccctgcaaacccacaagggtggagctgcccaagactgtgtgaacccttgcatcactgaatttcagatttgcatggggcctgtaacccctttgatttagccaatttctcccatttgaaatgggagcatttatccaatgcctgtatcctcatagtatcttagaaggaattaaattgtttttgattttacaggctcataggcagaagggacttgccttgtatcagatgtgactggactgtggacgtttgggataatgctgaaattagttaagattttggtgaactgattgaaaggcattattgtttctaaaatgtgaagacatgagatttgggaggggccaggagtggaataatatggtttagctttgtccccgcccagatctcatcttgaattgtaatccccaggtgttaagggaagaaactggtgaaaggtgatt

SEQ ID NO: 626316 - DNA, 408 bp, Homo sapiens
attaccaataagcccggactgagatgactataatagataactaattattcaatgctcaaacacagacaaatatcaagaccatccaggaaaccatgacctcaccaaacaaattaaattaaaaaaaaggccagtcttgaagaaacagatgtatttgacctttcagatagatagagaattcacmataaccattttgaggaaaatcaatgaaattcaagataacactgataaagtattcagaatcctatcagataaattaaacaaagggattgaaaaaaattaaaagcagcagaaattctacagttgaaaaatgctgtatttttcatactgaatttataaatagcagaaatgatcaagttaaaggaagagttattgaccttaatggcaaactatctaaaaatacacagtcag

SEQ ID NO: 626317 - DNA, 559 bp, Homo sapiens
ggcctgctgtaactattttctggttactgcctatgtttggtcaaggccctggagctctacaattagcagctagcaattggcaaagccaactaggcttgtcttttccttcagggaggtgagttcccccagactccaggtgggtccacaggtrctgtctggggtcaggaaccagaatcacaatatttagaagtccacctggtgttttattgtactgtggttgaggtggcactaaaaccacaggatgcagtccttcccactcttcccttcccttcccgaagtctaggatcttcaccctgcagccactggcaccaaaggccacagggaataccatgagagtaccacggtgttctcttgaggcccgagagctcttaagtcagcttttggtgaatgatgcctgacctgggactcaccccttagtaaagaggctcttctctggcccagggcaggtccagaagtggaaatccaagagcttgttttctcctctatcactctgtgcctgagctgatacctaaggtgcaaaacaaaatctcctttactttttcctctgcttttctcaagc

SEQ ID NO: 626318 - DNA, 582 bp, Homo sapiens
tgaagacagcatagcaatagatcttagttctttatccagcttgccactctgtgtcttttaacttgggcatttagcctatttacctttaaggttagtattgctatgtgtgaatttgattctgtcattatcatggcatctggttattgtgcagacttgttatgtggttgcttcattgtgtcataggtctgtgtacttcagtgtatttatgtagttgctggtaatggtttttcctttccatattttttgcttccttcaggagctcttgtaagacaggtctggtggtaacaatttccctcaacatttacttgtctgaaaaggatgttatttctcctttgcttatgaagcttagtatagctggatatgaaattctgggttggaatttattttctttaagaatgttgaatataggtctccaatctatggatctatggcttgtacgttttccactgaaaggyccgctgctagtctgatgggtttcccttcatagttgacctgtcctgtctttctagctgtccataacattttttctttcttttctgctatggagattctgacaattgtgtgtcttggggatgatctcat

SEQ ID NO: 626319 - DNA, 641 bp, Homo sapiens
agaaattatattctatacattactgggttccaaactgtactccaataaggtatgagagtttctcaaaatgtcttagctgcattggagggagcaggtaggaagatagactataacaaatattggagactatttttatggcataggggagacattgaagggtcttttaagggtaacaaaataaaggcatttttccttttagggaggaaacagtaagagcagcaaataaagatgaatttttgtcaggaaatactgtattcagagacttcagtcagacagctcttgcattgtccacacaagaggtgataaatgccaaaagtagcggagttattcagttaatgagagacaacatttatctatcttttcagtaccacagcataaccattttaaagtatagtatatcaaatctttgtattataaggatttcttstatactctaaaagttcacctaagatctcttatctctctctctctctatatatatatatatgcctatgcacataataacttttaaaataaataattaccaggatttggcttcatctatctttcttgtgacacttttttggaggaggggaaggtaaaataaatatatcaattaagaattaatataacttcccagaatgataaggtaatgctatgcc

SEQ ID NO: 626320 - DNA, 557 bp, Homo sapiens
tataaaaaactgattaaagaaactgaagagggtacataaaaaatgaaaagatacattatggtcatggattggaagaatcagtactgctaacatattcatactatccaaagcaatctacagattcagtgtaatccctatcaaaatatcaatgccatttttcacagaaataaaaaaaatggtaaaatttatatggaatcgcaaaagaccyagaatagccaaagatatcctaagtaaaaagaacaagactggagaaattacattacttgaattcaaattataccatagagatatagtaaccaaaacagcatgatactggcataaaagcagacatatagatctaaggaacagaatggagatccagaaacaaattcatgcacctacaatggactcattttcaacaaaagtgcaaggagcacaccttggagaaaaaacagtctctttaataaatggtgctgggaaaactggctcttcatatgcagatgaataaaactagactgctctctcatgctctaaacaaaaatcaaatcaaaataaattaaaactgaaatttaagagtt

SEQ ID NO: 626321 - DNA, 569 bp, Homo sapiens
aataataaactagacccttgtattagtctgctcttaccctgctgataaagacaaatctgagactgagtaatttataaaggaaagagatttaattgaattacagttccacatggctggggaggcctcacaatcatggcagaaaagcaagagacaacttacatggcagcaagcaagagaaaaatgagaaccaagtgaagagaaaacctcttataaaactatcacatctcccaaggcttattcactaccatgaagacagtatgagggaaaccaccccctgattcaattatctccyactgagtacctcccagaacatgtggtataataaagagccaaaattcaagatgacatttgggtgggaacacagccaaaccatatcattctgtatctgccccctcccaaatctcatgtccttacatttcaaaaccaatcgtgccttcacaagagtcccacaaagtcttaactcatttcagcattaattcaaaagtccatagtacaaagtctcatcttagacaaggcaagtccattttgcctatgagcctgtaaaatcaaaagcaagttagttacccctt

SEQ ID NO: 626322 - DNA, 569 bp, Homo sapiens
aataataaactagacccttgtattagtctgctcttaccctgctgataaagacaaatctgagactgagtaatttataaaggaaagagatttaattgaattacagttccacatggctggggaggcctcacaatcatggcagaaaagcaagagacaacttacatggcagcaagcaagagaaaaatgagaaccaagtgaagagaaaacctcttataaaactatcacatctcccaaggcttattcactaccatgaagacagtatgagggaaaccaccccctgattcaattatctcccactgagtacctcccagaacatgtggtataataaagagccaaaattcaagatgacatttgggtgggaacacagccaaaccatatcattctgtatctgccccctcccaaatctcatgtccttayatttcaaaaccaatcgtgccttcacaagagtcccacaaagtcttaactcatttcagcattaattcaaaagtccatagtacaaagtctcatcttagacaaggcaagtccattttgcctatgagcctgtaaaatcaaaagcaagttagttacccctt

SEQ ID NO: 626323 - DNA, 632 bp, Homo sapiens
atttttattccaatgttatcttctagttttacatttttgcattttatatgtaggtcgataatccatttttagtaaattatgtaaaatgtgtaaagtctgtaaagattttgtttttggtttggttttgctttgttttgcatttggatacccagttgtttcagcaccattcattgaaaatactatcatttttcctttgaattatcattgtcaaaggtcagccaactattttagtttgggtctatttctaggttgtttattttgttccagtgatatgtctactcttttatcagtaccagagtgttgattactgttgcttttttgtaattctttatgtttggtagtgttagtcttctttttttcttaaatactgtgttagatattctgtgtctttttcttttcacataagctaaagaatcatcttgtcaatagccatgaaataactggcagggatttctaaatgtttagttgtagtcacaaacctgtaaattttaccatcttaattattttataaagtttaatagtattaagtatatttacattgatttgcaacagttycttagacatttttcatcatgcaaaattgcaactctataccaattgaacaacgaatccccatttccttctccccaagt

SEQ ID NO: 626324 - DNA, 614 bp, Homo sapiens
gacaactttagatacctcttataaacagaatcatgcagtattttctttttgtattatcttatttcttttaacrtaacgttctcagtgttcatttgtgctgtaacatgacagaattttctttgttttaaggctgaataatgttttattgtaggtatatacaaaattttatttatctattaatccattgatgaacatttgagttgctttcaccccttggttgttgtgaataatggtgcaattagcatgggtgtgcaaagatcttgctttagatttttttgtacatattcccagaagtggaattcttggattatatggtaattctatttttatgtttttggggaaccctcatactgtttttttaatgtaaaataggtgtggcatatttcgttcccaccaattgcacaaagagtttccaatttctccatatcctttccaacacttgatattttctatatatttttatggtagtggtcgtccccatgaatatgagaacgtatctcattgtggtttaatttgcatttgtctaatggtgtaatgttgagcatcttttcatatgcttcttttgaagaaatgtctatttaagttctttgccatttttaatggacttgtttgtt

SEQ ID NO: 626325 - DNA, 614 bp, Homo sapiens
gacaactttagatacctcttataaacagaatcatgcagtattttctttttgtattatcttatttcttttaacataacgttctcagtgttcatttgtgctgtaacrtgacagaattttctttgttttaaggctgaataatgttttattgtaggtatatacaaaattttatttatctattaatccattgatgaacatttgagttgctttcaccccttggttgttgtgaataatggtgcaattagcatgggtgtgcaaagatcttgctttagatttttttgtacatattcccagaagtggaattcttggattatatggtaattctatttttatgtttttggggaaccctcatactgtttttttaatgtaaaataggtgtggcatatttcgttcccaccaattgcacaaagagtttccaatttctccatatcctttccaacacttgatattttctatatatttttatggtagtggtcgtccccatgaatatgagaacgtatctcattgtggtttaatttgcatttgtctaatggtgtaatgttgagcatcttttcatatgcttcttttgaagaaatgtctatttaagttctttgccatttttaatggacttgtttgtt

SEQ ID NO: 626326 - DNA, 567 bp, Homo sapiens
atttactttctgactgtgcttctgaatatatacaagggcctagaataattttcagtgtcaaataggcagagaaggacataaatttcatattcagtaaatgccaattatcccctatggatcttgttcagctctttgcatgcatgtctcagcagatyctcacctcaatcctatgtagtaaaatgattatctccatctgaccgatgaaaagactcagatagtgaggtaagttaattgccttagcttatatgggaaataaatcccagagccaggattcaaaatgaagtgtacttttacttcagatttattctacttccattgttggatgctacatctgtatactaccatttcctcatttaccacaactatcctgtaattatattactctgatttatttacacagcaatatgtcctccttaactttcagaagaggcaataatcccaatactttaagtatatggatagatcaaaagtcagattcaaaagtcagattctaattgggaaattgtgacacactgacttctcatattcaatttttctattatttttagggaaacctgctgctagaaa

SEQ ID NO: 626327 - DNA, 615 bp, Homo sapiens
tgaggtaagttaattgccttagcttatatgggaaataaatcccagagccaggattcaaaatgaagtgtacttttacttcagatttattctacttccattgttggatgctacatctgtatactaccatttcctcatttaccacaactatcctgtaattatattactctgatttatttacacagcaatatgtcctccttaactttcagaagaggcaataatcccmatactttaagtatatggatagatcaaaagtcagattcaaaagtcagattctaattgggaaattgtgacacactgacttctcatattcaatttttctattatttttagggaaacctgctgctagaaagttacgcattcttcattttcaaaaagagaaaaaagaagggggacacattagcattaaagatacactttaattttccaatgtcattataattttacctcacattgaaaaaaatataataaatctcaacagagactaattaacaacaacaaaaaatagtccctttgacttttctcattttctgtaagagaaaatttgttagcagggaaatcacatttataaaaagttatattcattgagaaatgcttgtaatttatcagtaccataaa

SEQ ID NO: 626328 - DNA, 589 bp, Homo sapiens
ttcaatttttctattatttttagggaaacctgctgctagaaagttacgcattcttcattttcaaaaagagaaaaaagaagggggacacattagcattaaagatacactttaattttccaatgtcattataattttacctcacattgaaaaaaatataataaatctcaacagagactaattaacaacaacaaaaaatagtccctttgacttttctcattttctgtaagagaaaatttgttagcagggaaatcacatttataaaaagttatattcattgagaaatgcttgtaatttatcagtacmataaagcatatattatatgcatgtgtatgtgtgtgtacatatatttacatatatatacagtcacgtgtgtgtatatatatatatatttgagaatatattgagaatatacatatgagtaatggactccaaaaaacaataattactcaattttatgactttttttttaagggaaatatccctatcccttctctgtctcttttttggtctttccattttttctcttttatgtctctaattacttttaaccaggaagacacttgggaaaaatgtaaagaagaaatggatg

SEQ ID NO: 626329 - DNA, 597 bp, Homo sapiens
tattgacagaaaaaatcccaagtctgagaaggtaaatgagcactgatatccattaagcccaaagaatcccaataggttgaatattaagaactgttcaccaagatacmatataatcaagttgtcaaaagtcaaggacaaagagagaattatgaaagcagcaaaagaaaagtgactgattacatacaaggatgtccctctaatagtatcagtaattttttaaacataaacattggagcccagaaaacagtgagatgagatactcaaagtgtcaaaagacaaaaagcaaacttccaaccaataactctatacctgaagtattattctatttgtgctatctatttgtgatactataaaggtacacctgaggctgggtaatttacaaaggaaagttatttatttggctcaagatttttaggctgtaaaagatacatagaatcaccatctgcttctggtgaaaacctcaagaaacttccaatcagggcagaaggtgaaggtggagcaggagtgttacactgagagaaaagaaacaagagttagagaaagaaaggtgccaggctctttttaacaatcagatctcacaggaattaataaagtgag

SEQ ID NO: 626330 - DNA, 509 bp, Homo sapiens
gaaggttgagagataaaaccagggatgtaggattaagatgaacactaaatttacaagtactttgtgtattatcactaaaaagcccaaaacttctgaagtatagccttcttttagaatcaaattctactatagtgtactgacaattagccatgtcccagtgaaattcttaamgagtacctaaatccagggtctcttattgtgtctttcatttttataacctgtgcctctcattcaggaaattgtaatgtagataatacatacataactgcatctgtcatgcaacaccattctttagaatgcagtataaggttcacatctccctgaaagcttttcatgattaacatctttttttctagaaattgccaagaaagaacgccatatgatctttcatcataggtattaatcatcttaagacaggatcaatcaactgtggtatcttccctccacaaaaaaatcgcaaaactttgacttccatgtgtattccatgtgccatatcacactcatgcctt

SEQ ID NO: 626331 - DNA, 438 bp, Homo sapiens
aaaacctacaggagatggataarttcctggaaacatagagccctcctagattaaagcagaaagaaatagaaaccctcaacagaccaataataggcagtgagattgaagtagtaattaaaaagttacgaacacaaaaaagttcagtaccaaacatattcacagctgaattctgtcagacattcaaagaataattggtaacaatcatattgacactattgcataagatagagaaaaaggaaatcctccctaaataattctaggaagtcagtatcaccctaatacaaaaacaaggaaatgacataataaaaaaaggaaactgcagatcaatatccctgatagatgcaaaaattgtcaacaaaatactagctaactgaatccagcagcatatcaagaagataatccaccatgatcaagtgggtttcataccaggaatgcagg

SEQ ID NO: 626332 - DNA, 733 bp, Homo sapiens
catcataaggtacagaaaaaaagtctggtggtgctagagggagaggtttttacagtgcacttattaaaaaaaactgacatttctgagtgtctaaaatacattattccttaaaaacccaagagtagcctctgttgcaataayattttagtcaaaaaattaggtgaaaacagaattcagtcaactgagaagaaaaaaagaaaaacctttgctccaaaagaaggcatggtcttaggagagaaaaacaaacaaacaaaaactgtgaaggccttttacatacaaacatgcacccgtgtatacatacacacaagcatcttggatattagccttttaattaagctgacttttaactactcagctcctttaacaacaacaaaatctttttaaatctcattaccttatttcagctaggacaaaatgctgttaaactaataatgaccacacaaattatacaatttctgagtgctctaagtgtaaggagaaattaacaccagctggttgttaacgctaactttagctatttaaaaacaatttgcaagacagaatcccaaaccagttccttacctagtgatgggtctcaggctgtagattgctctctattatactagaagcagaaaaacaacaacaacaaaaagaaaaaaaaaaaaaactcatcttccctgttggaagcaagctcaaactccaggaaagagtcacctgccttccattgtcatggaagcagaaaaacttgccttcc

SEQ ID NO: 626333 - DNA, 733 bp, Homo sapiens
catcataaggtacagaaaaaaagtctggtggtgctagagggagaggtttttacagtgcacttattaaaaaaaactgacatttctgagtgtctaaaatacattattccttaaaaacccaagagtagcctctgttgcaataatattttagtcaaaaaattaggtgaaaacagaattcagtcaactgagaagaaaaaaagaaaaacctttgctccaaaagaaggcatggtcttaggagagaaaaacaaacaaacaaaaactgtgaaggccttttacatacaaacatgcacccgtgtatacatacacacaagcatcttggatrttagccttttaattaagctgacttttaactactcagctcctttaacaacaacaaaatctttttaaatctcattaccttatttcagctaggacaaaatgctgttaaactaataatgaccacacaaattatacaatttctgagtgctctaagtgtaaggagaaattaacaccagctggttgttaacgctaactttagctatttaaaaacaatttgcaagacagaatcccaaaccagttccttacctagtgatgggtctcaggctgtagattgctctctattatactagaagcagaaaaacaacaacaacaaaaagaaaaaaaaaaaaaactcatcttccctgttggaagcaagctcaaactccaggaaagagtcacctgccttccattgtcatggaagcagaaaaacttgccttcc

SEQ ID NO: 626334 - DNA, 733 bp, Homo sapiens
catcataaggtacagaaaaaaagtctggtggtgctagagggagaggtttttacagtgcacttattaaaaaaaactgacatttctgagtgtctaaaatacattattccttaaaaacccaagagtagcctctgttgcaataatattttagtcaaaaaattaggtgaaaacagaattcagtcaactgagaagaaaaaaagaaaaacctttgctccaaaagaaggcatggtcttaggagagaaaaacaaacaaacaaaaactgtgaaggccttttacatacaaacatgcacccgtgtatacatacacacaagcatcttggatattagccttttaattaagctgacttttaactactcagctcctttaacaacaacaaaatctttttaaatctcattaccttatttcagctaggacaaaatgctgttaaactaataatgaccacacaaattatacaatttctgagtgctctaagkgtaaggagaaattaacaccagctggttgttaacgctaactttagctatttaaaaacaatttgcaagacagaatcccaaaccagttccttacctagtgatgggtctcaggctgtagattgctctctattatactagaagcagaaaaacaacaacaacaaaaagaaaaaaaaaaaaaactcatcttccctgttggaagcaagctcaaactccaggaaagagtcacctgccttccattgtcatggaagcagaaaaacttgccttcc

SEQ ID NO: 626335 - DNA, 451 bp, Homo sapiens
gccccttttagccacagctggagatgaaccagctggatgcagggcaccatgtctcaaggctgcatagaacagggggtccctggacctcctcaggaaaccatttttttcttctaggtctccaggcctgtgatgggaggggctgctatgaaggtttctcacatgccctggagacattttccccattatcttggtgattaatttttggcctcccattacttatgcaaatttatgcarcctgcttgaatttctccatagaaaatgggtttttcttttctattgcatcatcaggcttcacatttttcaatcctttatgctatgcttcctcttgaatgttcttcctcttagaaatttcttccaccagataccctaaattatctctcttaagttcaaagttccacagatctctagggcaggagcaaaatgccaccagtctctctgctaaagcacagca

SEQ ID NO: 626336 - DNA, 663 bp, Homo sapiens
tctctgtctctgcatgtgcaccaacacagcttttttcttcaaatatttttattttttctagattattataaatgaaacttatcttattcttctctatgtcaagaatctttagcaaattttccaaagtcattatctacatgtttgagataatcattgcagtttagaaatgtacatcttccttcaaagtccatatcattcatctttagaaaaatgttcagttacaatgaaagatagttatttaatatttttctgttcctttatttctctctttggtatgaacttcacccagaaacatataaaatatgatgagcaaaaaacatacacccaggttaaaaacagcaaagactaccagaaactttttcatggctataagtatcccacagattacatgaagaatattcttaacggcattaatttttttcccgaagaatgatcttgacactggccttatatgtctttgtagataaacataatagctatgatatgttcagttttagattgtgaaaataactttaggcattaatgtctccttatttcargatattagtcttgaaatatcaacttgtcagttccagactttaaaagaaaaagaaagggaaggaagaaggaagggaaaaaggaaggaaatgatgatgaacaaggccctcctttccaaaagtttca

SEQ ID NO: 626337 - DNA, 599 bp, Homo sapiens
ctttcttctatcgaaataatatcataaaacttagacctgagaccttctagctcaaaattccgttttagtacaattgaaaaactgaatttcaaagaggttaagaggtgtttccaagttcacacagctaactaatggcattattgagacccatattgyagtttattattccattcgggaaggagtagtttttcctggcctgtaaatactcttttactccacatcctacctttcactctctccctattcatgcctaagtatgcattggttcacatgctgacccaagcagtctgtgaccaagggaaggggtattttctctgtaagtggctaaatggttcacacatggaatcagtctctaccttggcctcattagatcccggttctaaccaattcctggactgcatccttattaactaagagggccaaaacagattgtcaccaagaagaggaagttatttttaaaaaaccaacagcacttgaaatgcattaaacataactttcttagatttgactccctctagagtatgttgatgggaaagacttgatccagtaaattctttctcaatacacattttaaaatgtggagcattcatgctacgaaa

SEQ ID NO: 626338 - DNA, 579 bp, Homo sapiens
ggaaggggtattttctctgtaagtggctaaatggttcacacatggaatcagtctctaccttggcctcattagatcccggttctaaccaattcctggactgcatccttattaactaagagggccaaaacagattgtcaccaagaagaggaagttatttttaaaaaaccaacagcacttgaaatgcattaaacataactttcttagatttgactccctctagagtatgttgatgggaaagacttgatccagtaaattctttctcaatacacattttaaaatgtggagcattcatgctacgaaactatctgtyccaacctccaaaaaaaaaaaaaaaaaaaaaactacaagttgtcttaaaaagaaaaaaaagaaaaaacaatattcagtctttattaatggacacagctaaaatgtttctgctaagtcaactactgatttgtaactccaactcattcatctactagtgccaggaccagagatctctaaaggaaagtaattaactactggttctgtaatataaagtaaaaaaattccaaatttgcagtaatagcttttttagtatgaatcagataatgtttt

SEQ ID NO: 626339 - DNA, 557 bp, Homo sapiens
tattcaacataacaaaaatgttctcaatgttacactgaagcattctgtaccatatattaattataataaaaaatgttcatgaaatccctcataggaataatactcactcgaggataatcaagttacatcagatcttttttctcctttcccattcttgcagggaacccacattttaaaaaacatacgcacatacacatacacacacacacacacacataatgtttacctatagatctatttgtgagctctgatgatcttccactatcttatgttgatagaccctattacagtgtttartacctaccacttcaaaatttaaatagttacataaagaaacttggaaataatatgggaaagaaaccataaaatcttaagttgaataacaccttaacacttatctgtatttatgcaggaattcttctactccataggagaaacacatttccttttagacaaaatgaccacttatataattttctctctggaatgttcctcccagtcatgaaagctcttgcttggccttgggtccccagctattagttgattagtaaagtgct

SEQ ID NO: 626340 - DNA, 654 bp, Homo sapiens
ttggtattcctcaaactgagaatcacataagcaaagaaagaatccaaaggacagcttcccacagtcctacagaatactgactcattccctttgtaatgaaccagaagactctcagtcaagttacccattctgatttgatctctctcttcccccaaaccatggttatcgtctctgaaatgtgccctttcaacaycagtcctttctcaaacaaagagatttacagttgttgggaatcattcactcatctaagtgcagcagtggctcttgatagtgacaaagggattcaggctgatttgagtcccacctccacctctgcccccaccctattggatattttggaatctatttctcatctcacattatttctttcctttccatgtttgtctccctactttgtgactccactgcctcttgtcctttggtgaaggatgtaaggacacaggaaaaaatgagttcccacaaggtcaccagatgaaagaaatagagcctgagttgcttgttaaatatacagatgaacagctttcttttctggaaattatgatttctgattctataggttctgaatctagactctgaaatctactttgtttacaagggatttgtgaaatttttatctatatgtcattttgggaaagagcagagcagtgtgcccca

SEQ ID NO: 626341 - DNA, 625 bp, Homo sapiens
tatgattatatcatgaagggttctcaaactttaatatgcattcagtcacctggataaataatggttaaaatgattgagtagattgtgattagcaggtccgaggtggggcctaatgttctgcatttctttttttttttttttttttgagacagagtttcactgtggttgcccaggctggagcaccatggcacgatctcggctcactgcaacctttgcctcctgggttcaagcaattctcctgcctcagcctcccgagtagctgggattacaggcatgcgccaccactcctggctaatttttgtattttttagtagagacggggtttctccatgttggtcaggctggtctcgaactcctgacctcaggtgatccacccacctcggcctcccaaagtgctgggattacaggcgtgagccaccgcacccggcctgatgttctgcatttctaacaagctcccagatgatctctgtgcttctgctctctggactacctataagtagcaaggcctattraagtgaatattttggggaatggagacagagctaaagctactgatcactcactcaccctccctccccaccacacacacacacacacacacacacacacacacacacactattta

SEQ ID NO: 626342 - DNA, 591 bp, Homo sapiens
aactgatttgtcaaggacccttcaagttctatatgtttctcaacttggtgttaaagataatcattcttcaacaatggacataaagtaattcattctgtatttaacttttaaatatctatgaattcagcaacagcaaatatatctyattgcagtggactcggctgctccatttttcattcacttttgcccactatcaataaggatctattgaacttactctgtaaattatccattatttcctgctttggtatttcggtggaaattgtttatttgtctctttattctccttctgcacacgtgtcctgatttatatagacaagggactattctgactgaaatatatggaagctgacttaagggaaatctcagtggcccgataactacaaagttgtgtttctcgttcatgctgtgtctagcataggtcagcaacaggcagggagcgagggggctgttcatagtcactcaaggaccttgtctgacaaaggcttcactctgtcttatgcttctatgatcacgatagcactagaaaaagaatgtggtaaactcaaccctggctcttcaaacttttatcttcaagtgactaatgtcact

SEQ ID NO: 626343 - DNA, 591 bp, Homo sapiens
aactgatttgtcaaggacccttcaagttctatatgtttctcaacttggtgttaaagataatcattcttcaacaatggacataaagtaattcattctgtatttaacttttaaatatctatgaattcagcaacagcaaatatatcttattgcagtggactcggctgctccatttttcattcactyttgcccactatcaataaggatctattgaacttactctgtaaattatccattatttcctgctttggtatttcggtggaaattgtttatttgtctctttattctccttctgcacacgtgtcctgatttatatagacaagggactattctgactgaaatatatggaagctgacttaagggaaatctcagtggcccgataactacaaagttgtgtttctcgttcatgctgtgtctagcataggtcagcaacaggcagggagcgagggggctgttcatagtcactcaaggaccttgtctgacaaaggcttcactctgtcttatgcttctatgatcacgatagcactagaaaaagaatgtggtaaactcaaccctggctcttcaaacttttatcttcaagtgactaatgtcact

SEQ ID NO: 626344 - DNA, 435 bp, Homo sapiens
taaataaaacatttttattaggtggttactcttttaaaaagaaggtaacataagtactagtatccaatcaaacrtgtctatgttgtcactgaagtttctctcaaagaggcatttagaagatggtcatgcagagaaaatactttcatacagtcctcactaacaggtatgcgtataggagcaattttgaaaacagttaatttttcaaagaaaatgagtaaaaagaaactatatgcattttgccccacatccttgcattccataatatatactcacccactttccatctttggggcatgttctgggtaatttttcttccttcctatctcatgtcaaatatcaggtgaatttatgtcattgttttgagaacaatttatgtataatattttatgcaatctcctcctatgtttaggaggttgccataatgtgtcaaatgta

SEQ ID NO: 626345 - DNA, 582 bp, Homo sapiens
ttcagaatagggaacttttagggtggggagagctggaaagcagaagggatgagcctcagcaggggatttttgataaggatgggtgcacaaaacactgtctggggagagcatgttacaaaggaataccagaatgtatagagrgtgcttgggcatggagttggggcaagagaatgggaacagccagacacttacgaagaccaaccctgatttctttggtagttactctaaacattttcaaacacttgtaggaacaggggaaatgaaatgtcatctttctcacatgagaggaatctgtccacattctcactacagtaaaccagtcaaatcattaacccacacaaacccccacacaggtatcagccgtgaaccacactcccacaggatcaccactgagccacaggaattgctggaagaggaggaggcctgatgccgctcttcgagtctggctacctccctagcaaacatgtagccaaccatgaccactgacctcctcaaagcaaggcagaaaaggggcttgcccccctacctctgaatcagggccagcctaagcaaaagaaggaatccttccttatccccattaag

SEQ ID NO: 626346 - DNA, 582 bp, Homo sapiens
ttcagaatagggaacttttagggtggggagagctggaaagcagaagggatgagcctcagcaggggatttttgataaggatgggtgcacaaaacactgtctggggagagcatgttacaaaggaataccagaatgtatagagagtgcttgggcatggagttggggcaagagaatgggaacagccagacacttacgaagaccaaccctgatttctttggtagttactctaaacattttcaaacacttgtaggaacaggggaaatgaaatgtcatctttctcacatgagaggaatctgtccacattctcactacagtaaaccagtcaaatcattaacccacacaaacccccacacaggtatcagccgtgaaccacactcccacaggatcaccactgagccacaggaattgctggaagaggaggaggcctgatgccrctcttcgagtctggctacctccctagcaaacatgtagccaaccatgaccactgacctcctcaaagcaaggcagaaaaggggcttgcccccctacctctgaatcagggccagcctaagcaaaagaaggaatccttccttatccccattaag

SEQ ID NO: 626347 - DNA, 590 bp, Homo sapiens
atgggatgaatggatggcacattgacgttagctgccatctttcagtatgctttccaataaactacccttactcactgtggattgtgcaaggctcgttttggacctaacaggaaaaaataagtaaaaagtgacttagtcaaaccatgctttaagatcaatgtcagcttttgctgctgctgtttcttgactcccttgttctttcttttcctgtgacttcttgtttctgattgcctggctataattttaaacatgaactttgctttgctctttgccattctgattctagttattcatggcgatttagcccatgaccttgctctgatgtttgttgtgtgcccacttccttactttataagccttcctggcttgtaacataccctggccctctcccttcatgcaacttagttttaatcagagtgcattcctctggaaaggcaggaygacatagtaggaagggcactggcattaaatcagacaacttggtcacaagtccaagcactgacacttttgtgtcacttagggacccagcaagaatttttgaaagacatttttataaaatggccattttctatagtgcagacagggttgaa

SEQ ID NO: 626348 - DNA, 629 bp, Homo sapiens
ctgacatttgcaattacaagtctgtctttctttcttagaaatagttacattattgtcagagctgaaaggaactttggaaatggtttagttcaatttcctcatttttcagatgaagaaacctgacacacaacaatataagtagaaaacaaggactcaccttgatccccagattcacaatttagtgccctcttactacaacatacagcctctttgtactaaagctccatgatcatgcaaaattttctgagctgttaaattctttatattgagtactattggatattcacattttaagtgagcccagcaatcaattgatttgtgaaataagttttaaacttaggcatataccagatggtgcttgccacaattacataaatgtcccataayttcatctgggaggaagaacattctttcttgttgacagaaagtaatccatcatgggtcttgattttctcattttcttaatgctatataaccatataatcactttttaaattgctacaataattctgtctcctttctttctctctctaaaaatagttttccatcatctactaatttcaatggtgtttaaatgctgctacccactctgtatttcagggatgacttctagctgcatcagttacaca

SEQ ID NO: 626349 - DNA, 608 bp, Homo sapiens
agtgccctcttactacaacatacagcctctttgtactaaagctccatgatcatgcaaaattttctgagctgttaaattctttatattgagtactattggatattcacattttaagtgagcccagcaatcaattgatttgtgaaataagttttaaacttaggcatataccagatggtgcttgccacaattacataaatgtcccataacttcatctgggaggaagaacattctttcttgttgacagaaagtaatccatcatgggtcttgattttctcattttcttaatgctatataaccatataatcactttttaaattgctacaataattctgtctcctttctttctctctctaaaaatagttttccatcatctactaatttcaatggtgtttaaatgctgctacccactctgtatttcagggatgacttctagctgcatcagttacacacatcccrccagcagtaccctgtttgacttactgactcagatgcatccagatctgagtaactggagagctgtgcattttcagaatctgcatattcgctctgtggtataatgactgatgtcagccccaactttgccaaacatctctcatcactactagtta

SEQ ID NO: 626350 - DNA, 450 bp, Homo sapiens
gcaccagcaatgcaaacagtataaagccatgggagaagctgggcacaaggagcaacatgacaggtaccaatgaggctgcaatgcgttgagtgctataaaatgagttacaaagggtggttggagccagatcctcccatcccttgagggccagagtaaaaagctaagtacatgtagcctctgcatttctaagtaaatattagaaggaaaggaaacaacacattttgtctgatatagttactttaatttgtgttaattttatggatcttggaacagaaccagcatcttgtattccatgaagatatgttctctttttaacttgtatattagakgaaaatgttctaactagcaacaaacttggggatttacatccagattccaatctttgaagaggctgtgcatcaatctacatgtgttttgctcttgggactatctcgtttctcctctgttcct

SEQ ID NO: 626351 - DNA, 571 bp, Homo sapiens
gttctctttttaacttgtatattagaggaaaatgttctaactagcaacaaacttggggatttacatccagattccaatctttgaagaggctgtgcatcaatctacatgtgttttgctcttgggactatctcgtttctcctctgttcctccccatctttctctagcagtaattttagtttgctttgggattttaattttcattctgtgtaartgtgtgtgtgggaataagtggggagaagtaaaaaagttatcaaatacatgaaaggtcataagaacaaagaaagaataaaaagcaaaaaaattacagtcttgcatataatcttttcttgtatttttctaaattgttaccattagcaatgcatattgaaacagtctaaataacttagagtaacaacactgtgctttttacttctaatttaatatttcttttagtatcttaatattatgttctttaattccttaaatgaattaaaaatctatggactaatttcaaattggatacttcaaaagtagtaaaaaccctatgaactttcctgtgaccaaccgactagctacagttgatgctgctatt

SEQ ID NO: 626352 - DNA, 571 bp, Homo sapiens
gttctctttttaacttgtatattagaggaaaatgttctaactagcaacaaacttggggatttacatccagattccaatctttgaagaggctgtgcatcaatctacatgtgttttgctcttgggactatctcgtttctcctctgttcctccccatctttctctagcagtaattttagtttgctttgggattttaattttcattctgtgtaagtgtgtgtgtgggaataagtggggagaagtaaaaaagttatcaaatacatgaaaggtcataagaacaaagaaagaataaaaagcaaaaaaattacagtcttgcatataawcttttcttgtatttttctaaattgttaccattagcaatgcatattgaaacagtctaaataacttagagtaacaacactgtgctttttacttctaatttaatatttcttttagtatcttaatattatgttctttaattccttaaatgaattaaaaatctatggactaatttcaaattggatacttcaaaagtagtaaaaaccctatgaactttcctgtgaccaaccgactagctacagttgatgctgctatt

SEQ ID NO: 626353 - DNA, 591 bp, Homo sapiens
ggaaagttggctggatgtcttagaaatgtgctatatgaaagaaagactgtccttttaaaattatattcagtctttgtggaggggactgagarttaccatcttgaggatggcatgaaatgagagtgtgtgaattaaagtcagaggggctaaggataccatgtttggaccttgttccttgttaccaaacaagcaacgagggtccttttggactccatataaaaaaaaactcatcataaattgaaaaacaaaactaaattctataagaaacaaatatgtagcttctcagtatgtcctcagtttgtggccaagcagcatttgtccataccgtttgtattttatggcagaaactacatgaccagtggtacaagtaaacacagcaaaaaattttgctaagtttttccaaaattaggattcttctattctttggttatcttattgtcaatttaagatgaaagaaaattaaatacattgttccacaatattggccatagtgacaatcaggtcatgataactattagatgtgtgcagtgcacaaggacagggtttatttgtctgccagatgatacctggagatttccagttgccagaaaa

SEQ ID NO: 626354 - DNA, 610 bp, Homo sapiens
tgtggaggggactgagagttaccatcttgaggatggcatgaaatgagagtgtgtgaattaaagtcagaggggctaaggataccatgtttggaccttgttccttgttaccaaacaagcaacgagggtccttttggactccatataaaaaaaaactcatcataaattgaaaaacaaaactaaattctataagaaacaaatatgtagcttctcagtatgtcctcagtttgtggccaagcagcatttgtccataccgtttgtattttatggcagaaactacatgaccagtggtacaagtaaacacagcaaaaaattttgctaagtttttccaaaattaggattcttctattctttggttatcttattgtcaatttaagatgaaagaaaattaaatacattgttccacaatattggccatagtgacaatcaggtcatgataactattagatgtgtgcagtgcacaaggacaggrtttatttgtctgccagatgatacctggagatttccagttgccagaaaaagctggccagaaaaagagtttgacttcctgtttgtagatttaaaataagcaatatcactcatccacatatttaaactgagaactggtagtcta

SEQ ID NO: 626355 - DNA, 524 bp, Homo sapiens
tatatgacagcctttgttgagatgacagtgttcttacctttgaagtctctttgtagaacaggggaacaaaaaacaatgagaaaggactgctgtttttcttaccaacttatcgagcatatgttaagaaaacagtgttctaaaataagcagctcacaaattctgttattttatattgtgtggtagtggtttgtattatgtggttataaaatgggggctgctttaccacttactstcaggaatgtgctttgtattggggtataattataaatatgcttaccagctagttttctaaggacaatttttgggagtgaatgtagcacattgcgttactgtgtgttcattttagaaaggtgttttaaggtaactagatctaataccatgcccatgccaagtgcaaagaagaggactaggagaataaactgctttggatacagaagccctaaaaataggaggaaaaagggggagagcttagggggctgactgttactgaggctagacagttactcagtggggatgttgtagaa

SEQ ID NO: 626356 - DNA, 566 bp, Homo sapiens
cccttattctacgatgttgtgattatctgtttaaacatctcaacctttcactggactctggtgtaccttcacaatagagagacagtaccccattcagttgtgaatccttaggccctagtacagtgcatagccacaaagtaagaatataataaaactatgttgaatgaataaatgaatgaaataagctagtaaatgaatgaaataacctaataaaggtcaactatggagaaataagaaaggtcaactacagaggcaatcaaactcctttggaattaattgagaagatcatttatagactcaccagataactaccaatagttacataaaactacacaacatatttgtaggaagtggtgctgaatacattagtgagaaagatagaaaaatgatattttaaagatcggcaactgagggtcttctggctggaagtttattcaccctaaaggatcatattattaaatgctatatttctccttgttgatttcacagcarattctaatagttaatattgatggaataggttctgtaatctggtctataaagaccagaatatgaaaagaaatcaa

SEQ ID NO: 626357 - DNA, 469 bp, Homo sapiens
cctttggaattaattgagaagatcatttatagactcaccagataactaccaatagttacataaaactacacaacatatttgtaggaagtggtgctgaatacattagtgagaaagatagaaaaatgatattttaaagatcggcaactgagggtcttctggctggaagtttattcaccctaaaggatcatattattaaatgctatatttctccttgttgatttcacagcagattctaatagttaatattgatggaataggttctgtaatctggtctataaagaccagaatatgaaaagaaatcaatatgaaaagatatctggagacagatatgaaaagaaatatgaaaagaaatatgcaatatgaaaagaaatctggagacaaatgtcgttaatgattttgctrtattcataaaatgtggtcttggtcatttcaaaataaagtcagtattaactatactggccaggtatgg

SEQ ID NO: 626358 - DNA, 489 bp, Homo sapiens
tatgtataaaactttcagacttgtgcctggcacagagtaagcactcaataattgtgagatctaatattaaatgtagtctcaaacatttgatggataaaccaaagatgtgaatattttaaatattaatatattctgccagattatttttcaaaaaggtgtttcagttcacacgtggaatatatcaaaattacgtgtttcctcatatcctgactctaactgcatgttattagtcctttaaactcttgccaatctgattgacaaatggtattctattgttttattgacattttcctattaataaggctaatctcatgtttagagcctatttgaatttccacaggatgcctatttatatgttttatccaattttctaatttttctattaagtaaaacaccacttaataggaattatttgtatattagagattaaccttttgtcatgtgcctagcaaatatttttmttattctagtattaacttgactataatg

SEQ ID NO: 626359 - DNA, 388 bp, Homo sapiens
tgctttctcatttttcactctttctctaatttccacttaattgtgtttggtttcttatttttctcatccattggtttctccagtgtctctaataccttgtagtctttccaatttcatcactgttatttatctcctttattctttggttcaagtagttcctatttaatatcctcctagtgctctggtttctccttccagagggtttttttttttcatttcttccttgtagctttctaacacagaatttattaactcagattttattattttcattcacatagctgataatgcttttcagctactccgtggtgttccttttctggtawtttttttatctattggcatgttgtaatgctcattttcttctttattcttacagtatctttgt

SEQ ID NO: 626360 - DNA, 470 bp, Homo sapiens
tattcaacatatagtttgctgcattctatttatttattactaaacagttatactaacactaattatatcatctgaccagaacctctaattagaagcttgatgtctttcgttcatatgagtgtagaattgatgattattttaaaataataagtagataaaatcttcaaatatatagttccaaagtgacagagtggtcagatgtaaccaattataatttgagtcattgccattaaaaatraagaaactgtacataattcatactctgatagtatagttatcattgatacaaccctgttctgttctatagatgctactgcatcccaatgcataagtggcaaagtctttatcctaggtcttggtctcttcattcctaaactttctgtaatatttctttgactatagatgtaggtgtgcacacacacacacacctcattttgcagtatttctcttcaattttatatctggcatat

SEQ ID NO: 626361 - DNA, 445 bp, Homo sapiens
aagaaaagagaaaggttaaacattttaagtaaagttagccacaaattctatgaatgctatcagtctttgtgtatctccttaaaaacccacacaaacttgccattttctaactctccgtctaatgaaagtatactttttcttcaagcaccagtctacaggaaactattgttgaatctttctcatrtaatttcattgtcaaaaacaaaacatgttctgcacatatttacacttcaggtgtatgttttcttgaataaagtaggcatttgtactaatcttggaaacctaaccaccacctaaaatagtgttattataggacaacgttggccaagtgaacttatagtagacaactttcttttaagttaggaactggatataagatgaagaatatgatatctgagctgaattatttgggcctagttctgccaggcatgtcctcttgttttcc

SEQ ID NO: 626362 - DNA, 445 bp, Homo sapiens
aagaaaagagaaaggttaaacattttaagtaaagttagccacaaattctatgaatgctatcagtctttgtgtatctccttaaaaacccacacaaacttgccattttctaactctccgtctaatgaaagtatactttttcttcaagcaccagtctacaggaaactattgttgaatctttctcatataatttcattgtcaaaaacaaaacatgttctgcacatatttayacttcaggtgtatgttttcttgaataaagtaggcatttgtactaatcttggaaacctaaccaccacctaaaatagtgttattataggacaacgttggccaagtgaacttatagtagacaactttcttttaagttaggaactggatataagatgaagaatatgatatctgagctgaattatttgggcctagttctgccaggcatgtcctcttgttttcc

SEQ ID NO: 626363 - DNA, 603 bp, Homo sapiens
atactttcagactgtaaaaagaaatgctaataaggtgattgccaagaatcttgtaaatttgaaacttgtaaagatactctttgtagtaatacaatcagaaaaaaggctctcttacagatatattcatatctaaagtaaagaaaggttttcacattatgggatggcttcattagtggattcattcattcatcattcattcatgatgtgcagagttgcagtattaagatgtatttcatactgtgggtcatcattacaaatgccattgtcataaaaatctgtatcctcagatgaagcctatcatttataaactcaggaaccatctttccaaagtataacacagcttaatttcaggacaaccacgtcacctaagtaattctgaaattttttttccacaagtattgccttacaagtttagattcacktggaagactatgttctccaaggtttgtgaataatgtacccagtacttttaacattttcactagccacccaaagactgaacatttagaaacaaagaaaggaaaaacacatttatttatttctattatcagatttaatcctcacaataatttttaagatgaacagtatcagcccttttttata

SEQ ID NO: 626364 - DNA, 541 bp, Homo sapiens
gagtagcctataattttcttgattttaagaggtaaaaatataatttcctatacaaacgcagttgtcctgctactccttgctgctatttccatcttggttaaaaggcactacccaagctaaacatctcggaagtcttggcaagaatcttccttctccctcacaccttacattattccacaccaagtgttgtccatcctgttcctcatagaaggtacttaatgagtgtttctggctaaggaatgaatgactcaatcaggaagtgaatgaatggaaatgttactgggcttctgattcttgatgagaaaaacttytaagcaccatcaacaaatctgtcttaatagcagtagtacatgttttttcttaatttaggatgtatatcctgcctttcaaaggagcttaatctactttttgttgaactcatcacagtcttgaagacctgtaggaagaaactagattccaacgtgccaccagatctcacccagcctgaaatcaggtcttggtaaataaaatttactagagcctctgtttttttttttttttt

SEQ ID NO: 626365 - DNA, 541 bp, Homo sapiens
gagtagcctataattttcttgattttaagaggtaaaaatataatttcctatacaaacgcagttgtcctgctactccttgctgctatttccatcttggttaaaaggcactacccaagctaaacatctcggaagtcttggcaagaatcttccttctccctcacaccttacattattccacaccaagtgttgtccatcctgttcctcatagaaggtacttaatgagtgtttctggctaaggaatgaatgactcaatcaggaagtgaatgaatggaaatgttactgggcttctgattcttgatgagaaaaacttctaagcaccrtcaacaaatctgtcttaatagcagtagtacatgttttttcttaatttaggatgtatatcctgcctttcaaaggagcttaatctactttttgttgaactcatcacagtcttgaagacctgtaggaagaaactagattccaacgtgccaccagatctcacccagcctgaaatcaggtcttggtaaataaaatttactagagcctctgtttttttttttttttt

SEQ ID NO: 626366 - DNA, 550 bp, Homo sapiens
cttcctgttcctatgtaaattcctggggcaaataggtgagtgggcagaagaattctgtccaactccactcacagcactcatagtccaaatcccagtaggttggggtagtggctgttgaagaaccccacctcacccctagagctgctgcccatgtatcctcttgcacctacattatttcatttaagcttcatgatgattttgcaaggtagtaatttcaatccccattttcacagacagatacaggtgcttaagaagataaaacaacttacatgtgtttacacagcaagtgccagaaatgggattcaaactcaggcctgctttcaaatatggacctcttccactctaccaggatgccgtcccaaatttttttttttttttttttggttttgagacggagtttcactcttgttgcccaggctggagtggtttgatcttggctcagtgcaacctctgyctctcggtttcaagcgattctcctgccttagcctcctgagtagctgggactacaggtgtgcatcaccacccctggctaatttttgtatttttaata

SEQ ID NO: 626367 - DNA, 577 bp, Homo sapiens
ttcattctgtatttaggggacaaatacatgagctgactaatttgaagagtttctaaaaagctaagtttgagcaagccatgcctggcgaagaagtgaaggtttccagcgatcacatgtggaatcagatggtctgactactgagctttctatctttgaaaaaaccctgtggatgtataaatgttctacaattttatgccagtcatttgcctgtttgctatcagattcattctctacccttcccttgctctggtctgtattgtaggaaaatcattttccagaatttccataattgccttctggctgggtttggccaatgggaggcactggcatgagattggagggtaagtggtaggaagagatcaaggcacattttgtcctctctttctggcatctccartagtaatcatgtctcttctaggttcctgatcccagaagatgtccctgcggtggttccaccttccaccagcttctgccagatcctggactccaggaacactgcccccttcaggccaactttttggacttcctcactgtcttctgagcccccaggtcttccaacacttttgcagccacttcc

SEQ ID NO: 626368 - DNA, 437 bp, Homo sapiens
tttcatggttggactgattcaccactttccctcccactcaaattcagtaagatctactatcttatgacagatatctacccactcattgcttcccgatgcagacataaacttggatcccaggccgtggaagagcaggtcaaggtttgctccttagaattgttgctttggtracatgtggagaaggatggtggttgctgagactagaggagacttgttgagagacaattgcaatgattcaagagggagaggacaaaggtgtaaagtcagactgtttcactgcagaggtagagtggggaaagggacacgagagatgcagaagaggcagaatcaggtccctgattggatggggcattttgggaagatgaaggaggctggaatgattcccaggttcctccagagtgaatggatggcacttgtgttcttgactgagcttgagg

SEQ ID NO: 626369 - DNA, 510 bp, Homo sapiens
aagtaaatacttttagaagtaggtggtatcgcttggcaaacaaggtcaaagggttaaatattttgccttcgaagccctatatcccaatgctctcagattcaagagaaacttataaattattttctttttttttcttctttggagacagagtcttgctttgtcactcaggctggagtgcagttgtgtgatctcagctcactgcaacctctgcctcctggrttcaaatgattctcatgcctcagcctcctgagtagctgggactacagggatgcaccaccacaccagctaatttttgtatttttagtagagacagggtttctccacgttggccaggctggtctcaagctcctgacctcaagtgatccacccgccttggcctcccaaagtgctgggattactggtgtgagccactgcacccagccatataaattaatttataatactttattttatacgcatcaagtatttaacctgagcacataacctatggaaaagcatggggcttccaag

SEQ ID NO: 626370 - DNA, 510 bp, Homo sapiens
aagtaaatacttttagaagtaggtggtatcgcttggcaaacaaggtcaaagggttaaatattttgccttcgaagccctatatcccaatgctctcagattcaagagaaacttataaattattttctttttttttcttctttggagacagagtcttgctttgtcactcaggctggagtgcagttgtgtgatctcagctcactgcaacctctgcctcctgggttcaaatgattctcatgcctcagcctcctgagtagctgggactacrgggatgcaccaccacaccagctaatttttgtatttttagtagagacagggtttctccacgttggccaggctggtctcaagctcctgacctcaagtgatccacccgccttggcctcccaaagtgctgggattactggtgtgagccactgcacccagccatataaattaatttataatactttattttatacgcatcaagtatttaacctgagcacataacctatggaaaagcatggggcttccaag

SEQ ID NO: 626371 - DNA, 566 bp, Homo sapiens
aaaaaaaaaaaaaaaaaagaaaaagttaatggaaagagcatscctctctacatagggccaagcctgaagttgatcagatgatagaagcatcttttggtccattttgtaggattctccaatgtcctaagtccaaagttcccaatataatgtcttaatctgttttcttcttaccatcatttatcagaaaagatggggttcattttcagagtggtatggccatagaccttaccataatttaaaagcccagttgttatcatcattcattttaatttggttttgggaaaagataggaggaaagagagaaaaagttatattctatcagtcttaaaattcaatatataaatcaaatttaacttcaaattttccactttctggtattctgcaaaaatccactaaatttctgcctagtcccaagaggtgatgctaccatcttataagtttaactttctcttatgccagatatttaatgacccaacatacagcactgcaaaatcctttcttggctagactctgcatctagccattacatctgcctttaacagactgtcagtctggcaagaacaccc

SEQ ID NO: 626372 - DNA, 442 bp, Homo sapiens
tggtattctgcaaaaatccactaaatttctgcctagtcccaagaggtgatgctaccatcttataagtttaactttctcttatgccagatatttaatgacccaacatacagcactgcaaaatcctttcttggctagactctgcatctagccattacatctgcctttaacagactgtcagtctggcaagaacacccactatatgaagagctgctattgatctcaggtataattggttcacagcctggcctgtgtcagggttggcaacacaggtcagtggaaatatgcacaaattagacatgatcaataggtggtttccaacttctttcccattggcccaagtgaaggtaacaagmacacaacaatcttgcccacctataaactagaatttaccacacaagcagtccaacttttccagaggattaagcgggaaggcaagaaatta

SEQ ID NO: 626373 - DNA, 548 bp, Homo sapiens
ggggtctctttccagttatctgagaaaagtgatttcaatgctctgaaaaccccctcgccaccccccacctcccccaggactttcacaagaaattccaaggtctttcagcctgggccaaaggaaaaagaaagatattttttaattaagaaatcaatgcaaaagcgaaatgcctttggtgtaagtcctctccgagtcgcttagaaacgtgagaaaatctgctcgagctaagctatctttaataataccaattcttcagcgagctcctcctaggtggattcacatataggcccccccagagagaggcacctctgcggaaatgaacattgacctcacgtggctgagtcttctgcagcaaggggatgccatccctgcggctcctagagccacgtgttgctggggcrcatttacacctggcaccgggatgcgcggtgcgttgaggcgcttggaggatcccacctgggcggggagactgagcgctgatgttagctggagctgcctcagcattttgtgttcttgatcacatttcacagggatttcactcccgcccg

SEQ ID NO: 626374 - DNA, 548 bp, Homo sapiens
ggggtctctttccagttatctgagaaaagtgatttcaatgctctgaaaaccccctcgccaccccccacctcccccaggactttcacaagaaattccaaggtctttcagcctgggccaaaggaaaaagaaagatattttttaattaagaaatcaatgcaaaagcgaaatgcctttggtgtaagtcctctccgagtcgcttagaaacgtgagaaaatctgctcgagctaagctatctttaataataccaattcttcagcgagctcctcctaggtggattcacatataggcccccccagagagaggcacctctgcggaaatgaacattgacctcacgtggctgagtcttctgcagcaaggggatgccatccctgcggctcctagagccacgtgttgctggggcacatttacacctggcaccgggatgsgcggtgcgttgaggcgcttggaggatcccacctgggcggggagactgagcgctgatgttagctggagctgcctcagcattttgtgttcttgatcacatttcacagggatttcactcccgcccg

SEQ ID NO: 626375 - DNA, 659 bp, Homo sapiens
  misc_feature 299: n = A,T,C or G
gcctgggaaggtttctctaaaatagcctcccacttgtgctcaacatgaagctgaacccattaattcaaaacacagctctgcgcttcctccccgccgctgctttcgcgacagacgctgccccagcagaacaaacccttgcatttggaggcccgcgcggctccggagcgctgagcccgtttgtctaaacagctctcagcggtggttctcattacaggtagacagccccacgcaaacagacagccctgctccttaaaacacagcaatttgggcttgtctgttgctccctgctcttttttctnttttttttttaaatcatttggactgtaaagtaattagagggatagacattcccaaaataagaagatcagcagctgagctttgtaattctaacgtgagcacacatatcatttcaggctctcccaggacccctagrcaggtacgatttcaataatcaaagcgttttgcatacattttctaattaccactcttgcccttggatttttttgtttttgaacttccaagctcgccagtgccacagagggtgggctccatcccctctgtcaccgcctggcttctcgctcccatcctcagccttgcccaccgctgagcacaaccttggtttgtttttttccctatcaaagcgctgtgcgaagaaagga

SEQ ID NO: 626376 - DNA, 627 bp, Homo sapiens
aagcttttgagaaacctccatactattttccataacagctgcaccatcttacattccaaccaatagtccacaagggttcccacttctctacattcttgtcagcatttgttgttttctgttgttgttttttaacatatataatgaccatccaaacagcagtgaggtggtatctcttcacggttttggtttgcacttccctgatcattagtgatgtggagcattgctatagtttggatatagttgcttgacacctccaaatctcatgttgaaactggatttccagggtcagagttggggcttaatggaaggtgtttgggtcatgggggtcgatccctccctatgagggggtcggggggaggctggtgagttctcagtctatttgttcccatragagctggttgttaaagagagtgtggcacctcctttggctctctctggcttcctttctcaccatgtgatctctgcacatgctgatggggctttgccttccagcatcagagctcagaggagaagtggacaaactcccagccccacagaattggggtcctgggtctctcattgactagagttgcagtcatgtcatttaaccttctgagtttcagttttctcatttgtaaaatgcagatg

SEQ ID NO: 626377 - DNA, 610 bp, Homo sapiens
attactgctaaggatcatgaaagcgagaaagggaatgaatcagccctttatgtaaaatggtctttcaatgtgtggaaagtgatgtcaactcagggaatgttgttttatgagaaacaaaagaaaagtagaaataaaggatgagaatagaaagacaaaatttcttgattattttaagcttctgttttgaaaaatttatcattttccaaattcttagccagttcttaccaatcagtagccactattagccaaagcgtaacttctgagatagatagaatgtaatccatcaaaagcaatgaatccaaaaacacatgagcacgagcgtacatgagtgtgtgtgagatatgtgtcagtttccagataaacacttatcagtgccctacaatccatacagrtgaaaatagaagtttgaatggtagaaattaccataccctggtggtgctaccttgggaagcttgctgcaggaggtaaataaatctccagtagaattttgaagcaagggaaaagtttgatttggcagagaagtagaggctgaagaggttataatggtaggagaatagcatattctgcacactgcagaaaggggatagttatgcttggcaatagcacagcg

SEQ ID NO: 626378 - DNA, 505 bp, Homo sapiens
ctaatcatacatccctgttacacttatttcattttgtaagtgtatattttggctgattatttggttaatgttggtcaccatcactgggctgtgagctcctggagagcaaaattatatcctcaattcttagaatagtatttagcactttccagtaacttaatacaattttattttatttagtggatgaacgaatggaatttcaggttctgattgctctctactctttcttaggatggggattctccgccagcacatgccatcaatacttccttttctaaagtctcatattttgggccttttttttttttttcaatctcttgctttccctcctcttcttgccatctccctgtcccctccccttctctytcttcccagtctccaattatgctgatgtcttcaggactgggtttctcccttgtcataaaactctactttgaccatcttttactttcaggaaaaatttccaaggtctttcatgatcttaagcctgattgcttctgttgtc

SEQ ID NO: 626379 - DNA, 599 bp, Homo sapiens
tgttgtgatggggaaggcacataggcagcttaaagacactgatatttaatcacgtaaatggatggtcatatgcatgggtgttcattytgttattcttaaactgtacacatgcattaatatatgctctattttatgtatgacaaatttcagaaaaaacaaaggatgagccaatatctagcagaaaaactcacaaagataatttttaagaaaaattagaaactacatctttttttcaggcatatatgaaaatgaaaatttgatattttaattttttcattatactttaagttctgggatacatgtgcagaacatacaggttacataagtatacatgtgccatggtggtttgctacacctatcaacccgtcaactaggtttttgtcctaatgctctttttccccttacccctcaaccccctgacaggccctcgtatgtgatgttcccctccctatgtccatgtgttctcattgttcaactcccacttatgaatgagaagatgtggtgtttggttttctgttcctgtgttagtttgctgagaatgatggtttccagcttcatccatgtctcttcaaaggacatgaactcatcttttttatggc

SEQ ID NO: 626380 - DNA, 594 bp, Homo sapiens
tttgtcaactaatattaatacattttaatgtaaaactaatacttagttttaaaaaaccttccaaaacaaaaattaaagtaagaataaagacagtgaaaagagaatgaaaagggaatgttgcctagtatttgcattttgcagtgaagatttggagcattttcaggaggataagaagccacaaaacaaaccaggtttaatctttgtcttaaataaatattatattttcgctctcactaataaacgaaattaatgctgacagaacttcaaaataaaaagtaggatattaacagaycttacgaaggatcgatttcatctaacccagaatgaagccatagactggtttgaatttcgtttttatttttattttattttgttttgttttaaataattttgctgtactgtatttttctgatttatagttaaatgtttagctcctgtagaaagagatggtcaataaaggtatattgtatgttataaaggtagttttgacaatatagttatttcattcctgaaagtataatctctaggtcgagggcttgaaactacagactatatagtttatctgctattttatcagaatttttgactggtgct

SEQ ID NO: 626381 - DNA, 622 bp, Homo sapiens
atgagctgcatgttcctatcagtttccctcctcctcccaagcctcagcaggatgatacggtgattgggcatatatttataaaatcatgagctttttgataatcatcaggttgatgttcatcaggttgatatcatgtttcagatttgaacaggtaaccatttatggatgagaaacttgagtgaatttcttttcttacgattaaacctttgcagctgaactgatccaaagaacttgattgatattcaaatatttttatcctgcaaatattttttccattgtgaagaggaaccccaagaatgtagacaaagattcttatgttactgatgtgatctaaaggagcataatcttggtggctagcaccyggtgtcattctatgagaacagatgcttggaagcaataatgttctcctgtcgttttcttcactgcattaaaaagcatgccagctgatgtcacaggttttctttaactcagaaaatcttgttaaacataaatggatgtctaattactaagagagcatgtaaaagtagcttttgcattaaggaaaatgtaatcattgtcttttagaataggcacatcagagttttggttacctgcagtagtcagtgttttctttcttaaataa

SEQ ID NO: 626382 - DNA, 622 bp, Homo sapiens
atgagctgcatgttcctatcagtttccctcctcctcccaagcctcagcaggatgatacggtgattgggcatatatttataaaatcatgagctttttgataatcatcaggttgatgttcatcaggttgatatcatgtttcagatttgaacaggtaaccatttatggatgagaaacttgagtgaatttcttttcttacgattaaacctttgcagctgaactgatccaaagaacttgattgatattcaaatatttttatcctgcaaatattttttccattgtgaagaggaaccccaagaatgtagacaaagattcttatgttactgatgtgatctaaaggagcataatcttggtggctagcacctggtgtcattctatgagaacagatgcttggaagcaataatgttctcctgtcrttttcttcactgcattaaaaagcatgccagctgatgtcacaggttttctttaactcagaaaatcttgttaaacataaatggatgtctaattactaagagagcatgtaaaagtagcttttgcattaaggaaaatgtaatcattgtcttttagaataggcacatcagagttttggttacctgcagtagtcagtgttttctttcttaaataa

SEQ ID NO: 626383 - DNA, 574 bp, Homo sapiens
tgcatgtggtaactggtgaatrtctaggagtgggtgaggttgccaagaaagcaagtatagaaaggaaataaaaatgagaatagaatatagtttattattctgtctagaagacagaagaaagatgccagttaagaagagaagtggtcaggattttaagagactccaaactgagcagcatgtcaataattaggaaagagacaatttcagaatgggagtggaaattgtgaccaacacagccaaatcctggagagaaaaacagatgcagacttttatttggtacttaacaagttatcagagacttttacaaaagaaatttcaagatgtacaggaggttcagaaggcagagaattaggaaagcaataaaatataagccactctgtcagagagtttggcattgacaggacagagagagtgaagatttcattgggagaagggattatttctatggtataactgggagcagaaagaggagatgaatttccacatagtctatgtcagtaatgaaacaatgtgttttattataaaattaacatagccatcttaagtaggcatgagggatctttttggggtgatg

SEQ ID NO: 626384 - DNA, 541 bp, Homo sapiens
tgattttaattttattattttgttgttgtttttaaacttttattttaggttcaggggtacatatacaaggtagttctataggtaaattcatgttatgggggtttgttgtacagattattttatcacctagatgctaagcctggtacacaatagttacttgttctgctcctcttcctcttctgatcctccaccctctggggtggkgatgagaacacatggacactaggccccagtgtctgttgtgcccctctttgtgttcaagtgttctcatcattttaactcccacttataagtgagaacacacagtacttggttttctgttcttgcattagtttgctagggataatggcctccagctctccagctccatccatgttcctgcaaaggatgtgatctcactcttttttatggctgcataatattccatggtgtatcagtaccacattttctttatccagtgtatcactgatgggcatttaggttgattccatgtctttgctattgtgagtagtgctccaataaacaaaaaaatgtgtgcatg

SEQ ID NO: 626385 - DNA, 565 bp, Homo sapiens
ctactaaaattagaattctactggcagagtctctgcttcattcctaacaatttttagggacaaaacatgatgccgtctatgtagttctaataattgttttgacttcctttcacattaaaccatttatgaatgactctggaactttttttgaattaacaagtatgcttatatttcagcctaaattttcaagaatgcaacttcgtctctgcaaaattgacaaatttccataatctgattaacaaagctatattgtaggtagtttatcttttaggaaggktaattttggtagtttactgagtttactaacatagggatgtgtggaagctcaataatttattatttttaaactaataattttattctggtatcactgagaaatataaaacaacacaagaaatttctgcacctaaaacaatacttactaaaaagaacccaataatccagcagattattacaaacaaattgagccttttgggttaaaatctcaagtctatccactgcccttctaagaattccttgtgcaattctaaatcaataaaaagaactggaaaaagtatactcaaca

SEQ ID NO: 626386 - DNA, 618 bp, Homo sapiens
ggttgatgataaaatctgatcttcagtcatctttgtagctggtatttgactctcttatggtcaaccmccagccacaaaggaaaagcagaaaaagaggtggggattgagcatgagttggtacagtccacaggggtccagaatggagcaaggacagggcattccatcatgatccatgcatctctgattaaatctataatatttgattaaaatgcagtgctatgtaggttgagagtctcttatccaaatcacctgagaccattagtgtttatgcagattttgaaatatttgcatatatatataatgagatggtacccatatctacacaagaaatttatttatgtttcatataaatcatatacacatagcctaaaggtaattttatgcaaaagtttaaataattttgtgtgtaaaacaaagtttatgtacatcgaaccatcagaggcaaagatgtcactgtctcagctacccatgtggacaatgtatggttgtttggcatcaccattatccctgattctgaattttatatgctagcaataagcaatcattttttgcacttatcatgcataaatccttaacagtataaaacataatataccattaatgcaatgaaaaaaataa

SEQ ID NO: 626387 - DNA, 503 bp, Homo sapiens
tggggcagctacactcaactttgtggtcattcatctttggtttcttttgatagtaaatattgagtagtagctttgttagctctccgttttgcctctagggatgcaagattccgttaattatctcaaaaacattttgtgggttagccacacacaccccacttttgccactcttatgataattgtgtccatctggcttctgattgttaagcattctcacctggtcttagcatccttattgctatcagtcaggctggttatatatcatccttttcttctgtcactcctgaccttcaggggagaaccaccactgaaatttttagtaatgttgatgtcttctcattggcatattccttatggctttgggaaatggtgtgttttctgggccttcctgtggaatatgttcatyttatggattttctggcttttacatgtgtctatataccagactgcccagttctctgagcctcgcaatcccctcttctgtcatttgccacagcattcct

SEQ ID NO: 626388 - DNA, 532 bp, Homo sapiens
aagaatggggtgaggatggagatggggtgggagggaaacaaggttgaggcaaatatcttatttttatgtttttaagggaagaaagacattgactgatggagggaagaaaatagaatggaggcaataattttaagactgaaatcaatttaaatatggtctatggtcatagactaaagggaagaaggcaatagagagaaagaggttgaagttacaggaaaacaagccatcttttaaccatgaacttctttcccaaagtagtggggtgtcattattagtgaggcaaaataattttttttttgagacagggtttcgctcttgttgttcatgctggagtgcaatggcatgatctcggctcacygcaacctctgcctcccaggttcaagcaattctcctgcctcagcgtcccaaatagctaggattacaggcatgcaccatcatgcccggctaatttttttgtatttctagtagagacggggtttctccatgttggtcaggctggtcttgaactcgtgaccttaggtgatccacctgc

SEQ ID NO: 626389 - DNA, 532 bp, Homo sapiens
aagaatggggtgaggatggagatggggtgggagggaaacaaggttgaggcaaatatcttatttttatgtttttaagggaagaaagacattgactgatggagggaagaaaatagaatggaggcaataattttaagactgaaatcaatttaaatatggtctatggtcatagactaaagggaagaaggcaatagagagaaagaggttgaagttacaggaaaacaagccatcttttaaccatgaacttctttcccaaagtagtggggtgtcattattagtgaggcaaaataattttttttttgagacagggtttcgctcttgttgttcatgctggagtgcaatggcatgatctcggctcaccgcaacctctgcctcccaggttcaagcrattctcctgcctcagcgtcccaaatagctaggattacaggcatgcaccatcatgcccggctaatttttttgtatttctagtagagacggggtttctccatgttggtcaggctggtcttgaactcgtgaccttaggtgatccacctgc

SEQ ID NO: 626390 - DNA, 587 bp, Homo sapiens
tagtatccttttttttttttttacagaatcagttgcccctgaaaattaatagaaatatagagacagcttcagctttactgcctaaaattctctatattagaatttcattaatgattattaactaaatgagaacaaaagctttacctcaagtaagcttttaagaactaatattaaattttttaaatggaataaatagctaatattcaacaaagactatatttaaaaattgtgttcttttttattttaaatgacaaaaattaaaagttattgggaagcactaggaatggccacaaacgtrgttattatactacaccctccttcaaccttggctgccatcacaaattgttctgtgatctgtcacataaagtttaagagaaataatcttagtctgaagccatatcatctgccatttgctgccaggtgtgataatgaggttttcatacaattatgctttttttgctgagtagtgttgaacaaaagtcttggctgtgtgcctgaaacagaccagactagtcagagatactatcaagttggtaatagtccttgagggtcacttatcagatttcaagatatatagcctgtgaatt

SEQ ID NO: 626391 - DNA, 620 bp, Homo sapiens
agtaatctaacgacatttaatgcaagttggtagtaaatattgtttgagctgacatatgtcaaagtctcattatttaaagctacaacaaaatttgtataaaatttgccataatcaaaatgtaagaacaaaataatcattcctgttgccaagatgatcacattctggctaactcaattttccatgatttgactgttacttttatttcactaactataaagcaagccagaattaacacagtgtgccaygttttttattttaccaatatgtagtgattaattctcaagagtgtttttctttgtggtatccacagatggtgacccacttttttcatatcctcatgaaaataatatcatattctgtatatacatggtaaaaatgccacatttgtgaatagaaaacaaaataagctattgttaaagttttgttgaccaatattgttagattgagatgtgtcgaaatttagatggaaagaaaggctcatcctactgagcacaggttggaatggtgctgcctgggacaggtttgcagtccatttcttcagaggtgtcatagaatgacatttcttaattcagttaatttaccatggtttggagcctgactctcagctcaggaagtttaga

SEQ ID NO: 626392 - DNA, 554 bp, Homo sapiens
accatcaatggatgcgagtgctcattttctaaaagcatcattaacagttgggtttataacaaaaatctttgctagcttgatagagaaaatcagtttctcacttgctgtttaataaatttttaaaaacttaatagtaaggctaaactccaaaaatatgtttactggccatggtatccttttgtgartatctgttctaccatgtctgattttgatcttttcaattatcaaagcattcagtataagatttcactatatttacaaaaatgtagcctaatatattaaatgtattttttaaaaatactaacaagtcaaactagtttattatggcaaaaatttctatgtgcaatatttagagtgtcatgttacagagtaactattccagaggctactatgagaagaaaaatttctttttgtagcttattttaaatgactagaggttgaaaccttatttttttcagtctgaatttgctgaattctgtttgtcttcagattatataattatgtggccaatttcttaatagattcaatttatgcattttttccagtttaaaata

SEQ ID NO: 626393 - DNA, 590 bp, Homo sapiens
aatatataatttaatatgcaaacatttatgttgttttctggttacaaatagttgaggataataccaacttcagccctgtcttagttttcttatttaaactctggattagactataactgtagtctctgcctagaagtatatatagctaatataaatctcaagtgcacacagagagtaaatagatgctacaactaaatgcgaaagaagaattaaaatgagtgtagtagctcgcttcagtggtgttttttataaaagtgactctggagaatttgtatgttagagatgtcatttggaaataggaattgggcaaaagagaaattgaggagataccctggaatgaaggcaaatctagtgaaacaactgagtcagaagcagatacattatgacagctcctttcgcttacttcatttcacccctttccccatcccacacatttatgcagttgatttcctgggcaaaattcatttctattctattcagttaatttttttttgttctggttaaagctctaggcatggmtgaatcttcagtttcagtaaaacatacctaaataaaattttgcctgtggaaaattgtaatattatttcaca

SEQ ID NO: 626394 - DNA, 586 bp, Homo sapiens
tttgaatttagcattcgttttcttaaactgaactctgtttcctattaactctgcatgataattagaaattatttaatactggtctttaactttgtatggacatttacatcagacccacaaaatcagaagatatacaatattaaaggaattctgtagttttgttcaacagtttactggtggctgttttagagaacactgcaaaatgaattgacaagtgacttaaaaacactggtctacaaagcatgtgtttgtagcgccaaaggcactttatcattattatacatggtatcttcaagttagtatgcaatactgatacagtttagctctgtgtccccacccaaatctcatctcaagttgtaatctccacatgttgagggagggacctgtagttcccacgtgttgagggagggaggtaattggatcatgggggcggttttacccatgmtgttcttgtgatagtgagtgagttctcacaagacctaatggttttataagtgtttggaagttcttccttcactcatctctctcctgctgccttgtgaagaaggtgcttgcttcctctttgccttctacgatgattgtaagt

SEQ ID NO: 626395 - DNA, 510 bp, Homo sapiens
aagaatttggggaaaagaaagatttgaccaattactttcatgtatctcaaaagaaataaagactcaggatttttaaagccgttaaatgtatatagctgccatactaaatacttaagcatggtgaattttaaaaattattatatatatactttttttcttttttctttttttttgagatggagtctcactctgttgcccaggctagaatgcatggcaygatctcagcttgctgaaacctccatcacccgggttcaagggcctcccaagtagctgggactaagggtatgcgccaccatgctgggctaatttttgtatttttagtagagatggggcttcaccatattggccaggctggtctcgaactcctgacttcgtgatccgcccgccttggcctcccaaagtgctgggattacaggtgtgagccactgtgcctggcctaaaaattattatttataaagtacctttcagtttatagggtatttctacaaataattattttgtcctcaatgt

SEQ ID NO: 626396 - DNA, 510 bp, Homo sapiens
aagaatttggggaaaagaaagatttgaccaattactttcatgtatctcaaaagaaataaagactcaggatttttaaagccgttaaatgtatatagctgccatactaaatacttaagcatggtgaattttaaaaattattatatatatactttttttcttttttctttttttttgagatggagtctcactctgttgcccaggctagaatgcatggcacgatctcagcttgctgaaacctccatcacccgggttcaagggcctcccaagtagctgggactaagggtatgcgccaccatgctgggctaatttttgtatttytagtagagatggggcttcaccatattggccaggctggtctcgaactcctgacttcgtgatccgcccgccttggcctcccaaagtgctgggattacaggtgtgagccactgtgcctggcctaaaaattattatttataaagtacctttcagtttatagggtatttctacaaataattattttgtcctcaatgt

SEQ ID NO: 626397 - DNA, 553 bp, Homo sapiens
gaagtctgactacaatgtagtcgattacaaagatttatgaacaagatagagattctgaagtaaatcagaaagttaaaaaattatcgattcccaggtragatgaccaaataggaacagctccggtctgcagctcccagcaagaccaatgcagaaggtgggtgatttctgcatttccaattgaggtacccggttcatctcattgggataggttagacagtgggtacagcccacagagggcaaggagaagcagggtggggcatcgctgcacccaggaagcgcagggggttagggaactccctcccctagccaagggaagctgtgagggaccctgccctgagcgactatgcactctggctcagatacaacacttttccccatggtcttcacaacccacagaccaggagattcccttgggtgcttacaccacaacagccctgggtttcaagcacaaaactgggtggtcatttgggcagacaccaagctagctgcaggagttttttttccataccccagtggcacctagaatgccagcgagacagaaccattcacaccc

SEQ ID NO: 626398 - DNA, 553 bp, Homo sapiens
gaagtctgactacaatgtagtcgattacaaagatttatgaacaagatagagattctgaagtaaatcagaaagttaaaaaattatcgattcccaggtgagatgaccaaataggaacagctccggtctgcagctcccagcaagaccaatgcagaaggtgggtgatttctgcatttccaattgaggtacccggttcatctcattgggatrggttagacagtgggtacagcccacagagggcaaggagaagcagggtggggcatcgctgcacccaggaagcgcagggggttagggaactccctcccctagccaagggaagctgtgagggaccctgccctgagcgactatgcactctggctcagatacaacacttttccccatggtcttcacaacccacagaccaggagattcccttgggtgcttacaccacaacagccctgggtttcaagcacaaaactgggtggtcatttgggcagacaccaagctagctgcaggagttttttttccataccccagtggcacctagaatgccagcgagacagaaccattcacaccc

SEQ ID NO: 626399 - DNA, 319 bp, Homo sapiens
cttttcaggcttttattgcctactgtgggggactgctgaggcgatctggggacttctgccccttgagcctggaatggggattcggtgaggggcagagaaagcccccctgcccagctacacctcacctctttctctccaccaccagacaaactcacctgccttcagccctccatgcactgccccccacaaatttctgggggctacttggcccctccacagtagagacccacgtctgcccttttcccagcatrgtggattaagtacccgctttcaggacacacagtgctgttggcccctttcactgaacagacatctgagg

SEQ ID NO: 626400 - DNA, 533 bp, Homo sapiens
cactgtttctccctggggtctgaaagagaggcccaatcctgtggagtgagtcactgggggagggagaatggtgatgtcacacctagtgagaaaccaagtggttctgatgtccagggattcccgtcctggcaatgtcgtctccttggactcattggaactgggcgactagggtcagccttagactcttaccaaagacacagcatcaaacagaatagctgaaatcccccacggagtaagctcacaagttaaagaacagagtatccaaggagcacaatgacttcaaaagaaacccaaactgattagagataccgctggaatcatccgtattagatcagatttactgagaatttaaaataagcaaaaatcgtaattgcctaggtttagtgatgttttgcttttcagtatttgggactgatttgagagggaggatccaggagccatacgttttccctggctgctagttttaagggcaagaagtgcatggctccccttaatcccaccccacrccactaccagccatagcacaatgaatt

SEQ ID NO: 626401 - DNA, 506 bp, Homo sapiens
tgaccccccacctccctcccggacggggcggctggcckggcgggggctgactcccacctccctcccagacggggtggctgccgggcggagacgctcctcacttcccagacggggtggctgccgggcggaggggctcctcacttctcagacggggcggctgggcagagacgctcctcacctcccagacggggtcgcggcggggcagaggcactccccacatctcagacgatgggcggccgggcagagacgctcctcacttcctagatgggatggcggccgggcagagacgctcctcacttcccagactgggcagccgggcagaggggctcctcacatcccagacgatgggcagccaggcagagacgctcctcacttcccagacggggtggcagtcgggctgaggctacaatctcggcactttgggaggccaaggcgggcggctgggaggtggaggttgtagctagcgagatcacgccactgcactccagcctgggcaccattgagca

SEQ ID NO: 626402 - DNA, 506 bp, Homo sapiens
tgaccccccacctccctcccggacggggcggctggccgggcgggggctgactcccacctccctcccagacggggtggctgccgggcggagacgctcctcacttcccagacggggtggctgccgggcggaggggctcctcacttctcagacggggcggctgggcagagacgctcctcacctcccagacggggtcgcggcggggcagaggcactccccacatctcagacgatgggcggccgggcagagacgctcctcacttcctagatgggatggcggccgggcagagacgcycctcacttcccagactgggcagccgggcagaggggctcctcacatcccagacgatgggcagccaggcagagacgctcctcacttcccagacggggtggcagtcgggctgaggctacaatctcggcactttgggaggccaaggcgggcggctgggaggtggaggttgtagctagcgagatcacgccactgcactccagcctgggcaccattgagca

SEQ ID NO: 626403 - DNA, 506 bp, Homo sapiens
tgaccccccacctccctcccggacggggcggctggccgggcgggggctgactcccacctccctcccagacggggtggctgccgggcggagacgctcctcacttcccagacggggtggctgccgggcggaggggctcctcacttctcagacggggcggctgggcagagacgctcctcacctcccagacggggtcgcggcggggcagaggcactccccacatctcagacgatgggcggccgggcagagacgctcctcacttcctagatgggatggcggccgggcagagacgctcctcacttcccagactgggcagccgggcagaggggctcctcacatcccagacgatgggcagccaggcagagacgctcctcacttcccagacggggtggcagtcgggctgaggctacaatctcggcactttgggaggccaaggcgggcggctgggaggtggagrttgtagctagcgagatcacgccactgcactccagcctgggcaccattgagca

SEQ ID NO: 626404 - DNA, 285 bp, Homo sapiens
aaatctgcacatgtaccctctgattctaagataaaaatggaaaaaagaaaagcatataagtacataaaaagaaaaaaaagactatagcataaacctagacttttaagtaggacacatcctcagttttgtgtgcctttygcttcagtttttttaaacaagaggatatgataataataataatcattttaaagtggaggaaataggacactaactcctaactccaaaacatgtggcatgtgaaataataaatatccatcatttgacaagaataccagagaagtggta

SEQ ID NO: 626405 - DNA, 609 bp, Homo sapiens
atgtttaaggatataaatatgctaattatcctcattttattattacagagtttacacatgtattgcaacattacactctaccccatatatatgcgcaattattatgtaccaattcattttttaaaaaagagagaaaacatgraaaacttcaacatggaaaaatgccttaatttccagtgattcccaataaatatggataaattgtgtgctactgtgagtctattattcattatatatgtacatattgagagggggatggagattgaatgatcatgtacactattttactattttaaatggtctttcgaaagaaatacacataaatacaagacgaaatcattaattgtatatcatagccaacttttttgattcacaggtcaagcaattatgacttggataaaacaagtaaatttgaaagtgaattccatttagactcagtctatggaacaataggggaattaagcacaatgttgcttaaagccaactctcctaagttctgcaaatgacagtaaaccaaaagaagaaataagaaagaaaaaagtactttgtacttacaaacatttcttcatgaattctaagtaaactatgattctgtcacagctatacaca

SEQ ID NO: 626406 - DNA, 609 bp, Homo sapiens
atgtttaaggatataaatatgctaattatcctcattttattattacagagtttacacatgtattgcaacattacactctaccccatatatatgcgcaattattatgtaccaattcattttttaaaaaagagagaaaacatggaaaacttcaacatggaaaaatgccttaatttccagtgattcccaataaatatggataaattgtgtgctactgtgagtctattattcattatatatgtacatattgagagggrgatggagattgaatgatcatgtacactattttactattttaaatggtctttcgaaagaaatacacataaatacaagacgaaatcattaattgtatatcatagccaacttttttgattcacaggtcaagcaattatgacttggataaaacaagtaaatttgaaagtgaattccatttagactcagtctatggaacaataggggaattaagcacaatgttgcttaaagccaactctcctaagttctgcaaatgacagtaaaccaaaagaagaaataagaaagaaaaaagtactttgtacttacaaacatttcttcatgaattctaagtaaactatgattctgtcacagctatacaca

SEQ ID NO: 626407 - DNA, 621 bp, Homo sapiens
tatgatactattacagcatcgttcttgtaaataattttttaaaataaaaattcaaagaatctccataaaaataaacatgaaataaactttaacctcacatttcacatttatctcataataaaaataaattctgtaacaacttccaaatttttttttcctatggcattatgtgtctgctcatactgtttcttcaagcaaatttcctttatagaaataaatcaaatgattattgttagggcataaaatactaaattctacttcttgaagaaaaaatagagttcaatttaaatgggcaaaaaaaaaaatcatttatagaattcttaattctttaaccaaaaataaccagccacccttcctgacaaattttctctgagtctgagatacaagctttgtacaaagacatcacataccaagtcagaccactggtttactgagcactatattctatctttgataatttttgcaatgaacactttcactataatgaagtagttgtcccttatatcagagttaccacataatgaagattaatcattcaatcaattttgaatatttattgtggttagtacacaaatgtaaccctgggtatctcayactggcctaaaattttctcataaagtt

SEQ ID NO: 626408 - DNA, 623 bp, Homo sapiens
agaacttccctaatactgtatgcataggtcaggttcytgtttcaagccctaattcaatcattcttctctttgcctcgaagtcaaaagatgaataatattggcatattcagtgttgttttaatcaatattattgaaattcaacaaatatttggtgttatttaattttttactttttttttttccagacagggtctcactcactctattccccaggctggagtgccatggcacaatctcagttcactgcaactttcacctccccagctcaagtgattgttctgcctcagcctcctgagtagttgggactacaggcaagtatcaccatgcccagatattttttgtattttttgtagagtcggattagccatgtttcctgggctgattttgaactcctgagctcaggtgatccacctgcctcagcctaccaaagcgctggaattacaggcgtgagccaccatgtccagccttcaacaagcattttgaacacctagaatgtacaacacattgtgttaggcatagtaaggaaagaacaaaggtgacaaagtatattttccatcctttaagggctttcaatcaagtatatttaacatttattcaacttttactgtatttcacacactgta

SEQ ID NO: 626409 - DNA, 623 bp, Homo sapiens
agaacttccctaatactgtatgcataggtcaggttcttgtttcaagccctaattcaatcattcttctctttgcctcgaagtcaaaagatgaataatattggcatattcagtgttgttttaatcartattattgaaattcaacaaatatttggtgttatttaattttttactttttttttttccagacagggtctcactcactctattccccaggctggagtgccatggcacaatctcagttcactgcaactttcacctccccagctcaagtgattgttctgcctcagcctcctgagtagttgggactacaggcaagtatcaccatgcccagatattttttgtattttttgtagagtcggattagccatgtttcctgggctgattttgaactcctgagctcaggtgatccacctgcctcagcctaccaaagcgctggaattacaggcgtgagccaccatgtccagccttcaacaagcattttgaacacctagaatgtacaacacattgtgttaggcatagtaaggaaagaacaaaggtgacaaagtatattttccatcctttaagggctttcaatcaagtatatttaacatttattcaacttttactgtatttcacacactgta

SEQ ID NO: 626410 - DNA, 569 bp, Homo sapiens
tagaattattataaatatattaaaatagaatatacatccaggtactagtcaagtgttttaaaataatatgttcaccgtaatcactctaatgttttgactgtaataatatttggagtatgtttcattaacctataatgcagataaacatatagaggagttttgaatcagctaattaagtatctacctagataacattttatctccctagcttcttagtttagtcttatattttgctagattatatattaaattrtagctggatcttgcatcaaagaaagaagaaaaaattccaaggaaagaccctctcagactctaattaaagttactatggatcagccaacttagtgttccactatttaaatattttctcacaaataagcagaaaattgtgcttttctgatgctgcatgactccagatttatttggctcacagaagctatttctgtacaattagtactgattgccgtataaacatatgaaactacaaaatgtcatgatactcataaacttcttcctctttttttgcttgcttttttttatgtgtttacattttctgccttaagaactaa

SEQ ID NO: 626411 - DNA, 565 bp, Homo sapiens
ccattcagattctccaatttacatatagatatatatgaaaattactttatgaccttcatctctaacgtgtcttttccaagtactacagtttcatatttctgtcccatgggaagttttcatgtattatcttttaacccccacatttaacagtcctcctaaaaaatctatatctctgtctacatagaactaactaaatctgctaagtactarggaacaaagcttcaaattattttagcttattttattttttctactttctatatctagacatcattgtttctttatttcacctgagggttcttaacctgaaatcaaagagcctatggccacagaaagggaaatagtaagtatttattttcaccgatctttaatcaaaatttagcattttcttcaacaacagatgtaggcatcatctctttaatacttccaatatacatttagtcaacaaaacccgacaattttttcctccggctattggcaaaagacaacttagggtcttcagaatacattgactaaagtatttttaatgttccaaatattgaagaatattccattcccctcaaaa

SEQ ID NO: 626412 - DNA, 580 bp, Homo sapiens
tctccaatttacatatagatatatatgaaaattactttatgaccttcatctctaacgtgtcttttccaagtactacagtttcatatttctgtcccatgggaagttttcatgtattatcttttaacccccacatttaacagtcctcctaaaaaatctatatctctgtctacatagaactaactaaatctgctaagtactaaggaacaaagcttcaaattattttagcttattttattttttctactttctatatctagacatcattgtttctttatttcacctgagggttcttaacctgaaatcaaagagcctatggcyacagaaagggaaatagtaagtatttattttcaccgatctttaatcaaaatttagcattttcttcaacaacagatgtaggcatcatctctttaatacttccaatatacatttagtcaacaaaacccgacaattttttcctccggctattggcaaaagacaacttagggtcttcagaatacattgactaaagtatttttaatgttccaaatattgaagaatattccattcccctcaaaacagtcttagggaagtatacatatgg

SEQ ID NO: 626413 - DNA, 568 bp, Homo sapiens
aaaatttagcattttcttcaacaacagatgtaggcatcatctctttaatacttccaatatacatttagtcaacaaaacccgacaattttttcctccggctattggcaaaagacaacttagggtcttcagaatacattgactaaagtatttttaatgttccaaatattgaagaatattccattcccctcaaaacagtcttagggaagtatacatatggtaggaatccctcttgcccttgataacaccatcaacagcaatgacaagaagaagaaaaacccacattatcaagcatccatgtgccaaatattgtgctaaacacttgtattatttcatttaattctcaaaacagtgtataaattaggtgctaaaatgattctaatttcaaaaataatgaaataaattcagagagataaaatagctwgtgaaagtgaattgcctaagatcacataggttttttctttttctgaacaggtatttttttatctttgttatgtctaaaatataaattttggacatttaaaagtggtaacagttaatatgcctgtggataatatcacagtaaaaatta

SEQ ID NO: 626414 - DNA, 614 bp, Homo sapiens
gtttataggttacagagcttggaactgatttctgtgccactctctgcttgtcttcaggtaactttttaaaaatatattttttaaagtgataaaatatatgtaacataaaatttatcattttaagacttcgattctatggcccattaagtacattcacactgttatgcaaccatcaccatcatccaactccagaaccttttcatctttcctgactgaaactctatacctgttcaacactactctttaattcatagagacagtagaatggtggttgccagggaatggagtgagggtagaatggggagttcacataagatcaaatgatattacacatctctctctctctctctctctctctctmtctatatatatatatatatatatacacacacacacacacacacatatatatctccatatccatatagataacaaacacatatatgtatgtacttctatattgacttggagaatactgccagttgttatgtgactatctgatttcacttagtatactgtctttcagcctcatccattttgtagtatctgtgaggatttccttcccttataaggttgaataatattcatatatataatatatataatattcatat

SEQ ID NO: 626415 - DNA, 542 bp, Homo sapiens
tatagccccctcgaggattcagggaaggcttgygggaaagtgacacttgggctgggtatgaaatgattcataggaagaagtaggcaaggtgaataaggggagaaaatattagcataggagaaatcatatacagagctatgaaggcatgaatatatgttccggattctaggagatgaaaactattccaaggtgcttggaacatagggtaggggtgggagcagggtaagaaaatggtttgattttatttagatggccattgggagctatgagatttaaacagggaagtgccatggtcagatctatatttttatttatttatttatttacttatttatttagagacagggtctctctctgtcacttagcctggagtatggtggtatgatcatagctcactgcagtctcaaactcctagactcaagggatcctccacctcagcttcttgattagctgatagtacaggtgcaggccaccatgcctgactattttttattttattttttgtagagacaaggtcttgctatgctgcccagtctggtctc

SEQ ID NO: 626416 - DNA, 549 bp, Homo sapiens
gaatgtggtattgtcctgttgatgtctccaggaaggcctagctcattctcccaagtggaaggctatgcattaggaacttattctccaccatattccttagtcttccctggatttaactctatctccagcccctctttccaagtttccctgtcttgcaaatccccaggtaggtataccaacagttgcctcaaattcattacattccaagctatactcatcccccactacaaccagatcctcctcatgttttcctgtctcagggaatggcaccatcatttatactgtccctgactgcagagtaggttagattctttattacaccctcgcctggcaagttaagattataattaaataaataatattttctgtatttgtttgccctgttgcttctcttggtagactggttccttgacagttgggaccatgtctgtcttgttcatcactgtccccagtacctggcacatgggtcctcaatatttgttggattaattaagaaatccatccagtcacccargatagaaacctcagcatcaaggtagattgtagatt

SEQ ID NO: 626417 - DNA, 566 bp, Homo sapiens
cctgctggttttccctggcaaaaccctctgagatgaccccattctgtacagctgggaagccgtggctttgcttttgaaagatataaacaatctgctccttctttaacagggcttagtaaggaagaaccttcagtcaataatacatgcaacctgaagaactagcacctcagtrttggaacatgtccttggcattcgtccactgatcctgggcaaaaacaccctgggggagaacccctggagccctatctttcctctgaataggacatttacaagacttagcaatggatgaggtcccagcatacagacacattacactccccaaagcaagaattaaaaactcattgagcacttagatcccgcctgcttaattgtcctctttcctctgttcctttttttcctcttgtagtgggtgatgggaggacatgagagagtctattatcagtattaagatgcaggcaagtgctatggaaataaagccatgtgctagatggttttgcttgaccagcttccccatcctggagagcccagctcccaccccccaccgcccccatttcattgtaatctca

SEQ ID NO: 626418 - DNA, 576 bp, Homo sapiens
tcaaagagggaaaggtaaaggccccatgacattttataccctgaatcccaaagcggattttgcccttgaactttccaattacaggatccaataaattctcttttagcttctgtgatattgaagtgggcttctgtgcctgccactgaactcaccttgtttaaagatttgcttcatgttttgtgtcccctactaggatatgagctccaggcaatcagggactttgtcattatttttcttgtttttctcaattcccagacatttcattcttttatttttttgagacagggacttgctttgcccaccctggagcttatcacagctcacccaactcctaggcttaagtgatcctcctgcctcagcttcccgaagtgctaggattataggtgygagccaccatgcccagctgtttattttttatttgctcccttcaactacagcctatattccatgaagctgggactttgtttttcaaggcttattccattagctccataaaaagttgttgaatgaacatgttaatcacaaggtacaactttcattcattgaagcaaccattaaacttttattaagcacaga

SEQ ID NO: 626419 - DNA, 552 bp, Homo sapiens
caatatttcaacgtaggttctttctattttccataagtgttggctggctgagcaataaagagagacagtacaaagagaggagttttacagctgggccaccgggggtgacatcacatatcagtaggaccatgatgcccgcctgagtctctgatcagcaagtttttattaagggtttcaaaacgggagggggtgtaagaacagggagtaggtacaaagatcacatgcttcaaagggcaaaaagcagaaccactrataagggtctaacaaagatcacatgcttctgagggaacaggacaaagggcaaaagcagtaccactgataagggtccaacaaagatcacagggcaaagggcaaaagcagaaccactgataagtgtctatgttcagtggtgcacatattgtcttgataaacatcttaaacaacagaaaacagggcttgacagcagagaaccagtgtgaccacaaatttacgagggtggagtttccccaaccctagtaagcctgagggttctgcaggagaccagggtgtatctcagtccttatctcaactgca

SEQ ID NO: 626420 - DNA, 552 bp, Homo sapiens
caatatttcaacgtaggttctttctattttccataagtgttggctggctgagcaataaagagagacagtacaaagagaggagttttacagctgggccaccgggggtgacatcacatatcagtaggaccatgatgcccgcctgagtctctgatcagcaagtttttattaagggtttcaaaacgggagggggtgtaagaacagggagtaggtacaaagatcacatgcttcaaagggcaaaaagcagaaccactgataagggtctaacaaagatcacatgcttctgagggaacaggacaaagggcaaaagcagtaccactgataagggtccaacaaagatcacagggcaaagggcaaaagcagaaccactgataagtgtctatgttcagtggtgcacatattgtyttgataaacatcttaaacaacagaaaacagggcttgacagcagagaaccagtgtgaccacaaatttacgagggtggagtttccccaaccctagtaagcctgagggttctgcaggagaccagggtgtatctcagtccttatctcaactgca

SEQ ID NO: 626421 - DNA, 611 bp, Homo sapiens
ttttccagtatctttttagcaatgtcccacttctctggtgccaatattctgtattaatctgttcttacactgctataaagaactgcctaagactgggtgatttatgaagaaaagaggtttcattgactcacagttccacaggctgtacaggaascatggctgggaggcctcaggaaacttacaatcatggcagaaggatgaaagggggagccagcacatcttcacatggcagcaggggagacagagagcaaagcaggaagtgctacacacttttaaacaaccagatctcatgagaactcaatcactatcaagagaacagcaagggggaaatctgcccacactatctaattacctcctacctggcccctcctccaacactgaagatcataattcaatgtgagattcaactggggacacagagccaaactgtatcatgtaccatggagatgacatttttaaattgtatctatttggggatccctgaacttcctgtatctggatatctaaatctcttgctagacttaggaagctcttagctattattatgttaaataggttttctatccctttcatttttctctttgccttctgggaaacctaaaacttgaata

SEQ ID NO: 626422 - DNA, 597 bp, Homo sapiens
catgggcattttcaactgtcatataaccagcctctttctttcattttgtttttttaagctaaggaactgttcttcaataatgcttacctttaattgcaattctcatccaagcattcaggtttcttcatttaaccctcttattcttagagttattctcctgctgctcatagaatggctagttaggtgcccaagctctgtgaccctggccctctgccaattctgtggaagaaacccaccgcaacccccacatcatctccagcctattatcctaaataacaatgagaaaggagggggctccatgagtagaaggaagatcagcatcatgaaagaggaatttgaaaataaatagaaaatctactccagaggaaactgagacaatttcagagaaagttaaacaacaacaacaacaacmaccacaacaatggaaaccctctaattagtcaaataagaaattggggaaaatcaatacattttataaatcaatgaccctgtgctaagggtaaaaatcaattaatcaatcataaagagatgatcattggattgtggtatcacttaggctgcctgaagagctcagcaaaagtggattaaagtgatagg

SEQ ID NO: 626423 - DNA, 595 bp, Homo sapiens
ccctggccctctgccaattctgtggaagaaacccaccgcaacccccacatcatctccagcctattatcctaaataacaatgagaaaggagggggctccatgagtagaaggaagatcagcatcatgaaagaggaatttgaaaataaatagaaaatctactccagaggaaactgagacaatttcagagaaagttaaacaacaacaacaacaacaaccacaacaatggaaaccctctaattagtcaaataagaaattggggaaaatcaatacattttataaatcaatgaccctgtgctaagggtaaaaatcaattaatcaatcataaagagatgatcattggattgtggtatcacttaggctgcctgaagagctcagcaaaagtggattaaagtgatagggcctatctcctaaaatgattttcagagaccaggtaccctctttgtacattttaagctactttctaacattttaaattatatttaaatacttgaaaagaaaatmacttccagcatatttcaaatattaacattaaaaatgtctgcatttaaatgtctccaaaggaatcaaaattccacagtaactgcccaccgtcactc

SEQ ID NO: 626424 - DNA, 592 bp, Homo sapiens
tggccaggcaccatgtctcatgcctgtaaacccaacaatttgggagacctatgtgggagagtagcttgaacccaggagttcaagaccagcctcggcaacatagtgagacccccatctcaacaaaaaaatttaaaaataattgtcagggcatggtggtgcacacctgtagttccagctactcaagaatctgaggygggagaattgcctgaacccagggattgaaggctgcagtgagctatgattgtaccactgccctccagcctaggcaacagagcaagactctgtctctataaataaatataaaaacaagcaaatatgttactaattaacttttaatggaatatataattattgacgataaagacaactttattggaaatatatgtcttaatgagatgaatgcagctttatcaaattacttcacatggctgttcatgaatatgacttattgctagaatgagacggaaatcacaccgagtctattcctgagtcttattttcatggtcataggcactgagaaatcttcacataaaagagtagatactaataatgagccgatactcataagtgaataatactaattagttacatg

SEQ ID NO: 626425 - DNA, 592 bp, Homo sapiens
tggccaggcaccatgtctcatgcctgtaaacccaacaatttgggagacctatgtgggagagtagcttgaacccaggagttcaagaccagcctcggcaacatagtgagacccccatctcaacaaaaaaatttaaaaataattgtcagggcatggtggtgcacacctgtagttccagctactcaagaatctgaggcgggagaattgcctgaacccagggattgaaggctgcagtgagctatgattgtaccactgccctccagcctaggcaacagagcaagactctgtctctataaataaawataaaaacaagcaaatatgttactaattaacttttaatggaatatataattattgacgataaagacaactttattggaaatatatgtcttaatgagatgaatgcagctttatcaaattacttcacatggctgttcatgaatatgacttattgctagaatgagacggaaatcacaccgagtctattcctgagtcttattttcatggtcataggcactgagaaatcttcacataaaagagtagatactaataatgagccgatactcataagtgaataatactaattagttacatg

SEQ ID NO: 626426 - DNA, 501 bp, Homo sapiens
aatgcaaaacatcctatacctaaaatacatctaaaaggaataatctgtgtattaattttttaaaaaagataagtcaacacgccacatctcattacttaatttatattaatacaatatatataactaaaattataagaaattatatataataattaactaacgtgtaactaaaattacaagtcagttacagcaggaagagaaaaaggcatggcatcctttggtaaatgcatttatatgctcatgtgtyaaagtctggtatttggcttttgggcataattaaataaatatcagatataaaagtagcaataatgccactaacttcaatatacttcgtgattaaacttttctacacatttaattaaagtgaaaatgatatattacccaaacctaatctacccaacagctagcttattttactttttattaccaggaggttgaaaatatgaaatattttttgagttatagtgatcatttatgtgaaaataacaagtacttaattat

SEQ ID NO: 626427 - DNA, 234 bp, Homo sapiens
tttgaactcaacacatgcgctgtacacattagtgggacatattctagagtcaaaatgccattctccactaaagagaaaccagagttactctcagaaaaagataatttcattccaggcctgggacaggaaaagtacmtctcactctgtcagaaaaactatcaatcaaacatttaaagtaagggagcatgctaaaaggatacagaaaaggactaaaaagaaaatttgaaacatcat

SEQ ID NO: 626428 - DNA, 557 bp, Homo sapiens
tatggaggaatcaaaaggaaaatatacttaggaataaatttaagaaaatatatgcaaaaccttttcattgaaaactacaaaacattgctgggagaaattaaagaagacctaaagaaatggagagatawacctagttcagctagggagatttactattattaagatgttacttctctaggacatagtttatagagtcagtgtcatccctatcgaaattccagcagacctgtttttttttaaatttttttgagaaaaagctgtttataaaatttatatggaaatgagctagaattaccaaagcaatttttaaaagaataacaaagttggaaagttaaagtacatgatagggtacttactataaagttacagttgtaagaacagtttgacattggcaaagggatagacacacagatcaatggaaaccaatagggccagacgcaaaccctcacctgtgtggtctgtagattcctgacagttaccaaggcaattttggggggaaaggaaaatcttttcagcaaatggtgctgtaactatgggatatccgtatagaaaaaaaa

SEQ ID NO: 626429 - DNA, 557 bp, Homo sapiens
tatggaggaatcaaaaggaaaatatacttaggaataaatttaagaaaatatatgcaaaaccttttcattgaaaactacaaaacattgctgggagaaattaaagaagacctaaagaaatggagagataaacctagttcagctagggagattwactattattaagatgttacttctctaggacatagtttatagagtcagtgtcatccctatcgaaattccagcagacctgtttttttttaaatttttttgagaaaaagctgtttataaaatttatatggaaatgagctagaattaccaaagcaatttttaaaagaataacaaagttggaaagttaaagtacatgatagggtacttactataaagttacagttgtaagaacagtttgacattggcaaagggatagacacacagatcaatggaaaccaatagggccagacgcaaaccctcacctgtgtggtctgtagattcctgacagttaccaaggcaattttggggggaaaggaaaatcttttcagcaaatggtgctgtaactatgggatatccgtatagaaaaaaaa

SEQ ID NO: 626430 - DNA, 557 bp, Homo sapiens
tatggaggaatcaaaaggaaaatatacttaggaataaatttaagaaaatatatgcaaaaccttttcattgaaaactacaaaacattgctgggagaaattaaagaagacctaaagaaatggagagataaacctagttcagctagggagatttactattattaagatgttacttctctaggacatagtttatagagtcagtgtcatccctatcgaaattccagcagacctgtttttttttaaatttttttgagaaaaagctgttyataaaatttatatggaaatgagctagaattaccaaagcaatttttaaaagaataacaaagttggaaagttaaagtacatgatagggtacttactataaagttacagttgtaagaacagtttgacattggcaaagggatagacacacagatcaatggaaaccaatagggccagacgcaaaccctcacctgtgtggtctgtagattcctgacagttaccaaggcaattttggggggaaaggaaaatcttttcagcaaatggtgctgtaactatgggatatccgtatagaaaaaaaa

SEQ ID NO: 626431 - DNA, 516 bp, Homo sapiens
agtaaagaaaaagagaatacaactcttttgacagatagacatatatatacacattataaaatatacattatatataatgttacacatattacatatatacatatatatatctgttaaatacaagtatttaaaatatattcagaactcttaaaatttaacaataaagacataaataaatcctaaataaaatgagcaaaagctttgagcacatattttaccaaagaagataaggacttgaaaagaagcttggtaggaatastcatcagggaaatgagatgccagtacacacctgtagcatcgctaaaattcaaaacactgaaaaccaagtgctggaaaggatgtgtagcaactggaatgtcatatattgctggtgggaatatatatttgtatagccactttggaaaactgttgggctgtttcctaaaaagttaaacaaactctataacataaccattttgaacgtaggtatttacccaagagaagtgaaaacatatatccacataaaacttgtacaca

SEQ ID NO: 626432 - DNA, 516 bp, Homo sapiens
agtaaagaaaaagagaatacaactcttttgacagatagacatatatatacacattataaaatatacattatatataatgttacacatattacatatatacatatatatatctgttaaatacaagtatttaaaatatattcagaactcttaaaatttaacaataaagacataaataaatcctaaataaaatgagcaaaagctttgagcacatattttaccaaagaagataaggacttgaaaagaagcttggtaggaatagtcatcagggaaatgagatgccagtacayacctgtagcatcgctaaaattcaaaacactgaaaaccaagtgctggaaaggatgtgtagcaactggaatgtcatatattgctggtgggaatatatatttgtatagccactttggaaaactgttgggctgtttcctaaaaagttaaacaaactctataacataaccattttgaacgtaggtatttacccaagagaagtgaaaacatatatccacataaaacttgtacaca

SEQ ID NO: 626433 - DNA, 515 bp, Homo sapiens
tcggaacctgttgttttcttcctcgggatgttagcacrctgggaatcactggtgtgggatgctgtcaaatgcacaccccattgaggctttaggacctggaggatgtgctttatcttcatgatgggaatgtcccatgttacatgactgggtatgactgttgtggagctggttctaacaatctaatccaatgtgctcatatggaatgtttggtctgctcgttttgttaagaataattgttttcactgaaacaatgtatcacttacaaacatacaaaataagcaatttgaaatttactaaatacaatttattttatggtcaactgacaggtttaaagtaccatgaactgtctactgtttatctgaattttttaaaactagatgataaactcaaaaatatttgagaaaaatggagacatttaaaaggatatttttggttgtttttaagcttttaccaaaaatcagtctctctctttctctctctctgtgtgcattatataatacattacagcctaataa

SEQ ID NO: 626434 - DNA, 577 bp, Homo sapiens
acttcggttttttataaactgggtaatttataaaggaaagaggtttaatggactcacagttccacatgcctggggaggcctcacaatcatggctgaagagcaagggattcttacgtagtgggaggcaagagagaatgagagccaagtgaagggaaaccccttataaaaccatcagatctcrtgagacttattcactaccaagagaacagtatgggggaactgcccccatgattcaattatctcctgtggggttcctcccacaacacttgggaattatgggagctccaattcaagatgagatttggttggggacacagtcaaaccatatcaaagattttaagaccaaaggattcaagtggccatggctaacatcatctagttaattgcttccaatatttacaaaggaccacgtgggcccctttgctgcatgctggggtgaggaagggatgcagtgtgagtgagatgtgagatacagtttcagctttctggattcagcacctctcatctcctttctgtctgacttttactattcacttagcacatgttttctgagctcttgcatggatcacaccctgtt

SEQ ID NO: 626435 - DNA, 655 bp, Homo sapiens
cattttggtttccacacaaaatggtttttcctgttatctggtaaaagagtctttgagtcttacctcagggaggtctgggtctaacgcttagacccacattccacaagactaggtcaggagatctggttttagtgattgctttataaatactgtaccttctcctgaggtttgaagcttagatgttcagggatagaggagctgatgattaaggtgggggtagaggttacaggaaatgctgagaataggctccccagatgcttaaaggacttgtcattttatagaattaatacaatttgctgatctttagagaattttatgcttaacatgccattgggaacacactaataacawctttaagaattgaaagcaccaactgtcaagttaggtggggatgaggtaggggtctaaagacaaagggatggctttaaaatccatgtaaaagagcagtcaggtccccatatttccattgccaaccaatgttttcaaatcagtacctcatacccgtaaaagataacacattaccagagagtctcagactcaagagtgtgagggacagaggaagttggaacaaatgcctgactcaagccagggggattgagtaaaagtcgcaaagtgaacggtgaggtacaagtcctcttcttccccccagctccat

SEQ ID NO: 626436 - DNA, 599 bp, Homo sapiens
accaactgtcaagttaggtggggatgaggtaggggtctaaagacaaagggatggctttaaaatccatgtaaaagagcagtcaggtccccatatttccattgccaaccaatgttttcaaatcagtacctcatacccgtaaaagataacacattaccagagagtctcagactcaagagtgtgagggacagaggaagttggaacaaatgcctgactcaagccagggggattgagtaaaagtcgcaaagtgaacggtgaggtacaagtcctcttcttccccccagctccatagcattactagcagtccctgcacccaggcagaaaaacragagatccctctttgaaaattgctcatgcctgtaatcccagcaccgtgggaggctaaggtgggcggatcacttgaggtcaggagttcaagagcagcctggctaacgtggtgaaaccccatctctactaaaaatacaaaaattagctgggcatggtggtgagctgctgtaatccccagctacttgggaggctgaggcaggagaatcacttgaacctgggaggctgaggttgcaatgagcagctgagattgtgtcactgcactccagcctgggcaa

SEQ ID NO: 626437 - DNA, 581 bp, Homo sapiens
ataaatatttttaaaatcaggtgaaagagtttaaaagtaatcawctctgtacaacagaacagggcaggtgcgcaggaaaggcaacaagttcgtgttctaagcttttggtactgctttgataaaaatagcaactaatcaaaaaaaagaaaaatggtataagtatatcatttagagttagagaggaaacttcagaagttctatcacaggaagaattaaagggagttacctctagggaataggttgggttacagggaagaaggagattttgatgtttcactttaaactgtttagcatcatgtacatattgctttaataatgaagaaaaacaaaaaaattatagaattaaaaattaacatatttaaggttattatagcaatttaaaaagatgtcacaatatctaataaccgcccaaagaaaaatgtgatagctaacaaatattgagggcttcctgagtgccagttactgagctaaatgcttttccatgaattatcacatttggtgtttataatgccctgtggtagtgactgtcgactaatccccaatttaacacataaggaagttaaagcttagcaaggtgaagt

SEQ ID NO: 626438 - DNA, 581 bp, Homo sapiens
ataaatatttttaaaatcaggtgaaagagtttaaaagtaatcatctctgtacaacagaacagggcaggtgcgcaggaaaggcaacaagttcgtgttctaagcttttggtactgctttgataaaaayagcaactaatcaaaaaaaagaaaaatggtataagtatatcatttagagttagagaggaaacttcagaagttctatcacaggaagaattaaagggagttacctctagggaataggttgggttacagggaagaaggagattttgatgtttcactttaaactgtttagcatcatgtacatattgctttaataatgaagaaaaacaaaaaaattatagaattaaaaattaacatatttaaggttattatagcaatttaaaaagatgtcacaatatctaataaccgcccaaagaaaaatgtgatagctaacaaatattgagggcttcctgagtgccagttactgagctaaatgcttttccatgaattatcacatttggtgtttataatgccctgtggtagtgactgtcgactaatccccaatttaacacataaggaagttaaagcttagcaaggtgaagt

SEQ ID NO: 626439 - DNA, 581 bp, Homo sapiens
ataaatatttttaaaatcaggtgaaagagtttaaaagtaatcatctctgtacaacagaacagggcaggtgcgcaggaaaggcaacaagttcgtgttctaagcttttggtactgctttgataaaaatagcaactaatcaaaaaaaagaaaaatggtataagtatatcatttagagttagagaggaaacttcagaagttctatcacagraagaattaaagggagttacctctagggaataggttgggttacagggaagaaggagattttgatgtttcactttaaactgtttagcatcatgtacatattgctttaataatgaagaaaaacaaaaaaattatagaattaaaaattaacatatttaaggttattatagcaatttaaaaagatgtcacaatatctaataaccgcccaaagaaaaatgtgatagctaacaaatattgagggcttcctgagtgccagttactgagctaaatgcttttccatgaattatcacatttggtgtttataatgccctgtggtagtgactgtcgactaatccccaatttaacacataaggaagttaaagcttagcaaggtgaagt

SEQ ID NO: 626440 - DNA, 581 bp, Homo sapiens
ataaatatttttaaaatcaggtgaaagagtttaaaagtaatcatctctgtacaacagaacagggcaggtgcgcaggaaaggcaacaagttcgtgttctaagcttttggtactgctttgataaaaatagcaactaatcaaaaaaaagaaaaatggtataagtatatcatttagagttagagaggaaacttcagaagttctatcacaggaagaattaaagggagttacctctagggaataggttgggttacagrgaagaaggagattttgatgtttcactttaaactgtttagcatcatgtacatattgctttaataatgaagaaaaacaaaaaaattatagaattaaaaattaacatatttaaggttattatagcaatttaaaaagatgtcacaatatctaataaccgcccaaagaaaaatgtgatagctaacaaatattgagggcttcctgagtgccagttactgagctaaatgcttttccatgaattatcacatttggtgtttataatgccctgtggtagtgactgtcgactaatccccaatttaacacataaggaagttaaagcttagcaaggtgaagt

SEQ ID NO: 626441 - DNA, 671 bp, Homo sapiens
ataaatgagccagaatctcatctctcttaaatgaagccaataagacaaagctaaagtctttgaatcaagtcataacatgtggagataaatatttttaaaatcaggtgaaagagtttaaaagtaatcatctctgtacaacagaacagggcaggtgcgcaggaaaggcaacaagttcgtgttctaagcttttggtactgctttgataaaaatagcaactaatcaaaaaaaagaaaaatggtataagtatatcatttagagttagagaggaaacttcagaagttctatcacaggaagaattaaagggagttacctctagggaataggttgggttacagggaagaaggagattttgatgtttcactttaaactgtttagcatcatgtacatattgctttaataatgaagaaaaacaaaaaaattatagaattaaaaattaacatatttaaggttattatagcaatttaaaaagatgtcacaatatctaataaccgcccaaagaaaaatgtgatagctaacaaatattgagggcttcctgagtgccagttactgagctaaatgcttttccatgaattatcacatttggtgtttataatgccctgtggtagtgactgtcgactaatccccaatttaacacataaggaagttaaagcttagcaaggygaagtaacttg

SEQ ID NO: 626442 - DNA, 584 bp, Homo sapiens
tttcatttaacccggatgggaaatgaagccctgtgagatgattattattactgtgttacagataagaaaattgagggtccaggttaactcatccaggattacacaggtaatamctgacaggactaggattcttgcctgagtcaatctgaccctgcaggctgacatctcaaacactttttctcatcgccaaagtcaagcacgcttagcatcttccctctcagtctctgaaagggtctgcttatctgtggagatacaacacaacaaaggttaccacgaacctaaaagtccttagatgatcccaatgcttgccataaattttaacactcgatcaacctatataaattccatcacacctaattatttaacacatacggggaagaatagaaatattgtgtaggtaaatgaccaactgtgttttccaacttcttatttcttagcaaatttaaggctttaaacttaagtggcatgaaatgaaatgaccctaactatatgccaaaacaagaaaccactgagaaaaatatttcaagtgactctgtaacatagtcctttgactgtatgtcattactgggatctattttttaaag

SEQ ID NO: 626443 - DNA, 584 bp, Homo sapiens
tttcatttaacccggatgggaaatgaagccctgtgagatgattattattactgtgttacagataagaaaattgagggtccaggttaactcatccaggattacacaggtaataactgacaggactagsattcttgcctgagtcaatctgaccctgcaggctgacatctcaaacactttttctcatcgccaaagtcaagcacgcttagcatcttccctctcagtctctgaaagggtctgcttatctgtggagatacaacacaacaaaggttaccacgaacctaaaagtccttagatgatcccaatgcttgccataaattttaacactcgatcaacctatataaattccatcacacctaattatttaacacatacggggaagaatagaaatattgtgtaggtaaatgaccaactgtgttttccaacttcttatttcttagcaaatttaaggctttaaacttaagtggcatgaaatgaaatgaccctaactatatgccaaaacaagaaaccactgagaaaaatatttcaagtgactctgtaacatagtcctttgactgtatgtcattactgggatctattttttaaag

SEQ ID NO: 626444 - DNA, 584 bp, Homo sapiens
tttcatttaacccggatgggaaatgaagccctgtgagatgattattattactgtgttacagataagaaaattgagggtccaggttaactcatccaggattacacaggtaataactgacaggactaggattcttgcctgagtcaatctgaccctgcaggctgacatctcaaacactttttctcatcgccaaagtcaagcacgcttagcatcttccctctcagtctctgaaagggtctgcttrtctgtggagatacaacacaacaaaggttaccacgaacctaaaagtccttagatgatcccaatgcttgccataaattttaacactcgatcaacctatataaattccatcacacctaattatttaacacatacggggaagaatagaaatattgtgtaggtaaatgaccaactgtgttttccaacttcttatttcttagcaaatttaaggctttaaacttaagtggcatgaaatgaaatgaccctaactatatgccaaaacaagaaaccactgagaaaaatatttcaagtgactctgtaacatagtcctttgactgtatgtcattactgggatctattttttaaag

SEQ ID NO: 626445 - DNA, 584 bp, Homo sapiens
tttcatttaacccggatgggaaatgaagccctgtgagatgattattattactgtgttacagataagaaaattgagggtccaggttaactcatccaggattacacaggtaataactgacaggactaggattcttgcctgagtcaatctgaccctgcaggctgacatctcaaacactttttctcatcgccaaagtcaagcacgcttagcatcttccctctcagtctctgaaagggtctgcttatctgtggagatacaacacaacaaaggttaccacgaacctaaaagtccttagatgatcccaatgcttgccataaattttaacactcgatcaacctatataaattccatcacacctaattatttaacacatacrgggaagaatagaaatattgtgtaggtaaatgaccaactgtgttttccaacttcttatttcttagcaaatttaaggctttaaacttaagtggcatgaaatgaaatgaccctaactatatgccaaaacaagaaaccactgagaaaaatatttcaagtgactctgtaacatagtcctttgactgtatgtcattactgggatctattttttaaag

SEQ ID NO: 626446 - DNA, 445 bp, Homo sapiens
ttgagagagaggtggagtaagatggtggaatagaaagctccactgattgtctccgccttccccaccctcaccagcctgggcccagcaaggacatyaagttaactgtctacacagaaagaaacaccttcataagaaccaaaaatcagtccgtagatttaacttcatatcactgaaagaggcactgaagagacagaataaacagtctggaattgtcgatgccacccctcccacccctggtagtggcagcatggtgctgagagcttctctgggtgctggggggtggagagcacagcaactgagaggaattgaactcagtgctgtcctgttagagcagaaaggaaacccggacaaaactcagctgatgcccacccacagagggagcatttaaagcagctctagccagaggggaatcaccaaccccaggggaccaaacttgagtgcctga

SEQ ID NO: 626447 - DNA, 564 bp, Homo sapiens
ctatttgaaaacacacagtcagaggggacaaaagaataaaaaaacaatgaagcatgcctactggatctagaaagtagcctcaaaatggcaaatctgagagttattgtccttaaagaagatgtagagaaagagataggggtagaaaatttatttaaagggataataacatagaacttcccaaactgagagaaaggtatcaatatccaagtacaagagcaccaagcagatttaaccaagaaaaccaaacagatttaacccaagaactacctcaaggcatttaataatcaagcacccatatgtaaaggattaaaacaaggatcctaaatgcagcaagggaaaagaaacaaatatcatayaaatggagttccaatatgttgggcagcagacctttcaatggaaaacttacaggccagaagagagtgttttgatatattcaaagtgctgaaggaaaataacttttaccctagaatagtatatccagcaaaaatatccttcaagcatgaaaaagaaatgaagactttcccagacagacaaaagttgagagattgcatcagtgcctgtccc

SEQ ID NO: 626448 - DNA, 564 bp, Homo sapiens
ctatttgaaaacacacagtcagaggggacaaaagaataaaaaaacaatgaagcatgcctactggatctagaaagtagcctcaaaatggcaaatctgagagttattgtccttaaagaagatgtagagaaagagataggggtagaaaatttatttaaagggataataacatagaacttcccaaactgagagaaaggtatcaatatccaagtacaagagcaccaagcagatttaaccaagaaaaccaaacagatttaacccaagaactacctcaaggcatttaataatcaagcacccatatgtaaaggattaaaacaaggatcctaaatgcagcaagggaaaagaaacaaatatcatacaaatggagttccaatatgttgggcagcagacctttcaatggaaaacttayaggccagaagagagtgttttgatatattcaaagtgctgaaggaaaataacttttaccctagaatagtatatccagcaaaaatatccttcaagcatgaaaaagaaatgaagactttcccagacagacaaaagttgagagattgcatcagtgcctgtccc

SEQ ID NO: 626449 - DNA, 544 bp, Homo sapiens
gaatagtatatccagcaaaaatatccttcaagcatgaaaaagaaatgaagactttcccagacagacaaaagttgagagattgcatcagtgcctgtccyaaaggaaatgctaaaggaagtatttcaatctgcaagaaaaggacgttgatgagcaataaataatcacctgaaggtacaaaactcactggtaataataagtacacagaacaacacagaatattatcacactgaaactgtggtgtagaaactactcttatcctaagtagaaagactaaattatgaaccaatcaaacataataacttcaaaaacttttcaagacatagtacaataagatacaaatagaaacaacaaaaagttaaaaagaagttaagatgtagagttttcattagacttctttttcttgtttgtttatgcacataatgttaaggtgttgtcaggttaaggtaatgggttataagatagtatttgcaagcatcatgataatctcaaaccaaaaaatacaatggatacacaaaacataaaaagcaaaaaactaaatcacatc

SEQ ID NO: 626450 - DNA, 544 bp, Homo sapiens
gaatagtatatccagcaaaaatatccttcaagcatgaaaaagaaatgaagactttcccagacagacaaaagttgagagattgcatcagtgcctgtcccaaaggaaatgctaaaggaagtatttcaatctgcaagaaaaggacgttgatgagcaataaataatcacctgaaggtacaaaactcactggtaataataagtacacagaacaacacagaatattatcacactgaaactgtggtgtagaaactactcttaycctaagtagaaagactaaattatgaaccaatcaaacataataacttcaaaaacttttcaagacatagtacaataagatacaaatagaaacaacaaaaagttaaaaagaagttaagatgtagagttttcattagacttctttttcttgtttgtttatgcacataatgttaaggtgttgtcaggttaaggtaatgggttataagatagtatttgcaagcatcatgataatctcaaaccaaaaaatacaatggatacacaaaacataaaaagcaaaaaactaaatcacatc

SEQ ID NO: 626451 - DNA, 534 bp, Homo sapiens
acatcagacttaatctgcactatagaccaaatggatctaataggtatttacagaacatttcattcaagagctatagaatacacattcttttcctcagtatatggattattctcaaggacagaccatacgttaggttacaaaacaagtcttaaaacattcaaacaaattgaaataatatcaagcatcttctctgaccacaatggaataaaactagaaattaataacaaaagaacttttgaaactatacaaatacatggaaattaagtaatatgctcctaaatgaccagtggatcaaagaagaaattaagaaggaaattgaaaaatttcttgaaacaaagataatggaaactcaacataccaaaatctattgtatacagcaaaagtagtactaaaagggacatttatagctctaagtgcctacatcaaaaaagaggaaaaacttcaaaygatgcatcttaaagaactagaaaagcaagagcaaatcaaacccaaaattagaagaaaataaataagaaaaatcagagcagaaagaaa

SEQ ID NO: 626452 - DNA, 556 bp, Homo sapiens
aacctacagaaaagtagaaagaatagtataatgaaaatttcatttagattcaccraatgggcacatttttctcactccttctcttctctctctctctctctctctctctctctccccccccacacacacacacacacacacacacacacttccctgaatgacttgaacctttagaaaataacttgcaaacaccacaatatttcgctcattcctaaactcttcagccttcaactccatctccaaagaaaggacattctcttagatgttcatgctacctatatcatcctgaagaaatttaacatgtgttccctaatattaacccatatataggtcactttgatttttttcctacctgttccaataatgtcctttatagctgttgggttttgaaatgttgttttgtttattcatttgtttggcttgggatccgattgttttgcttccacattgcacttggttacccccacccccacaaatttgttgaggtagaatttgcactgaataaaattccgtctttttagatgtttaattctatgaattttgacaagcttatata

SEQ ID NO: 626453 - DNA, 610 bp, Homo sapiens
cacatagtccacatcaggcaggggaaagtgcaagttgcttgcaggggaaaatagggccattgtcattgactgggcctagagttcaagtcctttttctgacacctgccatcctcattcccatttcaaactttacaattcccctttgaaaaatgagcagattgccatctatttttgtcttgaactcctggccttaagagattctcccaccttggccacccaaagtgctgggattacaggcatgagccactgcaccttgccatttattttgtaaagttgatgttaacgttaaacagaatggtgaatgtcaagtacagagtgcatagtaggagctcagcaaatggtagcttttattatttgagttcataggacacatcaaagatgggagatcatatttgtctcatcccaaagttagtgtagttcttttrtagtctaatgtagtccaatgtagtctaaacccagatctcttcttcagttagtggagcccaagaatattaaagctagaagggatcctggagctcgatctgtccaatgccttcatttagcaaatgtctacactaagacctgggctggttacaacagtttacccaacattcacaccaggccaggcaag

SEQ ID NO: 626454 - DNA, 468 bp, Homo sapiens
aattgaatatgatttcttttctctttttcttcctccctcccttcatctgttccttcctttcttcctttccttctttttttttgtttcttaacatttaratctcaataatatttatctggttatttattttaccttgttatttattcacccatatttcccacaaggttcatgacatgctcctgaatttatttatcttcttactggatgacatccatcaagagtgtttttaaagaaaatctttgagaaataagctttctcagctttctatgtcttagaatatatttacagtgtcctcgcagttatataacttataacttagctgcctatgaagtaagttcttgtttccaagactgctgatgggaaattgagtgtcaatctgatccttgttagcctgagggccatgagctctttctacacagaagctcttaggtttttaaatttgtctttgatggtcttaaattgcatgtg

SEQ ID NO: 626455 - DNA, 458 bp, Homo sapiens
atttcttttctctttttcttcctccctcccttcatctgttccttcctttcttcctttccttctttttttttgtttcttaacatttagatctcaataatatttatctggttatttattttaccttgttatttattcacccatatttcccacaaggttcatgacatgctcctgaatttatttatcttcttactggatgacatccatcaagagtgtttttaaagaaaatctttgagaaataagctttctcagctttctatgtcttaraatatatttacagtgtcctcgcagttatataacttataacttagctgcctatgaagtaagttcttgtttccaagactgctgatgggaaattgagtgtcaatctgatccttgttagcctgagggccatgagctctttctacacagaagctcttaggtttttaaatttgtctttgatggtcttaaattgcatgtgt

SEQ ID NO: 626456 - DNA, 623 bp, Homo sapiens
tgttccttcctttcttcctttccttctttttttttgtttcttaacatttagatctcaataatatttatctggttatttattttaccttgttatttattcacccatatttcccacaaggttcatgacatgctcctgaatttatttatcttcttactggatgacatccatcaagagtgtttttaaagaaaatctttgagaaataagctttctcagctttctatgtcttagaatatatttacagtgtcctcgcagttatataacttataacttagctgcctatgaagtaagttcttgtttccaagactgctgatgggaaattgagtgtcaatctgatccttgttagcctgagggccatgagctctttctacacagaagctcttaggtttttaaatttgtctttgatggtcttaaattgcatgtgtgtgggatttgttcttattcataaagtctagattctatcagcctttgcaatctgagatctttaagtttttgcttctgcaaaatttttactcatttcaaaatacawattttctttctgtttttctcttttttttctgggacatcatatatatatatatatgccctcttttcatcatatatatgctctttttacatatatatct

SEQ ID NO: 626457 - DNA, 618 bp, Homo sapiens
tggggaagggagctagtaatccacactaactctcttatgtttttctaatggtgaatggtcataaaataatattagctaagtctctcttcaagcttttattctcaagataagctattcattcaagtaaagccttcttcattgattagagtgaatrcattgattgagctgcagtctgtcaaaaattccaacattcttcctgaacgtcagtccctgcttttatttaccaaggaatatgcctgaaccattcacaatgtattcattcaatcaacaaatatttattgagcatctactaagtggcagaaactgttttgctgtttggaataccttagtgagcccaaaagtcaaagtccctgatgttgtggagcttaaaatgaactataaatataatgagtaaattgaagtatgttagaagatgctaagtactaattttttaagtagaagagaggaaggggtggtgagaggtgtggattgcaattttaattgtgacagacttattctcagtaagaaggtgactcttgagctaagactgaaaggaacaataaagagtggaaggaaacactggctcctactcaatgttaaggtcaacaaagagcttctagagttacaaagaaagcaaag

SEQ ID NO: 626458 - DNA, 618 bp, Homo sapiens
tggggaagggagctagtaatccacactaactctcttatgtttttctaatggtgaatggtcataaaataatattagctaagtctctcttcaagcttttattctcaagataagctattcattcaagtaaagccttcttcattgattagagtgaatacattgattgagctgcagtctgtcaaaaattccaacattcttcctgaacgtcagtccctgcttttatttaccaaggaatatgcctgaaccattcacaatgtattcattcaatcaacaaatatttattgagcatctactaagtggcagaaactgttttgctgtttggaataccttagtgagcccaaaagtcaaagtccctgatgttgtggagcttaaaatgaactataaatataatgagtaaattgaagtatgttagaagatgctaagtactawttttttaagtagaagagaggaaggggtggtgagaggtgtggattgcaattttaattgtgacagacttattctcagtaagaaggtgactcttgagctaagactgaaaggaacaataaagagtggaaggaaacactggctcctactcaatgttaaggtcaacaaagagcttctagagttacaaagaaagcaaag

SEQ ID NO: 626459 - DNA, 680 bp, Homo sapiens
aataattacttaaaagttacatatgggccaggcacagtggctcacacctgtaatcccagcacttttcgaggctgaggcagaggattgcttgagaccaggagttcaagaccagcctgggcaacatgatragacccccatctgaacaaaaaataaaaaaaactacctgggcatggtggcacacacctgtggtcccagctacacaggaggctgaggtgggagaacgcttgagcccaggagccatgtctgtgtcactacagtccagcctgggtgacaaagtgagaccctgtctcaaaaaaataaaaaaggtatatatgctgtgttgatcaatttcatattaataatacttttaatagtagctttagccacaatattttaatgaagacttacggtcataataaaattttttaaaatttaaatttaaatatacatgctttttttgcaaaaaaagaattatagattgatcaataacagattttcagtcatactaagagaatattctaagcagaagtggaatgataatgcaagtttagacaaaaaaataaaaatataaaatttctatatgttaaaagatagcttatacacctcttaaatgtatcatggtggatatcaaatcactatggtatcagattccattaggttcattaaaaagaatgataaaattattttattttaaaatgtga

SEQ ID NO: 626460 - DNA, 525 bp, Homo sapiens
tgtatatatattatagtgcttatataataaaagttgcatatatattatatatagaattatatataatgctaatattacataaattctatgagaaaatacaagagggaggaaaataccctaattcagtttacagagctagcataactctgacactcaaagctgacaaggactttacaagaaaaacaattgatcgatgtaactcatcaatgtagattggaaaatgataagatattaacaatttgaatccaacagtatatagaaaaaaattccacatgacaaactgattttacattttaaatcaacatacagataacctagaataactaaaaaaattttgaaaaagaacaaaagtgaaaaacttgttatcaagmattactgtaaagctacaatattcatgacaaagtgaaattgctatgaatatagacatatggatcaatgaaataaagaatccagaaacagacccaaaggcatgttcagttgattttttgataaaaattccaaggaaattcaatatgagaaaaggat

SEQ ID NO: 626461 - DNA, 539 bp, Homo sapiens
caaagtttaaaaggtgtttcttcaaaacaacaacaatagtaatgtctgcagggtttaaaacttatgtagaagtaaaatgtattataaaagtttcacaaaaaatgagaaaaaaaaagagttaaatttttataaggcttttcattgttagggatgtagtaaaagcactaatttaagagatgatgtaaataggtcaaagacgcttcttgtattttctagggtaaccacatatatatataactaatatatatataactaatatatatgtaaaactaatatatatatgtatatacatatatacatataactaataaaccaaaagaggaggyaatggaatagtaaaaaatatttaattaatctaaaagaagcaaagaaaagaggaacaaagtactaaagaacaaaaaaaaaaatacagagtaagcaagcatcacggtccatttaagcccaactatattaatgattacattacatatgaatcagctaaaattttaaattaaaggacaaaaacaatcagactggatttttaatttaaaaagcaaata

SEQ ID NO: 626462 - DNA, 611 bp, Homo sapiens
ttttgttaataaaaaacagtattttgatttattaattagatatatatatttttcttttctatctcatcaatttctacttttatcctattgttttcttccatattctttctatggattgccttattctcattttttagtttttttgggttagaaatttaattatttttatccttttattttaaaatgtaagtagttaagtctgtacatttccctttaataactattttaaatgtgtttcatacaaacagatatgcagcgttttcattaacattatttttcaaaaatkttgtaatttctgtatttacagttttattcaggaatcatttaagagaaggcttcttactttccaggtggtaaggtctttttaagttctgttattatttctagtcttattgaattataataaaacactgcactccagcctgggcaacagagcaagactccgtctcaaaaaataataaataataaataaataaataaattctttggcagtattcaccaaagctaaagatacgtcaaccctgtaacccagcaatctcactgctggagaaattagtgcagatgttcaacaaacgacatgtatgaatatgtttatagccacattattcata

SEQ ID NO: 626463 - DNA, 570 bp, Homo sapiens
attcaatggaagccactttctcagcagcagagaggaatactggttttaamttacatctcctgtcatctttgtaataaatctgcagccctatttgaccttggtgtcttggctaattctaatttgcaggcaccatcttggttggcagagagaaatatggaattttgctctgaggagtttctgaatcagaagatagtcatgctctctgtgtgtctctttcttagggaggctgtggtgcagaattccttagagattgccaattagtttggaataattgaaatcacctataatgataattttattgaacacatacttggccttctcatatggtgtttctttgcatctcctgctctataaaaatagatctattttcctccctgtttctcttcccttaaaatgtttcatgttattgaaaacagaagattgcttgtcaaatgttttattggccacatgggtgtgactgtcaatcctcttcctcgctccacgtgcgcatatgcacatcattagctgaactccaccagtcatgctcctggaaaaatgctgctaattgggtaaacagatacacagaaacta

SEQ ID NO: 626464 - DNA, 570 bp, Homo sapiens
attcaatggaagccactttctcagcagcagagaggaatactggttttaaattacatctcctgtcatctttgtaataaatctgcagccctatttgaccttggtgtcttggctaattctaatttgcaggcaccatcttggttggcagagagaaatatggaattttgctctgaggagtttctgaatcagaagatagtcatgctctctgtgtgtctctttcttagggaggctgtggtgcagaattccttagagattgccaattagtttggaataattgaaatcacctatratgataattttattgaacacatacttggccttctcatatggtgtttctttgcatctcctgctctataaaaatagatctattttcctccctgtttctcttcccttaaaatgtttcatgttattgaaaacagaagattgcttgtcaaatgttttattggccacatgggtgtgactgtcaatcctcttcctcgctccacgtgcgcatatgcacatcattagctgaactccaccagtcatgctcctggaaaaatgctgctaattgggtaaacagatacacagaaacta

SEQ ID NO: 626465 - DNA, 570 bp, Homo sapiens
attcaatggaagccactttctcagcagcagagaggaatactggttttaaattacatctcctgtcatctttgtaataaatctgcagccctatttgaccttggtgtcttggctaattctaatttgcaggcaccatcttggttggcagagagaaatatggaattttgctctgaggagtttctgaatcagaagatagtcatgctctctgtgtgtctctttcttagggaggctgtggtgcagaattccttagagattgccaattagtttggaataattgaaatcacctataatgataattttattgaacacatacttggccttctcatatggtgtttctttgcatctcctgctctataaaaatagatctattttcctccctgtttctcttcccttaaaatgtttcatgttattgaaaacagaagattgcttgtcaaatgttttattggccacatgggtgtgacygtcaatcctcttcctcgctccacgtgcgcatatgcacatcattagctgaactccaccagtcatgctcctggaaaaatgctgctaattgggtaaacagatacacagaaacta

SEQ ID NO: 626466 - DNA, 504 bp, Homo sapiens
ttgttatttagtccaacctcagtccagactactggaactattgaagaggtagcatgataatgccctggtgagtctgagatttaattctaaccaggttcagaatagccccttaaaactgccctctggattgagagaattctcatatttgaaaccctggtgaaggcagagacagccacagaatcgctcccctcggggatgagcgttcaattcctcacccccgaaaccacgttgttttactcctttgccaactggagactaaaccaagagaagtcaaaagacacyttgctccttggtgcttattaaaatggcaagtagactgagggcggaaatgaaaatggaagaatttgacctgtgatccagatggcctggcagtcagggtccagtcaggagctggacctgcagacggcactgcagttattttaacaagtgaatttaacataaagaattattaaccaggtattatagaactgaaaagacgaaaagtaaacatgaaggtatagagtg

SEQ ID NO: 626467 - DNA, 568 bp, Homo sapiens
atctcaactaggtaataaggaaaagtaatactttatattttccatctatctgaaaatatatgtagcattgtacacatatacatctttacaaaagaatagaaaatttttaaaattttgaagttggtggttacatttttctaaatgattaaatgattgtttgggactctggtttattatgattattatgttggagttacccaacatctgggtcacttgagagaatcagtttctattgtctttccttcctcttcactatgggtcatgtttgcctgtttcttcccatgtctagcaacttttcattatatgctgaacaaataagtggatgataatagyagagactctggattctgttttgttgctttgaagatttttgatatttttcctagcatgcaataaacttggctgaattaaactgtagacttccctggggtgagctgaagctaaaatctccactcgtcttttttccatctcccatctgttgctttctctcaggtctccttcttatgcatgggtatttcagatgttcgccaagaatttgagtggggttcatattcagattttgggtttc

SEQ ID NO: 626468 - DNA, 568 bp, Homo sapiens
atctcaactaggtaataaggaaaagtaatactttatattttccatctatctgaaaatatatgtagcattgtacacatatacatctttacaaaagaatagaaaatttttaaaattttgaagttggtggttacatttttctaaatgattaaatgattgtttgggactctggtttattatgattattatgttggagttacccaacatctgggtcacttgagagaatcagtttctattgtctttccttcctcttcactatgggtcatgtttgcctgtttcttcccatgtctagcaacttttcattatatgctgaacaaataagtggatgataatagcagagactctggattctgttttgttgctttgaagatttttgatatttttcctagcatgcaataaacttggctgaattaaactgtagacttccctggggtgagctgaagctaaaatctccactcgtcttttttccatctcccatctgttgctttctctcargtctccttcttatgcatgggtatttcagatgttcgccaagaatttgagtggggttcatattcagattttgggtttc

SEQ ID NO: 626469 - DNA, 585 bp, Homo sapiens
attttttcaattttgatattaatgtaaacattaatatcaaaagtacattacctggcatttaaaaatactgtttaccataattttrtcaacatgccagtgcccctgagatgcaaattaaaggcccagagaacatttggtagtggtagataatgcttaaatatacatttctttcttaaaaaaagaaaaaaacacttacctcaagaatggaattcaaatgattggctcattaactttgaaatactaatatatagagagagtacgtctgaccattttttataatgatagcccacaagtcttccaaaaatactgattcaggcaattctctgtaaaagtgttttcattctttataaaaaggatacaacatctctgagaggtatcagggaacaatggcagtctttcgcccatataaaatataatgccaacgatgcagggagttacctgttgagtaagaattagatgaagccatcgaattgtgtgctaaaaagaacatgccacaccagaggaccctgtcacgagtacacctgtgtgtgtgcaggagtcctagggaaggggaaagcagaaaaaaagaaaagagaaagcaagtgt

SEQ ID NO: 626470 - DNA, 585 bp, Homo sapiens
attttttcaattttgatattaatgtaaacattaatatcaaaagtacattacctggcatttaaaaatactgtttaccataattttgtcaacatgccagtgcccctgagatgcaaattaaaggcccagagaacatttggtagtggtagataatgcttaaatatacatttctttcttaaaaaaagaaaaaaacacttacctcaagaatrgaattcaaatgattggctcattaactttgaaatactaatatatagagagagtacgtctgaccattttttataatgatagcccacaagtcttccaaaaatactgattcaggcaattctctgtaaaagtgttttcattctttataaaaaggatacaacatctctgagaggtatcagggaacaatggcagtctttcgcccatataaaatataatgccaacgatgcagggagttacctgttgagtaagaattagatgaagccatcgaattgtgtgctaaaaagaacatgccacaccagaggaccctgtcacgagtacacctgtgtgtgtgcaggagtcctagggaaggggaaagcagaaaaaaagaaaagagaaagcaagtgt

SEQ ID NO: 626471 - DNA, 644 bp, Homo sapiens
gaattcaaatgattggctcattaactttgaaatactaatatatagagagagtacgtctgaccattttttataatgatagcccacaagtcttccaaaaatactgattcaggcaattctctgtaaaagtgttttcattctttataaaaaggatacaacatctctgaraggtatcagggaacaatggcagtctttcgcccatataaaatataatgccaacgatgcagggagttacctgttgagtaagaattagatgaagccatcgaattgtgtgctaaaaagaacatgccacaccagaggaccctgtcacgagtacacctgtgtgtgtgcaggagtcctagggaaggggaaagcagaaaaaaagaaaagagaaagcaagtgttagatgacagtggaaaaaaatgacttgtcagcctctcgactgccaaaataactccatcaagaacttacaactactattggctcatgttggaaaatgggagtgaagacagccaattcaaatcacaggagcacacccatcacagccgcgcggaatgtgcaggaggggcccgaatccagggcttagaaaatacagcacaggggagatggggagaaattctgaaataggcagcattcatcagtgccctggatattttcaggttttggcc

SEQ ID NO: 626472 - DNA, 644 bp, Homo sapiens
gaattcaaatgattggctcattaactttgaaatactaatatatagagagagtacgtctgaccattttttataatgatagcccacaagtcttccaaaaatactgattcaggcaattctctgtaaaagtgttttcattctttataaaaaggatacaacatctctgagaggtatcagggaacaatggcagtctttcgcccatataaaatataatgccaacgatscagggagttacctgttgagtaagaattagatgaagccatcgaattgtgtgctaaaaagaacatgccacaccagaggaccctgtcacgagtacacctgtgtgtgtgcaggagtcctagggaaggggaaagcagaaaaaaagaaaagagaaagcaagtgttagatgacagtggaaaaaaatgacttgtcagcctctcgactgccaaaataactccatcaagaacttacaactactattggctcatgttggaaaatgggagtgaagacagccaattcaaatcacaggagcacacccatcacagccgcgcggaatgtgcaggaggggcccgaatccagggcttagaaaatacagcacaggggagatggggagaaattctgaaataggcagcattcatcagtgccctggatattttcaggttttggcc

SEQ ID NO: 626473 - DNA, 644 bp, Homo sapiens
gaattcaaatgattggctcattaactttgaaatactaatatatagagagagtacgtctgaccattttttataatgatagcccacaagtcttccaaaaatactgattcaggcaattctctgtaaaagtgttttcattctttataaaaaggatacaacatctctgagaggtatcagggaacaatggcagtctttcgcccatataaaatataatgccaacgatgcagggagttacctgttgagtaagaattagatgaagccatcgaattgtgtgctaaaaagaacatgccacaccagaggaccctgtcacgagtacacctgtgtgtgtgcaggagtcctmgggaaggggaaagcagaaaaaaagaaaagagaaagcaagtgttagatgacagtggaaaaaaatgacttgtcagcctctcgactgccaaaataactccatcaagaacttacaactactattggctcatgttggaaaatgggagtgaagacagccaattcaaatcacaggagcacacccatcacagccgcgcggaatgtgcaggaggggcccgaatccagggcttagaaaatacagcacaggggagatggggagaaattctgaaataggcagcattcatcagtgccctggatattttcaggttttggcc

SEQ ID NO: 626474 - DNA, 595 bp, Homo sapiens
tctctgtgtaggagacatctgtggcttctcagatggggcatttacaaataagcacaccatttatatggaatggcacattctagatggtttctgctttccgtttttaatraaaccatagatttctggaatcagagcgtaatgaacaaattacaaatctatgcacttctcaagcaattttagcactgatgtgacttctaaattgtgagttctttacttcttattcctgtatttgcatatctgttcaaatccaagtgattaaaaaggagctgtcaaggttgataggcctaaaattagagctgactgttcgttttgaatgtacacattaatattagatgtgtctacttcctatttttctctgaaccttcagggaaaggagactgaaatgcatcaacagattgggacattttatttcttaaaaaaaatttcaaaaggagacattaacaacatgtaaataaatccgcaataaagtgccactccactttagcaaagtggataggacatttttaaaaacccaattttaaagaaaagcaaatttctaccaacttgatttaaattgccctccaatggcttcagtccaaaagaaaaaatcaacaat

SEQ ID NO: 626475 - DNA, 595 bp, Homo sapiens
tctctgtgtaggagacatctgtggcttctcagatggggcatttacaaataagcacaccatttatatggaatggcacattctagatggtttctgctttccgtttttaataaaaccatagatttctggaatcagagcgtaatgaacaaattacaaatctatgcacttctcaagcaattttagcactgatgtgacttctaaattgtgagttctttacttcttattcctgtatttgcatatctgttcaaatccaagtgattaaaaaggagctgtcaaggttgataggcctaaaattagagctgactgttcgttttgaatgtacacattaatattagatgtgtctacttcctatttttctctgaaccttcagggaaaggagaytgaaatgcatcaacagattgggacattttatttcttaaaaaaaatttcaaaaggagacattaacaacatgtaaataaatccgcaataaagtgccactccactttagcaaagtggataggacatttttaaaaacccaattttaaagaaaagcaaatttctaccaacttgatttaaattgccctccaatggcttcagtccaaaagaaaaaatcaacaat

SEQ ID NO: 626476 - DNA, 595 bp, Homo sapiens
tctctgtgtaggagacatctgtggcttctcagatggggcatttacaaataagcacaccatttatatggaatggcacattctagatggtttctgctttccgtttttaataaaaccatagatttctggaatcagagcgtaatgaacaaattacaaatctatgcacttctcaagcaattttagcactgatgtgacttctaaattgtgagttctttacttcttattcctgtatttgcatatctgttcaaatccaagtgattaaaaaggagctgtcaaggttgataggcctaaaattagagctgactgttcgttttgaatgtacacattaatattagatgtgtctacttcctatttttctctgaaccttcagggaaaggagactgaaatgcatcaacagattgggacattttatttcttaaaaaaaatttcaaaaggagacattaacaacatgtaaataaatccgcaataaagtgccactccactttagcaaagtggataggacatttttaaaaacmcaattttaaagaaaagcaaatttctaccaacttgatttaaattgccctccaatggcttcagtccaaaagaaaaaatcaacaat

SEQ ID NO: 626477 - DNA, 589 bp, Homo sapiens
tgtacatttgttttaggcacttctccttatgtattatatttgataattacaaataaagtacctgaactatgttaaaaaagaaaatgaagacacaatcacatgtgttgataaaggaagtttcagggtttcacctaaacttacaaaagcaaggacagactctgctaattgaactttgctcttcactcctcctggtgcaccttgttattagggcacatgcggcgagctgtgacatgctgaggagcccccctgcaatggtttcagggggatgaaataaggttggagaggaagccttacatcggaatctcattacttgggtgaggttaagtcagacacttcatgttacyatagcatagttgtgtgtgtgttcatatgttaattctattctagtataatgagggaagtgctggaattcagcaccagccaagtacctaatgtgcccttcaacccctgaccataatgaatataaaatgctggtagtaatagatagattgaaatgaaaaaccccttcatcttggcatgtgagagatttgcaatcacatttggattctcgaagtgctgtttgattggagattaacatgtgggtggattg

SEQ ID NO: 626478 - DNA, 401 bp, Homo sapiens
agactctgctaattgaactttgctcttcactcctcctggtgcaccttgttattagggcacatgcggcgagctgtgacatgctgaggagcccccctgcaatggtttcagggggatgaaataaggttggagaggaagccttacatcggaatctcattacttgggtgaggttaagtcagacacttcatgttaccatagcatagttgtgtgtgtgttcatatgttaattctattctagtataatgagggaagtgctggaattcagcaccagccaagtacctaatgtgcccttcaacccctgaccataatgaatataaaatgctggtagtaatagatagattgaaatgaaraaccccttcatcttggcatgtgagagatttgcaatcacatttggattctcgaagt

SEQ ID NO: 626479 - DNA, 385 bp, Homo sapiens
aagttttgcacttctattgatcttcctctatggggttgaatgtagtaaatgaacctcctagctcccgacaaatttgcatgtaattgcctgtccagtcctgaacgctgaatactgggctggaagaatacactagcattaacagagccaaaaatgtttttctttcaaaggctctgctcctttgtaaaagtggcatatatgggaagaatcagaaggctttctcaaggtttgggaaaatggygaggtggggggatgtccggaaattattaccgtgctatcaaaattatcataacctcaaatggaccttttgagtaagtctagagctggcattaacctctttctgaccactgaaacatactgacctacatttacatacccctaaagggaa

SEQ ID NO: 626480 - DNA, 501 bp, Homo sapiens
ggccacgtgccatgaagtggcgggtgcactgtggcccctggtgtgggccgcggtgcctgctgccccggagctgcctgtgctggacatgaagcggcccttcctgtgccaggagccgctgggtggccaggacatgggccgyaatgtccctgcttctgttaattgttcccttatggacatcaaagtgcttgccttttctgggtagcattgcactgaagttttagatagtacaaagtcttcaaaaaaaagcagcaaggctagaaaaggctactcttatttgtcaactgcaacagctactatcgcatatggtgccaacaatgtcttcccctagtttgttcccagcgtgagggcttctgctgatgtgttggccatgtcaaaatcaaattcaagttatccgatattccagaaggcaagaatatggctttcaaagatagaggcaaactcctgtttgtgggccacagaaccaaaaaggaaactaactaggaagctgcagttgaaaggtcc

SEQ ID NO: 626481 - DNA, 629 bp, Homo sapiens
gaaacctaatacacagggcttcataaagttagcatttatttattttrcacaatgatttcatctctccacatcatgtttccttcggaaacttttactgcggatcaggcttgacataaatattgccagcttgatttggcttaaaaaaatgccccctaccccccgctgccttattgtgagcattaatctgtatggaataaggtcaaacattgctaaagagaaacaggttgccaattatctttgttaaatgatagcatggtagctacatttccttaaataaatctctaatgttgatcactgcttttgtttattgttgttagcaccttattgataccatcagtagaacagacattttcaaccgctcttttagatagatgacccaccaccatcaatagcttcctcatggagcagtagttcctgacataggggtggggaactgcactctatctgtagggagaagaggtgcatgtagtttgataaactgcacagtgcttctgctctaggtcctcccttccttgtcaactcatacatcaatactcttcccatcccacctacctttccacacacaccttgagaacctgatggcaagggttcaagatggtgtaactaatgaattaattcatgcctttttt

SEQ ID NO: 626482 - DNA, 619 bp, Homo sapiens
atgcagtaaggaaggggtaaggaaagtttatagctggtgagacctgagctagtgtgtactgtgagaaaacaaataaggtgtgatataaggatcagccttggactggggaaggatmggtactgatgtggaactagagtggaaaaaaggtatgtggtcaagttcacatatatctttcttctgtgataccaagtaattcatctgagtccacttgtatgtgaaagcatgcctctttgtggccacagaatgactcaactcagcgtagtcatcttgtgaagatgtattactgttcataacaatttctaagtgagggatgtggaaaaatcaccacaaacacatcagcaatgtaacaacaacaaaaacaaaaccgcaaacccaaaccccttaacagatgttgtattttgatgagttagcagtattgtatcattttagtgttcaagagatagaaaaaaggtggtaagacttgaattaacaggtaacctccttacctgacactgtattctacctcacctttttgagaaaaaaaatcaaataaaataagtatggtattatactatgaagtttatagaaataaacaatgtaaaatatccctccctatattcactatatatctacacctgaa

SEQ ID NO: 626483 - DNA, 594 bp, Homo sapiens
tgaaagtgtccttttgcaacttatttttttcactcaacaatatgttttamggtttgtgtagatatatgttcatctatttaaactgctatatagtattccattgtattaataagccacagatttttttcatgaattttttctctgaaggactaaatataaatataagtgtattttataaattaacagctattcagggttttataacatttaaatttatatcctttgctcactggttgactgaaatttttgtttcttgttttttttttttaaagatttcttcctatgtcctggatggtattagttgtttgtatttgtataatacagaacatagaattctacaaaacagtactacaaaatctcccaatctgtgatcttttttgtttgtttcccctttgttaaagaatctttttcacactgaaattttttagttgcaatggtcagatttagcatcttttttttttttttttatcttattgtggtgtagtgtttatataaaaatcctcgtgtctggtgtgatggctcacacctataatcctagtactttgggaggccgaggcgggtggattgctttgagctcaggagtttgagaccagc

SEQ ID NO: 626484 - DNA, 594 bp, Homo sapiens
tgaaagtgtccttttgcaacttatttttttcactcaacaatatgttttaaggtttgtgtagatatatgttcatctatttaaactgctrtatagtattccattgtattaataagccacagatttttttcatgaattttttctctgaaggactaaatataaatataagtgtattttataaattaacagctattcagggttttataacatttaaatttatatcctttgctcactggttgactgaaatttttgtttcttgttttttttttttaaagatttcttcctatgtcctggatggtattagttgtttgtatttgtataatacagaacatagaattctacaaaacagtactacaaaatctcccaatctgtgatcttttttgtttgtttcccctttgttaaagaatctttttcacactgaaattttttagttgcaatggtcagatttagcatcttttttttttttttttatcttattgtggtgtagtgtttatataaaaatcctcgtgtctggtgtgatggctcacacctataatcctagtactttgggaggccgaggcgggtggattgctttgagctcaggagtttgagaccagc

SEQ ID NO: 626485 - DNA, 571 bp, Homo sapiens
ttactctgtctggtgccaccccagtttttaggatgactaatgatttcatgcagccagggatccctcctcagagaggttgaaaacatcagattaaaaacaaccacagctatttataggatgtgaagatagctgagtttcttgataaaatccagaagcrtttgcattttaaaaatggagacctcattgctgagaaatccagaggaacagacctttaaaaacagattgttgggtatttttatgtctgggcaagggagatattttggggcaaggaaagcttcttaaattataccattctggaatgctgcctttatctacttgtaaggttagtcctagtcatggataggatgtatccagatgaatggcattgttcgctagcaaaatgaggccatcaaaagtgcctgtgattttcccacggtcagatgaaagttactcttaatcatttaattttgcttctcattttatcagcagcctctagaatgctttccagggttattaaaatgatgattaattaaaacacaggtaagagttaatgaaatttgaaaggtgcttgggcatcattgaggcagatggt

SEQ ID NO: 626486 - DNA, 568 bp, Homo sapiens
atttgagatagcctaagtgaagaacacaagccagttggacatataccagctaacaccctgcccacttattttaaccaatgctaattagargaaaaagtttcctgggaaaatagtcacaattttagctaaaaaagaaaaaatagagttacaaacttgtatttataatatcatcccagttatgttttacttctgtgtaataagttgaagcatgttaaacaaattttatgggaagccattgttttgggctgagctcctgcattagacccctacagactagaccaaatcaaaacggagtcacgtgtgctacgtgccacataatcaaattgaaactttaagaaagcgggtagatcaccaaacaggccagtttttttcctgaaaacaggatgctcacaaacaccaattggaatgggcccagtcaatctgagtcaatgtaatagggaagtcccttcttctttaacccttataagataggtaaactgaagtaatgagatgttaaccaatccacttttttctagtgtgttgtttccttgttcccatcttacaaaacccaactcttctgtcataccct

SEQ ID NO: 626487 - DNA, 568 bp, Homo sapiens
atttgagatagcctaagtgaagaacacaagccagttggacatataccagctaacaccctgcccacttattttaaccaatgctaattagaggaaaaagtttcctgggaaaatagtcacaattttagctaaaaaagaaaaaatagagttacaaacttgtatttataatatcatcccagttatgttttacttctgtgtaataagttgaagcatgttaaacaaattttatgggaagccattgttttgggctgagctcctgcattagacccctacagactagaccaaatcaaaayggagtcacgtgtgctacgtgccacataatcaaattgaaactttaagaaagcgggtagatcaccaaacaggccagtttttttcctgaaaacaggatgctcacaaacaccaattggaatgggcccagtcaatctgagtcaatgtaatagggaagtcccttcttctttaacccttataagataggtaaactgaagtaatgagatgttaaccaatccacttttttctagtgtgttgtttccttgttcccatcttacaaaacccaactcttctgtcataccct

SEQ ID NO: 626488 - DNA, 568 bp, Homo sapiens
atttgagatagcctaagtgaagaacacaagccagttggacatataccagctaacaccctgcccacttattttaaccaatgctaattagaggaaaaagtttcctgggaaaatagtcacaattttagctaaaaaagaaaaaatagagttacaaacttgtatttataatatcatcccagttatgttttacttctgtgtaataagttgaagcatgttaaacaaattttatgggaagccattgttttgggctgagctcctgcattagacccctacagactagaccaaatcaaaacggagtcacgtgtgctacgtgccacataatcaaattgaaactttaagaaagcgggtagatcaccaaacaggccagtttttttcctgaaaacaggatgctcacaaacaccaattggaatgggcccagtcaatctgagtcaatgtaatagggaagtcccttcttctttaacccttataagataggtaaactgaagtaatgagatrttaaccaatccacttttttctagtgtgttgtttccttgttcccatcttacaaaacccaactcttctgtcataccct

SEQ ID NO: 626489 - DNA, 589 bp, Homo sapiens
tcgctctccacccacccctcccccaaccccagagagcaagaacttcaccactcgctccaccttctccaccaactactggtccctgggcccagctacaggctctgccaattagcagcgcggctagcctctaygcaggcgccagggggctctggttcccggatgtccgtgtcccactccaccagcctccgggacggcataagttccgggggcctggcgcggggatggccaggggtctgggaggaatgggaggcatccagaacaagaaggaaaccacgcaaagcctgaatgacagcctggcggtcagagtaaggagtctggagactgagaaccggaagctcgaaagcaaaatccgggagcacttggagaagaagggaccccaggtcagagactggagccattacttcaagaccatcgaggacctgagggctcagatcttcgcaaatactgtggacaatgtccgcatctttctgcagatcgacaatgcccgtcttgctgctgatgactttagagtcaagtatgagacagagctggccatgcgccagtctgtggagagcgacatctatgggctccacaaggtcattgatgacac

SEQ ID NO: 626490 - DNA, 589 bp, Homo sapiens
tcgctctccacccacccctcccccaaccccagagagcaagaacttcaccactcgctccaccttctccaccaactactggtccctgggcccagctacaggctctgccaattagcagcgcggctagcctctatgcaggcgccrgggggctctggttcccggatgtccgtgtcccactccaccagcctccgggacggcataagttccgggggcctggcgcggggatggccaggggtctgggaggaatgggaggcatccagaacaagaaggaaaccacgcaaagcctgaatgacagcctggcggtcagagtaaggagtctggagactgagaaccggaagctcgaaagcaaaatccgggagcacttggagaagaagggaccccaggtcagagactggagccattacttcaagaccatcgaggacctgagggctcagatcttcgcaaatactgtggacaatgtccgcatctttctgcagatcgacaatgcccgtcttgctgctgatgactttagagtcaagtatgagacagagctggccatgcgccagtctgtggagagcgacatctatgggctccacaaggtcattgatgacac

SEQ ID NO: 626491 - DNA, 589 bp, Homo sapiens
tcgctctccacccacccctcccccaaccccagagagcaagaacttcaccactcgctccaccttctccaccaactactggtccctgggcccagctacaggctctgccaattagcagcgcggctagcctctatgcaggcgccagggggctctggttcccggatgtccgtgtcccrctccaccagcctccgggacggcataagttccgggggcctggcgcggggatggccaggggtctgggaggaatgggaggcatccagaacaagaaggaaaccacgcaaagcctgaatgacagcctggcggtcagagtaaggagtctggagactgagaaccggaagctcgaaagcaaaatccgggagcacttggagaagaagggaccccaggtcagagactggagccattacttcaagaccatcgaggacctgagggctcagatcttcgcaaatactgtggacaatgtccgcatctttctgcagatcgacaatgcccgtcttgctgctgatgactttagagtcaagtatgagacagagctggccatgcgccagtctgtggagagcgacatctatgggctccacaaggtcattgatgacac

SEQ ID NO: 626492 - DNA, 575 bp, Homo sapiens
acctggagtcccaagaattggcccaccattaactgccaatgcaagtgccagtgtaaactgccctggggctcaaagtcaggtatgcatagcccaccactgccaccactagggcctgaatattggcccatctggcttcccagtcccccacaacttcaccacaacctccataaatgactgcaccctaaccccgatgagaaaatcacagaaagcactaacactgtttatagccaaagaaatcacacagagattacactactgattgcacccagaatcaaagctaaagtgctgtactcaaccaacaccatggatatatctttaggaaaagttctatcctacaaaaataarttaaaaaataggaagaagtgactattacacaagatgggtagatatccacataaggacacagaaaacatgaaaaggcaaggaaatatgacacctttaaaaaaacacaataattctccagcaatagatctcaatcaacagaatcttcaaaatgccagataaatattcaaaatattgattttaaagaagctcaatgagacacaagagacttctgaaaaacaatatttaaaaaa

SEQ ID NO: 626493 - DNA, 575 bp, Homo sapiens
acctggagtcccaagaattggcccaccattaactgccaatgcaagtgccagtgtaaactgccctggggctcaaagtcaggtatgcatagcccaccactgccaccactagggcctgaatattggcccatctggcttcccagtcccccacaacttcaccacaacctccataaatgactgcaccctaaccccgatgagaaaatcacagaaagcactaacactgtttatagccaaagaaatcacacagagattacactactgattgcacccagaatcaaagctaaagtgctgtactcaaccaacaccatggatatatctttaggaaaagttctatcctacaaaaataaattaaaaaataggaagaagtgactattacacaagatgggtagatatccacataaggacacagaaaacatgaaaaggcaaggaaatatgacacctttaaaaaaacacaataattctccagcartagatctcaatcaacagaatcttcaaaatgccagataaatattcaaaatattgattttaaagaagctcaatgagacacaagagacttctgaaaaacaatatttaaaaaa

SEQ ID NO: 626494 - DNA, 599 bp, Homo sapiens
gtcaaatgatagttctatttttatttatttgacgagcctctatgctgttttctgtaatggcttaccaatttacatttttatcaacaacgtatgaatgtttcattttttccacatcctcaccaatgcttattatattttgactttttggtaatatttattttaacaggtatgaggtgatatctcatgaatatttgatttgcattttcatatacctgttgcctrtttgtatgtcttctttggaaaaatgtctattcaagttttttgcccatttttaatctggttttccttatttgcttttgagttgtgtgagttccttatatattttggatattaacactttaccagatgtatagtttccaaacagtttctcccattctgtaaactgccgtttcactgtgttatttcctttgcagtgcagaagctttttaggtggatgtaatcccacttgtttattttacttttattctcactgtttttgtgtccgatccaagaaataactgtgaagaccaatgtcacggagctttcaccagaattttatgttttcattttttatgtttaagtctttaatccattttgaatggtttttggtgaatggtgta

SEQ ID NO: 626495 - DNA, 554 bp, Homo sapiens
gctgttttaatatggctgtagaaaagggatactggccaggtgcagtggctcacatctgtaatcccagcactttgggaggctgaggcgtgtggattgcctgaggtcaggagttcaataccagtctggccaacatggtgaaaccccatttccactaaaaatacaaaaacattagccyggcgtgatggtgtgtgcctgtaatcccagctactcgggaggctgagccaggggaattgcttgaaccagggaggtggaggttgcagtgagctgagattgtgccactgtactccagcctaggcaacagagcaagactccatctcaaaagaaaaaaaagaaaagaaaaatatgttcacacaaaagacatacacacaatgtacatagccaaaaaagtagaaacaacccacatgtctaccaaactacaacaaaatgtagtatatccatacagtcaaatgttattcagccatgaaaagaatgaactacatggataaccctcacaaaacactgtcagctcccacttggctttgcacttccacctgccctggtagcttaacacaaaa

SEQ ID NO: 626496 - DNA, 547 bp, Homo sapiens
actttccagtttcttttgcatttgtctaagtgtgtttcatttccagaagctgtggatgttttttatttatgctgtatatttctctggagatattttaatccatatcctataatatttttaaaatttctttaaattatttttcatctttctctgatccctccttgaacagcttaataattgactttctaaattcttttctgggcaattcacaggattcttcttggtttagatccattgcttgtgacctaatgtggtctttgggggatgtcaaagaaccttgctttataatattatcagaattgtttttcttgttccttctcatttgggtagactatgtcagaggaacgttctgtggctcaagggctgctgttcagattcttttcttccactgggtgatcccttgatgtggtgttctccccatttttctaaggatggggtttcctgggagccagactgcagtgattgttatttactcttctgggtctagccacccagcagagctaccrgactctgtgctggtactggggagtgtctgcaaagagtcctg

SEQ ID NO: 626497 - DNA, 622 bp, Homo sapiens
tgtcagttgtaatgtcttctttttcatttgtgatttaatttactttaattcctctctttttttcttagtytaggtaaaactttgtcaattttgtgtaacttttcaaaaacagccactttttgtttcattgaccttttgtattgttttctttatttcaatttcatttatttctgctctaatctttgttatttctttttttgtattagttttgagtttggtttgctctttcttttctagttctttaagacgcatcatcaatttttttgtttgaagttttttctctgttttgatgtaggcacttatagctataaatttccctctgagtactgcttttgctgtgtcccataggttttggtgtattgtgtttccattattatttatttcaagaaatttttcattttttttcttaatttcttcattgacccacttgtcatttaggagcatattgtttaatttccatgtatttgtatcatttccaaaattcctcttgttatttatttctagttttattccactgtcttcagagaagctacttgatattatttcagtgtttttgaatgtattatgatttgtgacttaacatatggtctgtccttgagaatgatccctgtgctgaggaaaa

SEQ ID NO: 626498 - DNA, 445 bp, Homo sapiens
tttatttgatttttctcaacacagctattttgaattctttgtctgaaaagtcacatatctctgtttctccaggattcatcctgggctcttacttagttcatttgataaagtcatattttcctggttgatattgatgctagtaggtgttcttttttgtctgggcattgaaaggttaggtgtttattatagtcttcactctgggcttatttgtagctgcccttcttgggaaggttttctagtatttgaaaggacttgggtgtcatgacctaagctgcttctgctctaggggayaccccaaatatagtaacattgtggttttcaccgacttatagaggtatcctcttcatggtcttggacaagatggggaagaattctctgaattaccaggcagagacttgttctcttcccttactttcttccaaaaaagaatctctctttctaagcc

SEQ ID NO: 626499 - DNA, 603 bp, Homo sapiens
gtgctgttacaaacattcatgtatttgtttgaatatctgtcttcaattattttgagtatatacaccagggagatggatggggataattggactgtatggtaattctatgtttaactttctgaggaacctccaaactatcttccrcagtgactgcaccattttacattcccatcaagcagcacagaagggttccaatttgtccacattctcaccaagacttgttattttcagttttatttttattatagccatcttactgggtgtgaaggggtatctcattatggatttgatttgtatttccataatgaaaaaaatattgagtatctttttatgtacttgtttgccatccatatatcttctttgggaaaatgtctattcaagccattgtccattttttaaatgggatttttaaattgggttgtctttttgttgttgaattttaatattttttgcatgttctgaatacttgatctttatcagatacgttatttgcaaacattttcccccatacttgatagtatcattttatacacaaagatttttaattttaataaaattcaatttatctattttttcttttgttgcctatgcttttggtgtcat

SEQ ID NO: 626500 - DNA, 634 bp, Homo sapiens
aaagcactttcaacgtctgtttcatttgatcttggcaatgagccagtgaagcaggtaagagatccagtattagatcccagttctcctaattgctaacccagtgtttgtcaamcaaagttaaaaaacaaacaaaaaaacccctccccattatgtgagataggtcagtatatctttctgtctcataggaattctgcaactctcctttgaatagggaattaggaagtattttctaacaacaggggagtgatttgttagcctttttcttaggaaactagggatttaaaattagtttcaacatttttcaaatctataactggtaggaagtggaactttaaaactcacctggagaaatacattgtaaagaatcaataggagtcaagagattaggtacccaaaggccttagcaagattctcgtgtatgacagaaacttgtttaactagaatctttaaataacagcttccgaaatctcagagtattcaatatggaaaacctgtttttagtgccttctcttccagttacttcaacagtattagctatttaaaaatgtaaaaagatagagggtgaacaatgtcacaagttggagtgggtgtgcatttgttctaggggacccttcaggatatttttaacttactc

SEQ ID NO: 626501 - DNA, 597 bp, Homo sapiens
gattaggtacccaaaggccttagcaagattctcgtgtatgacagaaacttgtttaactagaatctttaaataacagcttccgaaatctcagagtattcaatatggaaaacctgtttttagtgccttctcttccagttacttcaacagtattagcwatttaaaaatgtaaaaagatagagggtgaacaatgtcacaagttggagtgggtgtgcatttgttctaggggacccttcaggatatttttaacttactctccagtatttgatgaaatagctgaagactgtcgtagcaatgtacaggcagtagagaacagagtaagctaagaattgaaggaagaatttgtagttggaaaatccaatgcagttattaaccctaaaaaaaaagaaaaactaatttgacatcaggacctcttgattgagagcacactgatacataagtgaactaagcaatggaataatgctagttctgctgcttcattatgtgtcgtgtaaaagcccaatagagatagaagtcccttaataagaacaaactggataaaacaagttcatgtctcacttgtttattctttcatttacaggcacagaaacacctggcctg

SEQ ID NO: 626502 - DNA, 556 bp, Homo sapiens
aagatcatggtgggagtgcagatttatataatcagtttggaaaattttgtcattatctatttatgctaaatatatgcctgtcttatgaccccagcaattttattcctacttatatacacaagaaaaatgagtatctgggtgtatatgtgtgagcatgtattaaagttttatttacactcacacacacacacacacacacacacacacacacacagagtctctgatacacagagtcagccttccctatgtatggttccacattcatgcattcaaccaactggattaaaaaatatttttaaaattaacaatacaagaaaaatamtacaaataacaaacaatacaaaaactatttacatagcatttatagtgtattagtattgtaaataatctagagatgatttaaaatatgtaggagggtgtgaatgggttatatgcaaataccatgccatttcatgtaaggaacctgagcatctgtgattttggtatctatgggaggtcctgaaatcaatcccctgtgggtactgaggaacaactatatttatatgccaaaagacat

SEQ ID NO: 626503 - DNA, 553 bp, Homo sapiens
aaaaaatatttttaaaattaacaatacaagaaaaataatacaaataacaaacaatacaaaaactatttacatagcatttatagtgtattagtattgtaaataatctagagatgatttaaaatatgtaggagggtgtgaatgggttatatgcaaataccatgccatttcatgtaaggaacctgagcatctgtgattttggtatctatgggaggtcctgaaatcaatcccctgtgggtactgaggaacaactatatttatatgccaaaagacatgtacaagawtgttcattggagctttattcataacacacaaaacaatggaaacaagtatacttcaatggctgaatggttaaaccaagtgtgataaaagggaataactaacagcaatcaaaggaaattaactactgaaaaatgcatcaacatggataaatttgaaaaacactgtgttgagtgaaaggtacacatagaatagtaccaactaggattccttttttatggacttcaaaaacaggcaaaaccaatctatggtgatagaagttagcgtagtagttacc

SEQ ID NO: 626504 - DNA, 584 bp, Homo sapiens
catcaacatggataaatttgaaaaacactgtgttgagtgaaaggtacacatagaatagtamcaactaggattccttttttatggacttcaaaaacaggcaaaaccaatctatggtgatagaagttagcgtagtagttacctctaagaggaggttgattgaaaagaggcatgaagatttatgagatactagaatgtttaaaattttaacctggatactgattacttaggtataatatatggggaaacattcatcaaattattctctttaaaacttaattctgggagtagagtctgtatgttatacttcaataaaattagcagaacaaataataaaatatttgagataatttaaatatatctaacttaaaaaattgaaaacatataaaatcaaacactgtgttttaagaaccacacctagtggtgcgtttttatggtactgtcattctcaggtagagtgagaattaagtaccctgcttggggtatgtggaactatgtaggggcatttttggctattacaatgaatgtggtgtaccataggcaattaatccttagcctagggtgctaaagattctccaatgaactga

SEQ ID NO: 626505 - DNA, 584 bp, Homo sapiens
catcaacatggataaatttgaaaaacactgtgttgagtgaaaggtacacatagaatagtaccaactaggattccttttttatggacttcaaaaacaggcaaaaccaatctatggtgatagaagttagcgtagtagttacctctaagaggaggttgattgaaaagaggcatgaagatttatgagatactagaatgtttaaaattttaacctggatactgattacttaggtataatatatggggaaacattcatcaaattattstctttaaaacttaattctgggagtagagtctgtatgttatacttcaataaaattagcagaacaaataataaaatatttgagataatttaaatatatctaacttaaaaaattgaaaacatataaaatcaaacactgtgttttaagaaccacacctagtggtgcgtttttatggtactgtcattctcaggtagagtgagaattaagtaccctgcttggggtatgtggaactatgtaggggcatttttggctattacaatgaatgtggtgtaccataggcaattaatccttagcctagggtgctaaagattctccaatgaactga

SEQ ID NO: 626506 - DNA, 559 bp, Homo sapiens
caccctgctcaggaaatcactcttctcccacagatcactgcaacccaccgataaggagatcctctggtgatcccatgccaccagggccttgggtccgatacacaaagctgtgtggagtcatggcagagcagctgctcagccacacacagagacccaggagttttacatactccagccccagtagccccagcaaggtgggagatccatttgtacatacacctaagaagagggctaaatctagggagtcaagcagtgtcattctgcaggctccacttccatagcactgtacaagctaagacccactggcttgtaattctagccagccaactgcaacaggctgaagtctgcctgagatgagataaagttcctgtggggaggggtggctgccwtctctgtgattcagtcagctcagccattccagcctgccagctttggagagtgcaaatggcccagaggaggaaggaccccccaacagtgaagcgtacctactttgccaggttgtggccaggctgcttctataagcaggaccccaatccattcctcctcactgggtggagcc

SEQ ID NO: 626507 - DNA, 596 bp, Homo sapiens
gcttctttaagtgggtccctgtttccactcctcctgactgggtgaaacttcccaacaggggtctcgagatacctcctataggtgcatttgggccagaaacaggtcattacccccctgggatggaggttccagaggaaagagaaggctgccatctttgttgtttcacagccttcactggtgatacatccaggtatgaaaaaaaaaatgaggcaagtagggtctggagtagacctgcagcaaaccacagcagccctataggagagtgacctgactgttaaaagaaaaacaaacagaaaacaacaacatcaacagaaaagaccccacaaaaaactyattcaaaggtcagcaacctcaaacattgaagatagataagcccacaaatatgagaaataatcaacacaaaaaggctgaaaacaaaacgccagagtgtctctattccttcaaatgaatgcaacacctctagagcaagggcacagaactgggctgaggttaagatgcctgaattgacagaagtaggcttcagaaggtgggtaataacaaacttcactgagctaaaggagcatgttgtaacccaatgcaaagaggctaagaatcat

SEQ ID NO: 626508 - DNA, 552 bp, Homo sapiens
agtcaataaattgatattataaaacagtagctaaatgaactaaatactgcaaagtaatatgaaaaacaactggttattttgtttacttagaagaacagttataccagttaagacaaaattataaggttttaaaaattctttttaacattataattaaaagtagcaccttgtggtggcactttaatttctgggatgtccttgggaatataacttccttatagtacactgcacctacttgaaaggcacaggaagaggattttctatttgtatgtgataaatatctcatgtctacttaacaaactggctttkgtttggaataagatgtcaggcctggatgccctaattctggcactaacaagccttattgaaaacttataatacagtgagccagtaaatgcattttggatgaggcaattgatgatagattgggatgtacttgggtattaaagaatgtaatactgtggctattaaattggcccaatgtactctccttttctttttacacgttaaaaataataaagatgtggtcttaagtgttagatatttgtagtg

SEQ ID NO: 626509 - DNA, 611 bp, Homo sapiens
ggtcatatcaagtgatttgcccagggtcacacagcaagttgctggcagggctgtgacctgtacagttttgatgatttcttattttaggattcttttaactctgtaattcttattttaggattctaatataaaaaaatcattcctccttccctccctccttcattccttcctttcttccttccttcctttcctttagatgaaaggtattttactttccctctcattttctagatgttcattgatagagtacgactgtgtttaatgtgattattaagtataaaaactaaaatgatgaataatttgaactaatataatcatttcatctaaagtgtacattaagcacatattactgattcaacacaatagacagttaattcagcagagatttgtgtttacttccactaatggaagtatgtgagtgactaaagtcgtgggtataattragtcaaagaggaagggagaagaacatgcatatctgggtccttttgcatattttaaaatatactgtcaatgctcctatcctcatttaagccacattgtctcttagctagttgactgcaatatctgtgtaatttatcactctgctttcatacttgcccctcaaaagacct

SEQ ID NO: 626510 - DNA, 576 bp, Homo sapiens
atgggaaataaatctgactaaaattcagggaccttctacttcagtaaaatttccagggttccagtggtgtgaggccgtcaaaatattccttctgaggtgaaggataagttgctgcatttggcccctcctacaaccaagaaattagcacaatgcctagtgggcctatttggattttagatgcaacacattcctcatttgagcatgttactctggcccatttatcgagtgaccgaaaaggctgccagttttgagttgggtccagaacaggagaaggctcttcaacaggtccaggctgctgtgcaagctactctgccacttgggctatatgrcccagcagatccaacagtgcttgagttgtcagtggcagatagggatgctgtttggagcctttggcaggctcccacaggtgaatcacagcagaggtctctaggattttggagcaaggccctgccatcttctgcagataactactctccttttgagagacagctcttggcctattactgggctttggtggaaactgaacgattgactatgggtcataaagtcaccacgtgacctgaactatctatcatg

SEQ ID NO: 626511 - DNA, 576 bp, Homo sapiens
atgggaaataaatctgactaaaattcagggaccttctacttcagtaaaatttccagggttccagtggtgtgaggccgtcaaaatattccttctgaggtgaaggataagttgctgcatttggcccctcctacaaccaagaaattagcacaatgcctagtgggcctatttggattttagatgcaacacattcctcatttgagcatgttactctggcccatttatcgagtgaccgaaaaggctgccagttttgagttgggtccagaacaggagaaggctcttcaacaggtccaggctgctgtgcaagctactctgccacttgggctatatgacccagcagatccaacagtgcttgagttgtcagtggcagatagggatgctgtttggagcctttggcaggctcccacaggtgaatcacagcagaggtctctaggattttggagcaaggccctgccatcttctgcagataactactctccttttgagagacagctcttggcctattactgggctttggtggaaactgaacgattgactatgggtcataaagtcaccaygtgacctgaactatctatcatg

SEQ ID NO: 626512 - DNA, 659 bp, Homo sapiens
gatcatgctcgagcaggtcctgaaggcacaagttacatgacaaagtagctcaaatgcccatggtctccactcctgccaccttgccttctctcccccagcctgcactgatggcctcatggggggttcactatgatcaattgacagaggaagagattactagggcctggttcacagatggttctacacgaaatgcaggcaccacccaaaagtggacagctgcagcactacagcccctttctaggacatcctggaaggacagcggtgtaaagaaatcttcccatggggcagaactttgagcaccacacctggttgtgcactttgcatggaggaagaaatggccagatgtgcaattatatactgattcatgggctgtagccaatggtttggctggatggttagggatttggaagaagcatgattggaaaattggtgacaaagaaatttggggaagaggtatgtggatggacctctctgagtggtcataaactgtgaagatatttgtatcccatgtgagtggtgaccaaygggtgacttcagcagaggaggattttaataatcaagtggataggacgacctgttctgtggacatcactcagcctctttccccagccacccctgtcatcgcccaatgggcccatgaacaaagtggctgtggtggc

SEQ ID NO: 626513 - DNA, 442 bp, Homo sapiens
acaatattaactcttccaattcatgaatacaggatgcttttccctttattcatgtctactttctttcagtgacattttttagttttcactttagaagtctttcacttttttggttatgtttattcctaagtattttatgtttttggtgctattataaatgaaattgcttttttagtttcctttcagattgttcattgttagygtatcaaaacataattggtttttgcgtgatgtggtgattttgtatcctgcaactttgctgaattcatttattatttataatagggttttacatgtggaatatttacggttttctatatgtaagatcatacctacaaacagagataattttacttcttcctgttcaatttcaatgtcttttatttgattttcttgcctacttgcactagccagaggaaatgtttcttatttttttttttaa

SEQ ID NO: 626514 - DNA, 442 bp, Homo sapiens
acaatattaactcttccaattcatgaatacaggatgcttttccctttattcatgtctactttctttcagtgacattttttagttttcactttagaagtctttcacttttttggttatgtttattcctaagtattttatgtttttggtgctattataaatgaaattgcttttttagtttcctttcagattgttcattgttagtgtatcaaaacataattggtttttgcgtgatgtggtgattytgtatcctgcaactttgctgaattcatttattatttataatagggttttacatgtggaatatttacggttttctatatgtaagatcatacctacaaacagagataattttacttcttcctgttcaatttcaatgtcttttatttgattttcttgcctacttgcactagccagaggaaatgtttcttatttttttttttaa

SEQ ID NO: 626515 - DNA, 635 bp, Homo sapiens
cccctgggaacataacttcattgcctgagaatcaccgcccctccaccatctcccacagtggctgcagcaagccccacccaaggagagtctgagctcagactcacctaaccttgcccccacatgctggtttttctttaactgccctggttgccaaagacaaaagacataaactcctgggaaatctatggcaccacctatcacctgaaaaacgtgagtacccatcctagccaatgtagggcaagattacatacccttctactacagcagaaggcactctcttcaaagcaccacctgctggaggccagccaactcaagccattacagcaactcataacagaacaaccctgatccaaagaggagaaaacaacagctaattccatgtcctacaacaccctggctaactagaggtcctgagtctgtccctgtgacaacttcactgctagcataaccagtatttgaaaaaagccagcacactaaacaaaaatataagcaaggacttccacagagtccacttcactcccctgccacctccagtggagcaggtgctggaatctatgactgggagacctgaagatggatcatatcacaggactgtttgcagacattccccaraaatagcctggagcctggtagcc

SEQ ID NO: 626516 - DNA, 386 bp, Homo sapiens
tcagtggagcagagaattcataaatggaaccacacaaatgtggccaagtgatttttatttatttattttggagacagagtctcactctgtcactcaggtaggagtgcagtggtgtgatctcagctcactgcaacctccaaggttcaagcacttctcgttcctcagcctcccaagtagctgggactasaggcaggcacacaccaccatgcctggctaatttttttattttttttttaaagatgggtttttgccatattggccaggctggtctcgattcctgacctcaggtgatccacctgcctcggcctcccaaagtgctgggattacaggcgtgagccaccacgcccgacctgtattttttttttttttaagatgggtttttgcca

SEQ ID NO: 626517 - DNA, 496 bp, Homo sapiens
gaattcgcttgttcctaacttaggggagtggcgccgagacaccgtgtagcgcccatgccaaggaggaagcgagacagcaggagcggaggaaagaaccccgggctgtgttgaggaagcctcctacttttgcctgaagtgaggttgttgttgttgttgttgttgttttttccacgtgccttattcatccacrtaacctcagcctctagtgcagcgtcctattttttggcttgtattattatttttaattgacacataataattgtacatatttatgggatgcagtgtaatattttagtacacatatacaatgtgtagtggtcaaatcagggtaattagcacattcagggttggagtttttctgtcaatacagatacttatagaaacttttttttgtgtgagatagggtcttgctctcttgcccaggctggagtgcagttgcatgatcacagctcaagccatcctcccacctcagcctcccgagcagctgggactacag

SEQ ID NO: 626518 - DNA, 491 bp, Homo sapiens
aatttacactcattcccatcaacagcgtataagtgttcctttttctctccaacctcaccagcatctgttgttttttgactttttaataatagcattctgactggtgtgggacagtatctcactgtggttttgatttgcacttctctagtaattagtgatgttgagtcttttttcatgattgttgattgcatgtatgtctgcttttgaaaactgtctgttcatgctctttgcccactttttaatggggttgctttttcttgtaaatcgaagttcattacagatgctagatatttgacctttgacagatgtatcatttgcaaatattttctgccactctgtaggttgtctgttcactctgttgatagtttcctccactatgcagaagctctttygtttaattagatcccatttgtcaatttttacctttattgcagctgcttttggcatctttgtcatgaaaatttgcccactcctatgcccagaatggtatt

SEQ ID NO: 626519 - DNA, 489 bp, Homo sapiens
attaagtcaacaactattagctgagtagttactatgtccacaacatagtgatgaataaaaagatgttaggctccactcaaagaatttacaatataatacaagatggaaatgcccagctaatataaactgagggcaaattataaattttgaggatcttatactttaacatatatgttatgaagaaatcattaaacaatctaaactatctactgtatcagacaaaacyagcagctgtgaggctaacataatagtcaagataaggatgatgaagaatctaaactaaggctatggagccagttacagtagcttgtaatcccagcaactcgagaggctgaggtgggaggatcccttgagcccaggagttttatatatatatatgtatgatatataatacatatataaactcactgctatgatcattatatatacgatcattgtatacatgacatataatatgcctgtacgttatatatatatgaaatacataat

SEQ ID NO: 626520 - DNA, 588 bp, Homo sapiens
atcaggcaactaattatccatgtccttagcttctgcctttttactggggatgagtgtgtattactctagcatcctatcaaggtacagaatggtaaaaacccaaacataggtcattcaactcatgatttaatatattctactctgaaygtttgttttcaaattggttggcagtcaaagtatttccctaaaggaatcatatatagtggtattttatagatctcaggccagtcctcaaaagccaaaatgtagttgaactagagaagcaataatagtacacaacccaaacatccattataccagtttctatggcaaaattcatcccagaacccaagcgagcattgggtaacatatcctcccaatcactggcaacgcagcaagagcttcacagttcagttttcctcttctctcccagtcagcccaaaatcaacagggtgagaaggcagaaggagatctaataattgtggaaggctccaataataggaagctgaggggtagaaggcagaactatagcagatccctttgttttcactgagtctggtaagagtgaaaggggaaatcccaacatgagatattaggggtagaaaaagt

SEQ ID NO: 626521 - DNA, 588 bp, Homo sapiens
atcaggcaactaattatccatgtccttagcttctgcctttttactggggatgagtgtgtattactctagcatcctatcaaggtacagaatggtaaaaacccaaacataggtcattcaactcatgatttaatatattctactctgaatgtttgttttcaaattggttggcagtcaaagtatttccctaaaggaatcatatatagtggtattttatagatctcaggccagtcctcaaaagccaaaatgtagttgaactagagaagcaataatagtacacaacccaaacatccattataccagtttctatggcaaaattcatyccagaacccaagcgagcattgggtaacatatcctcccaatcactggcaacgcagcaagagcttcacagttcagttttcctcttctctcccagtcagcccaaaatcaacagggtgagaaggcagaaggagatctaataattgtggaaggctccaataataggaagctgaggggtagaaggcagaactatagcagatccctttgttttcactgagtctggtaagagtgaaaggggaaatcccaacatgagatattaggggtagaaaaagt

SEQ ID NO: 626522 - DNA, 596 bp, Homo sapiens
gtggtggtggtggtggaaataaggtctcgctatgttgtccaggctgatctgaaactcctgggctcaagccatcctcccacctcagcctcccaaagtgttgagattacaggcatgagccaccttgcctggcctatcagtgtgcttttaatgattaactcacaaccctcaaatgtagtggcaaacagcaaacaccatttagctcatgttgacaatttgtactagattcagcaagtggttcttttggttttggctaggttcatttatgcatttgtggtcagaagataatctggtatcttctgggtagcatagtacagctaccagggtacagctctaatatcacaaatcagggcaatgaaggatgaatttggagctgagaggcaattaattggtaacaggcacatgctcccatttcatctctcaaaagactttaaagtggccacaactttttaaaaaatcacatccaggaaagagataagaataaaaataagaaaatacataagtaatcaaattaaatcacaaattgtgactcaacrtctgtgtgattaaatttctaaataattatgattacctgtggggtttttaacggggcataataa

SEQ ID NO: 626523 - DNA, 506 bp, Homo sapiens
actgtgattgtatgaaacctaaatacagatcaagtatttctggtgaaaatttagagtctaacttgagacgtgccacacatgttaaatttatgcccaatttcaaagacatagtaccaaaacatgtaaaatatctcattaataatttcctattgattacatgttaatattttcacaggtagggctcaataaaacatgttattaaataaaattcataaatttctttttactttttaagatatggtcattagaaaatttaaagttacacatatggctcacatttgcggcttgcattatatttctactgaacactatagtggttcagaaagagttggaccagttgccactggtatagtgagtccagaaagagttccacatatagagacctgatttrtaagaaaggcaatactgcaaatgtggtgagcaaaggatgtcttttcaataaatagagctgaatgaactaaaaatccatatggggaaaaaatgaatcttgagccctcacataataa

SEQ ID NO: 626524 - DNA, 551 bp, Homo sapiens
ttttctttatccattcatctgttaatgagcacttaggttgatttatatcttggcagttgtaaatagtgctgcaataaacatgagagtgcggatatatctttgatatattggtttactttcatttggatatatacccagtagtggaatggcttgatcatatggtagttctattttttatttcttcaggaacttctatactattctgtgtagtgattgtatttatttacattcccaccaacaatgtataagggttcccctttgtttccatcctcacyagcattgttattgtctgtctttttgataaaaggcattttaactagggtgagatggtatctcattgtggtttttatttgcatttttctgatgattactaacaaggagcatttgctcacttacctgttggccatttgtatgttttattttcgggaatgtctgtttagatcttttgcccgtttttaaatcagattctttggctttttgctgttgtgttgtttgcgctccataaatattctgattattaatcccttgtcatatggataatttgcaaagat

SEQ ID NO: 626525 - DNA, 644 bp, Homo sapiens
gtatgtagcccaaaaagtgaccagcctgatgtgtgttgtaacccatctgagccctctatggtaacagtttttgaaataagattaagaacggtcacctgrtggggtctaaaccatactaagaagcatccatttagtaagtttcctaagttgcaaactgtttgggcccatccagagtctcactgggactggccagctccagctagactatactggatatgcaggcatagagcctacaccaagctacctgaccaatgggcaggtcgttgtgtcattagcaccattaagccatcctttttcctactgcttgtaaaaacaggtgagctcctaggcttccctgtctatgcttcccgagaaaagagaagcatagccataggtgattggaaaaatgatgagtggccccctgaaagaatcatacagtactatgggcctgccacatgggcacaagacagctcgtagggatactgaacccccatctacatgctcaactagattatacggttaacaagctgtcttagaataatcactaatgagactggcagagctttgactgttttagcccggcaagaaaccctgatgagaaatgctatttatcagaatagattagccctagactacttgctagcagctgaaagaggagtttgtgg

SEQ ID NO: 626526 - DNA, 644 bp, Homo sapiens
gtatgtagcccaaaaagtgaccagcctgatgtgtgttgtaacccatctgagccctctatggtaacagtttttgaaataagattaagaacggtcacctggtggggtctaaaccatactaagaagcatccatttagtaagtttcctaagttgcaaactgtttgggcccatccagagtctcactgggactggccagctccagctrgactatactggatatgcaggcatagagcctacaccaagctacctgaccaatgggcaggtcgttgtgtcattagcaccattaagccatcctttttcctactgcttgtaaaaacaggtgagctcctaggcttccctgtctatgcttcccgagaaaagagaagcatagccataggtgattggaaaaatgatgagtggccccctgaaagaatcatacagtactatgggcctgccacatgggcacaagacagctcgtagggatactgaacccccatctacatgctcaactagattatacggttaacaagctgtcttagaataatcactaatgagactggcagagctttgactgttttagcccggcaagaaaccctgatgagaaatgctatttatcagaatagattagccctagactacttgctagcagctgaaagaggagtttgtgg

SEQ ID NO: 626527 - DNA, 658 bp, Homo sapiens
gcaaacgggtattaccttattttttaacaccttaaaaaaacagtgtcagtatctgtcttagtcagaattctccagaaaaacagaataagtaggaggtctacttgaagagagaaagggagattgagagagatttattttaaggaattggctcatgtgattgtgggtgttggcagggaggtgaggcaggctggagacccaggtaagagtattgttacagtcttgagacaaaatttcttctttggggcatgaggaggtaggggagagaacagggctccgtcttctcttctctcttaaaagggctttacctgattatatgaggcccacttgcattatggaatataatctacttttctcaaagtcaacttgttgaaatgttaattaatcccatctaaaaaaataccttcacagtaycatctatactgatgtttggccaaactgctgggtgtcatatcctagccaagttgacacaataacatatttttttcttgattgttctttgtaattatttttgttcaaatactattggtactctttcagtaactgaagccatattaatatatatctgtagtctacactatttggaactccaaattactcaacccttagtatattcacagtctttcatgggtttaatcttatattttacaatacagagtca

SEQ ID NO: 626528 - DNA, 538 bp, Homo sapiens
cttaagtgatccgcctgcctcatcctcccaaagtgctgggattacaggtgtgagccaccatgctcagcctactgacagcttttaacaattaaatatactcctatgaaaaaaatttggagcatatttgtttctctctacctgatttctccagaatttagaaactatttgtgaacattcttaacttatgacaatattgttatttgcataagtgcaataagaatctgttttcatttgtaaatgaaataggacaccattggggaaactggttatttcaccaaggctttgactggaatggtgtgcattcctgtaaggaatcaaacttgacttacagagccaataaaagtgccttgggaaagctggcctcatactttgtacatagtccctgtagagagttcctgacctgtggtaagtaaggaatgtcactttctgacaggcccaggagccccaagttatcttgggrcatcaagaggagaaaaattcacccaacttacaggtatttgatggtacaaatccatggctgggcttggttttaaaaagt

SEQ ID NO: 626529 - DNA, 576 bp, Homo sapiens
ggatgcttctgcataactgttgctatacaatgagtggagccaggacgaggcaataaaatgccgcaggatgcaggtaatggaagaatgggagttggctgtgtgtatcttgaaacttattcatgtcaaagaatattatatttattggtccacctccctttatgccaagaacagtaccaggttttctgacttcttagtaaattttaattaaatcacagtaagaggaaacaaatttaactgagtgaaagaatctttgtagtttcttctactgtattgtttataaggtacatcattatctcagttaagaaacatgtctctgtgaaccataatgtagtaactaacaatattttagtgttttctaggtgtcaygcacaatattcagcattttatgtagattattttttaatcatctctctgtcaacaatcctatgaagtaagctgttatgatatagatgagaaaattgtggttaacttgcacatagcagaagtgggttgcaaaaatatgcaataaaagctagcaaaagttattttaaattatcctatgaaaatatgtgtttaggatacaagtccactttcagc

SEQ ID NO: 626530 - DNA, 624 bp, Homo sapiens
ttgttctctgtttccaaactcttatatacattttatttataagccatatataaaaccaagaaggaagataaaatgattcacaccttgtgacaaacagggcactctgtactccctatcttgtttgttttgacactgagtattggatgactgtagaattccaaataattgaggacagaagaattgctgtgaagaagactccaaccgagtagacagaagaaatgttaacatgttgcaacataactatccacagtcccaaatttgacagcaatagacaaattcacctggcatgtaacaagacaacatcaggtggctctttttgaggtaagcctccatgcagtcagagagatgaagagactaagccacagaatgtgacgagtcttaagtatgagtgtctagctaagcttctatttrttggcacaaggattatctgaaacacccgaggattttagttcccctttatatatgcatcatgatactgtcaatgacatttagagacaacttatgaacacttgaaagaaagtgcacttaattagtgatttgatagaatcatttttcttgtcatttaattacggttattttatagattgtggaaataatgtagaacattatgaagggtcacaatta

SEQ ID NO: 626531 - DNA, 632 bp, Homo sapiens
atcgataagattgattcagttggaattgtatgtgttatttggcaagaaaacagtaaccacagctcagaatttttaatatacaatacagtgtttaaagtttactcataatcactgaacaaccttttttgggggtgtgtcttttttaagaataaaraagagaagaaagaaaagtaagaaaaataaggaagagaagaaaggagaaaaacttcttgcaatgatatactactgaaaatccaagggcagattttttaacctcttgcacagaagcaagattttattttctgaaagaagaaaaaagacgtgcatgaaaaaaagttacaggcagattaatatttggagaaaataatgcttatttggaaaaaagactttttattcttatgcttcaagttgaggaataatttccctcctcataattagagcttattctttacttatgttcttcatctttaactcagaagacaaattagaaggcaactagaaggggcaatctacaattttgtcaaaaccaactgttcagccatgttctctgtgaatatgttgaccatctgatgatagaatgaacacataatggaggcagcaaaccatgaagcctgttcaaatcctttattttcatttgtgctagtttcctcagc

SEQ ID NO: 626532 - DNA, 591 bp, Homo sapiens
ggcactggctagttcctggtaagcttcttcaaaccacttcagctgagttgccagcatctagctgctagtcactagtttctcaatcccagaaagaagttaatcataaatcccaagagataatgaactctgtgaagggcagatgctagctaaacatatatatacctgattttagatccaaataattggagacagattagcgtgtttgctaggaacactaacattctagtacaaaagagctgggtttaatttcctgctatgcaaggatctcagagaagttgcttaattttgtgtctcagtttcttcatctgaaataatgataccattaggttttatatagaagactgagaaaatgtttgtacaatgttctcaatgctaacaaaaatcaactctcaaaagttataattagatcaactctcaaaagtcagaaatcaacctttcatatcaatatagttatgtcattacttagactatatctgctattattctgtatttaaattttcacaaatcactcgtgatcttcaacctgtacttcaaaacargtatactggattttccacttctctccaactgctacatttaattttgcttgtc

SEQ ID NO: 626533 - DNA, 587 bp, Homo sapiens
catcttttcaaggttctactgtaacctaggttttatatttgtctagggagagaatagtttactatgtactaagtagttctccagaaaaataaaataaaaaaaaactctctgttacactatatgacatgaaatgaatatatgcccaatcactcactcatggttctgggaagaaatagaaaaaaaaaaatgaagaaaacaggacaagaatttccaatattcattcctataatcattctatctaaacattccattaacaagagccaactttggtactcagaatttgagacaaaaaatactttgttataaattgattatttcttgctctttacatttacatttacatatgrtactgagaaatttctgagcttcatggaatttctctgaagaattttagatattacagtaaaatttcaagttgctaaaatgtttgataataaagcaagcttgaattaaaaaggtaacagcctaaaccatttgaaaatttccatttggttcataatgctttattttcaagggtcatatacagtctttttccatgaatatttaaatttcctttattttctaaaatggcctgaataaccaaattt

SEQ ID NO: 626534 - DNA, 550 bp, Homo sapiens
gaattcaagttttgacaattggaattggcgatttccctctggttagggctgatttaaatgctccctccatgggcaggcaccagcagagtttggtccagtttcctttctgctctaacgggatggtactgagttcagtgccacacaattgctgtgttctccctcccccggcacccagagacactctccgcatcatgctgctgctgccaggggtggcattagagattcaaaactgttttactcacctctccagcatgactttcagtgataccaacttaacagcaggtcctatgaggactcacctaatttttggttcatacgaaggtggttttttgtgttagayagttgttaaattggtgtccttggatggggaggggaaactggtattctattccaccatctcgctataccttctatcttttgtttataattcaaggaacacattgttataacttttatgaaatcagtggtcatttatattttccacatatttacatcttctctttgatccttcttgtatttcagacgttccgagatcactgtttttaatgcc

SEQ ID NO: 626535 - DNA, 484 bp, Homo sapiens
aacagcgatgtgagagagcctgaaagtagatcctctttcagttgagccttaaggttactgcagcccaggctgacatgttgattgcagttacatgagagactgtgaaccagaatcacccagctaagctgctcctagattcctgacccacaaaaaccatgagataataaatgtttgttgtcctcagccactaaattttggagtaatattttatgcagcaggagacaattaatacacctggtttggtgcattaatcagggtaatcaggctgggtcatggaaggagtgtttgatatatagsaatgttgtgattgagataataaacttttatttattgaagagtaaaatagtacattaacaaaatcttatctgatagagagataataccagaagtcttcttactgtgattatcagctaagtgactggttgaaatcaggatataaatcactggatagtttttttctggaaagacttagaacacatcaata

SEQ ID NO: 626536 - DNA, 589 bp, Homo sapiens
ttatatattttttgctaccctttgagatgtaaatgttctaccagaattttcttctcagagattttagaaatgcaaacattaagrtagataacttactgtcagtctctgtgggaggataaggacttaattttggtgggcatcttgctccaacttccaccactgcctcctgtgattaagatttgagccaggcgcggtggctcacgcctgtaatcccagcactttgggaggccgaggtcaggagttcaagaccagcctggccaagatggtgaaaccccctctccactaaaaatacaaaaaaaattagctgggcttggtggtacacacctgtaattccagctactcaggaggctgaagcagagaattgcttgaatccgggatgcagaggttgcagtgagccgagattgcaccacggcactccagcctgggtgacagagtgaaactccatctcacacacacaaaaaaagttttgagaagtttttttcttttccagttaagtgccagttagtaaacccagatggtccactcacacacaccaacccactttaacatccttcagcaccttaccattagcatactctagatgttaaaa

SEQ ID NO: 626537 - DNA, 589 bp, Homo sapiens
ttatatattttttgctaccctttgagatgtaaatgttctaccagaattttcttctcagagattttagaaatgcaaacattaaggtagataacttactgtcagtctctgtgggaggataaggacttaattttggtgggcatcttgctccaacttccaccactgcctcctgtgattaagatttgagccaggcgcggtggctcacgcctgtaatcccagcactttgggaggccgaggtcaggagttcaagaccagcctggccaagatggtgaaaccccctctccactaaaaatacaaaaaaaattagctgggcttggtggtacacacctgtaattccagctactcaggaggctgaagcagagaattgcttgaatccgggatgcagaggttgcagtgagcygagattgcaccacggcactccagcctgggtgacagagtgaaactccatctcacacacacaaaaaaagttttgagaagtttttttcttttccagttaagtgccagttagtaaacccagatggtccactcacacacaccaacccactttaacatccttcagcaccttaccattagcatactctagatgttaaaa

SEQ ID NO: 626538 - DNA, 589 bp, Homo sapiens
ttatatattttttgctaccctttgagatgtaaatgttctaccagaattttcttctcagagattttagaaatgcaaacattaaggtagataacttactgtcagtctctgtgggaggataaggacttaattttggtgggcatcttgctccaacttccaccactgcctcctgtgattaagatttgagccaggcgcggtggctcacgcctgtaatcccagcactttgggaggccgaggtcaggagttcaagaccagcctggccaagatggtgaaaccccctctccactaaaaatacaaaaaaaattagctgggcttggtggtacacacctgtaattccagctactcaggaggctgaagcagagaattgcttgaatccgggatgcagaggttgcagtgagccgagattgcaccacggcactccagcctgggtgacagagtgaaactccatctcacacacacaaaaaaagttttgagaagtttttttcttttccagttaagtgccarttagtaaacccagatggtccactcacacacaccaacccactttaacatccttcagcaccttaccattagcatactctagatgttaaaa

SEQ ID NO: 626539 - DNA, 574 bp, Homo sapiens
cgggctacatttttttttcttatacatacatacctataataaagtttaatttataagttaagcatagtaagagattaatcacaactaataataaaaatagaacaacatgctagcatcactactcctgtactttgggccatttttaagtaaataagggttacttgaacataaacattgtgataccatgacagtggatctgaaaaccaagatggcgcctaagtgactaacaggtggggatatgctagagaaagggatgattcacaycctggtggggcaaaaaaggacagctcaagatttcatcatgctacccagaatggcacacaatttcatacttgtgaattggtaatttctgcaattttccatgtaatatttttgaaccatggttgaccatgggtaactgaaactacagaaggtaaaactgaataagcagggtctactgtagttttctattactttaattttccatgtaacttgattgtacatttaacatttttgatctgtttttgtaatgctaatttagtaacagtcatttcatttctaaatatgtctttaaactagtctttattaactgaat

SEQ ID NO: 626540 - DNA, 553 bp, Homo sapiens
ggaaaaggagcaattaaagcaagggctatccttaggcactgaggcagacattctctcctgccaaacacacagaggaaagcaagtagaggaagagacacttgttttactgctctttccaggcacccctcaagataccactcagatacaatctctttcatacaaattttccccccaattacaattactctctgtttcctctatccttccacttcatttctatctctattatagaacttattctgtaactttgtaccaacttctccactgcatactccccactttcagtattaagacaataagttgttgtctttataacttaccttctgttcatatacaaagagcaggatggccaaggtcacctcagcaaggaggataatcagcagcaggatgaagaactgggacaaagcagatacattctcacagcactgatccccattctcgtcccactcccactcagctctgggagcatccaggggcatttgcacragtacagggtgttcctgttctgcttcctcagtgcctgttgtaagccttcttttgttttgtgaaaaat

SEQ ID NO: 626541 - DNA, 563 bp, Homo sapiens
taaaaaccccacaaaagttggctcttttagaagactgataaaattgataaacttatacacaggtaatcaattttaaaatagagaacaaagattatcaatattaggattgagagaacaacactacaaattctatagatatcaaaaatataagtcaatataataaatgacttcatgccaatacaacttagatgaaatagatgaattcactgaaaggcacaaattaccaartctcactcaaaaaatagataacctgaataatcctatctctaataagaaactgaatttggagtttaaaagtcttcccataaagaaaactgctagtccagatgtcttattgatgatttctactaaacatgtaaggcagaaataatactgattctatatcaagtcttccagaaaatagaaaaggagggtacactctctaccttatcctgtgaggccagacttttcagatactaaaagcagaaagatattacaagaaataaaaccacgggccaatgttcctcagaacaagatgtgaaaattataaacaagattttagtaaaaagcatctaacgatatag

SEQ ID NO: 626542 - DNA, 586 bp, Homo sapiens
taacaacttaactttgattgcatttaaaaattccagttttactctcacacattttatgtttttgatgttaccacttayatattttatattgtacatcccttaaaaattattgcagctatagttatttttaagagttttgtcttttaacatcggcatatagatgtaagcgatttatacacaaccaatacagtattagagtattatgaatttgactgcatatttgactgtagttttgagtccttcatttacttatgttttatgttattgcttagcatcctttgtttcaattccaataactcccttaagcatttttttttgtaagacaaatctagtggtaatgaactctctctgcttttgtttgtctgtgaatgtgtttatctctcctttatttctaaaagacatcttttctgggtttagtactattggttggcaggttgttttttttttccccttcagcactttgaatatatcatcccactccttcctggcttgcaaagtttctggtgggaaatcttcactagccttatggatttcccttctatataatgattacctttttctcttgctgctttcagaattctcattg

SEQ ID NO: 626543 - DNA, 585 bp, Homo sapiens
atttacatatgttctggttaatctaaccttaaacaaagaaaaaggaaagatcccttctttgattccatttattcctgtagcttcctgccagtcgttctcttccccttgacagtcaaagtttaaaaagagtggtctacttgcttcatacccactcctcrgcaacttctttcccctaccacactgctcttattaaagccatcagtgatcttcacagcactgttttcagtgtacatttttaatccttatcctatttgggcatgctcagaaacttttagtataattggcccaattttcttaaaatcctctgttcctttggcttaacattgcatcagaagcaatggttttcttcctacgactctaagaataatggaaggccactgcaatgttttaagcagggaaagatcagttttagtgtgctgagtaaattgaaaggtagaagatatgattggagaaaaaaatcagtcatgaagctattgtagtattctaagccagagatgatgtttgcttggagtagagtggtaacagttgatttggagagaattgaacagatgaaaggaaatttaggagacaatatcaacaggattt

SEQ ID NO: 626544 - DNA, 461 bp, Homo sapiens
ggtgataaaagtgaaattccatctcaaamaacaaacaaaaacaaaaacaaaaaaaggaagaaaaaaaataaaaatactaatacgaagaattgtatgatttttggttcaatatgttttacttcttttttatgtcttacatgtatgaaatatttgtgtatagatttgtaggttctcaaggagcagttattttgtcttcccagtttatatcatattgtaaacataatacacaaataacctaaaaaagtaaaaatgtgtccagctaaaagatctaaaagcaaattttaaaaacaaaatataaaccaatataaaccgaatgagtttatatacattaaattctcctcctgtatatttcgggcaaaggaatggaaaaagccaaagctatgacttcaacaaattattctcaaaaaacgtcattacattgcttaaaaacttcgctgatcatgcatcctgttcacacacaa

SEQ ID NO: 626545 - DNA, 634 bp, Homo sapiens
aggttcctcccaaaagtaaaaattgagctaccatatgatccagcaatctctctgctggatatatactaaaaagaaaggaaatcagtacattgcagagatattttctctgtcatgtttgttgcagcactactcacaatagctaagatttggaagcaactgaggtgtccctcaacagatgaatgaataatgaaaacatggtggagtactattcagccataaacaagaatgaattccagtcatttccaccaacatggatggaactggagatcattatgttaagtgaaataagccaggcacagaaacacaaacatcacatgttctcatttatttgtgggatctaaacattaaaacaattgagttatgaatgtagagagtagaaggatagttaccagaggccatgaagggtagtgaagatttggagggggaggaggtggggatarttaattgatataaaaaatttagttagaaataatgaataagacctactatttgctagcacaacagggtgactatagtcactaataacttcatcatgcattttgaaataactgaaagagcataattggattgtttataacacaaaggataaatgcttgagggaatgggtacaccgttcttcattccaccacacccc

SEQ ID NO: 626546 - DNA, 559 bp, Homo sapiens
acttccagtactgatgatttatggcattaacaaagctgtgatcctggtagagagagacagagaccccgccccatcctgttcccagartggggtgtcctacctgaatcaccgattaggaaacaaattctctgcacatctttgctattgaaacgcctactctgcaagagccagggtttggagatgagcatgccaaataccgatttttctagagacctgcaacttgcctaaccccatgcctaatcccagggagatttggggcaaggggcagtgatggtggggtggcggcacttggatgggttaaaacaaacacagcaaaaataaacacataaaagtcagaagaaacaaagctgtctccctccctctgtatgaatttgggtcacacgcatcacacccagatggcccgtggcttccatttctaagagttcagagagaattgctttcccaaaccccatggtgatgcagaaaaacggccctctggactcccacagtggtgaattggaaacgtctttgcactttgcacagcgtcacagggttttggccaagggaatacctgctagcc

SEQ ID NO: 626547 - DNA, 480 bp, Homo sapiens
tcaatggattgaaacacatctacataattccaaatcaaatattcctgatgatacttttaaaaactcattggtcactttgggaagttgcttgttactgtgaatattgatacataaagggaaagaatccatcatttattctgcctttcctgaacaaactgtgttttacggtaaacatataattggccaggcgcagtgactcacgcctgtaatctcaaccctttgataggcctaggctggaggatgcttgagctcaggagtttgagatcagtctgggcaacatggagaaaccscgtctctacaacaagtttaaaaattagctgagtgtagtggtgtgtgcctgtggtcccagctacttgggaggctgagatggagggatcacttgagctcaggaggttgaggctgcagtgagccatgataacaccactacactccagcctgggcaacagagtgagaccctgtctcaaaaataataataataat

SEQ ID NO: 626548 - DNA, 562 bp, Homo sapiens
tggcacaatgactgacactttgtaggcaacagtcaagtggctttggaggcttccaatgccaggagtcgggggcgggcagctaaagtcgccgagccctgtttcccgccatccaggggcactaagcctccccgcagagtagctgcgcggacagggggtctgacgaccgcacgtggcccgctcagcactgccgcggccaagggcgcgactcaccygccagtgtctttcccgaggacacgcgaatcctggggggctcactccggcaaagaggacgagacactgcaccaaggacagggcctgacctctctggccgccttccccggggcctcagtttcccccgatggtgagagtggagccgaccatgcgccctgctgtggactcacccggcgccctggcgtcgagtggcggcggagacctgacagacagcgtgggaaaaatcaagatgtctgcagatttcgagagatggggtgcggtggcgtgcgatggcgaaggacggcgagggacggcgaaggactgaggccacacgacaaggaagctacgctcgtttcgcgccggcggaaataca

SEQ ID NO: 626549 - DNA, 530 bp, Homo sapiens
ggattctgtgtgctggtattgtttcttgttttatgttcatttatttattattcattggctgtaaccaatgtggccggcagtgccagtttacagcacagatacaatcatctctttttatttctataattaatctctggaatccccacagcctccattaacagaaagtctcattgttccaaatgtccttgkgattttcttagtccaaattcctaatgtcacacagagagggtctggagagtgggtcagtccactatgctgttgttctttccactaccacatggtgtggctgttgacccgtcattctgcacagcccattgtcctgtgtagtcacctgtccactaggactgttgctcccgtcactaccacacggtgtcgctgttgaaaagctagcctgcacagcccaccttccctgccccacacttgggctccccgtttcatccatgttctcctgcccagccattgtccccaaaagcagaacaatgggccaggtgacagagtccattggggttttctgcttcagtcacatcttt

SEQ ID NO: 626550 - DNA, 600 bp, Homo sapiens
atatgctgacacggaaagatccacaagacatratttttaaaagcacgtttcagaaaaacagagaatcaattttttaacagaaaatcttattttgaaattagaactctgattttcatatacaaaattgacgtaaaggggtctgaaaagatacccacgaataactacttgatagcagtatcatctttagactgaagccagaaggatccctgccttgggctttgattttggaggaacccactcaagttccctccagatgcaccgtatcccacagggaatatgccagagggacatgcccgtctacagccaccaccctcctcccagaacaggcctcatgtgcctggaaccctagaattcctttccagggcctgtgaggggctcacctcattatgtcctcttgggaatggagtgcaccactgtcgtgaccactgctaggcccaaccggtaactaatgggtggctgtttgaggagggtgtggaggaatttgaatgtgcaggttggagtctccatacacatgtgcataaggaggccatcatggtgtagacagagctgggcgtgggaaggaaagggaggccttattgccacatcctggcaaggaactgg

SEQ ID NO: 626551 - DNA, 557 bp, Homo sapiens
atggtgtggctgttgacccgtcattctgcacagcccattgtcctgtgtagtcacctgtccactaggactgttgctcccgtcactaccacacggtgtcgctgttgaaaagctagcctgcacagcccaccttccctgccccacacttgggctccccgtttcatccatgttctcctgcccagccattgtccccaaaagcagaacaatgggccaggtgacagagtccattggggttttctgcttcagtcacatctttgggtgcaattagcacttccccatgactctcccagctctagtgtggaagccagatcaccaacccagactgtctttggaattctggggagtttccttgkgggctttgggccatttcctgccatgggacatcagagggggctatctcagcccatgagatggggttttatggattgtacttcagattgattgaggagtcctggaaggcctttctacactgctgacatgtgctctgagaccataaggatgagcaacaacacactggaggagttcgatgcagacggtggagtgggggaccacatgaccag

SEQ ID NO: 626552 - DNA, 625 bp, Homo sapiens
tcgtgggaccgtccacacccggctcctccacttccacgaggagacggagtgtcaacacccgagagagggaacctgagaggagcttgaagcagaggatgggcccagaagtcgccggcgtccgcaccgaggtcgtacctcgatatactcttcctcgtccaggacccgctgcttgctcgtcgcagccccagcctctcccgcctcgcgcttcctcgggggcctggacgcggcgggaagcaacaaggacgacgctgatgcgcccggcgtctccatcgctatcccaggaaaaagctcgggcccagcaggcgcgtcacagggtggagggggcgggactgcaccatttgcgcaggcgcctccaatagttggccaatggaaaagctgtggctctagaaagccagcccgcgctccgttctgacgtcactataaatgctagactttattggaratgtagtccttgtcctgccccgcgctattcatgcttgtcaatgctgtgaacacgagggggtgctgtggaggtggcggggaggatgctatagggcgtgttcttcacgcgagaaattctggctttgcagcgtccaaaggccttagaattctaatttcccacaaataagaactatgtatgcttcga

SEQ ID NO: 626553 - DNA, 625 bp, Homo sapiens
tcgtgggaccgtccacacccggctcctccacttccacgaggagacggagtgtcaacacccgagagagggaacctgagaggagcttgaagcagaggatgggcccagaagtcgccggcgtccgcaccgaggtcgtacctcgatatactcttcctcgtccaggacccgctgcttgctcgtcgcagccccagcctctcccgcctcgcgcttcctcgggggcctggacgcggcgggaagcaacaaggacgacgctgatgcgcccggcgtctccatcgctatcccaggaaaaagctcgggcccagcaggcgcgtcacagggtggagggggcgggactgcaccatttgcgcaggcgcctccaatagttggccaatggaaaagctgtggctctagaaagccagcccgcgctccgttctgacgtcactataaatgctagactttattggaaatgtagtccttgtcctgccccgcgctattcatgcttgtcaatgctgtgaacacgwgggggtgctgtggaggtggcggggaggatgctatagggcgtgttcttcacgcgagaaattctggctttgcagcgtccaaaggccttagaattctaatttcccacaaataagaactatgtatgcttcga

SEQ ID NO: 626554 - DNA, 625 bp, Homo sapiens
tcgtgggaccgtccacacccggctcctccacttccacgaggagacggagtgtcaacacccgagagagggaacctgagaggagcttgaagcagaggatgggcccagaagtcgccggcgtccgcaccgaggtcgtacctcgatatactcttcctcgtccaggacccgctgcttgctcgtcgcagccccagcctctcccgcctcgcgcttcctcgggggcctggacgcggcgggaagcaacaaggacgacgctgatgcgcccggcgtctccatcgctatcccaggaaaaagctcgggcccagcaggcgcgtcacagggtggagggggcgggactgcaccatttgcgcaggcgcctccaatagttggccaatggaaaagctgtggctctagaaagccagcccgcgctccgttctgacgtcactataaatgctagactttattggaaatgtagtccttgtcctgccccgcgctattcatgcttgtcaatgctgtgaacacgaggggrtgctgtggaggtggcggggaggatgctatagggcgtgttcttcacgcgagaaattctggctttgcagcgtccaaaggccttagaattctaatttcccacaaataagaactatgtatgcttcga

SEQ ID NO: 626555 - DNA, 541 bp, Homo sapiens
ctgcctcaaaaaccaaaaccaaaaaaaaaacctgttttgatttgaaaccatgtttattaaataatattgagagtggtatttactgtaacctcagtatttataacaagcccctctttcattacactaattggtaaggaagcatctcaattttgaacggttttattattktcctaggtttttttttttttttttaaaagatggagtcttgctgtgtcacctaggctggagtgcagtggtgcgacctcggctcactgtaacctctgcctcccgggttcaagcgattctcctgcctcagcctccccagtagctgggactacaggtgcgtgccaccacgcccagataatttttgtatttttagtggagatggggtttcgccatgatggccaggctggtcttgaactcctgacctcaggtgatccacccgcctccatctctgaaagtgctgggattataggcatgagccatcatgctcagccaataaatagatattttaaaaataattatttttcatttctgacagtcctgagccttcgttgatgta

SEQ ID NO: 626556 - DNA, 541 bp, Homo sapiens
ctgcctcaaaaaccaaaaccaaaaaaaaaacctgttttgatttgaaaccatgtttattaaataatattgagagtggtatttactgtaacctcagtatttataacaagcccctctttcattacactaattggtaaggaagcatctcaattttgaacggttttattattgtcctaggtttttttttttttttttaaaagatggagtcttgctgtgtcacctaggctggagtgcagtggtgcgacctcggctcactgtaacctctgcctcccgggttcaagcgattctcctgcctcagcctccccagtagctgggactacaggtgcgtgccaccacgcccagataatttttgtatttttagtggagatggggtttcgccatgatggccaggctggtcttgaactcctgacctcaggtgatccacccgcctscatctctgaaagtgctgggattataggcatgagccatcatgctcagccaataaatagatattttaaaaataattatttttcatttctgacagtcctgagccttcgttgatgta

SEQ ID NO: 626557 - DNA, 584 bp, Homo sapiens
tttaaaaggaaaaaaatgtgtataactgaatataaaacatactacttaacagaaaaaatagatctaaaatgcttagaacccacaaaaaagttaaatgaaattttagcttaatgctgttgcatatttctgctttataattgcagcatgagatgtgatgtctttttataggaagtaggtttactcatattaacctcattttacagatagagaaacagagcttgggagactaagtgacttagccaaagtcacacagcttttaaagtcatggagtgggtatttgaaacctgggcagcatagagttcatgctgtgatatygcacagcttcaagagaagtctctggctgtttttccatctactccttgtctttctccttctgccttttcttttttttttttaatttaattttattttactttaagttccaggatgcatgtgcagaacatgcaggtttgttacataggcatacatgtgccatggtggtttgctgcacctaacaacctgtcatctaggttttaagccccgcatgcattaggtatttgtcctaatgctctcctcccgccttttcaatgtgaaccttcccaccc

SEQ ID NO: 626558 - DNA, 494 bp, Homo sapiens
ctggggttttctttgtgggaagattttaaatttcaaattcaacttccttacttgctgtgaatctgttcagattttctgttttctwgtgtcagttttggtaatttgtgtctttctaggaatgtatccaggttatctaagtcttctagtatgttgacataaaattgttcataatattcgcttcttttaatttctttggggttggcagtggtgccctctttcattcttaattttgataatttgtgtcttctgtttttttcttgatcattaactaaggtttgggtcaggcctggtggctcatatctgtaatcccagcactttgggagtctgaagtgacaggatcacttgggaccagaagttcaagaccagccctgggcaacatagggagactccatctctacaaattaaaaaacaaaaacaaaaaactagccagtgtggtagtacgtgtctgtggttccagctactcagaagtctgaggctggaggatcatcctaagc

SEQ ID NO: 626559 - DNA, 494 bp, Homo sapiens
ctggggttttctttgtgggaagattttaaatttcaaattcaacttccttacttgctgtgaatctgttcagattttctgttttctagtgtcagttttggtaatttgtgtctttctaggaatgtatccaggttatctaagtcttctagtatgttgacataaaattgttcataatattcgcttcttttaatttctttggggttggcagtggtgccctctttcattcttaattttgataatttgtgtcttctgtttttttcttgatcattaactaaggtttgggtcaggcctggtggctcatayctgtaatcccagcactttgggagtctgaagtgacaggatcacttgggaccagaagttcaagaccagccctgggcaacatagggagactccatctctacaaattaaaaaacaaaaacaaaaaactagccagtgtggtagtacgtgtctgtggttccagctactcagaagtctgaggctggaggatcatcctaagc

SEQ ID NO: 626560 - DNA, 448 bp, Homo sapiens
ctttgtacccccacacacagcacagtgcctgacatggagtagggccttgatgagcatttgtggaatgaacaaatgaggaagcctgacaaggtaagggggccacccaaatgcgtaagacttggcccctgcaaggacacttcatccatctcagtggacacyagccactgagaattaacactcccacatgcaaggaagaatgcgtgatacccaacccaagttttttcctgcctctcaggtccaccctcagaattggtgggcacaatttaaaacatcggtaactcttatttagtgcacatatgcattgttcctgcttcagagtttgctggaggcaaacacacacacacacacaccccaggcataaaataatttaagcagaaggcccaaataatcacccctctcttttaccacctcctctctaaagaatttcagtggaaattagggttgtgtg

SEQ ID NO: 626561 - DNA, 608 bp, Homo sapiens
aaattagaataatcccagacgcaaatttataagagattagaaaagtaagagtcttggtcaaaatggaaccaagcaatcaacatccactccagaaatgtgtatggaccattttttttttctttctttttttttttttcataagagacagggtcttgctccattacccaggctgaaatgtggtagcatgatcacagctcactgcagccacgaactcctagactcaagtgattctcttgcctaagccccctgagtagctgagattataaggtatgtgccaccgtgccctgactatatggacctttttttttggtaccatgcattgagaggtgtcaaagagccactgctgagtgaaaaccagataatccatacacttctggatcccattatggagttcagacatgactggggaaagcagccttatataaaacactaatacttattaatttgtgataagaggagatgcctaaggtattaaaagcacaaatactaaaagggattaacctacgcttaaggactgccaarttttgttattgttcagacacactcagagtcaattctaggacacatttttctgggtattagggcacattctgggtgcagaatatttt

SEQ ID NO: 626562 - DNA, 485 bp, Homo sapiens
aaaaatgaaaaaatcccaagaactgtcctgagttcttggagggtagagggtggaggggcagaagggagagttgtgtattcttcagaaactgcagggaaggaagaaaaagaaattaatggtatgaaattgttggcgaaccagggacactgaaggtagagactcagcagcctgtttgcttttgtttcttaaataaatcacattggatgtggggctctgttactcttgaggatgtgatacagattcttggttgtgggaaaactcaaattaatcataaaacaggtcttggatattgaggagagattaatcatctagaaataaaccaaggatggattatttcatctctttgggttgtgctcaaatatgcatccaatcctactggmtattggagccatatggaaccctttttggtacacctgctaatggagacttcccaaaagggatgctctgaagtcacagtctgcactcatgatattcagaaagaattc

SEQ ID NO: 626563 - DNA, 592 bp, Homo sapiens
gccgtttgcaaataggttaagaaagcaggcacagaatcagagtccacgagtgcaaatcaaggctccatcttttactctctgtgggatctcaagcaagttaactaatctcagtgagtctccaggattaatgataacatgcatccagtggtggtttggggtcaaatcttagccactgaatcaccaccaacagccagtattcagcagtggcctcagcccagcccctggcactgagtacttgcttattcacttggcaaaaagtggattccttccattcccccttcactgctgctgcagacagatccccattatcatgataggaccaggttagtgtgtagaggagaagtaataayaataaataagtgatatggtttggctgtgtccccacccaaatctcctcttgaattgtagctcccataattcccatgtgttgtgggagggactttgtcagagacaattgaatcatgggggcagtttcccccatactcttgtcgtagtagtgaataggtctcacaagatcagatgtttttataaggggtttcctctttcacttggctctcattctttcttgccggctgccatgtaagacatgcct

SEQ ID NO: 626564 - DNA, 620 bp, Homo sapiens
tgaccagaagcacgggtttttagcacactctctgaatttctgaagtacactataatggagtgctttctctacattaagtataaatgttgcattggcatcaacagtgcctcatttccttttggacaggaagtcgtgatacttttgcatcttcaaaaatctaaggtaagggaataaatggatctaccaagaaatagtatggctttgcatataaaatacaatcatattgcaaattttaatgagcaaaatcagaatataaatgaaggatttaagtagtaggtaaatcttacaaattatttaagctatattttcagcaaagcaacttgaatctgtagctttgctggaagctcagcaggcaacccacatccagtgaaaaccgggagcggcatacaaacctagagaagtggctgatgactacacaatccctttcaagggactgtgttttataatgctcagcatagatgtacttctttcaccaatgttgccgttatagaactatctcctgcactactatccaggctttacawaaactcacttcttaagtaaatgaatttgaacagtgtattttctatcacaactgacattggcaatctagcgataatagctacaaaattaccaaattg

SEQ ID NO: 626565 - DNA, 544 bp, Homo sapiens
aattcttcaaaaaaatatgaatttagttattcatttgcacggggtaaatttttcaatttagyggaacaaaggcaactacaacttggcatttaaaaacttgggagagttgacaacagcaggacggagggccaacgctgagatcctcaattccattcaaatcacataatcagttaatgccaatttgttgctagtgctttaaagtcagaaacaaacagggcccttaaaggatttccctccatagtacccaacaaaattactcattgcaatttcctgtatgataattttttaaaatgtctgtctaactccagtagactataaattccatgagagcagaattgtgtacattctgttcacttttgagttcccagagttgaatccagtgcttcatatatagtaagttcccaacaaaaacttactaaatgaatcaaattaagccccagtgctggacctcaagaagctctctgttcagtaggaaacaggtaagaaaacaaaaggatttcagcaataggtgatgagtcccagagcagaactatgcccaggatac

SEQ ID NO: 626566 - DNA, 318 bp, Homo sapiens
aatatgaaagaagtagatatggcgaaaaaaggatcaccgaccctggctatacggttaaaaccgatagaaatgtgaggcttcagaatatatttttgcagacctattaatttggaaagctatttacaagcctcaagtcaggcctacaagcaatgtcttatttacctccctaaggaaggtcacattttggggtcctataagtaaaaataacattgrtagctacatttaagggagaattggaaaactcaaaggcatggtgtgattcattggttggacgattgcacagatgcctaactgtaaatgcacacacataaagaattc

SEQ ID NO: 626567 - DNA, 665 bp, Homo sapiens
tctggtcttgtcaatcttttctccccttgctaactctcccttctcaaacaaaactaattsactctcacagctccaactgtacagatgatccccagagtattatcttttttttttttttttgaggtagagtcttactctgtcatcctggctgcagtgcagtggcacaatcttggctcactgcaacctttgcctccagggttcaaatggttctcctgcctcagcctcccaagtagctgggattacacgcacacgccaccatgctatttttttttgtattttagtagatacagggtttcaccatgttgcccaggctggtatcgaactcctgacctcaagtgacccacccgccttagcctcccaaagtgctgggattacaggcatgggccatcgtgcctggcctccagagcattatctttacctctcatctctgctaagctcatagacttgtgtcttcagcacctgagagactacttccacttggtcacacttttcctttcccctcttttgcttttccatcagaatttacctctccactctctctaagcccgagttctcttaggaataccatgattcttccggatacaaaaatgcaaaactctgaaactgcacatcagggtcttgtttataactctttctttaatgacttcccatcactctctgaattg

SEQ ID NO: 626568 - DNA, 651 bp, Homo sapiens
acagcccaaactccttcccatggtccccagtcccagcagaacctggctcccaccgatggtggctgacttgtcccagtgtgccgtggactctcccagtttaaaaactgaaaatccatcaccccaagaactccctcagtctcctagcagcctgggctggtgatcaccctactccttcctccaccttcattctcatatcttatcacgctctgccttgtttagttctcacctgtcctgctgccttctgtttctagaacatactatccaaactcattttcatctagggcttttgcacttgcttctcccctctctgtgtttgccaaggttagtatcagaaactaacctccctgatttgtcgctccttttatagcttggcatgcagtgctttcataatctgacttcaaatccccttcgtgtccctattttcctactaccattccagtagagtcacttatgtgctcaaaaacagtaagcattttaatgatgaaaatatctgttgaatraaaaacccaagatatttcttaatcccattgcacaggctattaaaatggtaaaaagaaagatcctttgcacagagcagtccatgagcttcacagcaaagaaggcaataatgaaaaagtctgagactacctgtctcttttttatttatttgca

SEQ ID NO: 626569 - DNA, 651 bp, Homo sapiens
acagcccaaactccttcccatggtccccagtcccagcagaacctggctcccaccgatggtggctgacttgtcccagtgtgccgtggactctcccagtttaaaaactgaaaatccatcaccccaagaactccctcagtctcctagcagcctgggctggtgatcaccctactccttcctccaccttcattctcatatcttatcacgctctgccttgtttagttctcacctgtcctgctgccttctgtttctagaacatactatccaaactcattttcatctagggcttttgcacttgcttctcccctctctgtgtttgccaaggttagtatcagaaactaacctccctgatttgtcgctccttttatagcttggcatgcagtgctttcataatctgacttcaaatccccttcgtgtccctattttcctactaccattccagtagagtcacttatgtgctcaaaaacagtaagcattttaatgatgaaaatatctgttgaatgaaaaacccaagatmtttcttaatcccattgcacaggctattaaaatggtaaaaagaaagatcctttgcacagagcagtccatgagcttcacagcaaagaaggcaataatgaaaaagtctgagactacctgtctcttttttatttatttgca

SEQ ID NO: 626570 - DNA, 651 bp, Homo sapiens
acagcccaaactccttcccatggtccccagtcccagcagaacctggctcccaccgatggtggctgacttgtcccagtgtgccgtggactctcccagtttaaaaactgaaaatccatcaccccaagaactccctcagtctcctagcagcctgggctggtgatcaccctactccttcctccaccttcattctcatatcttatcacgctctgccttgtttagttctcacctgtcctgctgccttctgtttctagaacatactatccaaactcattttcatctagggcttttgcacttgcttctcccctctctgtgtttgccaaggttagtatcagaaactaacctccctgatttgtcgctccttttatagcttggcatgcagtgctttcataatctgacttcaaatccccttcgtgtccctattttcctactaccattccagtagagtcacttatgtgctcaaaaacagtaagcattttaatgatgaaaatatctgttgaatgaaaaacccaagatatttcttaatcccattgcacaggctattaaaatggtaaaaagaaagatcctttgcacagagcagtccatgagcttcacagcaaagaaggcaataatgaaaaagtctragactacctgtctcttttttatttatttgca

SEQ ID NO: 626571 - DNA, 652 bp, Homo sapiens
attgtgagaagaaagtgaaacatttaacttcttactcaaaggaagaatcctctaacttcacaagggagtggtcaaggagggctccattgagaaggcgacatttgaacagcagtttaaaagatacataagagttcaccaaggatgtcatgaaggtgagagacagttgwatgtacatgtcttttacaatgctagaattgcgaagtcagttttttagtttcttttcactgcagccagactgaagatccttgaaatttgaaattagaaagtgtggaagcacctcacacatcaccaggcatcccaaagtatgtagcaaaatcctgcccccaagaaatcctgaaacaaatctgtataattaatagtgtctacttttagctaatgtatagtataagtaacaaacactgaggtcagtggaaaactataattaaacatgcatgtctcaaagttaaaaatgtacatcaatcaacccaggcctaaaactgaaaatagaccagtttttttttttaacttgacggaatggagttaataaaagatgagaaccactcttttcaactatcaaaacagtgttcctggactgttgaaaagcatccattagctcatcccgtatcatccccttccttttaaaaaataataatttcattgttaaaatgactca

SEQ ID NO: 626572 - DNA, 569 bp, Homo sapiens
tgaccttttgctaggcaggattagggaacacctcctaatgtttccctcaggaaacaagggattttgttaaccygtttccccttaggtttctcttccccagaatactcccatcaacttgtttgtcactcggatttagataatgattctgttttggtagatggtagttttaccgataaagtaaaacctcgatatttttttctttcaggaaggaagataataggataaatcattaattaaaggggctgcatacgggacagatggaattctaaccatgtggacacctcccccaacggtggaggggtaaaaagcaccataaatcactcacggtccagcagtcttcagtagggcccatcttgccccctacaagtaatgataaacaacatatacttccagtgcagcccactgggtattctaaagtaggtgaactatgagataacacatttatccttcttgggaaggtatctcttcatatttcacatggcgcagagaaagcagacccaactgaatgacaactaatgaggattaatgcattattccacagaggattatgggctcttctcgtttgtgca

SEQ ID NO: 626573 - DNA, 591 bp, Homo sapiens
ccttatttcctgaaattagggaaattgggccaattaataaccctgccatggcttctaagtattcaagtgaaaagcagaggcacacatctctcactttaaattaaaggctagaaatgactaagctgagttgggaaggccatgttgaaagctgagacaggctgaaagctaggcctcttgtgccaaccaggtagccaagttgtgaatgccaacaaagagtttttgaataaaataaaaagttctaytctactgaacacacaaatgataggaaagtgaaccagccttattgctgatatggagtacgttttagtggtctggatagaagatcaaaccagccacaacattcccttaagccaaagcctaatccagagcaaggccctaactctcttcaattctgtgaaggctgagggagatgaggaagctgcagaggaaaagttgaaaggtaacagaggttggtttatgaagttcaagaaacactaacacttgtaaacactaacacttgtaaacacttaaatgtggtatatgttgtaactcaccaatattctgaaattacattgtcacaactattaggatggttatacctacttttataat

SEQ ID NO: 626574 - DNA, 557 bp, Homo sapiens
taccatataaatctgatttctgagcaggagggagggcagaagagagaagggctgctccgtgaaatactagttcggcaacagtttacctgccttccaaggctgttaggaggattcatggctctgggtcatttaaagtttgaaaagatccttgtgctctttccaagaaagataaaatcctaagactagccactttgtatgctggaaagtgagaatgctgggtaaagaggggacccgtsagggtcactgtcctggtaaactgaggtgccttaatccttgaagactaaataagtgctaatttttggaaaaatgaagaccgcaggcacatttgtgacctgtatttgaaaacatccaagtcctgagcccctcaagcaccatctgaggaggagttcttatgaaaacacagtttagatgatgaacgttcatattttacaaaccttcactttatttacctgtatatctttcaccaatatagttgttttcatcagcttaccatgggaaaacagagctatgcacaattcaggaacaaaatcgctttcaaccaaatgcagactctgaac

SEQ ID NO: 626575 - DNA, 594 bp, Homo sapiens
ttgggaacgggacaactaaacatatgccaccatctgaaactagaaagtttgtgatgaacttcagtgtccaggccagaggacagaatgatgggaatgctgtgtgagcccatcagaaaggagctcagtgttaagtggctgtgcaagggtttgcagtcaccgttgtgagtgagtctgcatgtggacccaaatgggcagtcaagggtggctgggaggactacmtaattatgtttcaaattcaccatcaggcgactccacttggccactctttcacttgccccatgaaatggatctgagacacaaactacgccttaactaggcagcttccactcttgctgatctcattagtcgcccaattgggcaagacaggttttaattgcatgtcagaagctttatttttctgccccaggcaaacagttaaccacattagtatagcactgacacattagaagttggtcagcaataaaaagtgaaagagccacttttagagacaagtgaggtacctgtcagttttgagcattttctccctagcatctgtagctacctgcaggagaaaattttcaatcgccaccacgacaatgtgacaaggtgtaaata

SEQ ID NO: 626576 - DNA, 570 bp, Homo sapiens
atttaaaagaggagcagagaggccgatagacaggaaacagaatggatcttcctctgtatagtaggactatggaggaaattgttttcctacattcttttcagtactttctaatagtaaactttttaaaaacaattattatgatggaaacactcaataaaagttattgaattggaaataaactggttaaaagtaagtagatgttatatttataactgacgaaggtcattttaaacctgcttccaactctgaaattaactttcttattttctccccctcccccgctttgtaaagaaaacaatcagcagatgtctctgcagttaayagttagaatgtgcaaggtaacagcattagaaagctacatctctgcctctatacccacttttcctggagcatagcccctcctttcccatgcaacacccccactaatgaattcccagagtaccctgtattttaacatctacaaggacaaggaaggcaggattgatggccctgcagtcacgtcctgggctgacactggcagtggaaggtaactcatgcttagcacttgacgtaattttttgatgactgaaa

SEQ ID NO: 626577 - DNA, 602 bp, Homo sapiens
aattttttgatgactgaaacctgatcccatcgaccgatcccctagtggctgatctcatctctttaccatcagagaaactgaagtcgagttaccaggaaagatacaaaagaggaagcgagtgggcaacgtctcagcatagaaaggagtaagcttgtgtttgatcttttgtccaaagaacattcctaattctcacaaaygggatggccgaacccaaaacattgcggcagccagtccttccctccccgccccatccctggccgggccaaattcttctgagctgggtgtccgtgaagttctttagaggaaactacaagtttgttatttttttccttcagttgtgattttgaggcgagtctcttttatttataaaattgagaagaaaagaataatgcaatccacaaaacactcttggaagggttagaaaaataaacatcataaacaatggcaataaaaatgagcctttaatgagtattttgagccaggaactggaggcagatgacaagggttgaggttcagatttgccatatagtcactatgtgactccaaacaagttgcttttcctccctaagcctcactttactaatctgagaagtgataataat

SEQ ID NO: 626578 - DNA, 602 bp, Homo sapiens
aattttttgatgactgaaacctgatcccatcgaccgatcccctagtggctgatctcatctctttaccatcagagaaactgaagtcgagttaccaggaaagatacaaaagaggaagcgagtgggcaacgtctcagcatagaaaggagtaagcttgtgtttgatcttttgtccaaagaacattcctaattctcacaaatgggatggccgaacccaaaacattgcggcagccagtccttccctccccgccccatccctggcygggccaaattcttctgagctgggtgtccgtgaagttctttagaggaaactacaagtttgttatttttttccttcagttgtgattttgaggcgagtctcttttatttataaaattgagaagaaaagaataatgcaatccacaaaacactcttggaagggttagaaaaataaacatcataaacaatggcaataaaaatgagcctttaatgagtattttgagccaggaactggaggcagatgacaagggttgaggttcagatttgccatatagtcactatgtgactccaaacaagttgcttttcctccctaagcctcactttactaatctgagaagtgataataat

SEQ ID NO: 626579 - DNA, 541 bp, Homo sapiens
tgttaaaaaaacatttacttcttaaaaaaattttttttggtcacttaggtcattcccctttcctaacaaaactaaagttttgggggagttgctacttactccccattagatgtagcctgataaagctctttttcaagtcccctgttctagtcccctagccagtatgactgattgctggtaaattggccttgtttgtatrcacacattttgccatgtgactgcgaagctctgtctgttaaaagatagcatttatttttccattgcttaagttgggctggccttttgacttactttgtccaatggaatgcaatagaagtaagcacagtacagttctgagactagatcacaaggacttacaggcttttgctcttacaactctgctaccaccatgggaacaagcctaggttagcctgctggaggatgagagaccttatgagaggagctgaaccatcttatctaaggccacgcaagaccagccagtcatcagctgagtctagccaaaattattgacctgcaggaccacggactaaataagtggtcc

SEQ ID NO: 626580 - DNA, 572 bp, Homo sapiens
tgtgtgtgtgtgtgtgtgtgtttctttgtcaggggagagatggcctggagagaaaaagagtataaatgtcacaaacaggtcatattcccatggcataaagtgtgaacgtcctcttcaagttgttgatttgggttttcggatggggtgggatagcagagtgtagtgggaaaggggtgggaccaacagtgaaagggtcagtacataaagagggagaagatgaccaacaaaaatataaaagcagcaaatatcatataatgtgatcgtaattatgtaaaattatgtaacatgtgagtgcgtaaaaacaccgagttgtccgtgtagctatgtagctgccgaattgttaagagtgtccatgctatatctttaagtgagcaaagcaagttgctgcgtaatacatagaggatgcatctccttcggaagacacagacaagtcaaaatcctgagatacacaaactcccccctttccaaatgcccagcttccttmtttcagatggtaagcagagacaataaaaagtgtcaaatgatgagaaaatttatattgaggtgtgctatgctccaggttaaatgaacac

SEQ ID NO: 626581 - DNA, 545 bp, Homo sapiens
ataggaagcgctggctctctttgtggacatcgctctgccaaatctaatcgatgtttatgtgccaaaagatctagatgcaaggagtatttatgtggatgagcactagtgttgttcaggtttattactgtttaaaatggcttcttcagggtagtaggcacagaggttcctggcctgggggcctatggacatcaagagtcccatgaatctgggaatttcataaatgtgcatttaaaacacaacaaacaaaaacccagagttttatttttaccaacttttaagtgaaatttagcatttctgctattatcaatgtagccactaagtcatgggacttgtgactttagcaccaatacaaatcataaatatctgcatatcacattacagttgttgcagagatattgaaatatcactgaggcttatttctatttcaaaattgttgtaattattaagcccactgatagatttggttatctaatgtgttaataaagaagctcatctacaactgcatcacaattktttttttttaaatattttggtaactgcattcc

SEQ ID NO: 626582 - DNA, 598 bp, Homo sapiens
tagggaagcttagagaatttggaacagaaataaaagaaaatgtatttaatcagaagtgggggttgagagtgggccttcctcatgccctgtcccccaccaattctagatgaaaaagagagtccactttggctgggaggaggagaaactgcacagtgaatggaagccaacatcccagggattcaatatctttggtgtgtctaggtagccgtgataccagaggcagccttgccgaaaaatatccatcctccaagcatggcccagatgccagagagagcatcctgactggtgtgatgaacgtctccccgtaacccaacaggctgtacatccttccagagagctgccccctcttccctccaaacaccttgggctggagtactttctagatccctggctcaacyttagggaaagaggaccccgtaaaagattaaaattgaagccttctgtttgccctgatagaaatagaaattaacttgaagtctagaaaataaaagtggtcttatttgtagatctttcgtttttttgtcctaaaacatactcaactagatgctactgctgatgatgttgatgacaataatgtcatgatggttgttgatgatag

SEQ ID NO: 626583 - DNA, 598 bp, Homo sapiens
tagggaagcttagagaatttggaacagaaataaaagaaaatgtatttaatcagaagtgggggttgagagtgggccttcctcatgccctgtcccccaccaattctagatgaaaaagagagtccactttggctgggaggaggagaaactgcacagtgaatggaagccaacatcccagggattcaatatctttggtgtgtctaggtagccgtgataccagaggcagccttgccgaaaaatatccatcctccaagcatggcccagatgccagagagagcatcctgactggtgtgatgaacgtctccccgtaacccaacaggctgtacatccttccagagagctgccccctcttccctccaaacaccttgggctggagtactttctagatccctggctcaaccttagggaaagaggaccccgtaaaagattaaaattgaagccttctgtttgccctgatagaaatagaaattaacttgaagtctagaaaataaaagtggtcttatttgtagatctttcrtttttttgtcctaaaacatactcaactagatgctactgctgatgatgttgatgacaataatgtcatgatggttgttgatgatag

SEQ ID NO: 626584 - DNA, 612 bp, Homo sapiens
ttagaaatgctgaatattagatttagagactcttggctacatcttccttattatgagaagttattcagtggaaatacacgttagctagaagactgttctgtgaggttttctgtgatgcagaagggaagaaataaagctttacgaagccccaagagctatgccattcaatggaaatataaagtgaaccccatatgtgatttaacattttctagcagccacattaaacaagcaaaattaattttaaaaatgcagtttatttaactcaatatattcaaaatgttgccattttaacatataattgatataaacattgtcagtggaasctttcacattctttttttgcatattacatcttgatagtctatgtgtatttcataaaacatagctccattgggattagtgacatttccagcattcaacagtcatatgtgttcatcgttaccatgctgggcagcatagcgctggactctctccccttgactgcactgagggctctgagcttccatgaacttgacctctcttgctgtagcacttatcatcgtgtcttacaatgtctcatttagttgtgtctcgtccctatttgcttaagtttgatgacaactggcaacaaat

SEQ ID NO: 626585 - DNA, 583 bp, Homo sapiens
cctgtacagcctgtggaacaggctcttttctttataaatcacccagtctcaggtatcgctttaaagcaatgtgagaatggactagtacacccaccaagatgcctttctggtgtggccattctatggctattgtgagtggtggctgctggctgcttacagcttcccccctccagaaaattgtccccagaggctgctagcagtcacccacctgggaggttaaggaacctccctgacacccataactgatgactggctgacattgggatacacaaatccaacccccttacctcaaatgaggacagctccactggagtttatgttccagagccctctgcctgtgcttcagaccaagatcagattttccctgagatcacaccctccctccactcrtctttctcctgccctgtcctgctttcctcactctctcgtaagtttttgttttatttttttttctgagacctctccctctataaatcaccagcacctaaatccctgcctcaggctctgctttcagtggacctcacataagacactaggattttcttcttcttttttgggtcatattttaactcttcttcccacc

SEQ ID NO: 626586 - DNA, 488 bp, Homo sapiens
ggacacaattaccacagaggaaggacaatgtgaagacatagggccgtctgaaaggcaataagagagacctcagaataaaaccaaacctgccatggtttaatttgaacttatagactccagaactataagcaaatatatttctgttgtttaaactacgcagtttatggtactcattatgaaaacaaastaaaacaggttacattcactatctttctctttctaaatatattttataatcaatacctagtttccatatgtgaagtgactcaggttaggctacatggatgatgtaactcacactgtgcccttaccaggcaacttaggtaatgaccagccacaattggctattaaatataaacataaattaattaacattaaatttaattaaaacttgagttacttaatcacactatctccatttcaattgcttaatagtgaaatatggctagtggctattatattggagaggacaaatttatagacatttc

SEQ ID NO: 626587 - DNA, 556 bp, Homo sapiens
ctttgtgaaaattctaaaacttgggaatgaaactgagtcacgcacgtggaccacagaacccaaaacagtgcaytaaaagagtaagagaaattatctcagtttgagcccattgctccacttcattgctccacttctgcgtcaacaatgcaccacacggagagaattcccctaagatcacagtttccatcattagaaaaaagaacccaatatggtacattcagctttcccagcactttggggcacttcttaagaggcccaatactgcttcacttcacagggaacactggtagaaactgtaaaactagactgcctggagtcaggtagaaacaaagaaaggggtggggctcacagggaccagcacatggatcttggtggtagctcagtgttcctggtggcagtagtgtccaatcagagatgcaccaatagcacagcctatccacaaagccactctggtcacacccagaaattcgtgggaagctacattggcttgaatccctaacaaagaagccaccctgcccagccttaaagtccaccccaaagctttgcctaagaagag

SEQ ID NO: 626588 - DNA, 556 bp, Homo sapiens
ctttgtgaaaattctaaaacttgggaatgaaactgagtcacgcacgtggaccacagaacccaaaacagtgcattaaaagagtaagagaaattatctcagtttgagcccattgctccacttcattgctccacttctgcgtcaacaatgcaccacacggagagaattcccctaagatcacagtttccatcattagaaaaaagaacccaatatggtacattcagctttcccagcactttggggcacttcttaagaggcccaatactgcttcacttcacagggaacactggtagaaactgtaaaactagactgcctggagtcaggtagaaacaaagaaaggggtggggctcacagggaccagcacatggatcttggtggtagctcagtgttcctggtggcagtagtgtycaatcagagatgcaccaatagcacagcctatccacaaagccactctggtcacacccagaaattcgtgggaagctacattggcttgaatccctaacaaagaagccaccctgcccagccttaaagtccaccccaaagctttgcctaagaagag

SEQ ID NO: 626589 - DNA, 555 bp, Homo sapiens
ttttccaggatagaccacatgttagaccacaaagcaagtcttaacaattttttaaaaatgtaagttatattatattttctcaccacaatgaaataaaactagaaataaataatagaaggaacattggaaactgtacaaaaacttgaaaattaaatgacaaggtcagaaacaaccttaggtgaatggaaaattaaaaagaaaattaaaaaatttcctgagacaaatgaaaatggaaacacaacatacccaaagctgtgagatatagcaatagcttaaagtcataaattcctacagcaaaaattacaaaaatyttaaataaacaacctaatattatacctcaaggaacaagaaaaataagaacaaactaagcctaaaatcagtagaaggaaagaaataataaagaccagagcagaaacaaacaaaatgtagactaattgaacaatataaaagatcagcaaaacagagttggtttgtgaaaagataaaattgtcaagccataactagcctaagaaaaaatgagagaagactgaaataaataaactcagggaggaaaaa

SEQ ID NO: 626590 - DNA, 618 bp, Homo sapiens
tgtccattatttcacagatatcaatatggaaacattaaataaatactccaaagcaatgattagaaacacwtaagtttaatgatataatcatttgaaaaattgaaaataagactttcaataaattatatatctatgtgtggtatgaaatcaccacagtttttaagaggagattttctttactcttgtaattgatttattgtgtacaacacctattaaatacaaaatatctgtgaaaaggcgattacctatatttctgtctttaaaagtaaagatgaaagtcatatggcattttataatttgaaattaagtaatggcctgaggttatgatataaaatgttagtaaacacaaagatttatttttataataagtatactacatcatcaatactacagtaaagaacaaccaacagataaggcattaccagctttctcctgggctccttgcagaacagctatagtgggacagggtctggctataatccctggttgcaccactaatgccaagcatgttgaatgctgtgttgccttgagataggttagtaaaatgcttcagcacctggaaatccactacaacattcatttggaaagcatacttattgtgcgccagggagctactga

SEQ ID NO: 626591 - DNA, 618 bp, Homo sapiens
tgtccattatttcacagatatcaatatggaaacattaaataaatactccaaagcaatgattagaaacacttaagtttaatgatataatcatttgaaaaattgaaaataagactttcaataaattatatatctatgtgtggtatgaaaycaccacagtttttaagaggagattttctttactcttgtaattgatttattgtgtacaacacctattaaatacaaaatatctgtgaaaaggcgattacctatatttctgtctttaaaagtaaagatgaaagtcatatggcattttataatttgaaattaagtaatggcctgaggttatgatataaaatgttagtaaacacaaagatttatttttataataagtatactacatcatcaatactacagtaaagaacaaccaacagataaggcattaccagctttctcctgggctccttgcagaacagctatagtgggacagggtctggctataatccctggttgcaccactaatgccaagcatgttgaatgctgtgttgccttgagataggttagtaaaatgcttcagcacctggaaatccactacaacattcatttggaaagcatacttattgtgcgccagggagctactga

SEQ ID NO: 626592 - DNA, 556 bp, Homo sapiens
ggttcaccaatctttttggtaggcaagtcacctaatggagtcctgagtccaccattygtatttacctgtgcaaagatttgcatttgaagtaaacttgaaaaagaaggaagcttccatcagaagccatttaattgacagaggttgaagtggaagcctctagcttttagcaatggtagaagttttcagaagtcccggaggtccagtagtggggctgaaggagaggtttttttctatagcagcattagtggtttgtctttaatctatcttgttgaagtatggttgacatgtaaagagctatacatatttaatgtgtacatctctatgagtttgggagtaggtatacatccacgaaactactaccaccatcaaggcaatagacatatccatcacctcccaggtttcttgtcaggctgaatctgcagcagaatttgggacattgtaactgaagcttagttatgagcctggtgcttcatttctcccaacatttctgcagctactcagtatccttttaataagttctttactgttttatcagcacaaatcacctaacttttac

SEQ ID NO: 626593 - DNA, 625 bp, Homo sapiens
agcttagttatgagcctggtgcttcatttctcccaacatttctgcagctactcagtatccttttaataagttctttactgttttatcagcacaaatcacctarcttttactactaagaactaaaaatttacgtgtttgtgtgtgtgtgtgtgtatataatttttacaaatgctatgttcttaatgttataaaatgttctacaggtggaaatgttatttccatgtgtaaacagaacataatttcttatgagtaaactactttttctaagaagtagtctgtctctggaatattagcctaaatttagtcagtagtaattgatgttttgactattctgaatacatgtagatatagctctaagtgctacagccattcatatgagtattcaatattctcttaatgttcaatagtgtttgggtcgccataaaattccaaatttatgacatgaaaagtttaactctgttttgtgaacacttgttaagaataactaaggaccttgtaagatagctgcatattcatgatttttaaaatataacaattggtccatatgccacctcataataatttgcttttgccatattgttaattacatagaaagacaaatctttttttaatcaaagatgtaaaa

SEQ ID NO: 626594 - DNA, 576 bp, Homo sapiens
ttgatgttttgactattctgaatacatgtagatatagctctaagtgctacagccattcatatgagtattcaatattctcttaatgttcaatagtgtttgggtcgccataaaattccaaatttatgacatgaaaagtttaactcygttttgtgaacacttgttaagaataactaaggaccttgtaagatagctgcatattcatgatttttaaaatataacaattggtccatatgccacctcataataatttgcttttgccatattgttaattacatagaaagacaaatctttttttaatcaaagatgtaaaataatttttaaaaatagaaggtatttatagttacagaaccctaaccatacgtcttaaaagacaaattttctcagatgtgccatctaaattttcacccatccctttgttcaaaaatcacctattgagtgactactatgtgccaagcatcactctagtcattaggaatacaacagtgaaccaaagactcaaaatctcttagagagctcatattctaatgagttgaagcagacgacacaaaacaaattttataatagatagcagcactg

SEQ ID NO: 626595 - DNA, 576 bp, Homo sapiens
ttgatgttttgactattctgaatacatgtagatatagctctaagtgctacagccattcatatgagtattcaatattctcttaatgttcaatagtgtttgggtcgccataaaattccaaatttatgacatgaaaagtttaactctgttttgtgaacacttgttaagaataactaaggaccttgtaagatagctgcatattcatgatttttaaaatataacaattggtccatatgccacctcataataatttrcttttgccatattgttaattacatagaaagacaaatctttttttaatcaaagatgtaaaataatttttaaaaatagaaggtatttatagttacagaaccctaaccatacgtcttaaaagacaaattttctcagatgtgccatctaaattttcacccatccctttgttcaaaaatcacctattgagtgactactatgtgccaagcatcactctagtcattaggaatacaacagtgaaccaaagactcaaaatctcttagagagctcatattctaatgagttgaagcagacgacacaaaacaaattttataatagatagcagcactg

SEQ ID NO: 626596 - DNA, 576 bp, Homo sapiens
ttgatgttttgactattctgaatacatgtagatatagctctaagtgctacagccattcatatgagtattcaatattctcttaatgttcaatagtgtttgggtcgccataaaattccaaatttatgacatgaaaagtttaactctgttttgtgaacacttgttaagaataactaaggaccttgtaagatagctgcatattcatgatttttaaaatataacaattggtccatatgccacctcataataatttgyttttgccatattgttaattacatagaaagacaaatctttttttaatcaaagatgtaaaataatttttaaaaatagaaggtatttatagttacagaaccctaaccatacgtcttaaaagacaaattttctcagatgtgccatctaaattttcacccatccctttgttcaaaaatcacctattgagtgactactatgtgccaagcatcactctagtcattaggaatacaacagtgaaccaaagactcaaaatctcttagagagctcatattctaatgagttgaagcagacgacacaaaacaaattttataatagatagcagcactg

SEQ ID NO: 626597 - DNA, 526 bp, Homo sapiens
ctaatgggcttccctgtgaaggtggcctgacccttctctctagctgcctttaactttttttttttttttgtttcaaccttggagaatctgatgattatgtgtcttagggtgatctgcttgtgaatcatcttactggggttctctgcatttcctgaatttgaatgttggcccctgtagctaggttggagttctcatggataatatcctgaaatatgttctccaagttgctwaaactctcccaatctctttcagggacaccagagggccataaatttggtctctttacataatcacatatttcttggaggttttgtttgttcctttttattcttttttctccattctcatctgtcttatttgagaaagccagtcttcaagcttcgaaattctttcctctggttgctctgttctgcttttaatacttgtgattgtattatgaaattcttgtagtgtattgtcatgtatttttcagctctatcaggttggctacatgcttttctatacggtctattttgtctgtcagctc

SEQ ID NO: 626598 - DNA, 641 bp, Homo sapiens
tcacaacgatcttatttgatctctaaaacatgttttaacagaaggaaagcagaaattaatctgttttacaaatgagcaaactgaacttcagggagatttttcactttatgaaggtcaaaagtagtagtgctagttggtcgttgattcttgatatatcatctatatatgctgcaatttatattttcctgctatcttggcattttaggagacagattattttgaggaaagaaacttttctaaaagtgtgaaatgcaagaaaagagatgcttctgtacttgtagaatattcatggttgtgttcctatctacctcaattttcattatatattttccatctgtaatttttatgtgtgcagtttcatagcaacatttattttttgcttttgatctttctcatggaattttgaggtttacacattaattgtgtttttatggaataaatacatatataaatataattcctcaaatattacagaacttaagcttttattcctctaatgttctamtattgatgcctgtgaagtaatatatatttattattcactataattattcattatgaattatttcattaatacttttactctatgacccagttgttgttataatcatgttattatatattttattataaggataata

SEQ ID NO: 626599 - DNA, 569 bp, Homo sapiens
catcattaattttatgtttatctttttgtgtatgtttttgtaagtttaatacatatttctgcatccttacaatgcatagtactgtgttgtatgtttttcacaattatagaaatarcatcctgctgcatatgacattttattcttcattcaactttcctttttccttcaacatttttagactatatcagatttttttgaaggcagttgtatcagtgtataacactacaagttccttttgtttctttttgttactgtcagatttcagttttgtctatttagtagatgttaagtgacaatttattgctttttaaatagatttccctaaatactgctgaaataaacattcatgttctaattgcattgaacttcttcttctgagatgtagctgagaatccactatatgcttgatcattttattattttttccttatttataagtggtctttaatattctgagtaatatgtttttattatagtaatcactgtaaagagtgcactgaaattgtgtttttcatttaattctatttatgggatctcttattatgcagaataatttaatgtttctaaat

SEQ ID NO: 626600 - DNA, 346 bp, Homo sapiens
agatcacatgtgcgtttgaaatccagtagggcagccattcaaccttatatttccaaaatgatcttctttgactctgtgtcactcattcggtcacacaratgcaagaggtgggcccccatggccttgggcatctccacctctgttgctttgcagaacacagcccccctcctagctgctttcatgtgctagtgttgaatgtctgtggcttttccaggctcacagtggaagtcgtcagtggatctaccattctgggatctggagaatggtggtccttctcacagctccactatgcagtgacccacatttcccttctgcatggccctagcagaggttctccatgagggct

SEQ ID NO: 626601 - DNA, 563 bp, Homo sapiens
aagtgcttgagccctgcccatgaaaccatttttccctcctaggtctccaggcctgtgatggctgtgatgggaggggctgccttgaagacttctgaaatgtcctggagacattttccccattgtcttggcaatgaacatttggctccttgttatctatgcaaatttttgtaagtggcttgaatttcttcccagaaaatgggtttttcttatctaatgcattgccaggctgcaaattttccaaactttcatgctctacatcccttttagatatgaattccaaatctaaayaatatctttgagaatgaatgatactgaatgctttcaagagcaccctagttacctcttgaatgctttgctgcttagaaatttcttccaccagataccttaaattatctctctcgagttctaagttccacagatctctagggcaggagcaaaatgctgccaatctctttagtaaagcatagaaagaatcacctttatttcacatcccaacaagtttctcattaccattgggtattacctcagcctagacttcattgtccatatcactgtcaccattt

SEQ ID NO: 626602 - DNA, 623 bp, Homo sapiens
aagtggacctctacagctctggggcttcaagttagctattgattttcagttcaaaaggaaccaacaatttcatttacaacagcaccaaacccagttaggattaaatttaacaaaaaacatgcctagatgagttcacgtaactccataaatacaaaggcttgttggccctaacctttttattggctttcagtaagattacatatgcaaccatccctattccagggagaatgatctccagatcacctaatatcaaaaggagcagatatcaagcacacaacaggtgcttttaatgcctggctcaaccatactcccatgggaaaaagcagtgatacaaattaagcaataaactgaagtttgattaagctatactaaactatcaaggttggcaaatcttccgtcagccactgtggccacataatttacccaaactaataaaaaccagagttaagtgctcttcactgaaaaatagaaaagtgtgctragataaattgaataatatctaattaaaaagagaggcctgccaagtccatgtattggaagaaaaaaattaagatatccgtgctcccaacattgacctataaactcaataccaatgtaataaatccctataatccatttattta

SEQ ID NO: 626603 - DNA, 597 bp, Homo sapiens
actggtgtgcctagagacaacctttccaggactattgggagcagctgcacctccactgacagtgggcccactggcctgggcttgcatgaagggtggggccaataactctccctgcatggagaagcagcattcctgagtagaatacaggcaaaccacagagctgtctgttttgagctgaggaaaggggtcctgcctcaaggccagtttggtggtagccacagggcaggtgttttccatggccctcaatgcattgcagcctaaagataaaagacagtttctatctaaactgaataagtcatgaggcctgggacaggggtgcgataataaagcaaatmatgttcccgcctgcccagaacatgcagctggtacagccccatgcactgagaagggttatttttacaagttcataggcttgtttgggacctaggcatgtctctttccaaagagctggtccagaaatgctgtgacctatctccctaattggacctcctcccaagggagtcccacggcatgaaacacctagcaacaacaacaacaacaacaataacaacaacaacaacaacaataacaacaacaaaattgttggcacagtgctag

SEQ ID NO: 626604 - DNA, 416 bp, Homo sapiens
caaaagcacactaaaacacatagcccacaggcactataaagcaaccacatgatcaatcctacataacatccagctaacaacacgatgacaggatcaaattcacacatgccaatattaactttgaatgtaaatgggctaaacccctcacttaaaagacagagagtggcaggatagaaaaaaagacccaatcatatgttgtgttcaagacacccctctcacatgcaattacacccacaggctcacacgaaaatggtggagtaagatctattattrcaaatagaaaacaaaaaagagcgggagttgctattcttataactaataaagcagactttaagacaataaaattaagaaggacaatgaagggcaccgcataataataaagggtataatccaacaagtcttaactatcctaaata

SEQ ID NO: 626605 - DNA, 759 bp, Homo sapiens
gtaaattagttcaaccattgtggaaaactgtggtgattcctcaaagacctataaatagaactaccatttgacccagcaatcccattacttggtatatacccagaggaatataaataattatatcataaagacacatgcacacatatgttcattgcggcactattcacaatagcaaagatatgaaatcaacctaaatgcccattaatggtagactggataaagaaaatgtggtacttatacaccatggaataccacattgctatgaaaaataagatcatggcctctgcaggaacatgtatggagctggaagccattattctttgcaaactaacagagaaacataaaacaaaatattgcatgttcttacttataagtgggagctaaaagatgagaacacatgaacacatagaagggaacaacagacactggggcctaccaaagggcagaggtttgtgggagggagaggatyggggaaaataacaaatgagtattaggcttaatactgaatgatgaaataatctgtacaacaaaacccccatgacatgagtttactcatatagtaaatgtgcacatgtactcctgaacttaaaatagaagttaaaataaccaactaactaatcaactaaataaataaatatgagtaccagctttaagtcatttctttgacgctgctttgagcataggttgtcagaagcatccaggccacattttgaatgtcttgctgcttagaaatttattcttccagatacctaaatcatc

SEQ ID NO: 626606 - DNA, 759 bp, Homo sapiens
gtaaattagttcaaccattgtggaaaactgtggtgattcctcaaagacctataaatagaactaccatttgacccagcaatcccattacttggtatatacccagaggaatataaataattatatcataaagacacatgcacacatatgttcattgcggcactattcacaatagcaaagatatgaaatcaacctaaatgcccattaatggtagactggataaagaaaatgtggtacttatacaccatggaataccacattgctatgaaaaataagatcatggcctctgcaggaacatgtatggagctggaagccattattctttgcaaactaacagagaaacataaaacaaaatattgcatgttcttacttataagtgggagctaaaagatgagaacacatgaacacatagaagggaacaacagacactggggcctaccaaagggcagaggtttgtgggagggagaggatcggggaaaataacaaatgagtattaggcttaatactgaatgatgaaataatctgtacaacaaaacccccatgacatgagtttactcatatagtaaatgtgcacatgtactcctgaacttaaaatagaagttaaaataaccaactaactaatcaactaaataaataaatatgagtaccagctttaagtcatttctttgaygctgctttgagcataggttgtcagaagcatccaggccacattttgaatgtcttgctgcttagaaatttattcttccagatacctaaatcatc

SEQ ID NO: 626607 - DNA, 513 bp, Homo sapiens
tttcaaactggcactaagatagaaagaccaaaagaaaccctttaggctctttggcagcctaactctacttgctgggaaaagagtctagatagggatttggaagcaattctagtaattcttcattcatgaccttcttatttaccttcttctgtgatttagtaaaagaatctggggtaataggtataaattcaaattctggccatacacttaggacaaaataaaataagtgttcagcaaattgcttttgatttaattaatttcataactgaatacccttattgttttgcaaattttctattagaacaataatttagtagctgttttcttgttgttttrtttttaaaatctgaatcatcttattcaacacacttcacatagtaaagaaaattatccattatataaaggcaatttaatttttcaatactattaaaagatacagtacaaacataggacaaagttaaatgagacatgaccctcaaaaaatatcaagcttaactcaataaaggcaaatat

SEQ ID NO: 626608 - DNA, 513 bp, Homo sapiens
ctagaaaatgggagaaacattttgcaaatcatttatctgataagggatttgtatctagaatagatgaagaactcctataattcaataataaaaagacaacccaattacaaaatgggcaaaagatctgaatagacatttctccaaagaagatatgcaaacagcttacaagcacataaaaagatgttgatcatcattagccaccagggaaatgcaaataaaaccacaatgagatattacttcactcctactagaatggcaggattaaaaaggcagataataacaagcattagcaaggatatgaagaaactggaatctttctacattgaccgtaggaacaataaaatggtgcagccattttagaaagcagtctgacagtttcccaaaagcttamacagagttaccatatgaacctgcaattccactccaagaaaaatgaaaacatatgtacatatgttcacacaaaaacttgtgcctgaatgttcatagcagcatcaatcataatagccaaaaggg

SEQ ID NO: 626609 - DNA, 450 bp, Homo sapiens
ggggtcttgctatgttgcctaggttggaggacagtagctattcacagtgcaatcatactacacagcatacatacaatacacagtatactacaacctcaaactcctgggctcaagcaatcctcatgcctcagcctcccacagatctttttttcttttttttttctgagatggagttcgctcttgttgcccaggctggagtgcaatggcgtgatytcagctccttgcaacctctgcctcctgggttaacacaatcctgcctcagcctctcccaagtagccgggattataggcatgtgccactacacctggataatttggtattttttagtagagacagggtttcaccatgttggtcaggctggtctagaactcctgaccttaggtgatccacctgcgttggcctcccaaagtgttgggattacaggggtaagccacagcacctggcctctcc

SEQ ID NO: 626610 - DNA, 450 bp, Homo sapiens
ggggtcttgctatgttgcctaggttggaggacagtagctattcacagtgcaatcatactacacagcatacatacaatacacagtatactacaacctcaaactcctgggctcaagcaatcctcatgcctcagcctcccacagatctttttttcttttttttttctgagatggagttcgctcttgttgcccaggctggagtgcaatggcgtgatctcagctccttgcaacctctgcctcctgggttaacacaatcctgcctcagcctytcccaagtagccgggattataggcatgtgccactacacctggataatttggtattttttagtagagacagggtttcaccatgttggtcaggctggtctagaactcctgaccttaggtgatccacctgcgttggcctcccaaagtgttgggattacaggggtaagccacagcacctggcctctcc

SEQ ID NO: 626611 - DNA, 466 bp, Homo sapiens
ggggtcttgctatgttgcctaggttggaggacagtagctattcacagtgcaatcatactacacagcatacatacaatacacagtatactacaacctcaaactcctgggctcaagcaatcctcatgcctcagcctcccacagatctttttttcttttttttttctgagatggagttcgctcttgttgcccaggctggagtgcaatggcgtgatctcagctccttgcaacctctgcctcctgggttaacacaatcctgcctcagcctctcccaagtagccsggattataggcatgtgccactacacctggataatttggtattttttagtagagacagggtttcaccatgttggtcaggctggtctagaactcctgaccttaggtgatccacctgcgttggcctcccaaagtgttgggattacaggggtaagccacagcacctggcctctcccaccaatcttgaattc

SEQ ID NO: 626612 - DNA, 606 bp, Homo sapiens
tgttctgtactaagaaaacttcttctgccgtgggatcctgttgatctgtgaccttacccccaaccctgtgctctctgaaacaagtgctgtgtccactcagggttaaatggattaagggcggtgcaagatgtgctttgttaaacagatgcttgaaggcagcatgctccttaagagtcatcaccactccctaatcgcaagttcccagggacacaaacaccgcggaaggccgcagggtcctctgcctaggaaaaccagagacctttgttcacttgtttatctgctgaccttccctccactattgtcctatgaccctgccaaatccccctctgtgagaaacacccgagaattatcaataaaaaataaataaattwaaaaaaaaaaacataaaataaaataaaattagtttgagggaaaacagaagtctcccaaatggaaagacaattccattttccaaatgggaatttgattacaaagcaccagattgttacaggttaggagtaaaattcaagagtttgagttccaatgtgtggttccacaaccaaaagtaaagaaggtagcacatactcagaaaaaaacttaatagttctggtgcccaggttggagtgc

SEQ ID NO: 626613 - DNA, 615 bp, Homo sapiens
cccaggttggagtgcagtggcaccaccttggtttactgcaacttccacctcctgtgttcaagcaagccaccgtgcccaggccaattctgggtacatttttttatgtccctatgttaacgtggtcttagatagaaaacttgtcatgtcaaagctcacttaattaaaggtctagcaatatatacagaataatacttgtaattttttttttttgagatggagtctcagtctgtcacccaggctggagtgcrgtggcatgatcttggctcactgcaacctctgcatcccagcttcaagcaattttcctgcctctacctcctgacagctgggactacaggtgcacaccaccatgcctagctaatttttgtatttttagtagagacaaggtttcaccatgtttgccaggatggtcttgaactcctgacctcagatgatccacctgcctcggcctcccaaagtgctgggattacaggcatgaaccactgcactcggccctatgttctgattatttcatgtagattggaaaggcttacttgagtccatttcgcctggccaatacttataatttctttttaaggtgacagaagacattaatagcaaatcatccaaagctattta

SEQ ID NO: 626614 - DNA, 615 bp, Homo sapiens
cccaggttggagtgcagtggcaccaccttggtttactgcaacttccacctcctgtgttcaagcaagccaccgtgcccaggccaattctgggtacatttttttatgtccctatgttaacgtggtcttagatagaaaacttgtcatgtcaaagctcacttaattaaaggtctagcaatatatacagaataatacttgtaattttttttttttgagatggagtctcagtctgtcacccaggctggagtgcagtggcatgatcttggctcactgcaacctctgcatcccagcttcaagcaattttcctgcctctacctcctgacagctgggactacaggtgcacaccaccatgcctrgctaatttttgtatttttagtagagacaaggtttcaccatgtttgccaggatggtcttgaactcctgacctcagatgatccacctgcctcggcctcccaaagtgctgggattacaggcatgaaccactgcactcggccctatgttctgattatttcatgtagattggaaaggcttacttgagtccatttcgcctggccaatacttataatttctttttaaggtgacagaagacattaatagcaaatcatccaaagctattta

SEQ ID NO: 626615 - DNA, 571 bp, Homo sapiens
gaaaaatggctctgaacaaaacttcaattataagttggcactgagagcaaccttgcagaaaaccattaaccccaggccagtccatgactaaaaaccactaacatttatgattttttctacctttaaagttcaggctttgtggcctgtggggactcacttaatagtttcattaatcaaaaagcagtgaaactgctatggtgtgactctactgaaaatccatttctttatataaaaaaagatataagaaaactcaratctgtttaattccctgcagtctccagttttattaatttttaagtacttacttaaaagtaaattaaccacatacgaaggattaaaaatatcttacagtgatgattctcaatcaaactgagtggctattacaggattaggttttaacatttcaggacagactgtagggtttctaatgcttagacagaagtcacagtggtggccaaaaggaagaaaatggattagtgatccaaaaaggaattccttctgggatctctgtgatcataaacttcacttaagtcactcttttcccctgcttcactgtccattagtgctaaac

SEQ ID NO: 626616 - DNA, 402 bp, Homo sapiens
gaattcacggaacttgactcttttgctcacaatgcaataaatatttatggaaagaatactgacttttaagtgattactctaggctgttctagaataaaaacaatcacatcagtggtatttaaatcatccatttaaaggaagagtaggaacagatagttatggtagccaaaagttttctgtttgaaaatacattgaattttatcattaccctgatactactcttcaaaaatcagtgggacaaaaacattttaatcctatgatccctaggcctcatttctcatgagaagcaaaccaataaagcagctgaattgacgtattgtggaaaattataacaccttccctttatttaagaaggaggtgataaaagagaatagcaaatwctgggagaaggcagtaattagg

SEQ ID NO: 626617 - DNA, 615 bp, Homo sapiens
tttttaattctatgattcctgaattctggaatcgaaggtgtcattatgaaaatacattgtcacttgatttttttaaaagcaaaatttcccataattatttgattgcaaaataactaacttcactgagagaccacaaaaactaaagcagcatatagtacaaatactctgtargttgttttgttggtggaaagctaaaattaacttgtcaagtagaacaatttctctgcccctggcaagtgagaaagcaataatgaatcttccattttaaggtggaaattttagcatacctatatgaacacttagctaaaatggtcaaatttctagaaaaatcatcaaaatcagctcaaagaatttttaaaacacgcacatcagtaaccactgaatacattaagctaacagaaaagactatacttgaaatggcacccaactcaagattttgcttgtgaattttatcacatccttaaaaaacacataattcttgtgttatataaacttttcaaagtaaagacaaagataagaaattatctgatccattttaccaagcaaatatagcactaataccaaaacaagagaaagcacaagaaaggaaatcatggacaaataacttttataaat

SEQ ID NO: 626618 - DNA, 589 bp, Homo sapiens
aatcttctgaaattagaaatagaagaaaacccttttaataaatgtcactagtggaaatatgtaataagtaccatacttaatggataaaatattagaagtaatttcttaaagtaaggaataaygcaaaatactatcattatctatccagcacttctgcaccatccttgtctatccaagacaataacaaatcagatataagaatcagaataaaaacagacaaaattatcattatttgcaaatgatataataattaccaaaaaaacctctaagaaattaacttgtgaattgttagagttcacattagaaagtttagcaaggtagccaaatagaagttacaaaataaccacatacattaaaatactatttacattttaaaacacacacatcaaaaaaaactatatagatagtatgtggccataaatatttgttacataggctgggcatgatggctcacacctgtaatcccagcactttgggagagtgaggtgggtggatcatttgaggtcaagagttcaagaccagattggccaacatggtgaaaccccatctctactaaaaatacaaaaattagccaggtgtggtagcaggc

SEQ ID NO: 626619 - DNA, 588 bp, Homo sapiens
acacaacgtgtagttgatgctgctatatgtggttgtagtcacagtggttacttctataaaacatttttcttatatgaaatgtataggataaaaggctgatctccagagttgtccacaacagactgaggtataatagttacgttttcaatgacggtcacctgaagcaattctctctcaaccttctccatagaatctacttgaacagatgaaaagagcacccagggtagccttttcaagatttccttgaaatcttttcaaaaaattcatgcaacttttatagtctactctataatagatacatgattaaaaataaaaaattattttaaattactattacattaagtgggccatcatgtgccctatttattttgtggtttatttacttsacatgctaccttatattcctagtggtttgagaagttttgaagtatgggtacgtttaattcaaggtattatatggctattaattcagactaaagtttaatgtataaatcagttgtctttttttttatagctacatcatatagtttagattatttaaaagaggaatactggaaggtcacagtggcagttgatgacagtttatgt

SEQ ID NO: 626620 - DNA, 599 bp, Homo sapiens
tttgtgtctcctctgaaattcatgttgaaacttaatctccaaygcaacattattaagaggtgtgatcttcgggaggtgattaggtcatgaaggccccatgttcataatggattagttctcttataaaagggctggagggaactagttaggccccttttggccatcagctttttgccatgtgaagatgcaacaacaaggtgtcatgtcggaagcagagaacaggccctcaccagacaccttgatcttggacttcttagcctctagaactgtgaaaaataagtttctatcataatttactcactcaggtattttgttattacagaaccaaaagattgagacaaggtcaaagcccaaagacctgagaaccagagtgtgggtgtggaaggagtgctagtataggtccggaagtctaaaggtccaagaagcaagagctctgatgtctgaaggcaagaaaaaagtagatgtcccagctcaacaagaaaggaagaattcacccttgccccacaattttgttctattcaggtcctcagcagcctggatgttgcactggtgagggcagatattctttactcagttttatgattcaaatgctacttttt

SEQ ID NO: 626621 - DNA, 599 bp, Homo sapiens
tttgtgtctcctctgaaattcatgttgaaacttaatctccaacgcaacattattaagaggtgtgatcttcgggaggtgattaggtcatgaaggccccatgttcataatggattagttctcttataaaagggctggagggaactagttaggccccttttggccatcagctttttgccatgtgaagatgcaacaacaaggygtcatgtcggaagcagagaacaggccctcaccagacaccttgatcttggacttcttagcctctagaactgtgaaaaataagtttctatcataatttactcactcaggtattttgttattacagaaccaaaagattgagacaaggtcaaagcccaaagacctgagaaccagagtgtgggtgtggaaggagtgctagtataggtccggaagtctaaaggtccaagaagcaagagctctgatgtctgaaggcaagaaaaaagtagatgtcccagctcaacaagaaaggaagaattcacccttgccccacaattttgttctattcaggtcctcagcagcctggatgttgcactggtgagggcagatattctttactcagttttatgattcaaatgctacttttt

SEQ ID NO: 626622 - DNA, 393 bp, Homo sapiens
tcagtagggactctgcatgggccatgcaaccccacatttcccttccgcacttccctagcagagattctccatgaaagccctgcccttacagcaaacttctgcctggacacccaggcatttccatacatcctttgaaatctaggcagaggttcccaaacctcaattcttgacttctgtgtacccacagactcaacaycacatggaagctgccaagacttggggcttgcaccctctgaagcaacagccctagctataccttggccccttttagtcatggctggagcagctgggacatagggcatcaattttctagactgcatacagcagagggaccctgggctcagcccatgaaaccattttttcctcctaaatctctgggcctgtgatgggagg

SEQ ID NO: 626623 - DNA, 393 bp, Homo sapiens
tcagtagggactctgcatgggccatgcaaccccacatttcccttccgcacttccctagcagagattctccatgaaagccctgcccttacagcaaacttctgcctggacacccaggcatttccatacatcctttgaaatctaggcagaggttcccaaacctcaattcttgacttctgtgtacccacagactcaacatcacatggaagctgccaagacttggggcttgcaccctctgaagcaacagccctagctataccttggccccttttagtcatggctggagcagctgggacatagggcatcaaktttctagactgcatacagcagagggaccctgggctcagcccatgaaaccattttttcctcctaaatctctgggcctgtgatgggagg

SEQ ID NO: 626624 - DNA, 525 bp, Homo sapiens
gcctgggcagtatttacaaaagaggagattcactttagtgcttgtcaaggacctcaaattataggaacagagaattaagagagagagaaagaaatgtatgtccgcgttagaacagccatcttcagttatttctgaacgggcaggcaagttgacattctgagggcttactgtcacatattgagaggctaagmattttgctagaacaaaaaacttgtcactgcaaaatagggagtttcaatgtataggctttttattctcatttgaaattttaaattatgtatttctattttacaaaaataattcctatttattgtaaccggagccactgataaatacaacttcaagatgcattattcacattttattttgtggatttttcctcaaagggatattcacctgataaacattgaaattggcatattggagttgcatatgcagtggctttgactttgaaacactgaaacaatatgctttaaaaaaattaacatctcccaatcccaaccatcttcctcatttttgcattac

SEQ ID NO: 626625 - DNA, 525 bp, Homo sapiens
gcctgggcagtatttacaaaagaggagattcactttagtgcttgtcaaggacctcaaattataggaacagagaattaagagagagagaaagaaatgtatgtccgcgttagaacagccatcttcagttatttctgaacgggcaggcaagttgacattctgagggcttactgtcacatattgagaggctaagcattttgctagaacaaaaaacttgtcactgcaaaatagggagtttcaatgtataggctttttattctcatttgaaattttaaattatgtatttctattttacaaaaataattcctatttattgtaaccggagccactgataaatacaacttcaagatgcattattcacatttwattttgtggatttttcctcaaagggatattcacctgataaacattgaaattggcatattggagttgcatatgcagtggctttgactttgaaacactgaaacaatatgctttaaaaaaattaacatctcccaatcccaaccatcttcctcatttttgcattac

SEQ ID NO: 626626 - DNA, 589 bp, Homo sapiens
gagaattaggactgtaaacttttgagttaatgctgaaatgagttaagactttgggggactgttgggaaggcatgatttgttctgaaatgtgaggacatgagatttgggaagggtcaggggttgaatgatatggtttgactgtgtccccacccaaatcttatcctgaattgtaactcccacaattcttatatgttgtgggaggaacctggcgaggaggtaattgaatcattagggcaagtctttccygtgctgttctcgttatagtgaataagtcttaggagatctgacagttttaaaaatgggagtttccctgcacaaactctctttttgcctgctgccattcatgtaagatgtgacctgctcctccttgccttccaccctgatagtgaggcttctccagccacatggaactgtaagtccattaaacctctttcttttgtaaattgcccagttgtcttgggtatgtatttatcagcagcatgaaaatgcactaatacaattacttagtaaaatcagtgttgatttctctcacataaattccaaatgggatgttcttgattggcaggtagccttctataataaggaccca

SEQ ID NO: 626627 - DNA, 595 bp, Homo sapiens
ttccctgacttatctgcctcaaaaatcctttataattgagaccatcctggctaacagagtgaaaccccgtctctactaaaaatacaaaaaattagccaggtgtggcagtgggcgcctgtagtcccagctactctggagkctgaggcaggagaatgaacccaggaggcggatgttagagtgagccgagatcacgccactgcactccagcctgggagacagagcgaaactccgtctcaaaaacaaacaaacaaacaaaaaaccaaaaaacaaaaaaaaaacaaaaaaaatcctttacatatgctgaagtgagggtatttcattcaaagcaaatttggtaggtctttatgtttaaggacatcaaaaactaactgttgcttactatgctcattacctggatgatgggatcatcattcatattccaaacctcagcatcacgcaatatacccatataacaaacctgcacatgtatccctaaatctaaaacaaaagttggagttcaaataaaaaattaaaatgttactccattaaaaaaggaaaaagaatgtgtagctttatattttgtttccctttttttaaaaaaaattagtagaccaag

SEQ ID NO: 626628 - DNA, 554 bp, Homo sapiens
gttagtaaggaaagattcaccaagagggggcagaagctcatgaaatgctaatccttgaattcaagagtaagaatcaatttcagattttcatgtttttggaacatttcagaggacttaatattttagttaaaaatctatatattctgagagtaatgataaacatatttctttgctacgattcatctctgaggtttctttcctttcttactgctttggctttcccattttgcttttgtcttcttgctgcctctcatcttccctctaagcattcagattaaaattccaktcctttaccttctttaaaaaatatgattataaatgtgctccctttatggtatgtgatgaaaaagcataaactttaagccagaaagacaatactttctttgaaacccctcctttaacaaatgatttttcagagttttaaaagcccataaagagagtatgttttctccagccattgaaggtatgataaatgatacatcctgagagtgaacggaagagtcattttagaaagtttgaagaacaaatactcaggcttagttagggattgtgta

SEQ ID NO: 626629 - DNA, 554 bp, Homo sapiens
gttagtaaggaaagattcaccaagagggggcagaagctcatgaaatgctaatccttgaattcaagagtaagaatcaatttcagattttcatgtttttggaacatttcagaggacttaatattttagttaaaaatctatatattctgagagtaatgataaacatatttctttgctacgattcatctctgaggtttctttcctttcttactgctttggctttcccattttgcttttgtcttcttgctgcctctcatcttccctctaagcattcagattaaaattccagtcctttaccttctttaaaaaatatgattataaatgtgctccctttatggtatgtgatgaaaaagcataaactttaagccagaaagacaatactttctttgaaaccyctcctttaacaaatgatttttcagagttttaaaagcccataaagagagtatgttttctccagccattgaaggtatgataaatgatacatcctgagagtgaacggaagagtcattttagaaagtttgaagaacaaatactcaggcttagttagggattgtgta

SEQ ID NO: 626630 - DNA, 554 bp, Homo sapiens
gttagtaaggaaagattcaccaagagggggcagaagctcatgaaatgctaatccttgaattcaagagtaagaatcaatttcagattttcatgtttttggaacatttcagaggacttaatattttagttaaaaatctatatattctgagagtaatgataaacatatttctttgctacgattcatctctgaggtttctttcctttcttactgctttggctttcccattttgcttttgtcttcttgctgcctctcatcttccctctaagcattcagattaaaattccagtcctttaccttctttaaaaaatatgattataaatgtgctccctttatggtatgtgatgaaaaagcataaactttaagccagaaagacaatactttctttgaaacccctcctttaacaaatgatttttcagagytttaaaagcccataaagagagtatgttttctccagccattgaaggtatgataaatgatacatcctgagagtgaacggaagagtcattttagaaagtttgaagaacaaatactcaggcttagttagggattgtgta

SEQ ID NO: 626631 - DNA, 461 bp, Homo sapiens
aatcaaccaactcaagaactaaaaaatattaacatgactttcatctacccatatacactttgcatgcccatactcctacctttccaccagagaaaactactgtagttayttatttacacatacacacacacatgcacatagacacacaaacacatatatgtagcttttttgacatatgcatgtaagccaaagtcaaatataacctaatattatttctgttgagatttataaaaatagtttcatatcttctgtagtcttataggacttttctgtttaacatcttaagatgcatccatagtttttacaaatagttgtgtttcattcactttaactgctttttcatatttaattgagtaaatataacaccattaatttatttgttcctttgtcatagtacatctttgtagcttccatattttattattaatcatacccttatgaatattcttgcatgtatcata

SEQ ID NO: 626632 - DNA, 539 bp, Homo sapiens
aaggtcatttatagcaaatacactgtcctggttccaaaggatgttacgaatgcaaatgatccagacttgcaaaggcccgatgaagaagctataaaagagataacagaaaagacaagagtagccttataaaaagctgtaccacagaaggtcaccgcagtcacrccagttcaggcagctgacaaaccggctcctgctcagtatatccgatacacaccatctcagcaggagtggctttcaactctggagttaaacagagggttagtcggatggtagaagtgcagaaagatccaacggagcctccaaggttcaagattaataagaaaattccccggggaccaccttctcctcctgtgcctgtcatgcattctcctagccgaaagatgattgtaagggaacagcaagagtaaaagtttcctccttttatttctaactggaaaaatgcaaagggttatacaattccattagacaaacgtctggctgccgaaggaagaggactacagacagtacacataaaagaaaatgttgccacattggtgatc

SEQ ID NO: 626633 - DNA, 615 bp, Homo sapiens
tgtgtttgtttattacctaattcacccccagtattctctgagaatcaaatatgtttgtaggatgaaaattacataaacaaattttgttgataattcaatgacatctagattttgtaatcatttgttagattactaaacaatctaaatttgcataaaaatgactactggaataggagtatgattttcttatttttgagctatctaaatatactaataattataatatcatatgaccatgactggaaatttgttaaaaatacaaatattatagataaatttaatattcagaaaaatggagcaaagactttgaygaaagcaaagtggtatctgccctccctgtaattatggatctaaattgactctaaaaatgtgtatatttattacaattaagtcccaaaacatttggctaaatatttatttctaaaatgaacttagactattcacaataagcatcacattaaaataaggtggtatattttagttctttttttttttccccttgagtttgtgagtaactctaaatttgttttgaccagttttctgaagagtgcatggtggacaacacattagacagactattggtttttggaatatttataaacataaaagtttcag

SEQ ID NO: 626634 - DNA, 583 bp, Homo sapiens
tatctaaatatactaataattataatatcatatgaccatgactggaaatttgttaaaaatacaaatattatagataaatttaatattcagaaaaatggagcaaagactttgatgaaagcaaagtggtatctgccctccctgtaattatggatctaaattgactctaaaaatgtgtatatttattacaattaagtcccaaaacatttggctaaatatttatttctaaaatgaacttagactattcacaataagcatcacattaaaataaggtggtatattttagttctttttttttttccccttgagtttgtgagtaactctaaatttgttttgaccagttttctgaagagtgcatggtggayaacacattagacagactattggtttttggaatatttataaacataaaagtttcagcatctcatatgaaaatctaatggatctttaggaaattcttcagtgtattaataataatgaaataaaaaactattttgatgtgcttttaaaatgaaaaatatcaattaaaggaagaccaaattgacaaaatagatgaaatacaaaaaatgaataatattataataca

SEQ ID NO: 626635 - DNA, 464 bp, Homo sapiens
atctgtggaattctaagaatccttgtatgatctccaagtaaaataataacatgaggttgagaattataacagattgtatttttccaaagattgctcattcatatgtggccctgcttgccatgtaatgtcatgctcctccactgagaagtgggatctctgtgtcttctgctttatcttgcatgaacttttgtaactgcctccatcaacagagtataatgtttaaatgctgtacagagctaaactgatgttatgtgtaatactgtacagaatttaaatgatgtgataacwggcaaggcaaagctacaaaatacaattcagcttccatctgtttcttgaaatacaactttgaagttctgaaccactttgtaagaagtctagctataatgaagttttggtgcagcagagaccactttgagatagaaatgcccagggatctccagttgttctagctctcagccatttga

SEQ ID NO: 626636 - DNA, 436 bp, Homo sapiens
ctaagaatccttgtatgatctccaagtaaaataataacatgaggttgagaattataacagattgtatttttccaaagattgctcattcatatgtggccctgcttgccatgtaatgtcatgctcctccactgagaagtgggatctctgtgtcttctgctttatcttgcatgaacttttgtaactgcctccatcaacagagtataatgtttaaatgctgtacagagctaaactgatgttatgtgtaatactgtacagaatttaaatgatgtgataactgkcaaggcaaagctacaaaatacaattcagcttccatctgtttcttgaaatacaactttgaagttctgaaccactttgtaagaagtctagctataatgaagttttggtgcagcagagaccactttgagatagaaatgcccagggatctccagttgttcta

SEQ ID NO: 626637 - DNA, 604 bp, Homo sapiens
ggattcatttagaatactgtggtcttgccttaatcctctttgacttaatgagctgggtgtgtatctctaaaatatatccagcaacccatgattggcatgcacaaataccacatttaccctatagaatgagtgacagaagactccacgtccagagccacatcctagtccctttttcttatgtttccagggaaaaaatgacttgttaatttcttcatatacatatatatatgttaatttcttcatatatatatatataaaacctcaggggtgagtaaaacctggagcttgttctgaaatattttcaaytgagcagtatatgcaacattatggacatggctgtaggattaattagggcctgtttgatctaaccgtttgctgcagtgtttgaaaagccaacaaatgactcttgttggcatgtgtcagcataacacactagactgcaaaattggtgtctttttcatctttgacattatacactctgcccttcttactttcttcaaattctgagaaactaagcaagactttgtaaatattttccaaatatttgttttcaatataagatatctaaagacaaaaccaaaaatgggattttcaatgaattttc

SEQ ID NO: 626638 - DNA, 585 bp, Homo sapiens
tcccctcaaataaaatgttcctttttggaaacattatagaataatgttccataaaagtacaaaacatcttgaagagagatgttcagaggttaaggtgttattttaacacttgcgagtgaaaatatgatactcctccttagtgataaggaaagctgacacttgtgaatcacccattttaatacattaatgtgcatctgatgcttggmaacattgcagaaaaaataagagtgaacagagcataaatgtgtaagaatgaatgcaggatgctttaaattgcaaagtcccctagatatgaaatgaaaatgcattttaattatcactttagaaatactgctttcacactggtgtcatttcttgcaaacatattctcttcaggtaacagagtcacattaatggctgttgaaattcagcagatattcctggtacttctctgactccattcatgatactgaattatggcttagtgataccactttcatgtgttgtttaggaacaaagatgggattaggaaaattgcttccaagccaccatagcaaattttcaccaaaacgatcaagcagacagctatggcaaatgacattgcct

SEQ ID NO: 626639 - DNA, 573 bp, Homo sapiens
tcaggcagaatttctctttggatctacaggagattttgtccacttwtgtttagtcttagaaaaggagcattcttaaccacaaaagaaacttacgtaatcctctaacatagagttctgctcatttattaacagattttctacacattagcttatctcaatagtaagtctaaaagtttttcagagaaagatagtagaaaaggagaatattaatttgttttccatgatcatttattattggtgatttagtagacacataccacaacttaaatcaagaaaactagtttacttgccatagcttcaaattatcctgaaattatatatatgtgcatatgtgtatatacatatatgcaataactagtacataatatttataatgagtattaatcattgaaagataggagataattttctagttactgaacctcagaagaaataatatttaaaaaggtccaaacttaaatgactttcgaaataagattatgctaggataatagcttatcagatcacatgcatcttaattctaaatgagcatatgggattgaaggtagaattgaaaaaaaaagcaggggttgc

SEQ ID NO: 626640 - DNA, 573 bp, Homo sapiens
tcaggcagaatttctctttggatctacaggagattttgtccacttatgtytagtcttagaaaaggagcattcttaaccacaaaagaaacttacgtaatcctctaacatagagttctgctcatttattaacagattttctacacattagcttatctcaatagtaagtctaaaagtttttcagagaaagatagtagaaaaggagaatattaatttgttttccatgatcatttattattggtgatttagtagacacataccacaacttaaatcaagaaaactagtttacttgccatagcttcaaattatcctgaaattatatatatgtgcatatgtgtatatacatatatgcaataactagtacataatatttataatgagtattaatcattgaaagataggagataattttctagttactgaacctcagaagaaataatatttaaaaaggtccaaacttaaatgactttcgaaataagattatgctaggataatagcttatcagatcacatgcatcttaattctaaatgagcatatgggattgaaggtagaattgaaaaaaaaagcaggggttgc

SEQ ID NO: 626641 - DNA, 573 bp, Homo sapiens
tcaggcagaatttctctttggatctacaggagattttgtccacttatgtttagtcttagaaaaggagcattcttaaccacaaaagaaacttacgtaatcctctaacatagagttctgctcatttattaacagattttctacacattagcttatctcaatagtaagtctaaaagtttttcagagaaagatagtagaaaaggagaatattaatttgttttccatgatcatttattattggtgatttagtagacacataccacaacttaaatcaagaaaactagtttacttgccatagcttcaaattatcctgaaattatatatatgtgcatatgtgtatatacatatatgcaataactagtacataatatttataatgagtattaatcattgaaagataggagataattttctagttactgaacctcagaagaaataatatttaaaaaggtccaaacttaaatgactttcgaaataagattatgctaggataatagcttatcagatcacatgcatcttaattctaaatgagcatatgggattgaaggtagaattraaaaaaaaagcaggggttgc

SEQ ID NO: 626642 - DNA, 598 bp, Homo sapiens
gcttatgtatcagcttttataataaagctcctaatgattcttacctagatcgaaattgagaactgctgccacatattctttcttctaatgctgtctggtaatagtgctgagcataaaaccagctgcgatgagctggtttacagctcagcagagtggccagggaattcagatgatagtcgctctgccacagggtgtacaagtctgaaaactcagaactgaaaatagagcagcacaggccyctaagctactcttcagattttaagccaatgctgtggttgcctgtgtttagaacctaaatattactgtgggtgatgtgcttcattatttttttatcgtccgttgtgacttaattattttggaaaccactaggcttttgagaaagtcattctttgaccactgatatgccaactgttgtttccctcagggtcaagtagacttagttatcctgattgactggattgcctgatagggggttggtggttcaaacaatttgttcttcacataaaaagaaaaaacctctttctctctctcttcttaaatttttggtcataggtcttattaatttcaccctacaagaatttatctgtgaaattcagtt

SEQ ID NO: 626643 - DNA, 540 bp, Homo sapiens
tgtatggtaaggaacaaaagcaatttaattccctgaaaaggacaacctgttttgcatgcatatcatgttatttttaattaaatccaccatattagttgattctcgcactgctatgaagaaatacctgagactgggtaatttataaagagaagtggtttaattggctcatggttccacaggctgcatgggaagcatgatgctggcatctgctgagcttctggggaggcctyagatgacatgcaatcatggtggaaagcaaagcgggagtgagacgtcccatatggccagagcaggaggaagagagaggggagaggtgctacacacttataaacaaccagatatcatgataactctatcacaggaacagcaccaaagggggaaatctctccccatgatccagtcatctcctaccaggccccacctcaacaatgaggattaaaattcgacctgagatttgggtagggacacagatccaaaccatgtcacccatattaatgacaattaaaaaccaaatcagtacaatcataaatgcaatttcat

SEQ ID NO: 626644 - DNA, 551 bp, Homo sapiens
aaaccccaactatagctactaactgtagtttcattttccccttttgaagtcgtgttgccacagaagaggttccaccacgttgcttgtcttctttggattgttcattctatcagcttgggtcctcactcttttttttgaaactagacaatgacttttcaaggttttctgattccacgctccacagccatgtgccatcattgctctattcaagcattctaatttggttctcactgtcagggccaaaaccttaaagggattagtccgctatggcaattacatatactgttaggtgattgttaatgtggtcagttatatttcaggtctagcattgagattatctcttattttcatgtgttatttgagtgatgaagcagaactttatcattacyaactaacgctgtgtatttgaaagtaaataaactttagatagtgaatacagcttatgaatagaaatattttccacttacaaatatttattcactttccaacattagtgtggcacatttgtaataatcaatggatgaatatggatacattactattacctaaag

SEQ ID NO: 626645 - DNA, 568 bp, Homo sapiens
caactaagaggcctaattacaaaaattggccaattttaatagttttcttattaaaaactttgtgttactaagtatwtaaatataatttattttctgatagaaaataagacagtaaaattttgtaaaatctcaaagtatttttttgttttttgagacagagtctcactctgtcacccaggctggagttcagtggcagccatctctgctcactgcaacctctgcctcccaggttcaagggatttttgtgcttcatctaccaagtagctgggattacatgtgcgcaccaccacactgggataatttttgtgtttttgatagaggcggggtttcactattttggccaggctattctcaaactcatggcctcaagcgatctgcccttcttggcctcccaaagtgctgggattacgggcatgagccactacaccctgccaaagtgtgtatttttgaacaccagtatcataattatcactcatatttaaattcaattttatgatatttaaaattcacacaattttttttcttacattatgtgttatctagtaaagagttaaccttgcccaaagaa

SEQ ID NO: 626646 - DNA, 537 bp, Homo sapiens
atcaagccccaatcaaaactgtgaacaacaaaggctcaggtgagcttctttggttggcaatattcagtgtatattgtcacacactgtggctgagaagtaacgctgcttatgaccccacaggaagagracaaccaggggtctcaagttggggccccttctggctctgccctgtgcatcacttcccttggctgattttaatttgtgtacttttgtcataataaaagatattataggtacagtgtgttcctgagttctagctgttctagccaattatcaaacctgtgactggtagtggggatcccagaatttgtagctatatatgtcagaaatctcaagaaaaacagatttttatatgtatgatatgacatatattatatatatataattatagtttatatagactataaacagatcacatatgttgtctaatatatatttatatgtacacataatcatgtgtatatgagtgtgtgtgtatatatatatatatatatgacatttactcaaaaccagtgctcatgcaatgtggtagctgcc

SEQ ID NO: 626647 - DNA, 648 bp, Homo sapiens
  misc_feature 606, 607, 608, 609, 610, 611, 612, 613, 614, 615, 616, 617,618, 619, 620, 621, 622, 623, 624, 625, 626, 627, 628, 629,630, 631, 632, 633, 634, 635, 636, 637, 638, 639, 640, 641,642, 643, 644, 645, 646, 647, 648: n = A,T,C or G
atacaacacaggtaaaatacggaatataaaataatattttattatatgtcacttatattacaaaaagtaaaatacatatggtgatatggactccactataaaatcacaatttatcatcrtgatgtctgagtttctcctagattttattgactttttaaaatccagatttagcatagcaaatgtaactttttgctaagagattaaatcccaggagaatgataaaatccaaacttcttgttctcctgctgagcactattttaggaaattctttatatacgtaaagaatgcatatgcttttaaacaatttatttcaagttaaagttttttaaagaataataatgatatattatacatacactcttgtatcctagtgcccactctcagtgctctgagaaaaagtcatagtttctgacttaactgttaatcagagaaaaacaaatccaaactagatctcaagacataagtttactagaaggtaagaggaataagttggagccaatggagtaagatggggttggaaagtgtgcctcaaaaatttgcactagacaggtgattaatttcctagaggactttatatttaggaactcaatcctaaggaagaaaaannnnnnnnnnnnnnnnnnnnnnnnnnnnnnnnnnnnnnnnnnn

SEQ ID NO: 626648 - DNA, 533 bp, Homo sapiens
accatctgtgttgatgattctcatatttacttccttgaattccatattcttatttctctattaggctgtgtaacactgcaaattaaatttttccccgaacaaattctggatatcctcctaaaatgtaacattcctcattttagtgactggaccctcaattattatagttgcgaaggccaaaatctctgaacttttttatgtttgtttattttttgatttgggagtttttgttttttgttttttttcttatatcygaaactcaatccatcagaaaattctgccaaatttctccagtatatatcttgtattcaatcacttcctaataaatctgcttctatcatttcattcaagctaaaattattttttatctggatttttataatatccttctacgtggtctctctgctacctctgttctctctatcctctgttctccatacagctaccaaagttatggcatttaaatactcaaaactctacaggggctccatgggacacccatatagaaaccaaacccttaccttgtgtaatac

SEQ ID NO: 626649 - DNA, 648 bp, Homo sapiens
  misc_feature 606, 607, 608, 609, 610, 611, 612, 613, 614, 615, 616, 617,618, 619, 620, 621, 622, 623, 624, 625, 626, 627, 628, 629,630, 631, 632, 633, 634, 635, 636, 637, 638, 639, 640, 641,642, 643, 644, 645, 646, 647, 648: n = A,T,C or G
atacaacacaggtaaaatacggaatataaaataatattttattatatgtcacttatattacaaaaagtaaaatacatatggtgatatggactccactataaaatcacaatttatcatcgtgatgtctgagtttctcctagattttattgactttttaaaatccagatttagcatagcaaatgtaactttttgctaagagattaaatcccaggagaatgataaaatccaaacttcttgttctcctgctgagcactattttaggaaattctttatatacgtaaagaatgcatatgcttttaaacaatttatttcaagttaaagttttttaaagaataataatgatatattatacatacactcttgtatcctagtgcccactctcagtgctctgagaaaaagtcatagtttctgacttaactgttaatcagagaaaaacaaatccaaactagatctcaagacataagtttactagaaggtaagaggaataagttggrgccaatggagtaagatggggttggaaagtgtgcctcaaaaatttgcactagacaggtgattaatttcctagaggactttatatttaggaactcaatcctaaggaagaaaaannnnnnnnnnnnnnnnnnnnnnnnnnnnnnnnnnnnnnnnnnn

SEQ ID NO: 626650 - DNA, 531 bp, Homo sapiens
ccaccatagaatttgcatattttagattagtcagcttatttgctagcaacaccaagttgtgtctaaaaggcargagtaaaataaataacgtacaataaataacctatgtgcctcttacctgagctcaaaatcttaaataatttccacatgattctaatgatttccacatgtgtatctttcctgtagacattgttttatccctttagtctttctggatggcaagattgtagttgtacataactgcaaactgaaggaaaaaattaagaataaaggcagacaatcccataagtgtcacttcttcactttattttaagggcaatagtgtccgattagaattttcatgattagtcaagaaatggatattgttgccataaagtatatagcttttatatactgctttgttgtaaaatatatagaatatataattatttataaggttttgggctaagcgttgtgataaatacaatgaataaggagcatactttttcatttgaaaatttgcatgtgaaaagataattaacaaaatatggt

SEQ ID NO: 626651 - DNA, 596 bp, Homo sapiens
tgtctaaaataaattcagaggctagaagaaatagttgggtgtcaagggactgaaagtttcaataagatcaaagaataggtgtgcaggcatgtctgaaaagaaatgatgctgtactcagaaaaaaacgtaatggagcttaagctttctaatccyaatgtgtggatgctcaatttcaggggagggcaaaattcatggagatatgagtcatggtatagagtaaataaggagtgataaaagtctgaatatttgggggagatttatgtggtgaaatcacacaggataatagaaggtggagagataagaaagactgagatgggaatcaacgtcctcaataaatccctgaaatgtaaaaaagaatttacattttttatttatgtaaattactttacaccaatgttaatgaaaggcaaatgacaaaaaagatacggaagggtagcaaatggtttcagaatcatgttgtaaaagcttttgtaaattgtaaagtaaaatgtaagtctgggagaatggcaacacttcctatttcaaaaaaagtgaaaaactttagggagtgagccttccactggacagatctgtaaggaaaataatgttctcagggg

SEQ ID NO: 626652 - DNA, 595 bp, Homo sapiens
ttaatgacattaacatttgctttttttattacgctctatgtctaattgagacactggctaccacgaactgaatgagtttttgacataatatttcctggcattatggccttcgtcagatgattttgcctctattgaccatcatgttttgcatttggatttgaaatgtacattagcatgataaaatgattcccctgtcattttcccacaagctgtttctcatttagttaaatacttcttccagggtcagagactccaccggtttcaaagtgagatcagcatgcagatgaaatttttagaccatattgaaaaatgaaaaattggactcctcatcactttttcccaagagaggaaarctgccgtcagcagagccaaggaaagaaaacagcagtgaaataatatagaaacccagggaacagcaggtagaagaattagtcatggttgctttggagtataaaattttacctccaatataacgccaaaaatactaaatgatttaacacaacaacttattctagctctacaaaatatgggttactaggttttcttccttttatgcccctgtgttttcttgatgtcttttacctggttccagttt

SEQ ID NO: 626653 - DNA, 595 bp, Homo sapiens
ttaatgacattaacatttgctttttttattacgctctatgtctaattgagacactggctaccacgaactgaatgagtttttgacataatatttcctggcattatggccttcgtcagatgattttgcctctattgaccatcatgttttgcatttggatttgaaatgtacattagcatgataaaatgattcccctgtcattttcccacaagctgtttctcatttagttaaatacttcttccagggtcagagactccaccggtttcaaagtgagatcagcatgcagatgaaatttttagaccatattgaaaaatgaaaaattggactcctcatcactttttcccaagagaggaaagctgccgtcagcagagccaaggaaagaaaacagcagtgaaataatatagaaacccagggaacagcaggtagaagaattagtcatggttgctttggagtataaaattttacctccaatataacrccaaaaatactaaatgatttaacacaacaacttattctagctctacaaaatatgggttactaggttttcttccttttatgcccctgtgttttcttgatgtcttttacctggttccagttt

SEQ ID NO: 626654 - DNA, 636 bp, Homo sapiens
aaacagcagtgaaataatatagaaacccagggaacagcaggtagaagaattagtcatggttgctttggagtataaaattttacctccaatataacgccaaaaatactaaatgatttaacacaacawcttattctagctctacaaaatatgggttactaggttttcttccttttatgcccctgtgttttcttgatgtcttttacctggttccagtttccttagcttttggtaggagatagcattttcagagcactgtgccaagacttacccacatgagtcctatcgaccttgatcaaggtcacaaggcaaaatccctagtccttactttgaaaattaacttgatatttccagatatatattcatctggtttttctattccacatatgagaattatttctctgaaaggtttgatttatttctattaattattattcaaaaatataccctgtgaaacaattgtaactaaataccaaacaaatgaaaacagatggtagtgtaatctagacaaagaatttggcccagagggttaaaaaaaaaaagaatataatagaggaagaattttctttaattaccctcagaaagtcaacgtgaaaagtgattgaaataggttttgctggtatctctcccagttttaaa

SEQ ID NO: 626655 - DNA, 636 bp, Homo sapiens
aaacagcagtgaaataatatagaaacccagggaacagcaggtagaagaattagtcatggttgctttggagtataaaattttacctccaatataacgccaaaaatactaaatgatttaacacaacaacttattctagctctacaaaatatgggttactaggttttcttccttttatgcccctgtgttttcttgatgtcttttacctggttccagtttccttagcttttggtaggagatagcattttcagagcactgtgccaagacttacccacatgagtcctatcgaccttgatcaaggycacaaggcaaaatccctagtccttactttgaaaattaacttgatatttccagatatatattcatctggtttttctattccacatatgagaattatttctctgaaaggtttgatttatttctattaattattattcaaaaatataccctgtgaaacaattgtaactaaataccaaacaaatgaaaacagatggtagtgtaatctagacaaagaatttggcccagagggttaaaaaaaaaaagaatataatagaggaagaattttctttaattaccctcagaaagtcaacgtgaaaagtgattgaaataggttttgctggtatctctcccagttttaaa

SEQ ID NO: 626656 - DNA, 632 bp, Homo sapiens
tgtgcactctgcatggagtgttatcatgtatttatctagcaatctctaaaaaaatacagaggttttaaagaaaataaaagctayaaagcccataatatttgccaaactattaaacatgatgtgcaattgtgagactgcttgacagaagatttcaaaaaaatgaaacttttcatttttataaagtcttttctgatcaatggctttaaagtccttctcactgtgtctgcatggcagcagaatatatgaatgacaaacaggaaaactcacgcaacaattttaatttgattatgcatatttgttaagaacctactatatgtaggaacatggtctggtagcactgctgattacattatccacctcttcgcctgtcaattcaatactaaaacctcagctcaacattaactccttctagaagtttttcttgtcaatcaattcctctactcccagctaggtgaaattcaccttcttctgctgccatgtttgtatctatgtcattccactaacccgctggattataattgcttaatgtaattatatcccatacaagggtttttcttaaacctaagaactctgtcttaacttaacatgttgtgtaggctgtatgtagcacagtaactgagttgaatgaatga

SEQ ID NO: 626657 - DNA, 632 bp, Homo sapiens
tgtgcactctgcatggagtgttatcatgtatttatctagcaatctctaaaaaaatacagaggttttaaagaaaataaaagctacaaagcccataatatttgccaaactattaaacatgatgtgcaattgtgagactgcttgacagaagatttcaaaaaaatgaaacttttcatttttataaagtcttttctgatcaatggctttaaagtccttctcactgtgtctgcatggcagcagaatatatgaatgacaaacaggaaaactcacgcaacaattttaatttgattatgcatatttgttaagaacctactatatgyaggaacatggtctggtagcactgctgattacattatccacctcttcgcctgtcaattcaatactaaaacctcagctcaacattaactccttctagaagtttttcttgtcaatcaattcctctactcccagctaggtgaaattcaccttcttctgctgccatgtttgtatctatgtcattccactaacccgctggattataattgcttaatgtaattatatcccatacaagggtttttcttaaacctaagaactctgtcttaacttaacatgttgtgtaggctgtatgtagcacagtaactgagttgaatgaatga

SEQ ID NO: 626658 - DNA, 577 bp, Homo sapiens
cagatattttttattaggggattattacatctctagttaatagcaagttttcacacagtcagagaatttatcttatacttccctggtgtctgtccatctcattgctttaggccaagcttaaagtattragttatttgattgaatcttctgagattttataactccccctttgtttgtttgtgaagaagagtttgtaatttagtatttactgatgatcttgtgacatattttacaggttaaggtggttgagtctcaaatcttaatatttacctaactcactatcaaatgaggaagtggaataaggaataacatgaggaaagacaaccaaatggaaaatgaagcataactttattattttggtaagctccttacaaatcctccaaaaatgtcttttctgaaaaaactgaattgaataatatatgctcaaagctatattgctcacctaattactctgccttctctactttactaatttgaagttgctgggtcatccctttccacctaattgcatggtgtgtgtgagacaagcatgaaaggcttggctaagtgggcttccagaacggaataggtaaagcaa

SEQ ID NO: 626659 - DNA, 484 bp, Homo sapiens
ttatgctcttatagctttacttaggggtatatttttaaaatcagtatcagtattctccatattgtattctagtattttgaatacaagtattctgattgctagtaatagggccctatttgaaaaaaaataaattaataaaggcattctataagtagagttctttttagaaatcctacatagttcactcattctcacactccaactacaccatagacttgagtcagccagtcaaaatattttaatatataaaagtttggagaattattgccattctaaaaaacacaaatccaaatattgaattagtttaacgtagttttgctgcaccttttaagactcagaacactttttttcccttaggataccaattaagatatgagagacctcacagaacacagatcaggaaagattaacatgatataatacagaattttcacaytcttcaaccatcatccatccataattattcactttatgatatggttta

SEQ ID NO: 626660 - DNA, 492 bp, Homo sapiens
tgctccagtcacgtcactgaagtttcaaaagaaagagagaaacaaagactccaggttctgtattagcagccatctctacaaaatgcaccagcaagacctttcacttctactatcataaaaaaaaaaaaaaaatcagcaaggttggcaaagcagaagaycacaagccagttatttatcttattttaataaaagtttactcaggttcagtgattccggggctgagatgctgcaaatcagctttccggactctggattccttttaagttctgacaaaaagaggcactcgggagagactggaagttaggcagaaagaaacagatactttcttcatatttccctgttcttgttggtgttgctccagcagcagttggtggcctcagcttccagtttctgtctgtgttccctacaccagccctgtgacactcccttagagacaccgtcagaacagaacattactaccccctcagaaaactaaacaccagctcacaggca

SEQ ID NO: 626661 - DNA, 554 bp, Homo sapiens
ttaatgcactctttaatgcacaccaacatccaaatttattaacattttactccaagaggtatctctagttcagatgtcactgttaagtcattgaccaaatttgagccatatatgtgccttgctttgtaagtgtgttagtctgtttttttaacctagaaagaaacagctgaagttgggtagtttacaaagagaagagatttaattggctcacagttctgcaggctgtacaggaatagtgctggcctctgcttctagtgagggtctcaggaagcttccaaggcaaaggagaaacaggtatatcacatggcaagagcagaatgagagacagagaagtgggaggacacagactcttttaaacaactggatcttttgtgaactgagccagaactcacagaagggatggtgctaaatcatttaggaggcatcatycccatgatccaagcatctcccaccagaccccacctccaatactgggaatcacatttcaacatgagacttggaggagacagacagacatccaaaccatattggcaagcattattgatttaaaaaat

SEQ ID NO: 626662 - DNA, 592 bp, Homo sapiens
ctgctatggctctggtttaagccaccatcatctttcccctggattattgccgcagtctcttaattggtctctctgctctacctctggactctgagagtctgaaaccagatggctcacttgctcatctctttcaggtttctgaacaaatgtcaccttctcaaataaagtctaccatgaaaaccctacttaaaactgaatttctttacatccactctgctccattttcatktcctcccctcccatctttatcacttattgattctaacatatttcttataattacattgtctgtttgtgatcactgcttttatgagcccagtacctggaccaatgtctggtctatagaggatacacaataattattttttgtatgcgtgaatgaatgtgtgaggtgtataggtatacaatggtgtataggacataatatgctcatttagcaatgcaaatcaattgtatgaagactggagagagactaaggacaaagaatgaaaatggaaatagtgcaggcaaactcaatccacccttccactcaatgaacatctgccccagaattaacatgccacagtatatgaatctgctattttatatgtta

SEQ ID NO: 626663 - DNA, 634 bp, Homo sapiens
ttcttataattacattgtctgtttgtgatcactgcttttatgagcccagtacctggaccaatgtctggtctatagaggatacacaataattattttttgtatgygtgaatgaatgtgtgaggtgtataggtatacaatggtgtataggacataatatgctcatttagcaatgcaaatcaattgtatgaagactggagagagactaaggacaaagaatgaaaatggaaatagtgcaggcaaactcaatccacccttccactcaatgaacatctgccccagaattaacatgccacagtatatgaatctgctattttatatgttatgtcagtggcctcacagtgtgagaatggtacatgttgggtgggattattttgctatttaaaaatgggtattttttatacatatggacttcaaatgcaagacagccaccttatctgaagcttaaccaaaacatgatctgttctaaagctaaagggaaaacagctgtgctgaatttatgtataaagagaagacacattggccagatgtggcggacacatgactatagtttcagcccctcctggggcaggaggatcacttgggcccaggagtttaagtttaacctgggcaacatagtgagactccatttctgaaa

SEQ ID NO: 626664 - DNA, 585 bp, Homo sapiens
aattgtatgaagactggagagagactaaggacaaagaatgaaaatggaaatagtgcaggcaaactcaatccacccttccactcaatgaacatctgccccagaattaacatgccacagtatatgaatctgctattttatatgttatgtcagtggcctcacagtgtgagaatggtacatgttgggtgggattattttgctatttaaaawtgggtattttttatacatatggacttcaaatgcaagacagccaccttatctgaagcttaaccaaaacatgatctgttctaaagctaaagggaaaacagctgtgctgaatttatgtataaagagaagacacattggccagatgtggcggacacatgactatagtttcagcccctcctggggcaggaggatcacttgggcccaggagtttaagtttaacctgggcaacatagtgagactccatttctgaaatgtgtctaacgtggtatttcctaaggggtctttaccagccatcattttcacctttcaagttcactttagaacttaaccaccagatagctgggacttcagtgtaatcaacgaggttttttttttttttaa

SEQ ID NO: 626665 - DNA, 587 bp, Homo sapiens
gaaagtaagggaggagaaaaagagacactgcttggtaatccggggaattctggatccaagactaccaaggtgttacctctacaagtctgcaagattcatagcattactgggcttgggcttcctcctaatgcagactcagcggcagtgaccaaagacttagatcacracactcaattttcattggccttctcaaaaggtcggtcacaaacaagcccagactgtgaagattacaaaaaacacctaactcttcaatgcctagatattgataaacatccacaagcatcaagaccatttaggaaaacatgacctcaacaaataagctaataaaagctccagcgaccaattctacagtgacagagatatgtgacttttcatacagataattaaaaatagctattttaaggaagctcaacaaaattcaaaataacagagaaggaattctgaatcctatcagataaatttaacaaacaaattgaaataattttttgaaaatcaagcagaaattctagaactgaaaaatggaactgacatactgaataatgcatcagaatctcaacagcagaatcaatcagcagaagaattagtga

SEQ ID NO: 626666 - DNA, 587 bp, Homo sapiens
gaaagtaagggaggagaaaaagagacactgcttggtaatccggggaattctggatccaagactaccaaggtgttacctctacaagtctgcaagattcatagcattactgggcttgggcttcctcctaatgcagactcagcggcagtgaccaaagacttagatcacgacactcarttttcattggccttctcaaaaggtcggtcacaaacaagcccagactgtgaagattacaaaaaacacctaactcttcaatgcctagatattgataaacatccacaagcatcaagaccatttaggaaaacatgacctcaacaaataagctaataaaagctccagcgaccaattctacagtgacagagatatgtgacttttcatacagataattaaaaatagctattttaaggaagctcaacaaaattcaaaataacagagaaggaattctgaatcctatcagataaatttaacaaacaaattgaaataattttttgaaaatcaagcagaaattctagaactgaaaaatggaactgacatactgaataatgcatcagaatctcaacagcagaatcaatcagcagaagaattagtga

SEQ ID NO: 626667 - DNA, 587 bp, Homo sapiens
gaaagtaagggaggagaaaaagagacactgcttggtaatccggggaattctggatccaagactaccaaggtgttacctctacaagtctgcaagattcatagcattactgggcttgggcttcctcctaatgcagactcagcggcagtgaccaaagacttagatcacgacactcaattttcattggccttctcaaaaggtcggtcacaaacaagcccagactgtgaagattacaaaaaacacctaactcttcaatgcctagatattgataaacatccacaagcatcaagaccatttaggaaaacatgacctcaacaaataagctaataaaagctccagcgaccaattctacagtgacagagatatgtgacttttcatacagataattaaaaatagctattttaaggaagctcaacaaaattcaaaataacagagaaggaattctgaatcctatcagatawatttaacaaacaaattgaaataattttttgaaaatcaagcagaaattctagaactgaaaaatggaactgacatactgaataatgcatcagaatctcaacagcagaatcaatcagcagaagaattagtga

SEQ ID NO: 626668 - DNA, 536 bp, Homo sapiens
ttcttcaattaaacaattgcacttattttaacctttgtgtttttttgtccgttctgataaaaaaaacttgcctgttccaaggttatgaagcattatagtatgaattttttggaagttttatggttctgggtttttaaatttargcctatactatggtttgaatgtgtttcctaaagttcatgtgttgaaaacttaatccccaatgcagcggtgtttacatgtggacctttaagaaatgattgggtcatgaaggcagagatgaattaatgctgttatcatgggagtgaattcctgataaaaggataagtttggctccctctcccagcttctgcttctcttgcatgcatgcacatgccagtgctctcttgccctttcaccttctgccatgagaagatgcaacaatagggagaaggctctcataagatgggagcccctcaacgttggacttcccagcctccagaaccataagaaatacatttatgtactttacaacttgcccaatgtcaggtattccataatatcagcacaaaaagaac

SEQ ID NO: 626669 - DNA, 515 bp, Homo sapiens
taccacttcacctttagagccgaaagtgggcatttttgaaagacaggagagcaagtgaccaaggggtcagggggtcacttgttagctctggtgtctaatctactgaacatagagctggtgactgctggtgcctttgatggcaggactaagctgaaaactccccacatgtgaaggagtttcatagaaactggcttttatttccggcaacaactctcggtgggtgaaagtcccaaggcaaccccctggagggtgagagttccatgttttagtctgcaaactgactgttaactctcaaagagagatctgtcttggagcacgtagatgaaattgccccataggcagtgtttgktgaaggggaagcaaaaggttatctttacatttctaaagggctaagtaggaagtagggaatgagaaaataagagaaagagaaaaaaaaatgtcttagaaaaatgggagtattcagttataaaaggaaatattaggaagatagaatggacagaattggtaagatagat

SEQ ID NO: 626670 - DNA, 630 bp, Homo sapiens
gtttctgaatttatgtttcaattaaagaacaaaaatatgagcagtttggaaatgattaaaacatttacatagagtcttatatgattttttaatacaaatttaaacttggctgctcaataaaagatagtatagtgtattaggaagagcagtttgctaggagtcagacaacatgagtccttgtctcactctatcacccaagcaaaaggcctgaggcaagtcactttgtattctagtgttaaattaagaaacttttaattataacttctagggctaaaatcagtttaaaactgaagattctctcattctaactctgctttccgactgtgagaggccaggtaacttttttacttagcgaggaaatgcmcattgcgtaacaacaaagatacgtacattaaatgtgcaagaaaactaattacaaatatcatatcccattaagattattcacctaaacttttaaaagcactttgtatagttcttcttaaatgtcacatgtttacagatttgactaatgtcttaaattaaaaaaataaagtaaaagttttcttgctatgtttggtatagcttatgatgtttgacatttattgttacacagtacagaggtgccttcattgttttttggtagcattgtcc

SEQ ID NO: 626671 - DNA, 600 bp, Homo sapiens
gtcctattcaatttttttcatcatagatttataatttttattgtagagatagtttcatcttgaagtttctttctaggttttatattttgtggctattgtaagtgaattgcttcttgacattttttcaagtagtttattattggtatatataaatgctactgattttttacaaggatagcttgtataagctattcttctaaagagtagctttgctggcagtagtattcttggctgatagttatctttttytcttcttgcagcactttgaatatatgattcctttttctcctggcctgtaaaagttctgctaagaaatctgctgttaatctaatagagactctcttatatgtgattggattccttcttactggtgtttttaatattctcactttgtctttgacttttgatggttttactataatgaacctcagaatggaatctatttggtaacttttgaacttcctggatctagatgtccatgtatcctccaaaacttaagatgttttcagctatttttgatcaagtagctttcctatgtcttttcttgtctcttcttcatctgaaaatcccataatgcaagtgtctgtgttcttaatggtg

SEQ ID NO: 626672 - DNA, 562 bp, Homo sapiens
tcatatggtctctgttaacaactactcaactctgcgattgtaccataaaaacagtgataagcaatatatacattgaatgggcatagttgtgtttaaataaaaacttatttataaaaacaggtggcaagctggatattggtctcggcaagtagtttggcaaacctctgtgttagatgagtgcttaatcactttttcgatactccatgtctctcaagtactctttcaacttatcttaatctttttgcttttccagtgcattcttagtgaacccctctgtatcctcttcctatttgttaattttctgttcatctctactctgtcaaatacttatttygtctactgttatcttttaacatctgtaattttactttatttcaaagttttctcataaatttttttgcatattcacttgatcttattttatttctatatctttattttatagtttctgttccttcttagatatttgtcttttgaccatctgcaaatactgctggagttattgattttgttggctgtcttttcagaattagttttcctaacatggcttgaattttcattt

SEQ ID NO: 626673 - DNA, 376 bp, Homo sapiens
actgaacctttggttgttactgcttactgccagagcccagctaataactctatccctcactcttttatacttgtttcgttttttcactgctcataatttttacyttatacttcagctcagctgttgttgcttcattttatttaattttttataggttatagcaaataagttttgtagagccctaactcactgttcaatgctgatcccaaattgggtattactgttaatataaaaagataaaactaaggttgaaaaatatctgtacaatttgctactcgcaccaagttattaagtgcctgagaagtgatacaaactacttagcttttgcttttccaacttgctacaatagttacaaagataatcaaatcctctgtct

SEQ ID NO: 626674 - DNA, 562 bp, Homo sapiens
aagtgtaatggctaaagataagcagagaaaggagataggaagtggttctgtgggtgtgtggatgtgggaaagatgactgaagttttaaatatggttgtcagggaaggcctcactgggaaggtaacatgtggggggattgaaaagagaagaagaaagtcatggagaaaagcactgtaggcaaagagaataaccagtgcagattcctggaggtgakggtgtgcttgaaatatttgagaaatagcaagacacctacttaacttttagactgttttaaactttcatttatgatttcaacaaacgttaattgaatattcaatgtggcccaaacacagtgctaagatctgggagcaccaatatgagtaagtaactattatacttatttgatgcttatgtgcatctagtaagggctctactcctaaaatgaaaaataaataaataaataaatatctagacacaataatgacacagagtagttttagttatttctcctggcactggtttgaggaaggataataatagtctgtgagaaacatttagagtagtaactaaaatatactttgac

SEQ ID NO: 626675 - DNA, 561 bp, Homo sapiens
tctacaattggagatttgtgttrtttttctctcattatcatcgttcattaaaattgtgtaatcttttctgcactaccagtcctcttgttccattgtcctgtcaaagtgttttagatgacctgtacgtgtatcttcttgccaacacaatatgcacaatattgcttttagcatgttaaactcacaatcaattaaagaacacaattaatcctgattgctatttcctaccaaaagtaagttttcatgaattataatgactgcaatcatgtgaatcattcatttagcacatatttacattttacctaatatctaccagggccagaaacatacacaaagaaagtggaaatagtccttgctttcaagtagactctcagtttgatgagccagacatgtaaacaagtaattgtgtttcagtgatagtataaagtaggaagaaatcaattcaaaagtcaattctaacctgggaccagtaaagtccaaaagagggattaatatttgaacttaatttgaaggttgaatacaagttctctatgtgaataaatcagataaaagaatatcgctaga

SEQ ID NO: 626676 - DNA, 601 bp, Homo sapiens
gtgatataatcatatccaaaaccactttgcccagggcaaaaaaaaaaaaatccttctatgaaattattaaattaatttatttaagagaattggtgacaaggctggaatctacacccagattgatttgtggtggaatagaggcagcaaatgcttattgatgcgagagcaccaagacagagaaaaatagaaatgatttcctagaattcacagaatttacaaggtagaactctggactgctacaagattgtgaaatgtcaagtcacattaagtttaaccacggctccaaaggctgggagattcccagccagcatatgtatatactatacacatatgtaattttacctcttcctaccactagaaaattccaaagtgatttttcatcaagcacatatctaattaaaatasctatgtggttcctgaccatcgccaaatatatgtagtacatttatttaaggaactattagctgtagtctacaaagccacatgataagaaatggacccaggtcaaaataaggtgtttaaaaatatgatttcattttttgagtaacctccatagtgtttttcataatggttgcaccaagttgtatttccaccagcagtg

SEQ ID NO: 626677 - DNA, 573 bp, Homo sapiens
ttttatagatttcagtgtacagatctttcacttccttggttaaatatgacgcagtagtccctctgctgggtatatatccaaaggaaatgaaatcaggaccttaatagagatatatgtactcccatgtatattgcagcattattcacagttcccaagatatggaaacaacctgtgtccattaataaataaatggatttaaaaattgtgacatatatgtatatacacaaacatacacatgcacacatatacaatacaatattattcagccttaaaaaaggagaatcttttacttgcactaagatggacgaaccaggagaacattatgctaagtgaaataaaccagaaacagaaagatactgtatgctctcatatatatgtggaatctaaaaagraaagttgaatacttagaaactgagaatagaaaggtggtttccagtggctgggaggtgaagaaaatggagagacctaggtcaaagggtagaacttagcagtaacataagatgaataattctaaaggtctaatgcactgcaagaagactatagtaaataatattttattctatattgaaaatg

SEQ ID NO: 626678 - DNA, 485 bp, Homo sapiens
  misc_feature 86: n = A,T,C or G
gaattgcttgaacctgggaggcagaggttatggtgagctgagattgcaccactgcataccagcctaagcgacagagcgagactctntatatatatatatatatatatatatatatatatatatatatatatayacacacacacacacacacataagctagaacctgtaaaatttttggcctactatctctttctctgtacatacctcatgtcctcaaaatcatattttattgcaatgttaaaattatcaatatctgcactgcatggaggcaaaaaatgatgttttactgagtacttacaaagcttatctactgtatggttagaatatgttttgtgatatttttaaaaactatagaacatgataatgaaaatatatttcagggcctagaatggtcttgaaaatataaaatattgactttctgaaaaacatcacaaagattatttagatacctgtttattttacgcattttttatgattcatgacat

SEQ ID NO: 626679 - DNA, 597 bp, Homo sapiens
  misc_feature 252: n = A,T,C or G
tgttgttcttatcattattatccattatcattaacatccgtctccactcccatatctggctttgtcattatgtatttccttaggggagttcatctaaatactagactagagttactcttggatcatttatcacagtttttagtgctagcatctctcattccttygcttcctttcttcctttttaatatcaacatctgttgatgctaagttcctgactgaatgactagactttgaacctatcactttttttcnttgtatatgcatccttttgttcttgactgtcgaacagaatttttgatcttctgctttaacttagccttatttttgatataaaacaaaaatctaatttccttacatacttctggttcaaatcatttttttcagaaattaagtctttcctaatttctcaaggatttctcaattcttcttgtctgaaaagcttacttggcagtccctgctgataaaatgcactgtattaagtgcctactgtgtgcccactagtgagataagtgagagatatataaaaatcaaaagtccacagtattctgctgccaccgtctgcatgataaactcattgattctctttgagctgtgtgt

SEQ ID NO: 626680 - DNA, 574 bp, Homo sapiens
tatatgaggaaaactaatttcagattttaaagagaaacagtttgattcagcacattaagcaactggatggcaattcacggactcagggttttcaaggtgtcctttggctgatgtgtttgacactgggaaagtcactgcttctctttacctcgggttactcatcaataaagtagcgtagcacatgattatgctgactcagctcattctcacagaatgttgattcactagcaatgatactgcactattctatttaagtaaccaataaaaataggaaggggtaaaattagtcacatttgtagctaaataagaatttgaaggaagcttatatgcttcagggcttcatrtatatatatatatatatatatataaaaattggtgaatttaggtaagatttgacaatgaaaataaaaataaatttcagttgagatgtgcaaggtagctctaagtaattttaattttagtgcaaattggagagaatgccagcgttcaagtttctgggggaaggtgtgagcagcagttgggatatatgccataattctatcaagatgagtatccactgctttcaggaccttta

SEQ ID NO: 626681 - DNA, 638 bp, Homo sapiens
tccttcaataggcaaatggataaactgtggtatatccatataatgaaaaattatgccacaataaaaagatatgagctaccaagccatgaaaagacatggaagaaccttaaatgtgcactggcaagtratagaagccaatctgaaaaggctacatcgatatatgatagcaactatatgaaattctaaaaaaggcgtaactatgtagacaataaaaagatcagtgtttgccagaaattcacagggaaggagggaggaataggtggagcacgcgggatttttaaggcaatggaactattctgtgtagtaatataatggtggataaatgtcattatacatttgtccaaacccacagaatgtgaaacaccaagagtgaatcctaaactatgaactttagttagtaataacatatcaatattggctcaacaaatataattgaaactgtagggagggtggcaggtaggaactctgtactttcagctcaattcttctgtaaacattaactgctctaaaaatacagcctacaaaaataagataaatgtgggcactttaagagagaaaaagttagctacattcaaattttacaaaaacgtttatcaaatcaccaattccacattaagaccaacaacaacgtatttatg

SEQ ID NO: 626682 - DNA, 501 bp, Homo sapiens
atcacagcattctgccactagccttcaaaattcaagtccttctcacaatgcaaaacacattcattccatcccaatagccccaaagtcttaactcattccagcagcaactcaaaagtccaaagcctcatctcagtcagatatgggtgagactcaaggcatgatacatactgaggcaaattcctctccagctgtgagcctatgaaaacaacaagtactgcaaaaataaaatgagggtgaaggcataggacagacattctcatttccaaagagagagacaggaaagaagaaagcagtaagtagtctcacataggtctaaaacccaacarggaaaacaacattaagtcttagttctgccaggatggatttgcatgctggtagctcgacagctctggattctcaaaggcagccccactaagaaggcttcactaggaattaccctatggggactatcatcagtggccttgttcccatggctccactacgcactgccttggtggagac

SEQ ID NO: 626683 - DNA, 594 bp, Homo sapiens
aaggcagcacagggcagtgaaggctgaagtctccctggcaccttgctagaaactttgccctcagagtcttagcttgcctcaaaggtctctaaaaggcctttggggtcatcttcccattgttttaacgaatagtaactggctcccttctatatacagtaatctctttagcaaacagttgcttggacacacccttggtttactctcctaaagatgcctttttcactctttacatggcctggctgcaaattttccagatttttaggttctatttctctttcaattataaattaaattatttatctcttctcacatcttactatatgtggttaaaaggccatgtagcaccttcaatattttgcatagaaatttmttccaccacatacctagttcatcactcttaaattccgcctcttatgaagccctagggcatggacacaacttagctaagtcctttgctaatttataacaaggatagtctttacacatactaaaaccatagcagtgcccttataaaagaaaccacagtttttgcccattccaccatgtgaggttataccaaactttggcagtctgtaatccaagagggccttcacc

SEQ ID NO: 626684 - DNA, 542 bp, Homo sapiens
caatgaatgtaccctccatgatcaaacacagatccataagcagaaagaagaagcattgattcaaactatttgagcacaatctctgaactgactaaacacaaggctgtragaaacagaagaaaacccagaaagtcaagcctaaaataaaacaatttaaaaaataaaacagagacatcagtggctacatgtttgggtgacagacttagtctagacaattaccaaacacacaaacaaaaatcaacaataacaataaccccaaaggaagaaaaaagtaaaaaactgtaattgcttgctacaaaatactatcttagtccagtgttcaaacaaaaaattataagatataacaaacaagaaagcaacttattgacctgggaaaaagggagtcaatcgaaatacaagtcaagcagtcattataaatatttcaaagagctaaagaaattcaagtttaaaaaaactaaaggaaagtataacaacaataatccactaaatggaatatcaacagagacattatttaaaaaaaaaaacagaaattctggagttga

SEQ ID NO: 626685 - DNA, 547 bp, Homo sapiens
gacacaattcaacctataacagtttttttattattattttaaacatgaatattcaatattttaaaaattggtaagctgtacagtttaaaaatagtataatttttctttcttttttttttttgagatggagtctctgttagcctggagtgcagtgctgcaatctcagcttgctgcaacctccgcgtccygggttcaagggattctcctgcctcagccttccaagcagctgggattacaggcatgcaccaccatgcccagctaatttttgtatttttagtagaggggggggtttcaccatattggccaggctggtcttgaacgcctgacctcaagtaattcacctgcctcggcctcccaaagtgctgggattacaggcctgagcccactgtgctcagccagtacaatttttcaactgtacttttacaatttaaataagaacatgaagttgattgcttgttttccatatattttgacaaattagtgtttttttttaacagtggaacagttttcttgcagttactaaataatataatagctacagtaaatg

SEQ ID NO: 626686 - DNA, 592 bp, Homo sapiens
cctcagtttctcagcagtaaaaggaggggactagattagataattttaaagaaaccttttcagaaactttattttgaatcaaatatatctgattcaactataattcgtaaatcttaaagactgtcttcaagaatggggcaacactgttatgagaaaatcaaattgcacagagtaaactgggaaaatcatgaaattaagaaaaagaaaaacatgttaaaaatgagtaacagaacgaaataaataaataaaaataattagaggaaggaaaagaaagctatagtttatccctggccttatatgtggaaataatttctaagaaacatgtcattgttccttaaatttaaaaaaaaaggtggggggtgttgaacatattatcacggaattttacattattctttttcaattaaaagaatttaacaggcctaactttgagtctaaaatacttgtttttaaatttccaagccctgawtaagaatagaggggaaggactgattaagtttctaacagaggggaaggactgattaagtttctaacagaggagaagggctgatttagaggggaagtgctgattaagtttctaacagaggggaag

SEQ ID NO: 626687 - DNA, 613 bp, Homo sapiens
caacaggctctacttctaattctaattctcttacagtttctaccacatcagcagttacttcctgctctgaatttttgaatccctaaaagttatccatgagcgctgaaatcagcttcttccaaactcctattgatgctgatattttgaccttctcccatgaatcacaaatgttcttagtggcatctagaatggtgactcctttccagagggtttcaacttactttgcccacatctgtcagaggaatcactatctgtggcaactgtagcctcatgaaatagatttcgaaagttgagctgactccttgatccatgggctgcagaatggatgttgtgctagcaggcatgaaaacaacattcatctcctygtatatctccaccagagctcttgggtgaccaggtacattgtcaatgagcaataatattttgaaaggaatcttttttctgagtagtaggtctcaacagtagacttaaattattcagtgaaccatgctgtaagtagatatgctgtcatccaggctttgttatttcatttactgagcaaaggaagagtacatttagtataattcttaagggcctgacatttttctgaatggtaaatgaacactggcttcaa

SEQ ID NO: 626688 - DNA, 651 bp, Homo sapiens
agtcttctggtttatttttatttatttaggtttaacttcactaagtcgtttctactcatctcctagatgttgtttgcttttcttcttctggatctctgaacaatggattgtgctaggtttcagcctttgtttcttatcttctctatctaaacttaacctatagttgatctcatccagtcctgtggttttcaatattaaataccatatacccaactgtttctgactactccacatagagctttcctctgaactccttgttcacatattgaaatcrgtactatacctctctctccacttgaatgtctggtagatttctcaaatttagtgtagccaaaaccaggtccttatattccctcaaacatgctcctgctgccatctccccctcatctcagcaatctatttggcaattctttacttccagcaggtcaaaatctttggagttatctttaactctctcacagcccacatttctttccactgctacacattgctcttagtcattactatcttttacttggattttattcttgtaataggtctgtctttctgcaactgcttttgctcctgtttttcatttctaccccctgccccttgttttattcttcctgtgatattgagtgaaattttaaatatttaaattagatttttttt

SEQ ID NO: 626689 - DNA, 596 bp, Homo sapiens
gccatctccccctcatctcagcaatctatttggcaattctttacttccagcaggtcaaaatctttggagttatctttaactctctcacagcccacatttctttccactgctacacattgctcttagtcattactatcttttacttggattttattcttgtaataggtctgtctttctgcaactrcttttgctcctgtttttcatttctaccccctgccccttgttttattcttcctgtgatattgagtgaaattttaaatatttaaattagattttttttttacttttataatttgaaattctttaatggcttctcattttattcagagtaaaagtcacatattttatgatgggctgtgtgtcctcacttttcactacttttctgatctcagtttcttctgctcttgccctcaccttctgctagaatattctttcctcaaatatcttcttactctcttcctcatgttcctgcttaaaggtctcctcatcattgaagacctcattgatcgccatatttgaaatagcagtctttcccttctctacttgccatttctacctaatttttcttcatagccttatctctgtgtgacactgta

SEQ ID NO: 626690 - DNA, 613 bp, Homo sapiens
atgttcttcataaatgtattttagtcagttttgttcagtattgtatctctcacacatggtaggtgcttgctaaatgctggttaaatgaatgagtcttacatactgcatagatacatagctaaaaattaatataatggaatgtcaaattttattttcaagtaagtgttgtgacctattttcaaactccagcactgtgactctagaatyatttctcataattgttgaattttaaggccttctgtgaaaataattgtagctgatcataagaaaaaggcagtgagctgatctcaactggtagtctgttttcagcactgccattaacttagtggtgtaactttgaacacattgcttactggtttttttttttgttttgttttttttgagacagagtcttgctgtgtcacccaggctggagtagagtggcgcaatcttggctcactgcagcctctgcctcccaggttcaagcaattctcctgcctcagcctcccgggtagctaggattacaggcacttgccaccatgcccaggtcatttttgtatttttagtagagatggggtttcaccatgttggctaggctggtctcaaactcctgacctcaagtgatccgccatcc

SEQ ID NO: 626691 - DNA, 565 bp, Homo sapiens
aggttcctcagaaatctaaaaacagagctaccatatgatccagatatacctctgctaggtatatcccagaaaaaaggaaatcaatatattgaaaagatatctgcattcccgtgtttactagtcacartagtaaagatttggaagcaacataagtgtccatcaacagaagaatgaataaagaaaatgtggcatatacgcaatgaagtactattcagccattaaaaaaaaaagattctgttatttgcaacaacatagatggaactggaggtcattaagtgaaataagccaggcacacaaaaaccgacttcacttgttctcacttatttatggaggctaaaaattaaaacaattgaactcatggacacagagagtagacagatggttaccagaggctgagaagggaaatgaagaagtggaggtaaagtggggatggttaatgggtacaaaaaacagaaagaataaataaggtctagtatgtcacagcagaacagagtgactacaatcaataataatttaactatagctgtaaaaataactaagagtataaatggattgcagtagaaag

SEQ ID NO: 626692 - DNA, 565 bp, Homo sapiens
aggttcctcagaaatctaaaaacagagctaccatatgatccagatatacctctgctaggtatatcccagaaaaaaggaaatcaatatattgaaaagatatctgcattcccgtgtttactagtcacaatagtaaagatytggaagcaacataagtgtccatcaacagaagaatgaataaagaaaatgtggcatatacgcaatgaagtactattcagccattaaaaaaaaaagattctgttatttgcaacaacatagatggaactggaggtcattaagtgaaataagccaggcacacaaaaaccgacttcacttgttctcacttatttatggaggctaaaaattaaaacaattgaactcatggacacagagagtagacagatggttaccagaggctgagaagggaaatgaagaagtggaggtaaagtggggatggttaatgggtacaaaaaacagaaagaataaataaggtctagtatgtcacagcagaacagagtgactacaatcaataataatttaactatagctgtaaaaataactaagagtataaatggattgcagtagaaag

SEQ ID NO: 626693 - DNA, 544 bp, Homo sapiens
gcactactgctttctaggaatctcacaatttatgctaggatacagtaacgggctaaatatctgttatccaaaatgcttgggatcggaagtgtttaggatttcaaattttctcgaattttggaatatttgcattacactggttcagcatccctaatccaaaaatgcaaaacccaaaatggtccaatgagcatttccttgagtgtcacattggcactcatgtctccccaaaatgtataaaagtaagctgtatcccraccaccttgggcacatgttctcaggacctcctgaggctatgtcacaggtacatccttaaccctggcaaaatacactttctaaaatgactgagacctgtctcagatatttggggatcacacagtaaatcagtaagacctaaagtaaaatcctggctgcatctgtttttaaattacttataaaccctgagcctaaatctctaattccatgaagctcaggtaaatctgggccagagaaagttggattctggttgtttccaggtaaagtgaacactgtgagcaatgggaggtaa

SEQ ID NO: 626694 - DNA, 506 bp, Homo sapiens
tgaaagggtaacttttagttcacattacaaataaaatgaatgattatgttacccgtatcattcacttaagcttaaatattaaaattttggttaatgaaatgcaagttaacatgtatacttaattattatgtaagttactaatcatcagaaaatattttcatgcttgattttagtaaattcgttaatattgaaatcttygtattgttcccataaggaagtaatacataggtgcttatgtgtatatttgtacacatgactgtttaattcaaattgacaagagagaaactttgattttgttactttgaatgaaaatgattacaaataaggtacatttattaccagtatgtaatttatataaagtttatggtagcatcctcaaataagaatatttgacatatttgttctaggcattatgtcagtgaataccacagttttcttctttcaaattaaaaaaaaatcttatattacagtgatgcttttcagggtaggcctaaagagaatggact

SEQ ID NO: 626695 - DNA, 623 bp, Homo sapiens
atgtgttattttagatgtatctttaccaaggaagagatggtaaatccatgttgtggctttttacgtattttataaagacagggttttaaaaaaataatatagcaacactgtaagtcaatcttctccatgttttcttgaatcatttttgtattctcatcttttatcagtagttgtcacactttttatggaaccaaatgcctaataattgaaacacatacacatgatctttgagaaatcatgaaaatacaattcttgtgcttagtgatatccagaaagcataatattctgaaaaaagttattcccttcagtcaatttaaaattaaacactctaatgcaaaaggatatctaaggtgaaagatgtttgtgtaatgctaaacataaccaaagaaactgtggttttagcaaaggtactattgctctattttatcaagtgccagaaattgcataatgaaagtctttcagttagtgaaaatataagtataaaaacacaaaaataccacccagctggtagagatcttcctaatttttacctgattgtatttctgaagaaatatggcagggctgtcgtaaattttcarcatgaactgcatttttgttgccaatttccatatcctttaaaaagt

SEQ ID NO: 626696 - DNA, 522 bp, Homo sapiens
gggttcagtatattgacagtatttgaagtaatgggtaagaatcaagttacataggagaaagtagacaaagattgcatctactagcattacttctccaaactcatctctcattccctaaaattgtacagttgtacaatatacagcctcaaatttcatatgttaaatagaatcctaaagtaaaacacgtgttcaaaggttaacatgctgcccactttcaaattttattgatttactgctattttataaaatgccttagagggtgtaagagttactacagcttttkttttttttgaggcagagtcttgttctgttgtccatgctggagtgcagtggtgcaatctcagcttactgcaacctccacctcctgggttcaagcgattctcttgcctcagcctcccgagtagctgggactacaggtgcctgcaaccatgcccggaaaatttttgtatttttagtagacaccatattggccaggctggtcttggacttctgaccttataatccaccctcttccacctccca

SEQ ID NO: 626697 - DNA, 616 bp, Homo sapiens
cattgctctcagatttataactgcttcatgtaattttccttagattaatttatgtagaattatttaaaaactaaaaacacaatttataatgaaagtgcgtattagttgaagttatattcattatttttgatacaaagtcacttaaaaattaatagcacacatatgatcccacaattccacttccaaatatatatttaaaaaaattaaaagcatggactcaaatggaaatttttacaccaatgttcatagcagtattattcaaaacagccaaaaggtggaagctatccaaatgtccgtcaacagataaatggataaaataaatagtttgcacatttctgatttacttttcttagattataataacttaattttaaatatctgcagagcaaaaaggcacagagattgaaaaatacattttggaaatattgcctttaaaggaatttctactattcaaattaaatataatgccaaaataatatttgttaaagcttaaccagggactaatttacaacataagcttagcttggaaaacaaacaaaaacagaccttgttctaaaatgaaaacygactatttgacttaaaatttggaattttgagcaaataactttgttttaga

SEQ ID NO: 626698 - DNA, 422 bp, Homo sapiens
atgaaaggccaaaagctgaagtatgtgtttgccatggaaatagtgttttgtttacaggacttgtcttttctagaactcatccattaaatggtaggagagaaccacttcaatcttgacattgtattgcattcrgagctttcattactagaataatatttgttcatttttcaataagaagcataaaatgttccattgctcattttgtccgtttgtttaatgacattggtaggcttgttacttaaattaaatccatctaaagaaaatgaatatgtactggttaatccaactgaacccatgtaaatacactactgtggctctaaacattggcaaatataacaaaccctcactaccatacaggatggaatgttacagataatgttctgcttcacaaccaatgacgatggtgccagaatgctcatgtt

SEQ ID NO: 626699 - DNA, 591 bp, Homo sapiens
tttaattttttttattgaatttgtttcttgttttatttttccttcctttgcacaaatgagagcttctagttttacaaagggtaccaccaattttaggataaamatttgtatttgtgggataacacaagttcgagacacaatgatttagagattgcatatcaattttatcaaataaatgtgatgaaagtaagtgatatgcacagtcacacacacacacacgcacacacgcatatgtagtgataaaaccattgacacagattcccagatggcacttaatgtactttcagtcttaaattctttctcaacgacaagccatttgtttgcaaatgatttagcattcaaaaatgattcaacatgagaaaaaaatgcattgcacataaagttcagattacaaaagaattaaagtcatactaatataactataatttataatgaattcaaatagctttcagaagggtcatctgtggaatgtaaagagcaatctgaatttatttttctgtaactggtcacagcaatgttttctagactagtgagtgtgtgctcatacagcaccatgtgtgttcaacaacacacaaagttggatgacaaaat

SEQ ID NO: 626700 - DNA, 570 bp, Homo sapiens
aattattcaaaaacaagaaaacttctaaattgaaagaatccctaaagtaaaagtagaccaaagaaaaagaaataaaggtgagaagtgagatgaggcagaaatagtgggcgacacggagacgtactgagaaaaaaagtagctaaagatagtgtgttattatttcagcaaaattaagtatatcaatactgagaaatatgacttgaaatagattcagtacctcaagcagaaacgtaaacaaataacatctggctttttcttttgataaccagtattttaaatacaaacatctaaaaatattatctttgtgtaagagttacacatttatcattccaatcctcagggtgcattgtttcmaactaaacagtaatcatttcaataacaaaaatgtgctgtaaatactgtatggaaataaatttcctaacagatgttaaccagacatcagtcttcactggtaaggattagatttgaaggtgtttgcagataattaaaacttgtttttataacataacttagcagctaagtagtataatgaaaatgggatattcaaattataagatataaaatattaaa

SEQ ID NO: 626701 - DNA, 412 bp, Homo sapiens
gttatatttcctgcctaagatgtttgtatgggtgagtgaaaggtctgatgaagatagttcctttttgcccccaaaggttttattgatcatgctgacaatgaatttattgttattttaatctyttactgttatactcaggcttaaattctctaccctatacacttcagttgacataattttaatttccactatgatgcttctctcttttctatcaacactctctccccgcagggtttcatctagatcaggagtcagcaacatttttgacaaagagccagacagtaaatattggaggctttgtgttgccaagaggcaaatttatggaaatttccctgctgaaaaatttccctatattttacattttagacttataaatgatacacctacttataactcatgagccatacaaaca

SEQ ID NO: 626702 - DNA, 411 bp, Homo sapiens
gttatatttcctgcctaagatgtttgtatgagtgagtgaaagtctgatgaagatagttcctttttgcccccaaaggttttattgatcatgctgataatgaatttattgttattttaatctcttactgttatactcaggcttaaattctctaccctatacacttcagttgacataattttaatttccactctgatgcttctctcttttctatcaacastctctccccacagggtttcatctagatcaggagtcagcaacatttttgacaaagagccagacagtaaatagtgcaggctttgtgttgccaagaggcaaatttatggaactttccctgctgaaaaatttccctatattttacattttagacttataaatgatacacgtacttataactcatgagccacacaaaaa

SEQ ID NO: 626703 - DNA, 607 bp, Homo sapiens
ctttaaatggtaacataacatgcacttctctctcccaaagtgtagtgcataaacgttctgcttctgaataacacaggatgcctggtaagatgtgctgtcaggggtattagtaaggaaatgttgtatcaaaacttctgcagatgtggccctgaaatacacattgtaataaatcctccaggcctctcaagttaggaataacttctttataaaattgtacttacttaaaattatagataaacagatttcacagtaacccaatttttctgatctgaatgaaataaggctctatattcagactgacctttcagtgaaaaacaacttaaaacagtgacaaamcatctatgtctaagtttaaatgaatgtaactaagagacctgaaaactcaggtttagtagtcatcttccaatagtttgagagcccacaggagccatagagccctcaagtctctccagagaagcagggtggtttttcgtcctaaacaccatgaaattcttgaagtgagtaaaagcattcctgcttacactgatattctctcaagtgaactcaaagttaagccatctccagccagaccagataccctggcccatatctcattcattaatatagg

SEQ ID NO: 626704 - DNA, 607 bp, Homo sapiens
ctttaaatggtaacataacatgcacttctctctcccaaagtgtagtgcataaacgttctgcttctgaataacacaggatgcctggtaagatgtgctgtcaggggtattagtaaggaaatgttgtatcaaaacttctgcagatgtggccctgaaatacacattgtaataaatcctccaggcctctcaagttaggaataacttctttataaaattgtacttacttaaaattatagataaacagatttcacagtaacccaatttttctgatctgaatgaaataaggctctatattcagactgacctttcagtgaaaaacaacttaaaacagtgacaaaccatctatgtctaagtttaaatgaatgtaactaagagacctgaaaactcaggtttagtagtcatcttccaatagtttgagagcccacaggagccatagagccctcaagtctctccagagaagcagggtgrtttttcgtcctaaacaccatgaaattcttgaagtgagtaaaagcattcctgcttacactgatattctctcaagtgaactcaaagttaagccatctccagccagaccagataccctggcccatatctcattcattaatatagg

SEQ ID NO: 626705 - DNA, 642 bp, Homo sapiens
tctgttccaggaacttaacttggcatggaggacacaataatgaacatagtatactccttgtctccatggagcttagcatctaatgagggatacagaaattcatcaaagaggttcacaaagaaatgtaaaattacgattgtaatttgtgctgaaaaggagggaggtgtgtggtgtgtgagagcattgacaggagatttgactcaatcaggagggtctgtgwtctgaatggccataagccagccccttgcctagctgtagcacaattattgctgtatgtagtccaatctcttattgctggacatttacattcttcccacatcttacctactatcatcgatgcaacaataaatacccttcgctaagtaccacttggcacacttctctgattatttcctcaggataaatttctagggtaaagccaggcaccacggttcatgcctgtaatcacagctactcaggaggccaaggtggaaggatcactctggccagtagttcgtggccagcctgggcaacatagagaagtcttgactcaaaaaacaaaaatcctagtaagaaatgaacaattcttagatgtcgaattgccaaatcaaggggtgcaccatcaccatccccatattcaccatcaccatactcattatcatc

SEQ ID NO: 626706 - DNA, 567 bp, Homo sapiens
ggctgaaagagaagggtatgtgaaactgtacaggtcttcattagtgatgatgaggaacataggtcttagtccaagtacaccagaaaagtgggagagttggaaactgaaagacatgttaagagatcactttggtgtctatgtagctaacagagtgtaggaaattaagaattaaagttggttgactaaggatgagcctaagaaaatagagtaggtaagaaaataagtggatctggctaggctggggacattggaaatcaaaataagtggaggaaattacagatatatttggaaccaaaatattttttaaatgaatgttgaattggatattgtcagaatattgaggaagagccaaaaatgacttataagcatctagcatggctggcagtgccacttactgacatgtgggaaaccaggacatgttacctctgaattattcgagtgctattgtcatgtaaatcatcaactcccagaataaaagtctgggccaaactctaaaagtggaaattmttagctgtttagtagtgtttagagcttagaaagagtatgtgtgtagagagaaaagaagag

SEQ ID NO: 626707 - DNA, 598 bp, Homo sapiens
tcttataagagaaaaattggaaacttttgcaaaaagagattggaaaggtgtcacatcttgtggcatgaggatttgtgggcatacacttgaactttgtgctgtgagatatccacagaacttcagtagcttaagagaacagtttagatgtcatcttattcatctaccatagaacttcttcttcttttctgagatttctagacagtaacttttacagctctaataatgcagttatctcccaattgtttggatttttctaatagatacaaagcagtatttcaccagcagatgctactgcagttcatacggtgatttcaaactaagaatccctttaaagttatgcaatactttttttttttggaaatagggtgaaagtactttaagattaaaatcctatgaaataggtttacagtaaataattatttgttgcaatgtctatcctaatatcttatattcacacatgtatcggtgtcctaataaatatatgtggtgaatgaaagttacttgagggcagagactgtgccatatgttccctgcaccactgatgcctatctcagcacgtgakgtacagtagatgctcagtaaataacttaaaaaacgc

SEQ ID NO: 626708 - DNA, 394 bp, Homo sapiens
agacagggtttcaccatgttgcccaggctggtctcaaactcctaagctcaagccattctcccacttcagcctctgagagacgtgagccacccttcctggcctctaaattcatgttatgtagactgattttcatggttaaaatgtcctgaattgactgtgatctgttgggaggtgggatggaggaaactgcttatggaaattgaagaagaaagggaagcacaccagaagcaagaaagtgtcatcgatttttacatcaaagactccatggtaaagagaaagaacaggtagcctgttttygtggctgatcattggactgcagactgcacctgcatctaccaggttcttctggatagtcctagttttaaattgttgacctggcattcatgaacacagt

SEQ ID NO: 626709 - DNA, 524 bp, Homo sapiens
cattctcctgcctcagactcctgagtagctgggactacaggcacctacaaccacgcccggcaaattttttgtattatagtagagatggggtttcaccgtgttagccaggatggtctcgatctcctgacctcgtgatatgcccacctcagcctcccaaagtgctgggattataggttgagccactgggcctggccctgtttgttcttttacattaactttacaatgtatttgccatgttttaaaaataaatttaaktggaattttattgaaattttatgagacatgatttagtcaaagatgaagacacaacattattattactgtttccatctagctatggcatatttcttttttttctctagttgtcttttatatcactcaataaaatttgtggctctggtacatttcataataatcatacattatatttcattatttctaattattataatggatcacatgtacatttactatgtaccacatattatgagataatgaatatattcattatctcaattcataaa

SEQ ID NO: 626710 - DNA, 592 bp, Homo sapiens
gggtttcaccgtgttagccaggatggtctcgatctcctgacctcgtgatatgcccacctcagcctcccaaagtgctgggattataggttgagccactgggcctggccctgtttgttcttttacattaactttacaatgtatttgccatgttttaaaaataaatttaattggaattttattgaaattttatgagacatgatttagtcaaagatgaasacacaacattattattactgtttccatctagctatggcatatttcttttttttctctagttgtcttttatatcactcaataaaatttgtggctctggtacatttcataataatcatacattatatttcattatttctaattattataatggatcacatgtacatttactatgtaccacatattatgagataatgaatatattcattatctcaattcataaaacaatcatgtgatttagttggtgttattactagattattaccattgtacaagtaaagaaaataaagacaaaaaaaaaaaaagaaaagagactcagcaaaatcaaaccaataaagacttaatcagaattgttgggcatataataaaaatttaatac

SEQ ID NO: 626711 - DNA, 592 bp, Homo sapiens
gggtttcaccgtgttagccaggatggtctcgatctcctgacctcgtgatatgcccacctcagcctcccaaagtgctgggattataggttgagccactgggcctggccctgtttgttcttttacattaactttacaatgtatttgccatgttttaaaaataaatttaattggaattttattgaaattttatgagacatgatttagtcaaagatgaagacacaacattattattactgtttccatctagctatggcatatttcttttttttctctagttgtcttttatatcactcaataaaatttgtggctctggtacatttcwtaataatcatacattatatttcattatttctaattattataatggatcacatgtacatttactatgtaccacatattatgagataatgaatatattcattatctcaattcataaaacaatcatgtgatttagttggtgttattactagattattaccattgtacaagtaaagaaaataaagacaaaaaaaaaaaaagaaaagagactcagcaaaatcaaaccaataaagacttaatcagaattgttgggcatataataaaaatttaatac

SEQ ID NO: 626712 - DNA, 608 bp, Homo sapiens
ctaaggcaggaggatcacttgagcccaggaggtcaagactgcagtgagccgtgattgtgccactgcactccagcctgggtgatacaatgaaagtctgactcaaaaaataaaagaaaaaatgtatagaaagaactttaaggccaggcgtggtggctcacgcactttaggaggccaatgcaggcagatcatgaggtcaggagttcaaggccagcctggccaacatggtgaaacccagtctctactaaagatacaaaaaattagccaggcatgatggcacatgcctgtaaacccagctactcgggaggctgagtcaggagaatcacttgaagctggggrgtgggggttgcagtgagctgagatggtgccactgcactccagcctgggtgaggggtccagactccatctcaaaaaaaaaaaacaaaaaacaaaaacaaaaaaaaaaactttaaaaactgcatgtggtaccatgaaacatttaaatattttattttttttctttttttatttattaattattattatactttaagttttagggtacatgtgcacaatgtgcaggttagttacatatgtatacatgggagactttaacaccccactgtcaacat

SEQ ID NO: 626713 - DNA, 608 bp, Homo sapiens
ctaaggcaggaggatcacttgagcccaggaggtcaagactgcagtgagccgtgattgtgccactgcactccagcctgggtgatacaatgaaagtctgactcaaaaaataaaagaaaaaatgtatagaaagaactttaaggccaggcgtggtggctcacgcactttaggaggccaatgcaggcagatcatgaggtcaggagttcaaggccagcctggccaacatggtgaaacccagtctctactaaagatacaaaaaattagccaggcatgatggcacatgcctgtaaacccagctactcgggaggctgagtcaggagaatcacttgaagctggggagtgggggttgcagtgagctgagatggtgccactgcactccagcctgggtgaggggtccagactccatctcaaaaaaaaaaaacaaaaaacaaaaacaaaaaaaaaaactttaaaaactgcatgtggtaccatgaaacatttaaatattttatttwttttctttttttatttattaattattattatactttaagttttagggtacatgtgcacaatgtgcaggttagttacatatgtatacatgggagactttaacaccccactgtcaacat

SEQ ID NO: 626714 - DNA, 575 bp, Homo sapiens
tccactgtctacttggggcctggtgtacacatggggcctgggcatccacctgagacttgatgtttaatatggtctggagttctyttggggcctgttgtaccctggagcctgggtgtacacctggagcctgatgtcccaggtgaacaactgggtcccaggtgatcttcaggccctaggtgaaaactccaggctctaagtggacaaccaggctccaggctgatgtttactggggccagatgtctaccaggccccaggtgaaatccccaggctccaaatggacaacatagccccaggttccaggtagacattggaatccaaatcaacaccaggccccagatggacacccaggcctgtggtggacatcagactgcagaaggtcatctggctcgaggtggacatcaagccccaggtggatacctagtccccaggtggatatcaggccccactttgacaccagtccctgggtagataccttggcctcaggtggatatccagtctctagctaagcatcaggctccagggggacccaggccctagctgactggggactagtgttcatatggggccacatgtcc

SEQ ID NO: 626715 - DNA, 566 bp, Homo sapiens
aaaggtgaatttttattatatactagaggaaagaaggcagwtactaaataataaatactgtatgcttccatgtaaataaaatttgaaattcccaagacaatgcattaaacccttctgtggttgaagttgggaatttcattggcaaaggtcatgcaataaatgtgtaggtgaagggaatattctatattcgattgtgtaggtgattatctagctttataaatttgtaaaactgaactggactaaaatgtgtgccttatacgcaaattattctataaaattgattaaaactagttaggagagaatcagtcaaggggaaaagaaagaaaaaacacgtgaaaaaataatgccaatgcactagaattgtctttgatgacatgaaatatagcctggccttctcttaattctttttaaaatttatgtagatttctcaatcctttgatacttttttctcaacacaccttatattctcgtatatgttgatgtatggttacataagagaggactcttttacagttggactggaacagcttgatatttatatctagagatgcattggaagcataaca

SEQ ID NO: 626716 - DNA, 322 bp, Homo sapiens
aatactagcttcatagaataaactgggaagtgtattctcttttttttyttttgcaagagtttgtaaataattgtattaattcaactttgaatgtttggtagaggcattcttggctagaagattttgttgctgttgtcattgtttcctgaggtggtagttttgattactaacttaatctctttacttgataagattttatatatctccttgactcatttttgctaatttgaacctttcttagaatttgtccagttcttaaaaagtatctaaattttagatgtaatttttcataggtacttttataataattttttatttcttt

SEQ ID NO: 626717 - DNA, 322 bp, Homo sapiens
aatactagcttcatagaataaactgggaagtgtattctcttttttttcttttgcaagagtttgtaaataattgtattaattcaactttgaatgtttggtagaggcattcttggctagaagattttgttgctgttgtcattgtttcctgaggtggtagttttgattactaacttaatctctttacttgataagattttatatwtctccttgactcatttttgctaatttgaacctttcttagaatttgtccagttcttaaaaagtatctaaattttagatgtaatttttcataggtacttttataataattttttatttcttt

SEQ ID NO: 626718 - DNA, 322 bp, Homo sapiens
aatactagcttcatagaataaactgggaagtgtattctcttttttttcttttgcaagagtttgtaaataattgtattaattcaactttgaatgtttggtagaggcattcttggctagaagattttgttgctgttgtcattgtttcctgaggtggtagttttgattactaacttaatctctttacttgataagattttatatatctccttgactcatttttgctaatttgaayctttcttagaatttgtccagttcttaaaaagtatctaaattttagatgtaatttttcataggtacttttataataattttttatttcttt

SEQ ID NO: 626719 - DNA, 322 bp, Homo sapiens
aatactagcttcatagaataaactgggaagtgtattctcttttttttcttttgcaagagtttgtaaataattgtattaattcaactttgaatgtttggtagaggcattcttggctagaagattttgttgctgttgtcattgtttcctgaggtggtagttttgattactaacttaatctctttacttgataagattttatatatctccttgactcatttttgctaatttgaacctttcttagaatttgtccagttcttaaaaartatctaaattttagatgtaatttttcataggtacttttataataattttttatttcttt

SEQ ID NO: 626720 - DNA, 440 bp, Homo sapiens
ttgttgaggttctcaattgtttttctattttgtatttcactaatttgtatatcyctaatactttcttgtggttgctgtagttttaatttgctcttcttttttcagtgccttatggtggcaggttagagaatgttatttttgagtatgagaactacttttattgcatcacagagatactatgcattcttaaagtattttaacttttttaaagtattttctaatttatcttattatttcttcttgaacccattggttatttaatagcatgttgtttaatttccacataattctgagtttcccaaattttcctattgctgatttattattttactcaattattgtctgaaaatatacttcgtattattccaatgtttaaattcattgaggtctattttatggcctggggtatggtattcctgggtaatgttgcatgtgcactt

SEQ ID NO: 626721 - DNA, 440 bp, Homo sapiens
ttgttgaggttctcaattgtttttctattttgtatttcactaatttgtatatctctaatactttcttgtggttgctgtagttttaatttgctcttcttttttcagtgccttatggtggcaggttagagaatgttatttttgagtatgagaactacttttattgcatcacagagatactatgcattcttaaagtattttaacttttttaaagtattttctaatttatcttattmtttcttcttgaacccattggttatttaatagcatgttgtttaatttccacataattctgagtttcccaaattttcctattgctgatttattattttactcaattattgtctgaaaatatacttcgtattattccaatgtttaaattcattgaggtctattttatggcctggggtatggtattcctgggtaatgttgcatgtgcactt

SEQ ID NO: 626722 - DNA, 440 bp, Homo sapiens
ttgttgaggttctcaattgtttttctattttgtatttcactaatttgtatatctctaatactttcttgtggttgctgtagttttaatttgctcttcttttttcagtgccttatggtggcaggttagagaatgttatttttgagtatgagaactacttttattgcatcacagagatactatgcattcttaaagtattttaacttttttaaagtattttctaatttatcttattatttcttcttgaacccattggttatttaatagcatgttgtttaatttccacataattctgagtttcccaaattttcctattgctgatttattattttactcaattattgtctgaaaatatacttygtattattccaatgtttaaattcattgaggtctattttatggcctggggtatggtattcctgggtaatgttgcatgtgcactt

SEQ ID NO: 626723 - DNA, 436 bp, Homo sapiens
aattccacctggggcctggaattaacctgggacctgatgtccacctgagacgtgggtgttcctctggagtctgatatctatctggggcccgggtgtcctcctgtggtctgatgtccacttgtaggctggtgtccacctggggcctgggtgtccacctaggaacctgatgtatacctgaagtccagtgtctacgtgggtactgatgtctaccaggaaagtgatataaacctggggcctgatagccacctgggccctgagtgtccacatatgttctgatttctcttttggcctkagtgtagggcctgagtgccacctgcttcctgatgttcaccaggaacctaggtattcacttggggcttgctgttcacctgggacctaatgtccatgtgaggcctggtattcagctagagcctgggcatccccctgtggcctgaag

SEQ ID NO: 626724 - DNA, 655 bp, Homo sapiens
tgccattatatagtgttgccacgatacaaacatcatctatgtaaatatttttggtagcataaatcacagcaaaatatagcgaaatacttaggaaatgatgaatttaagtaatttgttttccttatttttaatataatttaattataaattaaaaagtttatttttaataatttctgtgtctaaaaaggacctcagaatatttctaaaaatttaatagttggatctcatgagttgatatgagatagctctcaaacacaattgtgtataactaaaaagtctagaattatagctagttttagagtcaggaaataaaatgaagtggtcagaattttaattctctcatctagggaatagctaggatttaattttacatctagattgggtcacaygttcatatctggacaaattaattacaaccatccagttagaatacactagtcagaactgggtcatggacaacttctagaatttgcagatttatcaggttcacctaaaccacattgattcaaacttaaaaacattattccatcaaagaaaattggcaaaaagaactgctaaacatttattgcatactctttccaaaaatatacacctacagtataaaatactaactagtaatgagaatatgtttattgaaaatttactatatttcaaa

SEQ ID NO: 626725 - DNA, 529 bp, Homo sapiens
gcagtatatagcatctagaccttgtaattgaattttcaaagtttgctgtggtttgggagctgcatatgggtcagtaatcattatccagacaccatcatttatagtacacatacaattaatcaactcattaattatggaaagagtctcagggaaggctagtacacctatttcttaaacaaatatgttacccttgagctgtaaaagtagcatttccatcagccattgccttagattattgttagatatttgttctgggatcttttaaaacaaggcccataagaagagtcaatataaaaatctttcagacataaggcctgtcgtatatgttcactgaatttaatcactttctggttaactcactgttcaagtcagctttggatctttatcttctgaagctaatgtcaataacaccttatttttaatttaactaaatycagccaaacgtaggagaaacaaatcatgcttcttttcattactagttttagtagattttttgccagggcaaaattggtaattagggacagtaaag

SEQ ID NO: 626726 - DNA, 574 bp, Homo sapiens
tcaattcaacaagaggatttaattgtcctaaatatatatgtacccaatattggagtagccacattgataaaacaagacytaggaaaagacttagacaaccacacaataatagtggggaaattcaacaccccactgtcactattagatcactgaggcagaaaacgaacaaagaaattctggacttaaagtaaacacttgaccaattggacttaataggcatctacagaacacttcactcatcaaccacagaacatacattcttctcatctgcacctggaacatactccaggattgaccacatgttcagccataaagcaagtttcaataaatttgaaaaaatctaaatcatagcaaccatattctaagaccacagtggaataaaaatagaaatcagtaccttaaaggactcaaaaccacagttacatggaaattatacaacttgctcctgaatgacttttgtgtaaacaatgaaattaaggcagaaataaaaaaaatttaaataaatgaaaacagaggcacaggtaccaaaacctctgggatgcagcaaaagtagtgttaagaggaaattttatag

SEQ ID NO: 626727 - DNA, 568 bp, Homo sapiens
tttatgtatgtgatagtattaaataaagatactatatttcagatgctcgtaactaagaaaacaagccataatacaaaatacatttgcatgaactcctatatagcacacgtacaaaacaaatagtataaatctgtataaagcaggcagcaaaatataatgaacttgaagycattcccatggacatagccataatacatatagaaatttatttcagtttaaaaaactagttcaaagcacattgtaaaaataataaacatgaaagactttcaatgtaatgtgtacatatgccataaaagtacatatttctctgaacattagtaaatgaccagcaactgaaaatatgataaaaatagacttcaatgaatacataagcaggaaaaaaaatagagaggaaaaaggtatcataaagattttgatgtttagcctcaaagccaagtaaagcaagcccaaagcatgaaaatccacttactagcactgctagagtttggagttttctctttatcccaagcatttatcccattagccacacagtcaccattatctttaaaatacaccccctgcagcctaa

SEQ ID NO: 626728 - DNA, 568 bp, Homo sapiens
tttatgtatgtgatagtattaaataaagatactatatttcagatgctcgtaactaagaaaacaagccataatacaaaatacatttgcatgaactcctatatagcacacgtacaaaacaaatagtataaatctgtataaagcaggcagcaaaatataatgaacttgaagtcattcccatggacatagccataatacatatagaaatttatttcagtttaaaaaactagttcaaagcacattgtaaaaataataaacatgaaagactttcaatgtaatgtgtacatatgccataaaagtacatatttctctgaacattagtaaatgaccagcaactgaaaatatgataaaaatagacttcaatgaatacataagcaggaaaaaaaatagagaggaaaaaggtatcataaagattttgatgtttagcctcaaagccaagtaaagcaagcccaaagcmtgaaaatccacttactagcactgctagagtttggagttttctctttatcccaagcatttatcccattagccacacagtcaccattatctttaaaatacaccccctgcagcctaa

SEQ ID NO: 626729 - DNA, 414 bp, Homo sapiens
ccaccagaactgtgagaaataaatgtttatgtttaaaccatacagcctatggcattttgttacagcagcccaaactaaggcaagtcctttttataacacagtcagcaggagcaataatctatcaatactgytaagacccaaaaggaaattgaaaagaaacaaacaaaaaaacaaaaaaaatcctgatgctgactttctgagaaaccaacaatatcatagtcagaaatatataaattttaaaaaaaattgtacatggtgattgtataaataaagcattctactttaaaactcaatccaaacattataccagatttagtgacagcataaatcattcatggatcccccagaattcaaaatgtcattcaccaaacatttatgaagcacttccactgtgcgccagacacgggagaggat

SEQ ID NO: 626730 - DNA, 516 bp, Homo sapiens
acaataattatgtaagaatgggcatcattataataaatagagcayagacattgatatatgggtgaactggaatttggtatgtgataaagatattatttcaaaccaaatgtgaaagaatggacaatgagtgaggttagattagttggatatttatttaacaaaataaatactaatcacaaaacctgcttcatatctcactcagtaatgaactctaaatgttttaaaaattaaatatataaaactataattttttttaaaatatagtagaatatatgtataaccacaggttgagggatgcctttttaagtcttctcaaccccttaaaaaaacaaacaaaaaaattatgaatatgaggacatcaacacagaaacagataaatgggcaaataagtaggaaagaacaaatgaaccaatagaaggaaagaaaaaaagaacagtaggggcaacaccctgctcttgttcttactgatgtttcttccattaaccatgctctagccaggacatctgtgctactgga

SEQ ID NO: 626731 - DNA, 423 bp, Homo sapiens
taccccatctaaaatatcattcttgtttttttctttttaatcccctatccaattttcttttattgtctggaactttacttgtgttgttatataattatttatttataattgtcttccatattagaatatgggactcactaaagcatggttcttatgttgttctccaccatatcccagaatcctagatttcctggcatatagtaggccctttgcatacttgttgaatgaatgaataaaagagaaatgactaaaacatgacatataagaacatttgacaaaatggcatgcataattgtgtgcrtaataatatttcccttctctttcacttccatttcttgctcttcaggaagttttggtctagtaggtgaataagacaaatatacaaataaccaaaaaatatatccatcattatatcacattata

SEQ ID NO: 626732 - DNA, 536 bp, Homo sapiens
ggaaccagtttttgtcatatctaggaaatctgttaccatgaacagtatcagaaatactaaactttacattagatagaaaagtcaggagtaggtaagtcattcttatagctgtggtacacccattatttctgtggacgctatcctttgtgatttgtactgctacgatattctaaaaattttagctcatcatattccaggacactgcagaaactgaaacaagcctagcaaaggattaaatgtgtttattagtatatgttgttttattgagaaacaaatttctaatctcaatatgtcagaaagacttgaggatataggacaaaaaagaaaaacagaatgaaaaatatytaaagagctttctataataataattaataaagaggtctccaaaagtagctataattgatagtacatagaataaagtgataaagttacaaattgtcatggaagttcagaagaatcgtgtaggtaacatgattatgaaacacatctatttgaactgggctgataggaagaaatgcattttagcaagtaatagt

SEQ ID NO: 626733 - DNA, 537 bp, Homo sapiens
taatatacttctacctatgtcttcctacatgcttggagttcaagatggatgaccatggacttccagataaagtttttagcttaaaacttaaatttaattttaatataatgtcaaaactattcatattgagtcaaaaaattagagtagcatttactaaaataacattggtttatttctatttgaagaaatagaacagtttttagtcatttccctcctctaagggcaagttgatatattagtaattacttaggtaatacagggaaaggaayattatgtactaaaacatgtattttcttgaatcatgtatatatttttataattcagatttgaggtgatactagtggatatgatattgcataaaggaaatcatttgttttatgattgtttaaataaaattatctaaggaattttataaattaatattcaaaagttagacaattctagtgaccctataatataggtatctacttagagattatggatcctataaaaagaacaacctacttagactggtgatataagattcatatgccaaaa

SEQ ID NO: 626734 - DNA, 609 bp, Homo sapiens
ttttctttcaatataagtacaagatcataaaatatcaattatttcacacctcatcatcaagaaaaatcaatattgactctggatattgggaataattcttaagataaatttatagatttcatgaagttacttggcagaaggaactctttgaaagaagaaggaaacaaaataataaatcaaacttgtgaattttgactttttaaattcatttgattgttaggggatcaggaactgtctcaattttgtccaatactgcaaccattttggatagggtagacagagaatgtctatgtggaggtggcctttatgctgatacctaagagcattcaaaggaggaagccatgcaaaaattgctgaatggccttccaggaacagtgaattcagatgcaaagtatctgagagcaagaagctwagtacttgagggacacagagaaggctaatgtggtcagagaaatccagagaaagaggatgtggtaagagacatgcagaggtcaaatagcaatgatgacaacaacaatgagaattactctatcaatgaacatttactatgtgctagccacaattttagtgcttaacacgcagtttctgttgacccttacctctaaggta

SEQ ID NO: 626735 - DNA, 622 bp, Homo sapiens
gctagccacaattttagtgcttaacacgcagtttctgttgacccttacctctaaggtaagacatttagtttttattcaaacwgaaatgaagtagttaaagagttttaaatgggaaaatgttatggttaactgtaattttaaaagatatctcagatatttttggcataataatatagagggcgagcaaagtataaagacaggaaccaagaggacaatagagaggcttcaacagcagcactccagatgagtgtgaagcaaagttagagttggggagaaattccaatatccattcagaggtatagctgactttctcttagattggatctatccatcacaggaaggatggaaatcagagatgatccctagttgttctgtgttagtaactatttgagttatttggctgatatggtgaaaacaagcactagagaagaactagaggtgggcaatgattgggtctgctttgcacttgtgaatatcattaaatatccaaatatatgtatccaatagatttctagatataacccttgaactaatgggaaaagtctgaattggaatgaacaatttttgagatatctgattatccatgtaatttagaaccatgagacaacataagattatttaa

SEQ ID NO: 626736 - DNA, 513 bp, Homo sapiens
gaactgcaaaggatatttcaaataaaatgtttaattaaaaaaaccacaacagatattatggacatttaaagtttgaggcttcatgctgtattccatttggttcagagtatagttttcatgatttattgacagctgctttagatggttctttattttcaactcatcccaaccctggtcaaacaatacagccctcctgcttttttcaatattttcctaatatctcagctcatttaattctattgatccactgaagagtataatgrcactgaaactgggattaatagcacctcccttttccagtgctaagagctttcctattgagtctgtggaccatcacatgaaatcacaaatgtagacaaaaaagtagagtgacctttaccggccactattgtactgaaaaattcagtaaaccttagaacatcattttcaattttatggcactgttttcttaaataataagagaaaaggggaaaaaggaaaaactgacccctgttcagcatttacttaagcaga

SEQ ID NO: 626737 - DNA, 513 bp, Homo sapiens
gaactgcaaaggatatttcaaataaaatgtttaattaaaaaaaccacaacagatattatggacatttaaagtttgaggcttcatgctgtattccatttggttcagagtatagttttcatgatttattgacagctgctttagatggttctttattttcaactcatcccaaccctggtcaaacaatacagccctcctgcttttttcaatattttcctaatatctcagctcatttaattctattgatccactgaagagtataatggcactgaarctgggattaatagcacctcccttttccagtgctaagagctttcctattgagtctgtggaccatcacatgaaatcacaaatgtagacaaaaaagtagagtgacctttaccggccactattgtactgaaaaattcagtaaaccttagaacatcattttcaattttatggcactgttttcttaaataataagagaaaaggggaaaaaggaaaaactgacccctgttcagcatttacttaagcaga

SEQ ID NO: 626738 - DNA, 241 bp, Homo sapiens
tatgtttatgtgaatgccttattagatatataatctattagtacagaagttcatgtatacactctatacttcaataaatatacacatactatattggagaggtgtaatctaaaagtgtagagacaaatttagaatacctaaacctaatttggaaatatataaatttctcattttcaagcaaacattttcagacygtgaatggatattcaaactgcttatttcagaaaaatgcagtaaagca

SEQ ID NO: 626739 - DNA, 644 bp, Homo sapiens
ctttaacagtaaaggcagtttgccmaaactcaattatttgacaaaaattttcaatattcacaaaaatcctgtttaaataattttggattccaaagtgtatccttgtttttatttacaaacaaatatttattaaatcaatgacatgtgttcaactttattaaaacataggtaaagctatctttaacctagaaaaccccattttataggacccaaaacatgtggtacaacaatgatgcttgaattgtaagtatatttatgaatactatgtgcttttatatccctctataaatggaattatttgaaaagctttataaactggttttaccatggtgtatatcttagttctcttatcatctctgctgaaagaaattagcctatattaatcaaatgaattttttctcaaaagtaaaatgatgcatatttttgaattattaatatgtttcttagaaaatatggttgtgtcatctcacttggtaagattaggacaaagctatcactactaattctgatgtttcagcaataagtttagcagctaattgcacaaccagcttttctaattcaccggtgttgaacaattgaaagaacacacattttatactttttaatctttctaaaaagatatttatggcattgatagatttatg

SEQ ID NO: 626740 - DNA, 564 bp, Homo sapiens
gcaggctaaaagcctcagaaatttaaatgaaaataagaaaaaataatctttaagaaatagtttttggaattatgttagattcaaaacaaacttaattgggagaaaaagatggttgaattaagagtaatgatttcaccatatagttaacattaaatgtatatttaagtatactctttttcactaaaatgtctcatttttgggaatttctcaggataaaacttcatggaaaatattactgaaatgtaccagaaagcaacggtattgacactaaaccaaagataacatgtagtgatgggcttttgctcaagaccgattagagttgcacaattaaattaaaagcaacattttttttttttgagatggagttttgttcttgtagccaaggctggagtgcaatggcrcgatctctgcttactgcaattctcctgcctcagcctctcgaaaagcaaccatttttaatagctcaaaaggagcaaccttacccaagagaagaaaaaaaattaaattagacacttctgtgtgtaacaatcagcctctggctagatgtttgaattctgtcgattt

SEQ ID NO: 626741 - DNA, 493 bp, Homo sapiens
attacatttacttttaagaagaattattaggatgttacagacaagactactaccacatggaatagtttgacaagtcattcaacagccagtgtgctgttctatattgtctatattcttggctgggmgcggtggctcactcctgtaatcccagcactttgggaggccgaggcgggtggatcacaagatcaggcgttcgagaccagcctggccaacaacatagtgaaaccccatctccactaaaaatacaaaaaattagccaggcatggtggtaggtgcctgtaatcccagctacttaggaggctgaggcagtgagccgagatcgcaccactgtactccagcccaggcatcagtgcaagactgtgtctcaaaaaaattataataaaataaaataaaaatatatgaacaaaaaatattattctcccttgaatcctgcaaatatgtgttggaaatctaataaatttatttgaaatactaaatagttatgtcaaatgga

SEQ ID NO: 626742 - DNA, 538 bp, Homo sapiens
  misc_feature 261, 262, 263, 264, 265, 266, 267, 268, 269, 270, 271, 272,273, 274, 275, 276, 277, 278, 279, 280, 281, 282, 283, 284,285, 286, 287, 288, 289, 290, 291, 292, 293, 294, 295, 296,297, 298, 299, 300, 301, 302, 303, 304, 305, 306, 307: n = A,T,C or G
  misc_feature 308, 309, 310, 311, 312, 313, 314, 315, 316, 317, 318, 319,320, 321, 322, 323, 324, 325, 326, 327, 328, 329, 330, 331,332, 333, 334, 335, 336, 337, 338, 339, 340, 341, 342, 343,344, 345, 346, 347, 348, 349, 350, 351, 352, 353, 354: n = A,T,C or G
  misc_feature 355, 356, 357, 358, 359, 360: n = A,T,C or G
tcaaaaagaatgaacacttgatacacgctatatggatgaatccccaaatatggagccagacaaaaaagagtacgtactctgtattttcatttatgtaaaattctaaaaaacacaaacaaatctgtggtaggaaaagrtcaatggttgtttgggatgggaacagggggaagcaggagggagggattacaatagaggataagaaaatttttggatgtgatgaatatttttattatctcgaggggagtgaggtttagcaggtannnnnnnnnnnnnnnnnnnnnnnnnnnnnnnnnnnnnnnnnnnnnnnnnnnnnnnnnnnnnnnnnnnnnnnnnnnnnnnnnnnnnnnnnnnnnnnnnnnnattttttaatttttgaaatagtgaatttatttgatttttatagaatagttacatagtaacagtatccaatatagatacatctcttcctgattcctgatccagggtacaattctgaggagactttataatttattaccttaaaaataaatacttccatggaatctttgtattatatagt

SEQ ID NO: 626743 - DNA, 576 bp, Homo sapiens
tggccaggctggtctcaaactctgaccttgtgatgcacccaccttggcatcccaaagtgctgggattacaggcatgagccactgtgcctggcctaaaattattttaatgtaagtatttgaaagtttaaaatacagaaagaaattaaatggtaaagaaagaatttttatcattctgctcttgatagtcaaaattaaaccaaaatgtacctaagactttaaagatgttcttgcatatattagaataagtccatgttggggtctgtatgaggcctgctccagatgattggctgtgcatttgaaggtttaaaactaagactaaaattctctatattgggaaagggttttatgaaactatttctgagttcatatgggtcaagacatctaacaaatattttgcaaaatttttccatttttaattatccaacttcttcttttcaagggaaatgatggtattaaagacagactactctagtctaatatcttgaagtaggaggcattaggtatcatgcttycatgtcccctattatgttatttgcatgtcagtatgtaatacttaaaggatttatttaaaaaata

SEQ ID NO: 626744 - DNA, 592 bp, Homo sapiens
tggtgccgtggttaggagttctgcaaagtggttgaatgaactgcagaraaaagtgactcaggaggaagtgtttaccaaccactccccagtacctcaggtgaccactgacagggtaataaagggattatggaaaatggcatcactctcctatatatagataagtatctgagccatctgatttacctattgaatggaaaggtgataccaggaagcaggaaaaaaggctttgtgatattcaagtagcatactctctgatttcatatgcgtaaattgtagaaaaccttctgacacattttattgatttaggtttattagcgttacaagtctatgttaacaaataaaacaagaaaactctaatcgttaatcattgtctcttaagaagcaactaactttgggataaataaagcaaaacaaattgtttttcttcttgggtcttgagtggaatgatgtgggtggatatatccccacaaacacatgttctaaaataatatattatttttcccaatggtcatatgagtctgcagtagatacaggtactttcctcaggggtttcaaaatatttctcttttcttcttttgtctctgaccacttt

SEQ ID NO: 626745 - DNA, 594 bp, Homo sapiens
gcagagctggtgccgtggttaggagttctgcaaagtggttgaatgaactgcagagaaaagtgactcaggaggaagtgtttaccaaccactccccagtacctcaggtgaccactgacagggtaataaagggattatggaaaatggcatcactctcctatatatagataagtatytgagccatctgatttacctattgaatggaaaggtgataccaggaagcaggaaaaaaggctttgtgatattcaagtagcatactctctgatttcatatgcgtaaattgtagaaaaccttctgacacattttattgatttaggtttattagcgttacaagtctatgttaacaaataaaacaagaaaactctaatcgttaatcattgtctcttaagaagcaactaactttgggataaataaagcaaaacaaattgtttttcttcttgggtcttgagtggaatgatgtgggtggatatatccccacaaacacatgttctaaaataatatattatttttcccaatggtcatatgagtctgcagtagatacaggtactttcctcaggggtttcaaaatatttctcttttcttcttttgtctctgacc

SEQ ID NO: 626746 - DNA, 539 bp, Homo sapiens
tttcactaggtaaagaaagcttcttatggttcactgatgagaatcccttcacaatctacaacccaaagattagatcttctgagaacatcagagaaaaattctcctttccatccacgctatagcaaaagtttgtagccttgaaccttgggttcatawtctcacaactgagaagggtgtctccacgctcctggaactgtacacccattggaacccttaaggtaaaactaaccaggaaagtttatccccagaagaagatggcatccttgatgtgaacagcttttcccaagatcacagatcaagatttctactattatgagactcttatctttgaatattttttccttgtttatgcctctatgaacaatagaaatgaaaagtggttctattatgggcacttatcaggtatacttttatttgtgaaagatttttcagcaagccttatacatgactaatattatactttaataaataaaagatgaaggcacaatgcaggtgagaaactttggtgttatatattttgcctcataatcagtcaaaac

SEQ ID NO: 626747 - DNA, 539 bp, Homo sapiens
tttcactaggtaaagaaagcttcttatggttcactgatgagaatcccttcacaatctacaacccaaagattagatcttctgagaacatcagagaaaaattctcctttccatccacgctatagcaaaagtttgtagccttgaaccttgggttcatattctcacaactgagaagggtgtctccacgctcctggaactgtacacccattggaacccttaaggtaaaactaaccaggaaagtttatccccagaagaagatggcatccttgatgtgaacagcttttcccaagatcacagatcaagatttctactattatgagactcttatctttgaatattttttccttgtttatgcctctatgaacaatagaaatgaaaagtggttctattatgggcacttatcaggtatacttttatttgtgaaagatttttcagcaagccttatacatgactaatattatactttaataaataaaagatgaaggcacaatgyaggtgagaaactttggtgttatatattttgcctcataatcagtcaaaac

SEQ ID NO: 626748 - DNA, 626 bp, Homo sapiens
tatcataattttcacctgaaaaatcatctttcatattgttcttgatttcattgcctctggacttaacatttcctctttgaatatctgttgcattattttattaagtattgatgtcatttttcaaagttatttgagatcactctttttaacttttaaaaataatcaatacagcgtttgttaccctccattctttcttgtctctctggaacccaagattttttaaaaatatttttaagtggtttagtaagtaggttagctaatacttttaaaaacgtagtacataatccatccatcatttatatttgctgtgcatgacacccttcatgcaaacatctcagaatgctttttctgttwttactatataacagaatatacaattaaatggcaagttgcaatcaataagtctagacctgatttaaacttagccaactttttgtatcaataaatataaaagtaaaacaataacaaaaagtaaaagcaagggtaagcacattattatcgtccaaaatcacagaagctttttggatatgaatccagcaaagctttgttttgtgtgtctttaaaaaaattgaaaaaaatcatatcaaatatttttttcttggagtatccattaggataaaataaaa

SEQ ID NO: 626749 - DNA, 616 bp, Homo sapiens
gcatattaataaactgacactgagagcatttagaaactcctctaaagtggtgtatctaaaaagtgactgagttcaagacctggtctcttaaccrctaacccagattggaatgagaggatgcaagaggagaaggtgccatggagctaccattttgggaaagggcctctgatgacaggatgggagacatcatggatctaaccaactgtaagaacctaggcatgtgtttattggatctgctggatggcagaagcccctgatcagaatcagctgcctatcctgagagttccagatggaatgtgtttggaggaacatattcaaggcttctcacaaatggctctaatccttcctatatttaagcattcagttcacaaagactcctcaagaagaatatccagagaagctcttgttggccaaggctctctattgggaagtatacttgggaattgcttatcaaaggtaatccctgctccatgtcatcaatgggatgttagaagtgtcttttttatcatggcttttgacaaagccaggaattcagtactaagtaaatagagataatcaaggatctgctctccaagctctggaattagcaacaacaggactgaagagacaaggagtg

SEQ ID NO: 626750 - DNA, 587 bp, Homo sapiens
gagtagcatttggctaggttgagatgggaaggaagaggtatttgagagggaggtaaagacctaggccaaggtgagtgtggggaaaaggtcagtcctatttctggaggggtaaaaagctgactgtgkctggggtcaaggggctggaaggtggcacggcaggaaattaggctacagaggtggttggagccagcctaagaactctgagtgctaaaacagtgtctcccaagagcctgaagtttcatagcatggaaatgacataatcagatgtgggtttttgagctctctagaggaggcaggtggcaagaagtctccacaggatgctgctgaagtcatccaagaaaggatactagtccctgaactcagacagggaggatgcagactaatccaagagacatttctgcaagagaattggaaatgtacagtgactggttgtatgttgagaatgaatgagagggagacataaggataaatgcctctaggtttttcaatttgagagaactggcagatgtcatgtaattaactgagatggagacagaagacagaataggtttgaattagcttttagttccactgagtttagagttttt

SEQ ID NO: 626751 - DNA, 587 bp, Homo sapiens
gagtagcatttggctaggttgagatgggaaggaagaggtatttgagagggaggtaaagacctaggccaaggtgagtgtggggaaaaggtcagtcctatttctggaggggtaaaaagctgactgtgtctggggtcaaggggctggaaggtggcacggcaggaaattaggctacagaggtggttggagccagcctaagaactctgagtgctaaamcagtgtctcccaagagcctgaagtttcatagcatggaaatgacataatcagatgtgggtttttgagctctctagaggaggcaggtggcaagaagtctccacaggatgctgctgaagtcatccaagaaaggatactagtccctgaactcagacagggaggatgcagactaatccaagagacatttctgcaagagaattggaaatgtacagtgactggttgtatgttgagaatgaatgagagggagacataaggataaatgcctctaggtttttcaatttgagagaactggcagatgtcatgtaattaactgagatggagacagaagacagaataggtttgaattagcttttagttccactgagtttagagttttt

SEQ ID NO: 626752 - DNA, 569 bp, Homo sapiens
tagccatattgaactcccatatatatcaaatgcttctcttctcttkctgctttcaagatcctttctttgtctttgatttttggcgatatgattatgtcttgatgtagtcttattaggattgaatatggttgaagatctctgaccttcttgaacctagatatttgcatctttttctaggtttgcaaaactttcttctactacttctttaaataagcttcctacccctttatctttcttgtatcctgcttaaatttttatcactcaaaacttgctcttctgatgctctttcataaatcctgtaaactttcttaattccttttcagttgttttgatctcctctgactgtatattttcaaataacttgtaatgagttcatgaaatctttcttctgttcgatcagttctactgttgatgctctctgttgaatttttcattttttattgtagttttcagctccagaatttgttttattattattatttcaatacctattaaattttcctttctcatcacttattttttttctcattttgttggattgcttctctacattttcttgaggttcacca

SEQ ID NO: 626753 - DNA, 569 bp, Homo sapiens
tagccatattgaactcccatatatatcaaatgcttctcttctcttgctgctttcaagatcctttctttgtctttgatttttggcgatatgattatgtcttgatgtagtcttattaggattgaatatggttgaagatctctgaccttcttgaacctagatatttgcatctttttctaggtttgcaaaactttcttctactacttctttaaataagcttcctacccctttatctttcttgtatcctgcttaaatttttatcactcaaaacttgctcttctgatgctctttcataaatcctgtaaactttcttaattccttttcagttgttttgatctcctctgactgtatattttcaaataacttgtaatgagttcatgaaatctttcttctgttcgatcagttctactgttgatgctctctgttgaatttttcattttttattgtagttttcagctccagaatttgttttattattattatttcaatacctawtaaattttcctttctcatcacttattttttttctcattttgttggattgcttctctacattttcttgaggttcacca

SEQ ID NO: 626754 - DNA, 517 bp, Homo sapiens
cttaagtgtgtttttgtaattgccagaaatgctctttcctgtccatatttagcgctccattcaggacctcttgtaaggcaagtctgttggtaataaattcctttaacatttccttgtctgaaaaggatcttatttctccttcacttataactaagctttgttgcccttggaggtttgtttgatcatggtgtaagatggtttcagttgactggcttcatttctggaagattttagggtgycaaggctcaggttggcactccgtgtgtggtttaactctggggggctggtaccagacccccggattcattctctggccccttgaggtcaggaacctgctgcattggagggactgaactgttccaggttcactgacagcgacactctgatgggtagtaccaatcaaagcactttgtcagggtggtggcaatgggatccatgctcattcacttgtgtcagtagcagcagcagcagtgcagcagggtgcacatgcaccagcttgtgtaggttactagtggaa

SEQ ID NO: 626755 - DNA, 390 bp, Homo sapiens
ctattactgattgagttttaaaatattaaatcaattttgcctttttgggataaacctgattttgtcattgtgtatgtcttttttttttgcgtgttgttgartttgatttgctaaaaattttgttagaatttttacatcgctgtgcatgaggtatactgttttacacttttcttataatgtctttgtctgattgtggtatcagggtaattgtggcctcactgaacaatttgggaaatatcctcttctttccaatattctggaagagtttgtgtagaattagtattatttatgccttaaatatgtgatcgaattcactcgggaagccacctgggcctaggattttctttgcggaaggtttttaactacagattcaaatgtattaatagatat

SEQ ID NO: 626756 - DNA, 655 bp, Homo sapiens
actgcacatggtggccctgtttgcccaaataatttccccctaaaataccttcccctgcaactctgccttccaaatttttccagacgcatctctgatctgaactcctctttccatcctggccttaccacaacccccaaggcattcctttttcctcagacctcctttgatattttctgcctgtagaggtaaactgaaaattaaacagggcctccatggaccctttcttgttttgagttttttaactattagtttagccttgtgtttgtttagctttttgccaacctgactcttatctccctgcatggtttttggtagtaagggtaagaactgtgtcctatccatctttgtgtctccccaaaaggctttgcacatarttgaaattcaataggacaaaagaagaaagtggtatttaaaatgagagacctttcaaagagtgaaagatgccagttgaaatggagtgtttgtgacaaaaatcttcagtcaatacgtttttcaaattctttcagtgttgactctcaaatatttatgctaatgacaaccaggaaaagcacagatattggaaatgtaccaaaccaagactaattctggccaactcattcttttcatcaaaacttctgtaagagtatctaacaagaaaaggttcaggcaccactga

SEQ ID NO: 626757 - DNA, 655 bp, Homo sapiens
actgcacatggtggccctgtttgcccaaataatttccccctaaaataccttcccctgcaactctgccttccaaatttttccagacgcatctctgatctgaactcctctttccatcctggccttaccacaacccccaaggcattcctttttcctcagacctcctttgatattttctgcctgtagaggtaaactgaaaattaaacagggcctccatggaccctttcttgttttgagttttttaactattagtttagccttgtgtttgtttagctttttgccaacctgactcttatctccctgcatggtttttggtagtaagggtaagaactgtgtcctatccatctttgtgtctccccaaaaggctttgcacataattgaaattcaataggacaaaagaagaaagtggtatttaaaatgagagacctttcaaagagtgaaagatgccagttgaaatggagtgtttgtgacaaaaatcttcagtcaatacgtttttcaaattctttcagtgttgactctcaaatatttatgctaatgacaaccaggaaaagcacagatattggaaatgtaccaaaccaagactaattctggccaactmattcttttcatcaaaacttctgtaagagtatctaacaagaaaaggttcaggcaccactga

SEQ ID NO: 626758 - DNA, 312 bp, Homo sapiens
tattgagtacacatgaccacaaagaagggaacaatagatactgaaactacctgarggtggaatgtgggaggagggtgagaatttaaaaactacctatcagatactatgcttattacctgggtgacaaaataatctgtacaccaaaacctgagacatgcaacttacctatataacaaacatgcacatatacacctgaacctgaaatgaaagtttaaaaagtttttttacacatcacattgtaccctataaatatattcaatacaaatggtgggtctaagtttgttccactgttttctacaaatttttcattgt

SEQ ID NO: 626759 - DNA, 603 bp, Homo sapiens
tgacagttcaatttgggtaacacgaccataaataagaccacaattgaatgtaatttttgttgttgttgcctgttagtttatttttagtcttcccatttagtttctacctttctctcctgactttcttctgtttccatttttcccactctaatttttctccttcttttaattctgtttttcaatcatcttacaccttttgctgctatttctttgccttcttacctgcatttgctcctgtctacctcagtcttcccctccctcttttccccctagacttggaattcctaccccagatgggttttgtaggaagatcaaagcctctatctctccttttgctttcagccctattcctcggtaataacaatggtgtggagggactcaaggtagcccaggcatctcaaacctggtagtatagacggcccccaaagagaaaaaactgatatagcctactttcagtgactaacaagctattaatagctggagtaaaacaggttgamtcagataaattgtttcacatgacattacaactgctatccagtgtgagattctataagcacattagagtatactatctttgagggcagagacatctcactaaccttg

SEQ ID NO: 626760 - DNA, 603 bp, Homo sapiens
tgacagttcaatttgggtaacacgaccataaataagaccacaattgaatgtaatttttgttgttgttgcctgttagtttatttttagtcttcccatttagtttctacctttctctcctgactttcttctgtttccatttttcccactctaatttttctccttcttttaattctgtttttcaatcatcttacaccttttgctgctatttctttgccttcttacctgcatttgctcctgtctacctcagtcttcccctccctcttttccccctagacttggaattcctaccccagatgggttttgtaggaagatcaaagcctctatctctccttttgctttcagccctattcctcggtaataacaatggtgtggagggactcaaggtagcccaggcatctcaaacctggtagtatagacggcccccaaagagaaaaaactgatatagcctactttcagtgactaacaagctattaatagctggagtaaaacaggttgactcagataaattgtttcacatgacattacaactgctatccagtgtgagattctayaagcacattagagtatactatctttgagggcagagacatctcactaaccttg

SEQ ID NO: 626761 - DNA, 585 bp, Homo sapiens
cacagcatgcatgaagaaaagccctagataacaatgtaggaaaggcaggtgggtgccaggttgcagacagcctaaataacaggctggagaaccacccctcttcatgcctgcatttggaaccattagtctccttccttttctccgtgtagtgcagagtaatgtcygcagccctctcttgtcccaagaaaccacccttccatttcccactctaatagacgtccctctgtctatccactcaaacccttccaactttgggtagtggagacctgccttttagtccatgggccaatgagaaccaaggttggcactgatagctggaatctgtttgtgctgccagtcagctttccagcaagtccaaggggaacttatgggggcccatgtcacctccaactccatcctccacctctatcctcagagtcagccaacctcccttgaccccataatgtggttgcctggcctgtgtgatctgacttcttctggtgtgtttttgagtctctggaaccaactctaaaccccacccagttgctcacactaccagggtcccttccccttaagaacaacattcagtccttctctccccacctt

SEQ ID NO: 626762 - DNA, 566 bp, Homo sapiens
aagcactcttttaaggattttagttttattaactcatttaattatcacaacaaccttatgtggtagattctattattatctcctttttataaatgaggaaactgagacacagagaagttagtaccatagtagtggagctgtgctactagctctagagcctgcactcgtagccatgataccagtgtgcctccacttaatgctttagatgacaggcaatgcctgaggacygaatctcacccttggcagttcataaacctgactcagcagtccatcaagggtggacctgtctctacagagcagcctctcatcaacccagtgtatccaaagatgagatttattaatgtgcttttgaaaatcagaatcacagggatggaaattcttgaatcccactgaatagcatattctactcctgcagggagccctccactggtggccaaaccacagccaaagggaaatatagactccagacaaaggaggttgacaagtccaggattgcgtggtattgggctaagattgtctgatagtcacacgtcttttggaataaagaaatccattacaccaaggaa

SEQ ID NO: 626763 - DNA, 673 bp, Homo sapiens
gagcaagtctcacgagatctgatggttttataagtgtctggcatttcccctgcttgcactcattctctctcctgctgccctgtgaagaggtgtctttcgtcatgattgtaagtttcctgaggcctccccagtcatgcggaagtgtgagtcaattaaacctctttctttataaattacccagtcttgggtatttcttcatgacagcatgagaatggactaatacaatgttgaatctgcagattgctttggacaggatggcctttttaatgatattgatccttccatttcataaatgtttttccatttgtttgtctcatctatgatttctttcagcagtgttttgtagttctctttgcagagatctttcacccctttggttagatgtattcctcagtattttattttattatggctattgtaaatgggattgcattcttgatttggctctcagcttgaatgttattggtgtatagaaatgcaactaatttttatacaytgactttgtatcctgaaattttactgaagtcatttatcagtgccaggagccttttgatggagtctttagggttttctaggtatagagtcatatcatcagtaaagagagatagtttgacttcttgttttcttacttgaattccttttatttctttctcttgtctgtttgccctggcta

SEQ ID NO: 626764 - DNA, 486 bp, Homo sapiens
gcactctctgcttcacacccaggcagatytccaggcattcagagcagcacctcaactggatcagcagcctgacccaccccatatttcctgtgcaaagatcctggtggaaggaggccctttccactgcacgcccaggcaggtctccaggcttctggaagacccactctctttaattaggagtttaggccactcctgatcccatgcagagagcatggggctgaggaggtttcccagctccacacctagacacacttctgggtgcttggcagccacccactggattgtcccatggcactggtgctcgtgcctgcctctgggagacctgtaggcagacctgcccggttcagacccacccatcatggcctctgcccccaggtgctgagcaggagctgagaccactgtacattccacaaatcagcccattgcctgaggcaacagagagcttcaggcagtaaattaggaccaagtttatatccagctatattg

SEQ ID NO: 626765 - DNA, 486 bp, Homo sapiens
gcactctctgcttcacacccaggcagatttccaggcattcagagcagcacctcaactggatcagcagcctgacccaccccatatttcctgtgcaaagatcctggwggaaggaggccctttccactgcacgcccaggcaggtctccaggcttctggaagacccactctctttaattaggagtttaggccactcctgatcccatgcagagagcatggggctgaggaggtttcccagctccacacctagacacacttctgggtgcttggcagccacccactggattgtcccatggcactggtgctcgtgcctgcctctgggagacctgtaggcagacctgcccggttcagacccacccatcatggcctctgcccccaggtgctgagcaggagctgagaccactgtacattccacaaatcagcccattgcctgaggcaacagagagcttcaggcagtaaattaggaccaagtttatatccagctatattg

SEQ ID NO: 626766 - DNA, 646 bp, Homo sapiens
ataatttctttttacccatcttgatagctgagatctcagagcacccaactaacgttaaaactataggaaaacagcattcaaggggaaatagaacacatgcacttgcttatctggggcagaacctgggaataatagacatatggcaccataaagttgctatgaagaattctgctgaacttggtaatcatttggtagagacgaaaaagggcaagtacgatgtacaacacttgggagacacagaaccaagagggaattgtcctcgttcattcacaggctcttttgcacaatgggagctgaaaagaaagattagagccagggaaggagatttgaaaaagtcttctgtatggtacagacctaggggaggagagaaacatctgccgaggaaaagggacaaaggaacatctggaaccttcttaatcccctgctagagaacagaagccttaagcttctgggaaaaggacagcaaaccctgatgttttcaagtcataagtagccctgttgtggctacaggaagggatcataacaacaccatttatcttaggggagaggcaagggttgatcccattakaaatctctaaccactatgggaggggtaaaatcactgagcaatcccacccttgagagtcagggggcacaaggcacatgt

SEQ ID NO: 626767 - DNA, 575 bp, Homo sapiens
aagcactggttaccttaacctctatttaccgacattgtctcttaaagttaaggtcactgctctgcagttcttcttgaacagagctgacatctgtcccgcaaaggtcaaggacagggggtggagttccttgctactctttctgcctctctcctccagttccctgagagaggactggagttggtctcttcctttctttgatctcctgagttccttgctactctttctatgacctaatgagtmtggcttgccttctgagacatctgtaaatcttcattggatctattgcatttatgcaaagaccatgtgataaaatcctaagatttttttgtaaggacaaatcaggtagtgagaaagacttaatccctgagtgtaggcaaccctttctgcttttcagagctcagatttaaattcagtgttcagtcctcaaactgtataactttattttggggtatatttatttgcatttctgtttacatttaagaatttttatttctatttgaaaacatgtattatggatatgtcttctcttaaaaggaattgcaagcttgtttgaaagcaggtggtgtagacactat

SEQ ID NO: 626768 - DNA, 537 bp, Homo sapiens
ccacatgtggtgtgattccatctctaggaaatgtccagaataggcaaattcatagaaacaaagttgattactggttgccaaggtctcgggaaagggagagatggggagtgactgttaatgagtacaaagtttctctttggaatgatgaaaatactgtagaattagataatggtgatggtttcacaactttgtgaaaatactaaaagccactgaatggtatactttaaaaggctaaatagggtgtgtgaattctatctcaatttttttaaataagagagaaaagaagctaggaaggaaatgtcaggataaaacaagtgaaaatagaaggaagtaataaagtaaataacattaatgtaataaagaaaagtgaaaagaattggccaggcacggtggcttacacctgtaatcccagcactttgggaggcctaggcgggtggatmacttgaggtcaggagttcgagaccagcctggtcaacatgatgaaaccccatctctagtaaaatacaaaaattagccaggcatgatggcttccgcctg

SEQ ID NO: 626769 - DNA, 610 bp, Homo sapiens
cggcaagtcctggcccaccagtcctggggaaattgcagtctctgttggagctatgtcctcaaagttggttaccttgctccccgatgcttcatgtggggagtgacctggaaggaccttgacggataagtgggktttgcatgatgactgtttgaggacaagccctccgcatagaagaaagtccctgagcaactgcacatggttggcttccctgtcctctgcctggatgagcgtcctggactcagaggtcccctgccaccacctacaagcagtgttccactcagtgaccaaagggaccagtggacatggctcgactccctgggtccaaatctcagctccagcacttgccagcaaaatgccctggggaaattagcctctctgtgcctcagttccctcttctgtaaatggggatgataatatcttctaccccatctggttgttttgagaatcaaatgggttactatagataaagcgcttagagtggtgcctggcacacagtaattagtatgtatctgatattaatattatctttaaaatatgtgaatcatccccagcttcccattgccactagaatgaaattcctgaccatgggcctgtaatgccctccctcaag

SEQ ID NO: 626770 - DNA, 553 bp, Homo sapiens
cgtgaatgaaatataaacaattttyaattttatattatatacaatggcagatcatagctgcacctgtaagagaagatcaaattaaaatcggttatctgtttgtttattctcttatcagtgcctggctttctagaaaaatttagctattttcatggaattctctgataaacattatgaactcatttctttctataatatgttggtaatattggccgtatataataatttagaatctcttattctcctttatttttctcagagcagtcattgccatttgacatgttatattttatttttgttagtttcctattttaccatacagctaattaaaatgaacttttcattaattcaattactgttcttttcactgttatagcccaagtatctaaaacagtgtctagcactaagtagtcaccaggtaagtctttgctgagtgaataaatcttagaaggaaaggagagagaaaatctagatcctttatagtatccatggttttctacaaacaggtagaatgtaatattttattattttgcaccatgtaagttagaatcat

SEQ ID NO: 626771 - DNA, 553 bp, Homo sapiens
cgtgaatgaaatataaacaattttcaattttatattatatacaatggcagatcatagctgcacctgtaagagaagatcaaattaaaatcrgttatctgtttgtttattctcttatcagtgcctggctttctagaaaaatttagctattttcatggaattctctgataaacattatgaactcatttctttctataatatgttggtaatattggccgtatataataatttagaatctcttattctcctttatttttctcagagcagtcattgccatttgacatgttatattttatttttgttagtttcctattttaccatacagctaattaaaatgaacttttcattaattcaattactgttcttttcactgttatagcccaagtatctaaaacagtgtctagcactaagtagtcaccaggtaagtctttgctgagtgaataaatcttagaaggaaaggagagagaaaatctagatcctttatagtatccatggttttctacaaacaggtagaatgtaatattttattattttgcaccatgtaagttagaatcat

SEQ ID NO: 626772 - DNA, 553 bp, Homo sapiens
cgtgaatgaaatataaacaattttcaattttatattatatacaatggcagatcatagctgcacctgtaagagaagatcaaattaaaatcggttatctgtttgtttattctcttatcagtgcctggctttctagaaaaatttagckattttcatggaattctctgataaacattatgaactcatttctttctataatatgttggtaatattggccgtatataataatttagaatctcttattctcctttatttttctcagagcagtcattgccatttgacatgttatattttatttttgttagtttcctattttaccatacagctaattaaaatgaacttttcattaattcaattactgttcttttcactgttatagcccaagtatctaaaacagtgtctagcactaagtagtcaccaggtaagtctttgctgagtgaataaatcttagaaggaaaggagagagaaaatctagatcctttatagtatccatggttttctacaaacaggtagaatgtaatattttattattttgcaccatgtaagttagaatcat

SEQ ID NO: 626773 - DNA, 553 bp, Homo sapiens
cgtgaatgaaatataaacaattttcaattttatattatatacaatggcagatcatagctgcacctgtaagagaagatcaaattaaaatcggttatctgtttgtttattctcttatcagtgcctggctttctagaaaaatttagctattttcatggaattctctgataaacattatgaactcatttctttctataatatgttggtaatattggccgtatataataatttagaayctcttattctcctttatttttctcagagcagtcattgccatttgacatgttatattttatttttgttagtttcctattttaccatacagctaattaaaatgaacttttcattaattcaattactgttcttttcactgttatagcccaagtatctaaaacagtgtctagcactaagtagtcaccaggtaagtctttgctgagtgaataaatcttagaaggaaaggagagagaaaatctagatcctttatagtatccatggttttctacaaacaggtagaatgtaatattttattattttgcaccatgtaagttagaatcat

SEQ ID NO: 626774 - DNA, 561 bp, Homo sapiens
acattatgaactcatttctttctataatatgttggtaatattggccgtatataataatttagaatctcttattctcctttatttttctcagagcagtcattgccatttgacatgttatattttatttttgttagtttcctattttaccatacagctaattaaaatgaacttttcrttaattcaattactgttcttttcactgttatagcccaagtatctaaaacagtgtctagcactaagtagtcaccaggtaagtctttgctgagtgaataaatcttagaaggaaaggagagagaaaatctagatcctttatagtatccatggttttctacaaacaggtagaatgtaatattttattattttgcaccatgtaagttagaatcattgtggaacatcacatttatacaattcttattagactatatctagatctcttttaaaataagcaagcaagcaagcagacaaacagcaatgaagatacgctgaagaagttttgggaggagcacttacatctttacagtttcacccacaacttacccataccctacttcaatgaattcc

SEQ ID NO: 626775 - DNA, 547 bp, Homo sapiens
catttctttctataatatgttggtaatattggccgtatataataatttagaatctcttattctcctttatttttctcagagcagtcattgccatttgacatgttatattttatttttgttagtttcctattttaccatacagctaattaaaatgaacttttcattaattcaattactgttcttttcactgttatagcccaagtatctaaaacagtgtctagcactaagtagtcaccaggtaagtctttgctgagygaataaatcttagaaggaaaggagagagaaaatctagatcctttatagtatccatggttttctacaaacaggtagaatgtaatattttattattttgcaccatgtaagttagaatcattgtggaacatcacatttatacaattcttattagactatatctagatctcttttaaaataagcaagcaagcaagcagacaaacagcaatgaagatacgctgaagaagttttgggaggagcacttacatctttacagtttcacccacaacttacccataccctacttcaatgaatt

SEQ ID NO: 626776 - DNA, 561 bp, Homo sapiens
acattatgaactcatttctttctataatatgttggtaatattggccgtatataataatttagaatctcttattctcctttatttttctcagagcagtcattgccatttgacatgttatattttatttttgttagtttcctattttaccatacagctaattaaaatgaacttttcattaattcaattactgttcttttcactgttatagcccaagtatctaaaacagtgtctagcactaagtagtcaccaggtaagtctttgctgagtgaataaatcttagraggaaaggagagagaaaatctagatcctttatagtatccatggttttctacaaacaggtagaatgtaatattttattattttgcaccatgtaagttagaatcattgtggaacatcacatttatacaattcttattagactatatctagatctcttttaaaataagcaagcaagcaagcagacaaacagcaatgaagatacgctgaagaagttttgggaggagcacttacatctttacagtttcacccacaacttacccataccctacttcaatgaattcc

SEQ ID NO: 626777 - DNA, 561 bp, Homo sapiens
acattatgaactcatttctttctataatatgttggtaatattggccgtatataataatttagaatctcttattctcctttatttttctcagagcagtcattgccatttgacatgttatattttatttttgttagtttcctattttaccatacagctaattaaaatgaacttttcattaattcaattactgttcttttcactgttatagcccaagtatctaaaacagtgtctagcactaagtagtcaccaggtaagtctttgctgagtgaataaatcttagaaggaaaggagagagaaaatctagatcctttatagtatccatggttttctacaaacaggtagaatgtaatattttattattttgcaccatgtaagttagaatcattgtggaacatcacatttatrcaattcttattagactatatctagatctcttttaaaataagcaagcaagcaagcagacaaacagcaatgaagatacgctgaagaagttttgggaggagcacttacatctttacagtttcacccacaacttacccataccctacttcaatgaattcc

SEQ ID NO: 626778 - DNA, 667 bp, Homo sapiens
cttgcaactctaagaaaaggaccttggcaaatctcaatctacagaataattcataattctgggagctccacagaaaataaaagttatttatttatttatttatttatagctgttgcagtgttctgccacaggtatagtcaactttgtctgcaaagttaaaatttttaaaatgaaagaattaacaattcctcccctaattatatatatatataaataaatgtaggccttaacattaacacaaatcattgaagtttcatgggtcaaaaatttaggcagatatgtagtttgtaggcatcttatactaattagttaacatactacttcttttatttttattataatataaactatattcattttataatatacataaataaaaatcaaatgctaaatataataaagtttattttatatagtccagctcgctaatgtacattaatgcttcaatgataatattaaastttcttttattttattacatttagatgcaaactccagccagggttcacatattgatttcacgttctagtaaaaactacaaataaaaaactataaagtcagagattatttcttaatatattgcatatactttcatccaatgtaagtcatttcatgacatgtttagctttttttgtcatagtggtctcatgttttaatggaaaatagt

SEQ ID NO: 626779 - DNA, 644 bp, Homo sapiens
acaagctccacaagacaaggctgcaggggaagttaggaaggractacttttttggttttgcattctttgaaataaagcattatgggcaacatattaacaaaataaaatataaaaggaataccataaatcttcattttacattttttcctacaattattttctatatacctaccatctgtcattttctatctatttgctaaaaatttctcagcatttccatgtaagcaacatgcatattaactgggttgaatcctctgtgtcagattctattttataatccagagtgtttcacttgcaccttttacttccttaaagtcctaagataaacagttgcaaagagtcagactctttgaagctctaaacatacttctgctctctccgtcctaatagccaaaggagggcttttctgcattttctctattcaagttccttttgcttttcctaagctttgtagtaaaaatctgcactcatgttctgccatctgcttttagtatatttttaattcacccaccaattgccattttactgattatccccagaaggataaagccatttttagtaaaattctgctttaaggggaattgatagttgtggagaaataactgcacattgttgaagagtatttattagaacacagttccatt

SEQ ID NO: 626780 - DNA, 593 bp, Homo sapiens
agaattgctggctctataatggagaaaagtcaagaagaatttgagataaatttatttgttggacaaaatactacttacaaaagagttggagttggatttgagttgttaatatataggtgtgaatgtgtgtgtgtatatgtatgtatatatgtatatgtacatgtggattctagaggtctagaacttaaattgtttggacaaaggatatggatttttaccaagtgtttatttaattgcattctaacaaaataatattcttataartgtatgagaaagaccttctcccctatatttacttggaagattaccaattgtattgacctttcctaatttaatagataaaataactacaataataaaatttttattgatgtacttacagattaaacagttttcatattttttatgtttttgtaaattgtctctcatagctattgccactcctcacctttttaaatgtttattaatttgtaaaaattctcttaaggacatccacctttgaagtaaatgttgcaaatatttcccaatgcatattattgtcttttagctttgtttataatgaatttttacatttttaactataagactcacaa

SEQ ID NO: 626781 - DNA, 593 bp, Homo sapiens
agaattgctggctctataatggagaaaagtcaagaagaatttgagataaatttatttgttggacaaaatactacttacaaaagagttggagttggatttgagttgttaatatataggtgtgaatgtgtgtgtgtatatgtatgtatatatgtatatgtacatgtggattctagaggtctagaacttaaattgtttggacaaaggatatggatttttaccaagtgtttatttaattgcattctaacaaaataatattcttataagtgtatgagaaagaccttctcycctatatttacttggaagattaccaattgtattgacctttcctaatttaatagataaaataactacaataataaaatttttattgatgtacttacagattaaacagttttcatattttttatgtttttgtaaattgtctctcatagctattgccactcctcacctttttaaatgtttattaatttgtaaaaattctcttaaggacatccacctttgaagtaaatgttgcaaatatttcccaatgcatattattgtcttttagctttgtttataatgaatttttacatttttaactataagactcacaa

SEQ ID NO: 626782 - DNA, 564 bp, Homo sapiens
gtttatttaattgcattctaacaaaataatattcttataagtgtatgagaaagaccttctcccctatatttacttggaagattaccaattgtattgacctttcctaatttaatagataaaataactacaataataaaatttttattgatgtacttacagattaaacagttttcatattttttatgtttttgtaaattgtctctcatagctattgccactcctcacctttttaaatgtttattaatttgtaaaaattctcttaaggacatccacctttgaagtaaatgttgcaaatatttcccaatgcatattattgtcttttagctttgtttataatgaatttttacatttttaactataagactcacaaatatttsttgcatcaaacttatttatgatttccacgttggtcatttttcaataggccttctcacccccaaattattattattttaataatggtctttaaaaatatcaaataatatatgtattagctattaagtacagttagacttttttactaatataataaaaatttgcaaaatgataaataataaagtaatg

SEQ ID NO: 626783 - DNA, 514 bp, Homo sapiens
ttttctagcatatcattttaatwcttttgtttgttttaccatatatttttagttattttcttattcttgccctggggattataacattttatcataaaacaatctaatccatatcaatccaacttaatttcaacaatatatttaaagattgcttcaatataggtccatttcctgcccccttcctttgtgttaatattatcgtacaaattacatctttatacattataagcccaacaacccagttttataattactcatttatgtagctatttttaaatcagataggataagaagagaattacaattaaaaatacattatactgtctttttaattatgtaattaccctgcagtgctctttatttctttgtgtggatgaagttaccatctagtgtcctttcatttcagcctgagagactccttttagtatttcttgtagggaagatctactcatgatgaactctctcatttttcatttatctggacatttcttcttttttttcaaagatacctttg

SEQ ID NO: 626784 - DNA, 517 bp, Homo sapiens
atatcattttaattcttttgtttgttttaccatatatttttagttattttcttattcttgccctggggattataacattttatcataaaacaatctaatccatatcaatccaacttaatttcaacaatatatttaaagattgcttcaatataggtccatttcctgcccccttcctttgtgttaatattatcgtacaaattacatctttatacattataagcccaacaacccagttttataattactcatttatgtagctatttttaaatcagataggataagaaragaattacaattaaaaatacattatactgtctttttaattatgtaattaccctgcagtgctctttatttctttgtgtggatgaagttaccatctagtgtcctttcatttcagcctgagagactccttttagtatttcttgtagggaagatctactcatgatgaactctctcatttttcatttatctggacatttcttcttttttttcaaagatacctttgctagatatagaa

SEQ ID NO: 626785 - DNA, 521 bp, Homo sapiens
tatctaggtatggatttctttgtttttataccacttgtagttcgttgaatttcttgagcatgtaaattaatgttcttcatcaaatttgggaagtttatggcaattatttcttcaaatattctttctgcccctttatctcctcttcttttgggattctcattatatacatattggtatgctctctgaggctctgttcatttttcttcattcttttgactttctgttccctggattgtataatctcaattgacccatattcaacttactgaatcttttttctgcctgctcaaattggctgttaagcccctctggttaataattttttatttcagttgcactttcaacccagaattttatttttttcccttttttatataattttctatctctttattgatatgctgtatttggtaagacatcattgtcatgytttttaacattctttaaacatgttttcctttagttgtttaaacatgtttttaagacttgttctaaaatctttgatagtaagtccaatgtct

SEQ ID NO: 626786 - DNA, 473 bp, Homo sapiens
atgagggaattttcagaagaaagttaagtactaggaatagattttgaatccagtgggtttcagttacaagactgttacaagagtatgagtttataaatagtttccaagtgccaataaatgccagtggtggagataaacagaaaaaggtgattttatcacacctgatttaatgctgtttttcttttatatttcaacagtcagtggaatcttggcagtaacaaaaagagaaacaaaatttacattrttaacagtaccgatagagtgacactctttatcacagtttgagagaaacttcaagaagtaaaaataggagatgtagtctacagacacttaagaaattcacattatgccagaaagactaagtagccattcccctagaaattgaagaaaaacagaaactgggtttgattaaatgacagtatgagtgctacatataagacattttctagcctttcagagaaggaagttaagag

SEQ ID NO: 626787 - DNA, 622 bp, Homo sapiens
agccggccacgctgtggaagcagccatccagcttgctcagcaggatggagaggaagctgtctgcggccgcgtgctctggtcatagaccaccacgtcctgtggctcagtggcctccacctggctgcgtgcrgccggctggatgaactccacaatggtcaccttgcccttctgcaaccgccacttcaccagcttggagcagcagatgttgacggagctgagcacatgccagctgttgtactccaggaaggagtgactgtcgatgaccaggcccccccaggcccgccccgcagcaggctggccagcttcttggcgtccatcaccttcctggggagccggtccccggccatgatggggcaatgggtcttggggagggtgacccctgaagtgaggaggggctgctccgacggcccaagtgtggcctcgcactgggaataacctagcacatgatgccggaccttgcttgcgctcacctcgggggtgctccgaggacccgcaccgcgctcaaggcgcccgctcggctgtgcagtccatgggccaggcgggggcccgcgcagctggggcgggggctggggctctaatatatatttaatcagtgctcttcaccactttaaaaagataatag

SEQ ID NO: 626788 - DNA, 622 bp, Homo sapiens
agccggccacgctgtggaagcagccatccagcttgctcagcaggatggagaggaagctgtctgcggccgcgtgctctggtcatagaccaccacgtcctgtggctcagtggcctccacctggctgcgtgcggccggctggatgaactccacaatggtcaccttgcccttctgcaaccgccacttcaccagcttggagcagcagatgttgacggagctgagcacatgccagctgttgtactccaggaagragtgactgtcgatgaccaggcccccccaggcccgccccgcagcaggctggccagcttcttggcgtccatcaccttcctggggagccggtccccggccatgatggggcaatgggtcttggggagggtgacccctgaagtgaggaggggctgctccgacggcccaagtgtggcctcgcactgggaataacctagcacatgatgccggaccttgcttgcgctcacctcgggggtgctccgaggacccgcaccgcgctcaaggcgcccgctcggctgtgcagtccatgggccaggcgggggcccgcgcagctggggcgggggctggggctctaatatatatttaatcagtgctcttcaccactttaaaaagataatag

SEQ ID NO: 626789 - DNA, 473 bp, Homo sapiens
atgagggaattttcagaagaaagttaagtactaggaatagattttgaatccagtgggtttcagttacaagactgttacaagagtatgagtttataaatagtttccaagtgccaataaatgccagtggtggagataaacagaaaaaggtgattttatcacacctgatttaatgctgtttttcttttatatttcaacagtcagtggaatcttggcagtaacaaaaagagaaacaaaatttacattgttaacagtaccgatagagtgacactctttatcacagtttgagagaaacttcaagaagtaaaaataggagatgtagtctacagacacttaagaaattcacattatgccagaaagactaagtagccattcccctagaaattgaagaaaaayagaaactgggtttgattaaatgacagtatgagtgctacatataagacattttctagcctttcagagaaggaagttaagag

SEQ ID NO: 626790 - DNA, 598 bp, Homo sapiens
acaaacatgggcaatgaatagtcaccaggttcaaaataccgtatgtctaaacwgaggttttggcttcaaatgggtatattgaaagagatccttacctgttattctcctcacccactgccaacctctttcaatttgaagatgagaaagccattttcccttcctgaggttgagtgattcccttcaccacttctgcaagaaggggaggtagccaagcagacaggtactagtgcccctgtatctagtagccattacgtgttggtatagggtatacagaaagtggggatgcccactgctttggctttggggggtcttggtcaattacccttccaagttttggagtgctaagccacctttctttctctataatccattgcttctcaatcccaaggaggaaagtctgagcagggttgatgtttgactgcacagtgcttgggacactgggtgtttgtgtgtgaagtttacccacaagaagctgcagcattttttctaccctcccactctcaacagattcagcccctctcgaggggctgggtacgatttccactgggagtcacaggtaagtaatgggagcctcagggacagctcttttaaagaattc

SEQ ID NO: 626791 - DNA, 598 bp, Homo sapiens
aattctgctttctgataattcacaaacatgggcaatgaatagtcaccaggttcaaaataccgtatgtctaaactgaggttttggcttcaaatgggtatattgaaagagatccttacytgttattctcctcacccactgccaacctctttcaatttgaagatgagaaagccattttcccttcctgaggttgagtgattcccttcaccacttctgcaagaaggggaggtagccaagcagacaggtactagtgcccctgtatctagtagccattacgtgttggtatagggtatacagaaagtggggatgcccactgctttggctttggggggtcttggtcaattacccttccaagttttggagtgctaagccacctttctttctctataatccattgcttctcaatcccaaggaggaaagtctgagcagggttgatgtttgactgcacagtgcttgggacactgggtgtttgtgtgtgaagtttacccacaagaagctgcagcattttttctaccctcccactctcaacagattcagcccctctcgaggggctgggtacgatttccactgggagtcacaggtaagtaatgggagcctcagg

SEQ ID NO: 626792 - DNA, 598 bp, Homo sapiens
aattctgctttctgataattcacaaacatgggcaatgaatagtcaccaggttcaaaataccgtatgtctaaactgaggttttggcttcaaatgggtatattgaaagagatccttacctgttattctcctcacccactgccaacctctttcaatttgaagatgagaaagccattttccyttcctgaggttgagtgattcccttcaccacttctgcaagaaggggaggtagccaagcagacaggtactagtgcccctgtatctagtagccattacgtgttggtatagggtatacagaaagtggggatgcccactgctttggctttggggggtcttggtcaattacccttccaagttttggagtgctaagccacctttctttctctataatccattgcttctcaatcccaaggaggaaagtctgagcagggttgatgtttgactgcacagtgcttgggacactgggtgtttgtgtgtgaagtttacccacaagaagctgcagcattttttctaccctcccactctcaacagattcagcccctctcgaggggctgggtacgatttccactgggagtcacaggtaagtaatgggagcctcagg

SEQ ID NO: 626793 - DNA, 595 bp, Homo sapiens
acaaacatgggcaatgaatagtcaccaggttcaaaataccgtatgtctaaactgaggttttggcttcaaatgggtatattgaaagagatccttacctgttattctcctcacccactgccaacctctttcaatttgaagatgagaaagccattttcccttcctgaggttgagtgattcccttcaccacttctgcaagaaggggaggtagccaagcagacaggtactagtgcccctgtatctagtagccattacgtgttggtatagggtatacagaaagtggsgatgcccactgctttggctttggggggtcttggtcaattacccttccaagttttggagtgctaagccacctttctttctctataatccattgcttctcaatcccaaggaggaaagtctgagcagggttgatgtttgactgcacagtgcttgggacactgggtgtttgtgtgtgaagtttacccacaagaagctgcagcattttttctaccctcccactctcaacagattcagcccctctcgaggggctgggtacgatttccactgggagtcacaggtaagtaatgggagcctcagggacagctcttttaaagaa

SEQ ID NO: 626794 - DNA, 598 bp, Homo sapiens
acaaacatgggcaatgaatagtcaccaggttcaaaataccgtatgtctaaactgaggttttggcttcaaatgggtatattgaaagagatccttacctgttattctcctcacccactgccaacctctttcaatttgaagatgagaaagccattttcccttcctgaggttgagtgattcccttcaccacttctgcaagaaggggaggtagccaagcagacaggtactagtgcccctgtatctagtagccattacgtgttggtatagggtatacagaaagtggggatgcccactgctttggctttggggggtcttggtcaattacccttccaagttttggagtgctaagccacctttctttctctataatccattgcttctcaatcccaaggaggaaagtctgagcagggttgatgtttgactgcacagtgcttgggrcactgggtgtttgtgtgtgaagtttacccacaagaagctgcagcattttttctaccctcccactctcaacagattcagcccctctcgaggggctgggtacgatttccactgggagtcacaggtaagtaatgggagcctcagggacagctcttttaaagaattc

SEQ ID NO: 626795 - DNA, 431 bp, Homo sapiens
aactgggtttgattaaatgacagtatgagtgctacatataagacattttctagcctttcagagaaggaagttragagtacatgaaaagattattactgttcctgtttgcctttgaagattacagaggagtacagtcagcatgcagagacaatattgttgtgacttacagttttaacaatgaattctattgctagaatttccttttttaaatgttttctataagagaattcttacagttctgattattatttccagcaagaaccttagaaccttatgtttctgttaggttcttcttaatcacgtacactacgaggagatggagggaatttcgttattctattctaaaacatacccccttccaatttaaaaatggaacgtttttaaatggaaaatggaaaataataaaatggtcagtcatctaaaccatgatt

SEQ ID NO: 626796 - DNA, 454 bp, Homo sapiens
aagccattttcccttcctgaggttgagtgattcccttcaccacttctgcaagaaggggaggtagccaagcagacaggtactagtgcccctgtatctagtagccattacgtgttggtatagggtatacagaaagtggggatgcccactgctttggctttggggggtcttggtcaattacccttccaagttttggagtgctaagccacctttctttctctataatccattgcttctcaatcccaaggaggaaagtctgagcagggttgatgtttgactgcacagtgcttgggacactgggtgtttgtgtgtgaagtttacccacaagaagctgcagcattttttctaccctcccactctcaacakattcagcccctctcgaggggctgggtacgatttccactgggagtcacaggtaagtaatgggagcctcagggacagctcttttaaagaattc

SEQ ID NO: 626797 - DNA, 609 bp, Homo sapiens
tcccactttcctgcctctcctaccttacttgtttcttcatatcgtttattattactgactttgcattatacatgtgtttagtatctggcttccctacctggcaagttagcaccacgagggcagactttgttatgttcactgctttaattcctkgttcctaacatagaaaatggcatacattaggcactcaaatacatgctgaattaatatacgaatattctgactcttaaaatttaaaaaagaaagaaaagctatggccacaaaaaattttgacatacatgtacttttaaataacttaccataagcctccatacatatcatgaaaggactcagtatacaacattggggatgggggtgatggggagatgatggtcaaagggcacaaagcctcaattagacaggaggaataagtttctttgagataaattgcacagcatggtgaatacagtaaataataatagattacacatttggcccaacatggtagttcacgcttgtaatcccaacactggaaggctgaggtgggaggatcacttgagctcaggagtttgaaaccagcctggccaacatagtgagacctcatttctacaacaacaacaaaaagtactg

SEQ ID NO: 626798 - DNA, 426 bp, Homo sapiens
taggaaccagacctctccttccacacaacagtgtaaacagaatgtccattttatcataagtcatggaatgatatgrgtcagaaactgtgtgtgtataacaagagacatgttccgctggatggaacccaggaattcttgtttgtaaagttaaattttctttcccagctacacccatttagagagctcaacctgctaaacagtgaagagaagcagtttcacaaattacctctcacaccacaggcattttctgtaggctatgaaccaataaaggttcagtgaatggaagtacaggaggagctataaagaaagtaccagcttagtggaagaagccctggagccaacagagtagggacaaggaggggatagaagtgaatgcaagtgatattgcctgggctaaagaagacacattttcattttaaatttcta

SEQ ID NO: 626799 - DNA, 447 bp, Homo sapiens
aaattaggaaccagacctctccttccacacaacagtgtaaacagaatgtccattttatcataagtcatggaatgatatgggtcagaaactgtgtgtgtataacaaragacatgttccgctggatggaacccaggaattcttgtttgtaaagttaaattttctttcccagctacacccatttagagagctcaacctgctaaacagtgaagagaagcagtttcacaaattacctctcacaccacaggcattttctgtaggctatgaaccaataaaggttcagtgaatggaagtacaggaggagctataaagaaagtaccagcttagtggaagaagccctggagccaacagagtagggacaaggaggggatagaagtgaatgcaagtgatattgcctgggctaaagaagacacattttcattttaaatttctagttaaccagtgatacac

SEQ ID NO: 626800 - DNA, 437 bp, Homo sapiens
aaattaggaaccagacctctccttccacacaacagtgtaaacagaatgtccattttatcataagtcatggaatgatatgggtcagaaactgtgtgtgtataacaagagacatgttccgctggatggaacccaggaattcttgtttgtaaagttaaattttctttcccagctacacccatttagagagctcaacctgctaaacagtgaagagaagcagtttcacaaattacctctcacaccacaggcattttctgtaggctatgaaccaataaaggttcagtgaatggaagtacaggaggagctataaagaaagtaccagcttagtggaagaasccctggagccaacagagtagggacaaggaggggatagaagtgaatgcaagtgatattgcctgggctaaagaagacacattttcattttaaatttctagttaacc

SEQ ID NO: 626801 - DNA, 499 bp, Homo sapiens
agatctataaaaggttaatgggctttaaaaagggaagaaatcttctgcaacaacacggatgaacctgggagactttacrtcaagtgaaataagccaggcacttaaaaacaactatgacataatctcacttatatagagagtttagataagtaaaactcatagaaacagacagttaattggtagtcatcagaagctagggcatggggaaattgcaaagatgtcggtcaaaagacacacaattccagttagccaggaggagtaagttcaaaaaattgattgcacatcatggtggctacggtgaataacaatacatttatatttgaaaattgccaatagagtagattttaagtattctcaccacacacacaaaatatagtaagtaggtgaagatgttgtagaggcccaaattcgggctcatgtacctgatgctcagttgaaaccaaacactgacacaccaatgcttggggatagataaaagtttattccatttggccaaagt

SEQ ID NO: 626802 - DNA, 613 bp, Homo sapiens
ctcctggctttcatctttatcctgtgctggatgcttccagttcttcagcttttggactcttggacttacaccagtggtttgccaggggctctcaggccttcagccacagactgaaggctgcactgtcagcttccctrcttttgaggttttgggactcggactggcttccctgctcctcagcttgcagatggtttattgtgggactttaccttgtgatcgtgtgagtcaatgatccttaataaactccccttcaaatgtacatctatcctattacttcggtacctatagagaactctgactaatacaaaccccatctaaatgaagcaaattcaaaaaagaagtgtcaactcccgcagatggaaaggaataagcacaagaagtctggcaatacacaaagccagagtgttttgtgatctccaaagcctctcactagctccctaggaaaggatcctgaccagatgtaaatgtctgaaatgagacacatagaactcagaagatggatgtcaaggaaagtcaatgagacataagacaaaatagaaatccaatgcaaagaaaccagaaaaacagtccaagatttgaaagacaacatagttatattaagaaagagccaaac

SEQ ID NO: 626803 - DNA, 613 bp, Homo sapiens
ctcctggctttcatctttatcctgtgctggatgcttccagttcttcagcttttggactcttggacttacaccagtggtttgccaggggctctcaggccttcagccacagactgaaggctgcactgtcagcttccctacttttgaggttttgggactcggactggcttccctgctcctcagcttgcagatggyttattgtgggactttaccttgtgatcgtgtgagtcaatgatccttaataaactccccttcaaatgtacatctatcctattacttcggtacctatagagaactctgactaatacaaaccccatctaaatgaagcaaattcaaaaaagaagtgtcaactcccgcagatggaaaggaataagcacaagaagtctggcaatacacaaagccagagtgttttgtgatctccaaagcctctcactagctccctaggaaaggatcctgaccagatgtaaatgtctgaaatgagacacatagaactcagaagatggatgtcaaggaaagtcaatgagacataagacaaaatagaaatccaatgcaaagaaaccagaaaaacagtccaagatttgaaagacaacatagttatattaagaaagagccaaac

SEQ ID NO: 626804 - DNA, 613 bp, Homo sapiens
ctcctggctttcatctttatcctgtgctggatgcttccagttcttcagcttttggactcttggacttacaccagtggtttgccaggggctctcaggccttcagccacagactgaaggctgcactgtcagcttccctacttttgaggttttgggactcggactggcttccctgctcctcagcttgcagatggtttattgtgggactttaccttgtgatcgtgtgaktcaatgatccttaataaactccccttcaaatgtacatctatcctattacttcggtacctatagagaactctgactaatacaaaccccatctaaatgaagcaaattcaaaaaagaagtgtcaactcccgcagatggaaaggaataagcacaagaagtctggcaatacacaaagccagagtgttttgtgatctccaaagcctctcactagctccctaggaaaggatcctgaccagatgtaaatgtctgaaatgagacacatagaactcagaagatggatgtcaaggaaagtcaatgagacataagacaaaatagaaatccaatgcaaagaaaccagaaaaacagtccaagatttgaaagacaacatagttatattaagaaagagccaaac

SEQ ID NO: 626805 - DNA, 499 bp, Homo sapiens
agatctataaaaggttaatgggctttaaaaagggaagaaatcttctgcaacaacacggatgaacctgggagactttacgtcaagtgaaataagccaggcacttaaaaacaactatgacataatctcacttatatagagagtttagataagtaaaactcatagaaacagacagttaattggtagtcatcagaagctagggcatggggaaattgcaaagatgtcggtcaaaagacacacaattccagttagccaggaggagtaagttcaaaaaattgattgcacatcatggtggctacggtgaataacaatacatttatatttgaaaattgccaatagagtagattttaagtattctcaccacacacacaaaatatagtaagtaggtgaagatgttgtagaggcccaaattcgggctcatgtacctgatgctcarttgaaaccaaacactgacacaccaatgcttggggatagataaaagtttattccatttggccaaagt

SEQ ID NO: 626806 - DNA, 621 bp, Homo sapiens
catgcatgcttaatctaaaataaatattaaataatcaaataaaatgaataaaacggtagatatgattatgtggaaaatgctttactatttattatgtggtgaataatttaataatatttaataaatacatgaatgaaaaatagctacaactgtgtgttaggatttcaataattttttatttcattcctataacttttatgtattattatatacataataatatatagttaataataacaaaaacaacatggtattgaaataatttccacccagaaggaggatcaacatatttaagtgactacactactcaagataaaaatcatttatcaaacagatcaaagtcatttacctgctttcctttttataggtcctaggaacacacgtgccatagacaataaaacatcacttcccccatcccactaccttggactttatttaacatctttgggtagaacagaaactgttgataaggtgagttttgttttatagacaagagaggaaaatggatactttgtgtggtctgggccttagaaacagactaagatcttttttttttctcttttgctttttttactagcataaaatattaattgrcaaaacactgaatacaagcttcactat

SEQ ID NO: 626807 - DNA, 621 bp, Homo sapiens
catgcatgcttaatctaaaataaatattaaataatcaaataaaatgaataaaacggtagatatgattatgtggaaaatgctttactatttattatgtggtgaataatttaataatatttaataaatacatgaatgaaaaatagctacaactgtgtgttaggatttcaataattttttatttcattcctataacttttatgtattattatatacataataatatatagttaataataacaaaaacaacatggtattgaaataatttccacccagaaggaggatcaacatatttaagtgactacactactcaagataaaaatcatttatcaaacagatcaaagtcatttacctgctttcctttttataggtcctaggaacacacgtgccatagacaataaaacatcacttcccccatcccactaccttggactttatttaacatctttgggtagaacagaaactgttgataaggtgagttttgttttatagacaagagaggaaaatggatactttgtgtggtctgggccttagaaacagactaagatcttttttttttctcttttgctttttttactagcataaaatattaattgacaaaacacygaatacaagcttcactat

SEQ ID NO: 626808 - DNA, 576 bp, Homo sapiens
tgattttttttttcttctcacaatgctattattttaaggaggaaggcatgtgaagactttgtatatagagtcaataagaagattttaaacacgtgcatgtaaacttggccgacaagaggcacttggatctagagagactggcaacatatagcagaacttyagcatagcctagagctctgttacagaaattatgagctgggagaagagacaatggtgagctgatggaagtcagagcagccaggttaattaattaggactctcaataaacactagaacaaaaataaagaagacagtaatccgctagaacaaaatggaaaccaaggagtcactacccacccatagacccaataacaatagatgacaatttttgataagaaaattagaagcaggagagaaattagcattttatgaaagaggttgtagtcagttggacagatggatgtttaatacttgaatcctctatttacacatgctagtgtatcttcctctctggatctgtttccatataagggatataataattattatttcatacagacattttgttgtgttgttgatacatttgtgtgaggtaca

SEQ ID NO: 626809 - DNA, 587 bp, Homo sapiens
caattattttcataattataggaatttctgcataattatgtaaataaytgcctttcttgagagtggaattgtatatgtgcagattgtttcattaaaaaaatgtatttattataattaaaaaaggctttatatatacataaagcctttaaggccttttgttttttttaaaaaagaagactgtccctccaaaagtggcacgtagttctacctgttgtataatcaacactttactaatttatggatttaatccactgcttatccccaagatttccgagatcccaagtccaatatagtcaaggctcaagatcaaagtacttacgctttaccctcactacaccccttgccttttatactgcaccaaataccacctcccagaagttgctgtaaaaagaataatttacctacatacatgaccattaggattctgccttgaagcagacatgcaggaaaatataatattccatcccatggcaacttttctttacttgttttgttgtaatatttttgtgtaccctaagaaatagtcattttaatagattttcaattatagactaatatttatcagggattcattataaaatatgcta

SEQ ID NO: 626810 - DNA, 587 bp, Homo sapiens
caattattttcataattataggaatttctgcataattatgtaaataactgcctttcttgagagtggaattgtatatgtgcagattgtttcattaaaaaaatgtatttattataattaaaaaaggctttatatatacataaagcctttaaggccttttgttttttttaaaaaagaagactgtccctccaaaagtggcacgtagttctacctgttgtataatcaacactttactaatttatggatttaatccactgcttatccccaagatttccgagatcccaagtccaatatagtcaaggctcaagatcaaagtacttacgctttaccctcactacaccccttgccttttatactscaccaaataccacctcccagaagttgctgtaaaaagaataatttacctacatacatgaccattaggattctgccttgaagcagacatgcaggaaaatataatattccatcccatggcaacttttctttacttgttttgttgtaatatttttgtgtaccctaagaaatagtcattttaatagattttcaattatagactaatatttatcagggattcattataaaatatgcta

SEQ ID NO: 626811 - DNA, 487 bp, Homo sapiens
cctatcaaggccaccaagaaagggcacgtgaggaaagcacaaagatcctggagagacactggtttcactcagtttctcaaaattatcttagacacatttcctgagawcttttcttaatgccacaaacaccagagaagaaaatccttataacaaagcttgaaatggatccccatctccattaaacttgtccaaagctcagtgagtatataacctgataacctaaacacctagctagaaaaacctcagttccagtgctacaacagtgctagcttttctaacatttttaaataaccctgcttttaacccaataaaattcaactacagaactaagaaataaatattggaaatccactttaaaataatgaggagaccactgtgattgagaaaaagaaaaagacaaacgagagctggaaagcacactgattttgtagaaacagaaataagccgtgcaggtgccacactggcagcagtgcccgcgctggggcca

SEQ ID NO: 626812 - DNA, 487 bp, Homo sapiens
cctatcaaggccaccaagaaagggcacgtgaggaaagcacaaagatcctggagagacactggtttcactcagtttctcaaaattatcttagacacatttcctgagatcytttcttaatgccacaaacaccagagaagaaaatccttataacaaagcttgaaatggatccccatctccattaaacttgtccaaagctcagtgagtatataacctgataacctaaacacctagctagaaaaacctcagttccagtgctacaacagtgctagcttttctaacatttttaaataaccctgcttttaacccaataaaattcaactacagaactaagaaataaatattggaaatccactttaaaataatgaggagaccactgtgattgagaaaaagaaaaagacaaacgagagctggaaagcacactgattttgtagaaacagaaataagccgtgcaggtgccacactggcagcagtgcccgcgctggggcca

SEQ ID NO: 626813 - DNA, 487 bp, Homo sapiens
cctatcaaggccaccaagaaagggcacgtgaggaaagcacaaagatcctggagagacactggtttcactcagtttctcaaaattatcttagacacatttcctgagatcttttcttaatgccacaaacaccagagaagaaaatccttataacaaagcttgaaatggatccccatctccattaaacttgtccaaagctcagtgagtatataacctgataacctaaacacctagctagaaaaacctcagttccagtgctacaacagtgctagcttttctaacatttttaartaaccctgcttttaacccaataaaattcaactacagaactaagaaataaatattggaaatccactttaaaataatgaggagaccactgtgattgagaaaaagaaaaagacaaacgagagctggaaagcacactgattttgtagaaacagaaataagccgtgcaggtgccacactggcagcagtgcccgcgctggggcca

SEQ ID NO: 626814 - DNA, 487 bp, Homo sapiens
cctatcaaggccaccaagaaagggcacgtgaggaaagcacaaagatcctggagagacactggtttcactcagtttctcaaaattatcttagacacatttcctgagatcttttcttaatgccacaaacaccagagaagaaaatccttataacaaagcttgaaatggatccccatctccattaaacttgtccaaagctcagtgagtatataacctgataacctaaacacctagctagaaaaacctcagttccagtgctacaacagtgctagcttttctaacatttttaaataaccctgcttttaacccaataaaattcaactacagaactaagaaataaatattggaaatccactttaaaataatgaggagaccactgtgattgagaaaaagaaaaagacaaacgagagctggaaagcacactgattttgtagaaacrgaaataagccgtgcaggtgccacactggcagcagtgcccgcgctggggcca

SEQ ID NO: 626815 - DNA, 487 bp, Homo sapiens
acacaaagtcaaataaaatacatcacagaatgtaaataatagacaccagctgcatgggttttaagactttgttgaaggaaaaatataaaactataattaagaatgagattctagaaaartaagaaacatacagacattcagcaatatctaatggtttaatttcacagaaaaaaattaggcatttattagaaagtgtatttataaggaaaccatagaatgagaagaatccttgaccctcctcaactttaacaattatgatacatcaaattcacttttgacggcagaagtgatgatatatttttttaaagtaacctagcctaaaatacgtccttaaccactatcatttagacaattttttacaagcccttgcgttgtgtacagtagcaagctcataagtggaaacattgggcatttagaagcaaactggtgatatggaattttattctctttttttctgtttttattctaaacaaaattttacttctac

SEQ ID NO: 626816 - DNA, 487 bp, Homo sapiens
acacaaagtcaaataaaatacatcacagaatgtaaataatagacaccagctgcatgggttttaagactttgttgaaggaaaaatataaaactataattaagaatgagattctagaaaagtaagaaacatacagacattcagcaatatctaatggtttaatttcacagaaaaaaattaggcatttattagaaagtgtatttataaggaaaccatagaatgagaagaatccttgaccctcctcaactttaacaattatgatacatcaaattcacttttgayggcagaagtgatgatatatttttttaaagtaacctagcctaaaatacgtccttaaccactatcatttagacaattttttacaagcccttgcgttgtgtacagtagcaagctcataagtggaaacattgggcatttagaagcaaactggtgatatggaattttattctctttttttctgtttttattctaaacaaaattttacttctac

SEQ ID NO: 626817 - DNA, 487 bp, Homo sapiens
acacaaagtcaaataaaatacatcacagaatgtaaataatagacaccagctgcatgggttttaagactttgttgaaggaaaaatataaaactataattaagaatgagattctagaaaagtaagaaacatacagacattcagcaatatctaatggtttaatttcacagaaaaaaattaggcatttattagaaagtgtatttataaggaaaccatagaatgagaagaatccttgaccctcctcaactttaacaattatgatacatcaaattcacttttgacggcagaagtgatgatatatttttttaaagtaacctagcctaaartacgtccttaaccactatcatttagacaattttttacaagcccttgcgttgtgtacagtagcaagctcataagtggaaacattgggcatttagaagcaaactggtgatatggaattttattctctttttttctgtttttattctaaacaaaattttacttctac

SEQ ID NO: 626818 - DNA, 583 bp, Homo sapiens
ggatcccttctgttttgataaaaatctccctgctgccattctcagtaccrtgaggaacaccacagaaattctcaaaagtattaaagtttcaattcattgcagtaaggatgaccctgagtaaggattgaccagcgcacaagaattattgtcagttggatagagtatagacctgcatattgaagtgccagtaaggaatgcattctaacatattgaattcttatgaaaactgttaaataatgaaaactaccactgatgcttgttgcaggccttttcaaataaattatgactgttcaataaatataaaactgaaaaaattatgagattgaagaattatgtccagaatcgagccatcttcagaagatacaacaaaaatgctttaatagcctcttagcattccacaaacataactatactaagaaatcaagctgtgatgcagattaaaataggagagcctttagctgaactacagattcatcaaattggtacccataaccttggctagaggacaaattaaggaaaaagtagactacaggtaattgaggtttaacaaaagattcattgaaaagaacctcatgaaaagcag

SEQ ID NO: 626819 - DNA, 590 bp, Homo sapiens
ccatgagatctagaatgtgataatcctggtagtgcagtatcaattcttggacaagggcaattctaagtcaaatwgacatgctgaattcacttgaagcagaattgaagaggtaggaaacatagtcatttagcataacctgaaacctttactccaaatgcattatgtaattgagattaaaacttgttgggaacatctaagtgaggggtggacaaccttgtttctgtaaagtgccagacggtaaatattttaatctttgcaggccataccgtttttgtcacaaccactcaactctgctgtagcaaaaaagcagtcatacacaacgcgtaagcgaatgatgagtgtggctctactccaataaaactgtatttacagaaacaggtggcagtctggatttgtcctgtggtctgtagtttgctgatccctgatctaagtgatcatactgcccagctccattaggtgtactataatatctatttcaaaaaggaatgcaatctgagcaagatagaataatattgccttccctctgttttcaaggagagtagaaatggcagcaatggagggacagaagtacatggtttacttgtacatat

SEQ ID NO: 626820 - DNA, 590 bp, Homo sapiens
ccatgagatctagaatgtgataatcctggtagtgcagtatcaattcttggacaagggcaattctaagtcaaattgacatgctgaattcacttgaagcagaattgaagaggtaggaaacatagtcatttagcataacctgaaacctttactccaaatgcattatgtaattgagattaaaacttgttgggaacatctaagtgaggggtggacaaccttgtttctgtaaagtgccagacggtaaatattttaatctttgcaggccataccgtttttgtcacaaccactcaactctgctgtagcaaaaaagcagtcatacacaacgcgtaagcgaatgatgagtgtggctctactccaataaaactgtatttacagaaacaggtggcagtctggatttgtcctgtggtctgtagtttgctgayccctgatctaagtgatcatactgcccagctccattaggtgtactataatatctatttcaaaaaggaatgcaatctgagcaagatagaataatattgccttccctctgttttcaaggagagtagaaatggcagcaatggagggacagaagtacatggtttacttgtacatat

SEQ ID NO: 626821 - DNA, 568 bp, Homo sapiens
tgtgcacatgcacatactagtgttgggagacggcagaaggaggaaggagggctagcatctgctatggcacaaaaagaactgtgcatttagggtactgaaaatagctctagtgggctagcaacaaagtgggagtgaaggatggttggtaagaaaatcaaataccataaacagaggtaaacaatgtaacagagattatgtacctaggttagaaattttgctctacccttactacacaaatatcttaaaactcatataattcaattataaaacatgagtataacagtacctaccacaggcatttgttttgagaataaaatgaaaatcatgttgaggactcctagtagaacagtcaaagggcaacaaarggtaaaattaccccaaagtaacatttcttcagaacataatctgttctccactccctgtgttttttagactggtttttcttcctttattttttggtctcagattgagactcttagatcagtgctgtctaacagaactttctgtgatgatggaaacgttctaaatctgcactgtctaccatgcagtcactagccacatgtagcta

SEQ ID NO: 626822 - DNA, 554 bp, Homo sapiens
caaaagacccaagcagacacttgaccacaaaggctatagtgtggcaaataagcacatgaaaagatattcaccataattagccattatggaactaaaagctaacagtacaataactactgacatatactatgacaatacctaaaatttaaaaatataacaatatcgagtgctggtraggatgcaggagaactagaattctcaaacttgctgacagatatgcaaatggtagaactgctctggaacacagttggcagttccttataaacttaaacatatacttaacatacgacccagaaatcccataccaagtatttaccctagagaaattaaaactatgtacataaaaagcctgtacacaaatgttttaagaagtccattcataatcatcaaaaatggaaacaacccaatatcctttaatgaccgaatgtatagacaacctgtggtatgtatatccatataatggaatactaatccagaagaaaaaaacaaattattgatacacaaaccaacttcaatgaatctcaaaggcactacactgaataaacgaagctatt

SEQ ID NO: 626823 - DNA, 555 bp, Homo sapiens
ctattattaacattttgtttcagatccttgtagtcttttaaaaaatatgaaatatttcggacatacaaataagtatagagaagataacaaaaacccacgtacctaccacctagcttagaaagtaaaatattagacaaacagttgaagttccctgtgtatctctctctcattctgttctttkgttttcttccccagaggtaatcagtattctggatttggtatttctccttaaaaattattgttggctgggggcggtggctcacacctggaatcccagcaccttgggaggccaagatgtggttggatcacttgagctcaggaactcaagattagcctgggcaacatggtgaaaccctgtctctacaaaaaatacaaaaattagccaggtgtggtggtacatgcctgtagtccaggtacttgggaggctgaggtgggaggatggcttgagtcagggaggtggaggctgagggagaggaaatcaagccacgcacgcagccggacgacagagcaacatctgtctgaaaaaaaaattatgtttatatatctatataatct

SEQ ID NO: 626824 - DNA, 617 bp, Homo sapiens
ctgtggtctttctgcttccccaacctgaggctggagaccatgaaagtaatgccaagccttctgcttatgtgattttctcctgtactattcagcagccctggagtatgagcggaaaaaaaaaaaaaaaaaaaaaaaaagaaagacggtggattgatccaaggttgarattttgccaggtgtgtgtggcgggagaacaagggaaggaaggagtagaaggtgctgagagagaaagggtggaagaggtgggccttgggagtcaggctagaggagaaggctggaggggctgataggtagggagacagcagaaaagccaacagaggcagaagccagttgtagcaggagctggagagctgcaggtccacgaggttggttgtgatgtgaaatcaggatggtttcttggatttgaaaaggtggagcagctttaagtcaggctgaggccacagaccactgcctttgtgctacacagacctgagtgtctgaggagcacagcaggaccttccccatctggggacattctcatacgggcctgagcccaggagccacagaagaagagcagcgcacatctgccctgccttccactgggactgaaggagttgttaagcccttgggggctcccg

SEQ ID NO: 626825 - DNA, 617 bp, Homo sapiens
ctgtggtctttctgcttccccaacctgaggctggagaccatgaaagtaatgccaagccttctgcttatgtgattttctcctgtactattcagcagccctggagtatgagcggaaaaaaaaaaaaaaaaaaaaaaaaagaaagacggtggattgatccaaggttgagattttgccaggtgtgtgtggcgggagaacaagggaaggaaggagtaraaggtgctgagagagaaagggtggaagaggtgggccttgggagtcaggctagaggagaaggctggaggggctgataggtagggagacagcagaaaagccaacagaggcagaagccagttgtagcaggagctggagagctgcaggtccacgaggttggttgtgatgtgaaatcaggatggtttcttggatttgaaaaggtggagcagctttaagtcaggctgaggccacagaccactgcctttgtgctacacagacctgagtgtctgaggagcacagcaggaccttccccatctggggacattctcatacgggcctgagcccaggagccacagaagaagagcagcgcacatctgccctgccttccactgggactgaaggagttgttaagcccttgggggctcccg

SEQ ID NO: 626826 - DNA, 617 bp, Homo sapiens
ctgtggtctttctgcttccccaacctgaggctggagaccatgaaagtaatgccaagccttctgcttatgtgattttctcctgtactattcagcagccctggagtatgagcggaaaaaaaaaaaaaaaaaaaaaaaaagaaagacggtggattgatccaaggttgagattttgccaggtgtgtgtggcgggagaacaagggaaggaaggagtagaaggtgctgagagagaaagggtggaagaggtgggccttgggagtcaggctaraggagaaggctggaggggctgataggtagggagacagcagaaaagccaacagaggcagaagccagttgtagcaggagctggagagctgcaggtccacgaggttggttgtgatgtgaaatcaggatggtttcttggatttgaaaaggtggagcagctttaagtcaggctgaggccacagaccactgcctttgtgctacacagacctgagtgtctgaggagcacagcaggaccttccccatctggggacattctcatacgggcctgagcccaggagccacagaagaagagcagcgcacatctgccctgccttccactgggactgaaggagttgttaagcccttgggggctcccg

SEQ ID NO: 626827 - DNA, 617 bp, Homo sapiens
ctgtggtctttctgcttccccaacctgaggctggagaccatgaaagtaatgccaagccttctgcttatgtgattttctcctgtactattcagcagccctggagtatgagcggaaaaaaaaaaaaaaaaaaaaaaaaagaaagacggtggattgatccaaggttgagattttgccaggtgtgtgtggcgggagaacaagggaaggaaggagtagaaggtgctgagagagaaagggtggaagaggtgggccttgggagtcaggctagaggaraaggctggaggggctgataggtagggagacagcagaaaagccaacagaggcagaagccagttgtagcaggagctggagagctgcaggtccacgaggttggttgtgatgtgaaatcaggatggtttcttggatttgaaaaggtggagcagctttaagtcaggctgaggccacagaccactgcctttgtgctacacagacctgagtgtctgaggagcacagcaggaccttccccatctggggacattctcatacgggcctgagcccaggagccacagaagaagagcagcgcacatctgccctgccttccactgggactgaaggagttgttaagcccttgggggctcccg

SEQ ID NO: 626828 - DNA, 581 bp, Homo sapiens
tgtacccctggctcactccattctgtcataatcccctctttttgattctttgaacataccaggcrctctccaaccagctccaggggtgttccctctacttgttatgttctttccccagaggtcagcatgaccacctctctggtatgtcattgggacttcctcctttcttgctttattttctctacagcatttatcaccttctaatacattatttgatttactgtttgtgtttcatattttgtgcttctctctggaatgtgaggtccccaaacacagggctatttgtgtgctatgtttgctgctacacttctagggcccaatattggaggtgattgatgagtgttttgttcgatgattgattgaagatgtcaaatctggactggaggacgtggcctagaagagtggtcaatccagctccctgctatttctcctgcattgaatagatttatccacccaagcatagggtgaactggacaatcccaggcttgctctgctaaagtagctacatggtaggagagtagacagcttccaggcagtctggagaagatacagagctacacatgctcaatttatttacccag

SEQ ID NO: 626829 - DNA, 585 bp, Homo sapiens
tgtaataaatctgagcccagataaatacagcttcttggctcatacattttatattttatttgctcttcaaattagactgttagctgtgttctgccaggataccttctactcacttaatataatgttgcaagactttttaagaagttgagtagagacctaacctttgaaacttttataccattcaatctcatstgattttttccccagattttaacttctgaagagttctttaatttcaaccataaatgccgatttccctatgttttactacattttttggacaatttagccaggatctggaaaacggagaatgagatttctgcgttttagttgccatctttcctggctgtacaaatacagattatttgaatgctgtgctcatttctttttccactatttttcacttgagtgaaaaatataaatgacctataccaatggacaactctcttcaaagtgtaacttacatttcatttacatacataaaatttatacatattatacataatatatagtgcataatatataacaatacatgtcacatataaattatatgctatacatgtatatatagttatacatacaaag

SEQ ID NO: 626830 - DNA, 585 bp, Homo sapiens
tgtaataaatctgagcccagataaatacagcttcttggctcatacattttatattttatttgctcttcaaattagactgttagctgtgttctgccaggataccttctactcacttaatataatgttgcaagactttttaagaagttgagtagagacctaacctttgaaacttttataccattcaatctcatgtgattytttccccagattttaacttctgaagagttctttaatttcaaccataaatgccgatttccctatgttttactacattttttggacaatttagccaggatctggaaaacggagaatgagatttctgcgttttagttgccatctttcctggctgtacaaatacagattatttgaatgctgtgctcatttctttttccactatttttcacttgagtgaaaaatataaatgacctataccaatggacaactctcttcaaagtgtaacttacatttcatttacatacataaaatttatacatattatacataatatatagtgcataatatataacaatacatgtcacatataaattatatgctatacatgtatatatagttatacatacaaag

SEQ ID NO: 626831 - DNA, 442 bp, Homo sapiens
acatgtataataaggactttyattcagaatgtgtaaataattctcaaaactcaataataaaaaaccaaaaaaaaaaaaattgggcaaagacacttcatcaaaaaaagatagggggaaaataggcacatgaaaagatgctcaactcatccttagttatttaagaaatacaaataaaaaccgtaagatatctccacacacctatcagaatggctaatattaaaaatattgagatatcaagtgtggtgccacttctaggctctgtaatttccacacacacaaataaacaggaaatgtaaaatgggtgaattgtttcagaaatggaaaagggatataatgaacatgagcttttcctagaacttataacagaaaatatcccaacataaaagaagttcacccaaaaagcagaaaacagcccatttaccaaatttaccctgtgcttaca

SEQ ID NO: 626832 - DNA, 442 bp, Homo sapiens
acatgtataataaggactttcattcagaatgtgtaaataattctcaaaactcaataataaaaaaccaaaaaaaaaaaaattgggcaaagacacttcatcaaaaaaagatagggggaaaataggcacatgaaaagatgctcaactcatccttagttatttaagaaatacaaataaaaaccrtaagatatctccacacacctatcagaatggctaatattaaaaatattgagatatcaagtgtggtgccacttctaggctctgtaatttccacacacacaaataaacaggaaatgtaaaatgggtgaattgtttcagaaatggaaaagggatataatgaacatgagcttttcctagaacttataacagaaaatatcccaacataaaagaagttcacccaaaaagcagaaaacagcccatttaccaaatttaccctgtgcttaca

SEQ ID NO: 626833 - DNA, 480 bp, Homo sapiens
taagtatttactgaacatgtactatgtgccaggaatggcacaagtacctaagtatcaggccgagcatggtggctcacacctttagtcccagcactttgggaggstgaggcatctttactaaaaatatgaaaatcagccaggcatggtcataggcacctgtaatcccagctactctggaggctgagacagaagaatctcttgaactggggaggcagaagttgcagtgagcggagatcgtgccactgcactccggtctgggtgacagagtgagattctgtcttaaaaaaaaaaaaaagaaagaaagaaagaaaagaaaggaataaagaacataataagtatctaaggggattgcatccctacttagtgcatatgagtgtaaccagggactaagttagaataaatgaaacattttaccatttagtggacataaattcttcccctacaatgatgaaaatcactacaaaatatgtttcacagatt

SEQ ID NO: 626834 - DNA, 480 bp, Homo sapiens
taagtatttactgaacatgtactatgtgccaggaatggcacaagtacctaagtatcaggccgagcatggtggctcacacctttagtcccagcactttgggagggtgaggcatctttactaaaaatatgaaaatcagccaggcatggtcataggcacctgtaatcccagctactctggaggctgagacagaagaatctcttgaactggggaggcagaagttgcagtgagcggagatcgtgccactgcactccggtctgggtgacagagtgagattctgtcttaaaaaaaaaaaaaagaaagaaagaaagaaaagaaaggaataaagaacataataagtatctaaggggattgcatccctacttagtgcmtatgagtgtaaccagggactaagttagaataaatgaaacattttaccatttagtggacataaattcttcccctacaatgatgaaaatcactacaaaatatgtttcacagatt

SEQ ID NO: 626835 - DNA, 462 bp, Homo sapiens
attgtttatggtaataccttatagtcccactagtgtgttcattagaggacaggcctgttagatcaagggtttctgtaaaatcaggtgaatatattcaccaaaaataaaatatgtaatgattccatagcatatcaacctttaaagtttttatcatgaaaactttgaaagggcaggttacaaaaattattcaaacaacaagaaaatcttactgtgcttatggtttcaagaaacagtaaggagcatatacrcaatagaaactcactaaatatttgttgaataaatattaacatcctccaaccccaatgtgcaacattgctaattttcatatctatccctccgcacttgattatgttccttgatggcaaaattgtgtcttcgccattttatattctcaaaatttagcaaaaagcgtggtgtatagtggctgctgtatgatgtttgtgaaggaatttgtaaatgaca

SEQ ID NO: 626836 - DNA, 541 bp, Homo sapiens
tccaccattacgtggtaaaagtgttaggggcatataacttgtctctttagtttcacaagcccacagatagaaattgtgccctaggagggattaatcataggcscctcttccacacctgatttagatgatgagattttggactttgtgctatgagattttgatgaggttttgaacttgagctgataatgtaataagatgaagaatttgggaagcttgaaatgggtgaatatgttttgcacgtgaaatgaacatgagtctttaagggccagatggtggactgtagtaggcagaattctaagttttctctcaagattcccagcccctggtgtatacacactttctcccagttatttaagcaaacattaagctaggtgctgcttcaaggggttttgcagatgtattatggtcccaaatcagttaatcttaaatagcgaaattatgcagttaggagagatctaatcacatgagccctttaaatctggttgtacaggtcagaggcagagtagctagattcaaagtgtgagagggattcaacataaag

SEQ ID NO: 626837 - DNA, 463 bp, Homo sapiens
tgtgctacgtgctatttaagtgaatgaaacacaattccttcccttgtgaaacctatattgtagaaaagaaacagaaagaaatctatggaagtaaaatatatgacatattgaatggtaacaggagaatagcaaaygcttagcaaatgctaagaggagaataaagcacaaggggtggaatttctaactacaatgatcaaggaaggactcaccgtaatcacttgcttaaaaagaacacttaagcaaggactgaaagggagtgaagatgtgagacaaataggtatctggaggaggagcgttccagccaaggaaatgcccagtgctttggactcatggcagaaatgtacttgagtattctaggaccaactgggaagcccatggaagccagagtggaggtcggggagggagcaggaggacacagagccaaagcctttctgaaccaagagggacaggaattgggtgaccg

SEQ ID NO: 626838 - DNA, 577 bp, Homo sapiens
gttttccattgttggtgaaaaatgtcaaggaggaaagaacaataatgattccatcatgataagaggaatgaacgtgtctgcaactaatgggagcaagatagtacactttaactctttcagacaacttgcattctgtggatgccagctttggaatcagagccgcctctggaatacctgtgcttccagagttagcttttggacagttaccttctttctggccatcttgacttctgccccacatctgctttttggctttgtgcagatctttaacatgttagtgaacagacattgcccagtgtctcttctagcccctccaacagttcttcatgtagcactgcttttggacagtgacccatgatatctgccttcgtttgcccctctgactgttggaatcccacgcaccattcagtaggattcaattcaatgtggaaccattcaacattcacctcattaacctaaaatgtctcccaaagatgtatgtaagacacacactgccctaacctcactycaaatgtctggagaaatgtgtgtagtgcttttgttaaagcccctatatgggcagcatggaggatcataa

SEQ ID NO: 626839 - DNA, 356 bp, Homo sapiens
ttttggtttaagattactttggttatttgggaccttttgtacttccatagaaattgtaagatgtttttctatttctgcgaaacatgtcatgggaattttgataaggattgcattgaatctttagattgctttggatcgtacagacattttaacaacattaattcttyctatccataagcacaggatatctttacatttgtttgtgtcttcttcaatatcttccaccaacattttagttttcattgtggtctttcacctattcagttaaatttattttaagaatttttttcttgtaactattatatatgggattgtttcattgattttgtgtgtgtgtgtgtggatagttcactgta

SEQ ID NO: 626840 - DNA, 506 bp, Homo sapiens
attgatcatttccattttgttctcttataaattatctattgatacctggatacattttccttactgaggtattatatatttcttattcatttatatgactcatacaaatgagtatatatatttctaagatttacttagagtcatttatacatttatatgtggagtactttgttcaatggcaactagttaatgcactgtatagaaaaatataaactgaggatttatctttctggtgtgagtagtttcagtatgagctcaggggatttaaaccaattctggtgaactttttttattttctacattctgctgtggagagtgatggctttaagccataagaaaaactatccaagattttgagtgatgtgttcacatgcacagggagagtwgaacaaatgcctgctggcccacctgatatgggtaagggtgaatattgacttccttggtgcttcctgtgattaaaaacaagaaaaacaaaacaaaacaaaacctggctgagcattctgctt

SEQ ID NO: 626841 - DNA, 590 bp, Homo sapiens
actatgtaaatattccatcctacatcagactttcaatttattcacttatttattttagtaaagctcataattttgttttatttagtgatttataatatattactatttttgtttactttgatgctcaatttgtctcaattttggccagttggaggttcttcatcattctttgagcactttcttactttgtggcacaaaacaaaattccagagtcatcttgagtttttccctgaccaagccctgaaatcagtcctcactctaataagctctggttcctcttaatgtttgagaattgtatttagaaaccaagatctcagtggtagatgtgttcatggcttctggggcctctgccctcaggtttgctaggtagacaaagttagggactatatgtgtatacatacatatctatctacctacctacctacctacctacctatctttctattcatatccatgaatttacaccagtacttccatccattccagtccaatacaaagtttctycaagttttctacttttccatatttttaactttcttttccagcagtgagctcctattaggattaatgtttgtatttactttgtcaat

SEQ ID NO: 626842 - DNA, 458 bp, Homo sapiens
tttcaaggtggcaacatggttggtctgcgtttagggcatcattgttcttaatctggccctgcagtgaggcagcctaccttgcttattatttccctaccctatcccaataactttttttttttttwaagtagagatggggtttagctatgtttcccaggctggtcttgactcctgggctcaagtgatgcgtccaccttggcctcctaaagtgctggaatttcagatgtgagccactgcacctggcctccaataacttttgaacaaattcagaaaattaagtgaggatgcaaagggtttaccttttcccttcaaacctgctcagtgaagaaagaattttaaatctaggttatcccacccccactataccccacactcttatttatttatttatttatttatttatttatttccttgttaagccctcttaggtagtaaaaagtactgtggtcactttaaat

SEQ ID NO: 626843 - DNA, 516 bp, Homo sapiens
cttaaggtcagttgacacaaacctttgtgtggcatgctaaggagattggaacctctaatttaaaaagtagacatccaaggcttctgagtacaggagtgaaatggtcagatgtgtgagtaatcaagaaactggtagcatcagtgtggatggattgcaatggggaagtggtgaagtatgaggaaacacacctgtccagtttgcttgagacagaaagttgggattctcttaagcagtcacttaatcttaatctctataagcagtcacagagccagggttgtgctggagctggctcaaatgaatgcaatcttactcacaaggaccaattattaaaattgcaggaattttgcaaactggttgttaaacaccaccattattaaaaattaaattatataaaattacagttaaattaaatttagaaaggtgaaaatacagtacattttagtatttactcwccatgctcttgaggttatttatgtcaatactatctgaattgtagaaatgctatttaatggtatg

SEQ ID NO: 626844 - DNA, 603 bp, Homo sapiens
ttaatgagaactaagttcttcagtcatgcaggagatggagctatgaaagcacaacattgcattcattgattcaataaatrtttactgaatcaatgaatgaacttgcggccagtgaactcttagacattggaacactcgaagagtctgtgtgggtatagcttgtggaaaaaaatgttgccctgaaagctatgtctttagttcttgtgactgatatgattttttcaattcaactaattgccctgaggtgtgaaaataaatgataagcaaattatttttccagcagactattcagtcccctcattttaccaagtttcttttcagaattaccagaaccattccatttgccaatgagtatttgtttggatttcaattcaattttgagtgtgttttcgaattccagtgcagactagagggttccatggtctaacatctgtggttttgaatgacatcattgaggcaacttctctgtcagttgcttacttaccagctttagtggtacgttacataacatttccacttatctttaaacacaatagcaccaaaggatcaggtctattttcttttatattaataagaatagtccttcacagagagcacatggaa

SEQ ID NO: 626845 - DNA, 632 bp, Homo sapiens
taatactgcattttgtcaaactgaagacaccattgatacatcgtaatttttgttccactaaaactcaattgatcaactgattaacagatcaaactgaataggtccaaaaccaaactcttgagccctaccacctcaaaacttctacccagagtcttccccagctcagttgatagaaatctcattcttccaaacactttgcaatccttgatctggaatgtactatggtcttcatattcaaaatgtgtatagaatccaacaacttctcacaagggccactgttattttttggctaagagctaattccatgtggttctagttaccaatatctcctgcctgaatttctgcagtaaccttcagcttggttccttgcttctaatctattctcaatacagcagttggagtattctcaccataccatraataaaatcacctcctcttctgctcaaaatcctccctgtgtttttatttttgtttggattaaaaactaacgtctctgtagtgaacaaaggaaatgaaatacgtaaactctttgcctcacaattttcatttcttaggaataaaccctgaagaaataattccaatgtggactagtgtcatgttaaataatattcatttatcatcatatatcataa

SEQ ID NO: 626846 - DNA, 625 bp, Homo sapiens
gtaacaaaagaaaaccctacaaattaaatatccagtcacaagaagatttttcagctaagaaatacttcatctattggatatgttggaatataatgtgtatcctttaagaatccatattgctttataagattcacaaagatattcacactttgtgaatctaataaagcaatatggaaaactatatgctgtcaagttagaaaatatacaacacaatacataaactatagaactattcaaaatatgcatacaaaataaaggcaataaaattaaattatagtcattgaattaagcttatgacaatctttttatttcttgttttttgaagtatctataattagttttttttacttttttaaattaagcaatacagttaygtttaaaatattacatgcaatcacaagcaggacacacaatactatgtgtagacaattcagtagcaattatcaagaatgtaaagattggatagatacagattgaaagataactgtcaaaaataaaacacttctttttagtaatttttatttccttcatatttgcaaaatatgttaatttcactggatttgtaaaaagaattaaagaacttaaaaatcacaaattcatttttatagtaatacgttgacaaaaa

SEQ ID NO: 626847 - DNA, 534 bp, Homo sapiens
tcagccagtgcctgggtcttttggacccatctgtctttgaatgcattcttgctttctggaaggacaaagggctctagttgcattttactttccactgcctcatgcctggcatcctccacttgtccaaggagacctggctccttctgatggagactggcatcaagaaatagagagatgtgggcactagatacatgcattgctacagggggacatggcttcttgctcttctttctatggttatgacttgtcaattgcatatttataccatcaaaagagcataatgatggccccaactccaatccaccgccttcccccattccatatgagaaggcccttttcccacagagagaaccctggtacctaacagtatatatttactyatttgctctactctgtttttcttttttcttttttttgagacagagtcttgcctgtttcccaggctggagtggagtggcatgatctcagctcactgcaacctctgcctcctgggttcaagtgattctcattcctcagcctcccatgtagatgctc

SEQ ID NO: 626848 - DNA, 398 bp, Homo sapiens
gccctgccgtgtgttcttcagcccagtgctgggcacccagggggagagtccatgtcccaggacggccaatgcccatctggttgggcctcgtcgcaggtcagccaagaagccaaaccaaccaagaagcccctccyggcctcctctggggctgggcagcgtgggctcatccggctcacgcatttctgctggaacccatgggttcacgctaagaccactttcttccctcgggcaatgtgctctgccggaagggcctgagtctgaaccatgttctgggtcgtcatggtccagggcctgtgagtgagcagttcctccggaattcaggggctgccaaggtctgtgctgccgggtgagcactcaggcctaagtcctgcggtccttcttgtggccggggcaagagt

SEQ ID NO: 626849 - DNA, 565 bp, Homo sapiens
agaaatcctttatgaaagaccacatgttttctcgtatataaaattctctaataggtaaaactatagtgacagaaaacaagtgagagatagctaaaagccaacatgggcaaaaacggttgactgagcacgagggaaactttcaggctgatggaaatgttctatatyttgaggatgggggttgctacatgttaaatctcatgagactgatactgtctaaagtgagtaaattgtattttacaaaattatatttcaataaagctaattttttaaaaatgctgtaaaaatgacaattttggttttaagactatttaaccctcaggatactggaaagtgatgatcaggactgctgcatatggttatgtaaattgtgtgtttacgtaactgttcagttaaatgcagacgctcactcaagaatccgagtagtaccagctgtccaccggcatgaatcattttcctactcttgcctcacccagaacaaggggcagagaccatccaaaacctgaattggtaattaaattgccttataaggttttagttaagaaatcttatccacaaaagttcagaa

SEQ ID NO: 626850 - DNA, 574 bp, Homo sapiens
atgcagtgagcctgggtcagcgtgtgcaaatgtttcttctagcatctaggtgttataaaatcgttactgagggatcccacaaatgatggttctcaggtgttcctgaagcattgacaccctgcacagtttgcccaggagagctaagtatcactgttggtgctctcacatgtaaagtaaagaggagaattgagtcaattgcctgaataattatagcttgaacgagctcttattttgcttatctatttcaggaaaatatttgagggcagtaacttaacataagatgactggaaaacggtctctattctccgcttttcttagggcatatatatatatatatatacactctctacatcagtgattttttaamtggggtgattatgcctcccccacccacctttcaccccagagatatttggcagtatctggaggtgtttctgattgtcacaacttgagggtgctacaagaatctagcaggtggaggctaggggatgctgccaagcaccctgccatgcacaggacagccccctctgcaacaaaaaactttctagtcgaaaatgttaatatcattgaggtt

SEQ ID NO: 626851 - DNA, 456 bp, Homo sapiens
gaattctaagccagtgggtcttaacttctaaggtgccatggaagtggggcctgcagaatgacactgcctggctccctccattcagcccccttcctagggatatatacggacagatctcctgccttaccggggatcctgggtctggagtatgtcagactcctgggactctgtgagtgcctgagctgctgctgccaagactacacacaactctgtgtattggacctaaggctctggtggcatgggctcccaaggggatcttctgattcatgagttgcaaagatctgtgggagaggtggtgtttttcaggyggtgtcacacaatcactcactgcttcccctggctgggattgggggtttctttggctccgtgccactcctgggtggtctgtcacccgccctgctttttttcattctccaagggttgagttgtttgcctagtcagtcccaacactagaac

SEQ ID NO: 626852 - DNA, 399 bp, Homo sapiens
tgaggcttggtggctcccaccagagcgtggtcggcaggaagccaagtctcccctccacagatcatacctacaggtcttttctccaggaatggttctcagaggggtggcaccgggcagtgagaccccgcctgtcagagttctggaagagggcaagtgtgctggacacagacgccatgcatagaccgctcctgggcagaccctgttgccccagctggcagcaggccaccctcggctgtcagctccccccaggcccgcctccctcgtagggagccctcgacagcctttctgggcacccgcatgggtkcctgatggaggtgagcctgctgtctactggagcagcccgggtaggtctgccactgtgtagagagagaccagggagaggccgcacagccgggcagg

SEQ ID NO: 626853 - DNA, 588 bp, Homo sapiens
gtgcatactgtattaaaatctcataattagtgaaacattagcctactaaggttttaaatggaatgggtcatggccttgctgtattgtgtagagcccaaaacaatatagacatttaaatcaatgtaatttttagtgcttaacaatcacctttagatttgcatgatctgaatgagtggccctttgggttatatacggwctgtgacagttacccagcttcaggttacaagcatgcaagaccataaatcaaaccatttcctgatgtaaacaggtctcacaaatttagacttctcaaatactccatgaagtccaaatttaacagccgtttcagctagaacaaccatcagcaaccccccgaaatctgcatctaaactatccacattatctgaacatctctacaaccatcaggtctgtttactcggaatctagggataaagggttagtggaaaagaaaagaaaattgtcccacttggctatctcacataatataacaaagagggcaagaccctcgattctgcagatagcctgaaaaagattgtcttagatccgaagtggaaacactctgtttatctggttcagattcctattctc

SEQ ID NO: 626854 - DNA, 486 bp, Homo sapiens
ccaggaagtcctgccacatggctctgaacacctttctatgaagtagaaggagtggtgagccattaacctattttacagatgagaaaaatggtaatgaagggtcagctttattttattttattttattttttgccagggttacagcactggcaaatggaggcacttgaggagcaccaggtctcttgaccatgagtccagtagactctgcaatgctctctgtgctccctgacaacctctaaacaggaagtgaagttcccacttaactttgggggaaataccacgggccatgctgtagatgagygtctttcctacagagaagaatgatttgaacccctacttctccccttgacaccacttctatatacacacctccatgtacacatctccagacacacagaccacacacacacacaaacacacacgtattctctttcctttatttttctcaatggtcctgcctaaagtaggaaacagatgggcagctga

SEQ ID NO: 626855 - DNA, 478 bp, Homo sapiens
tgtaatcccagctactagggaggctgaggcaacagaatctcttgaatccagggggcagagggtgcagtgagcygagatcatgccactgcactctagcctgggtgacagagtgaaactccatctcaaaaaaaaaaaaaaaaaaaagacagggccgggaacagggaaaccatcaagagactcaacagtctaggtgaaggatggtactggacctctctgaaggagaaatgcagtccattcctccccagctcagctggtgccctctggtctgtagtcagagcagtggctgaagaaactgtgtggccagcagacactgtgtcctggggaaggccgttggaggagcagttcactgggagtaaaaataacactctggaagcaaatgcccctgcagttgtaactggctccatccaaaaccttaggagtcccaccatcagagcaactttttagaagtacccaacaagagtagcatgcatattggaag

SEQ ID NO: 626856 - DNA, 478 bp, Homo sapiens
tgtaatcccagctactagggaggctgaggcaacagaatctcttgaatccagggggcagagggtgcagtgagctgagatcatgccactgcactctagcctgggtgacagagtgaaactccatctcaaaaaaaaaaaaaaaaaaaagacagggccgggaacagggaaaccatcaagagactcaacagtctaggtgarggatggtactggacctctctgaaggagaaatgcagtccattcctccccagctcagctggtgccctctggtctgtagtcagagcagtggctgaagaaactgtgtggccagcagacactgtgtcctggggaaggccgttggaggagcagttcactgggagtaaaaataacactctggaagcaaatgcccctgcagttgtaactggctccatccaaaaccttaggagtcccaccatcagagcaactttttagaagtacccaacaagagtagcatgcatattggaag

SEQ ID NO: 626857 - DNA, 556 bp, Homo sapiens
atcaagagactcaacagtctaggtgaaggatggtactggacctctctgaaggagaaatgcagtccattcctccccagctcagctggtgccctctggtctgtagtcagagcagtggctgaagaaactgtgtggccagcagacactgtgtcctggggaaggccgttggaggagcagttcactgggagtaaaaataacactctggaagcaaatgcccctgcagttgtaactggctccatccaaaaccttaggagtcccaccatcagagcaactttttagaagtacccaacaagagtagcatgcatattggaagaatttgatttccactctcaaactacgtgataattatctcattttaaaattccttaaaatggtacrgcttttacttctattcacaagtagatttaacaatttcatatgatgttatgctatttgattgttaattacatcattattttattatccagaaatgagaaatacttagtagctttaacatttttgaattccagaaggaaaagaaactagattgttaactttttttaataattaaaaaaaaaaa

SEQ ID NO: 626858 - DNA, 513 bp, Homo sapiens
ggtcttattgccaaaaaatagcccatgcttcttctttttttttttttttttttttgagacaaggtctcactctgttgcccaggctggagtgcagtggcatgaccttggctcactgcaatgtccgcctcccaggtttaagagattctcctacctcagcctccctagtagctgagattacaggcgcctgccaccaggcctggctaatttttgtagttttaatagagatgggtttcagcatgttggccaggctggtcttgaattcctgacctcaggtgatcagcctgcctcgacctcccaaagtgctgggattacagacgtgaaccaccacacccagccccatgcytcctcttttagcagcctattgtccagaactcatctcccagcctgatccagctgtagggaggtcttccatgagctagaagggcagcagtaatatctaccttgcttggataacaaaacttttctcacaggaatgttgtaaaatttatacaagttaggtaaaagaaagttgct

SEQ ID NO: 626859 - DNA, 648 bp, Homo sapiens
gttgttagaactgctcttcagggtgtgattgccaaccaggtttcaaaattgcagagtgggagagcagcctgacatcagggaggtgggtaacargctgctgagcctcttgccaagatgtaataattacgatgaaaatgcaatagtctcactgcaagaggcagaggctatttagagtatcccccacccccacctcgctctgtcgttactgatcaaggctcattgttctctcacttaatgtaaccacagctttcagatttcgaagtgcttcttaacttatccttctttgtcattctgcttgaatgttatctttggaaaatggaacacaacccacagtcataacatgtgccccttgtgaaggaggatgacacttaaggcacttgaacacaggctaataagtgctttcagggctgggtgtaggcggtaggctttatgaaagttctctaaccccctgagaacttagatcaacaaagacacaggtcaaaaatctaccactagatgttattttcctggagaagtggatgcacttttaaaatctttgctgcaagttgcttgtagcaactactctcagaaaccactctcatcccaaatgttactgttttttgttttttttttaaacacatttattttaggtttgggggtacatgtgaa

SEQ ID NO: 626860 - DNA, 601 bp, Homo sapiens
gtactgttattactgagatattagcttgctctagaaacccctggagtagtctggatcagcgttcggtgcttttcaggtacgaatggagagatcaaagtcagagatttttgacttccaaagcaacctgagcacttagggctgaactatttaaagccagcaccacagagggaacagcaaaggtggagacaacctgcagagtccagscttttcaaaggaaataatgagctattcagttagcattctgtgggctttaaaaaatgtggcagggggcggggggaatgttagttcagccactactactgaaaaatgctcactgttcaacttgcctgctgcaatttaagccgccaaataattcagagctgctacagatgctggagtcaagagtgtttcaaaaagcatcagcttccccagctcctaatcacattttaaaataaaattggagctttcaacacagcccgggagctgttccttatattcttcaaggacttagacatccaccctggagctactggacctttgtccatgtctggttttgaatcttcttccattcctttggcacttgcagcctagtaggtgaaaggtggtgggtttagctggtttg

SEQ ID NO: 626861 - DNA, 601 bp, Homo sapiens
agtaatgcatataactgatgtctaattgttcctttcactactgcaaataggtctggtattctctgaagcacatctcaatatttttctgcacttycatattttgattcagatattttcattctctttcagtttatctagtataaatcttacactgttatttgctatcactttagcctaacctatgccagaaaacatttactaaatatgaccatttattctagagagagataagttaatatagcttgtatgctatgtgtatcagttctcttttttccactgagatagcataagaatgaggaagtcttttactttttaagaattgtggttgagcaacagaaagaatgtactatcgaagctgtgagactgtaatatatgaacaatgtaggacaatacagataaaaaagtgtttcaatcagaattgaaccaggagtcacatatttgagttccagcattaacttcatcattattaattgtataatgttggaccaatcactacacccctctaagcctcagtttccaatccataaaacaggaaaagtaataactctgtttgctttcctgtaaaatatgtgatgggaaaagagggatttacatcatgccc

SEQ ID NO: 626862 - DNA, 388 bp, Homo sapiens
cacatcttcaccctggtccaaactacctttattccttgggaacgtaacaatagttttctaattattctccttctgcttccattcttatcagcctctaatcctttcttcccacagcaaaatgaactttaaaacatatgtcagaacatgtccctcccatgttaaaacccttctgtaggtttccttttcagaaagctttggatattctgccatcacctcccctccccttscagtccctatcttcatctcttattgctattctcttggtgcctctgtcacattgcctttctttcaatccctaaaacactccaacttcttttctatctctgggcttcccataggtggggctctgccaaaaagactcctctccctcctttgcctggatagccct

SEQ ID NO: 626863 - DNA, 388 bp, Homo sapiens
cacatcttcaccctggtccaaactacctttattccttgggaacgtaacaatagttttctaattattctccttctgcttccattcttatcagcctctaatcctttcttcccacagcaaaatgaactttaaaacatatgtcagaacatgtccctcccatgttaaaacccttctgtaggtttccttttcagaaagctttggatattctgccatcacctcccctccccttgcagtccctatcttcatctcttattgctattctcttggtgyctctgtcacattgcctttctttcaatccctaaaacactccaacttcttttctatctctgggcttcccataggtggggctctgccaaaaagactcctctccctcctttgcctggatagccct

SEQ ID NO: 626864 - DNA, 507 bp, Homo sapiens
gcacgattatatcaagtatagtatggaaggctgaaaacctcaactttctctaagccagttggatttctctaagccagaatactctatccagtgctatcattgtatttaaatatcttcaactgggagaaatgggggagaaaggaaaatagaaargaaagaaatgaaatgtgtaatgcatacattctaccctctgtccccttatcacacacaatggtcctactgagtatatacacatatacacacacatatagtatacgcagatatacacagattctttcattctctatatatctttaattgagaacagagcactagttggagatgttcgaatttgttggaacttgttttttattattatttttagagacagagtctcgctctgttgcccaggctggagtgtagtggcacaatctccactcactgcaacctctgtctcccaggttcaagcaattctcctgcctcatcctcctgagtagctggggctacaggtatgcgccaccacaccca

SEQ ID NO: 626865 - DNA, 623 bp, Homo sapiens
catactttttcaagacttgggaggaagataatcctttatgactcctcatttaacttctttatatctagtgatttatcatctaatccctgagctttacttggggtcacaagagtcctcttttactctgtgtgtacagtgagggctgaagggtgaaagggagcctcatctacaagcccaggacatgttctgaaccgactggccacccggaggccttaagaccccttgggagagcaaggaaagaagattttttctctctgacatcccacattgaatccacctgcaaatcctgttggttctactttcaagatacattcaatcyacttttggcatctcctctgttatcaccttgtatatggtccaaactgccctcatctgtcacctatattactacaataacttctacctggtctccttgctcccacctttgtccccacttgttctgcataagacagcctaaggtagtgggagaggtcctccactccacgccaccacacccggcctccttgttttcttgattatcctgtttaaacttgcaatgaccccccactgccttcactatccacattccctactttatgtttctctatagcacttatcatggtcccatacactatatattttac

SEQ ID NO: 626866 - DNA, 601 bp, Homo sapiens
actgccactctgccttctcagctcttatctttactgctctgttcttgtcatcatattggtccttagagtaggccacgccaagtgcaatcagggtggaattagttgctacaggatatctgtagcaacttcacagaagttcctcagaaggagatttcatggcacaaattcccagtggctgaagtggaagagctcagcagtcaagggctttgtattaattaccctgccctggcttccttcccttaatgctcaggtggcctggttaaaatgaatcccatcctcattcttccatttaagcccaatgatagtcatagttctagcaaggagggtgcagtagggacgtccacaccctgaacctgccctggattaggacaatacactggctcctctctgctattcttagaattggaatcaaagtgtggaattgtccactctctttccatgtcaacacaagacctcaatctctgatccagcctgactttcagaagtccacagtagacacaggagtgatayggaactgacccttcagggcagggtttaaaactaagtgttatctcaaaaacagtgtccagggttaggtatggcaaccgaagagaagctccag

SEQ ID NO: 626867 - DNA, 517 bp, Homo sapiens
tgacctggaaattctacttttaagtatataccccagagaaattctccctcatatgcaaaagacgctatcttcaaagatagtcattgaagcattgttggttgtagtataaaaaaaaaaaaaaccaaaaagtagaaaaactaaaatatccattaggcaaagaaaggataaataaagtggtacgggacatattatacagtaattaaaagagataaggtagattatacctatctacctatctatataaaatgatgcagatctgctcatcataatattgacagaaaaagcaaatttcagtatgatgtttaatgtatgatataaattttataaactaaaaattcagtatgatgcygtatattttttatgaatagattcacatgcagttaaggttaaaaatatggatttgatacatacatatcactgtcacattcactgtcacgttcatgatagtgtcaacttctgtaaagaaaggaaggacattggaagaccaggagaactgagaagactttaattttagcag

SEQ ID NO: 626868 - DNA, 525 bp, Homo sapiens
aattaaatgaatcaagcttcccaaacactgatggcctgaggactagggtgccatgtgtttctgccagacacagatctgtttccacaaycaaattaggcttcaagtttataactcatatgtctaaccctccgtactttgtctcccgccccctacacacatacaaagtaaattgcatgttaatgaacaaagctcagactttctccatttctccacttgtcaaaatctctttcactttcgcaaccaacagtaaatcacacgttctgcttgaacaggcactcagacaaaacccctgccaaatggctatcataggaaaaaggtctttgtcagagcataggcattgtgcttttaaaagggaaagatagcccacatggaaataggaaggcttgctctggctatccttttaaaaatacaacgtgtcgggtgcaaactagaattcaaaactgaattcaagcaccagcttgcaagggagagctaagccaatgaaaagcttaggggattatgtaataataataagtaacatttagg

SEQ ID NO: 626869 - DNA, 540 bp, Homo sapiens
aaaaccacaatgagataccaccttacaacagtcagaatggctattattaatattaaaaagtcaaaaacaacagatgctggcaaggcttcagagaaaagaaaatgcttatacattgttggtgggaatgtaaattagttcagccactgtggaaagcagttttgagatttttcaaataacttaaaacagaactaccattcaacccagcaatcccattactaggtatatacccraaggaaaatacatcattctaccaaaaaggtacatgtactcatatgtttattgcagcactattcacaatagcaaagacatagaatcaacctaggtgcccatcaacagtggattggataaagaaaatgtggtacatatacactatggaatactacgcagccatgaaaaagaacaaaattatgtcatttgcagcaacatggatgcagctggaggccatcatcctaagtgaattaacacaggaataaaaaatcaaatactacattttctcacttataagtgggagttaaacattgaacacacatggacgtaaag

SEQ ID NO: 626870 - DNA, 533 bp, Homo sapiens
taaataatttcactgatgacaacacatgttttagtagcactgatatgttagtatgaggtgaatggtgagttttgtcacttggattccagtgagggaactgacccatgagacaaaagctcaaactctgatgggccctgactctttgaagaagtrtttttcagcatgtctctatctaacaaccaaccaaatatagatgattcagtaagcaatatcataaagactgaaatggtaagctacttagttggttgaacatttttgtatttcctccttgccttggctgccaggaagctcatggctaggtttaatgcctgacagcagtgaccatcttttcccaagttctgggttcttctctcatgtacttatttcagaccatactctgactctctgttattaagagctctaaaatctttgagactatctaaatctcaagtacctgattgtagcatttgattttgccagctcatcatcttcaacatggagataaagacagccatctgctaggtttttatcaggattaaatgaaatggtgaatg

SEQ ID NO: 626871 - DNA, 584 bp, Homo sapiens
ccgcccacctcggcctcccaaagtgttgggattacaagcatgagccactgcgcgcagctaatttttgtatttttagtagagatggggtctcagcatgttggtcaggctggtctcaaactcctgactctgtgatccgcccacctcggcctcccaaagtggtatcctaaaaatactgtgatatttttagatttttaaaaaattaagtgcttaggcmgggtgcagtggctaatgcctataagccactaaggctaagaaatatcccaatttcttaactccacagtatttttagatttttaaaaattaagaaatatcccaatttcttaactccacactatccttaaaataacatagaaagtttaaaaataaaggggtaggcaaagaaatatatcaagcaaatgcatactagcagaaatcaagataacatcaatatcagaaaacataaatttagaatcattaaatgggaaagaaatgttacatcattttggtaagatttagattgggtaatgaaaaaaagttgataaaatttatgcacaggataacttttaaatgtttaagtcaaaatatagcaaaaaaaagttttaata

SEQ ID NO: 626872 - DNA, 584 bp, Homo sapiens
ccgcccacctcggcctcccaaagtgttgggattacaagcatgagccactgcgcgcagctaatttttgtatttttagtagagatggggtctcagcatgttggtcaggctggtctcaaactcctgactctgtgatccgcccacctcggcctcccaaagtggtatcctaaaaatactgtgatatttttagatttttaaaaaattaagtgcttaggccrggtgcagtggctaatgcctataagccactaaggctaagaaatatcccaatttcttaactccacagtatttttagatttttaaaaattaagaaatatcccaatttcttaactccacactatccttaaaataacatagaaagtttaaaaataaaggggtaggcaaagaaatatatcaagcaaatgcatactagcagaaatcaagataacatcaatatcagaaaacataaatttagaatcattaaatgggaaagaaatgttacatcattttggtaagatttagattgggtaatgaaaaaaagttgataaaatttatgcacaggataacttttaaatgtttaagtcaaaatatagcaaaaaaaagttttaata

SEQ ID NO: 626873 - DNA, 584 bp, Homo sapiens
ccgcccacctcggcctcccaaagtgttgggattacaagcatgagccactgcgcgcagctaatttttgtatttttagtagagatggggtctcagcatgttggtcaggctggtctcaaactcctgactctgtgatccgcccacctcggcctcccaaagtggtatcctaaaaatactgtgatatttttagatttttaaaaaattaagtgcttaggccgggtgcagtggctaatgcctataagccactaaggctaagaaatatcccaatttcttaactccacagtatttttagatttttaaaaattaagaaatatcccaatttcttaactccacactatccttaaaataacatagaaagtttaaaaataaagggstaggcaaagaaatatatcaagcaaatgcatactagcagaaatcaagataacatcaatatcagaaaacataaatttagaatcattaaatgggaaagaaatgttacatcattttggtaagatttagattgggtaatgaaaaaaagttgataaaatttatgcacaggataacttttaaatgtttaagtcaaaatatagcaaaaaaaagttttaata

SEQ ID NO: 626874 - DNA, 545 bp, Homo sapiens
ttatggacctgtctagagccttttgttttgccaggtcctgtagcaggtgggatgcctctgtagttggtgacaccaagggtgtcctcacactgtcatgtcacacttacctcccatgctcagttaggtggttcagtacgtccccaatgaagagcactccattgcatggctttccttctgaatactccacgctgccctatgctctgctgctctgcactctctcttttctccttcaattggggtgacaactttcgctattccatccacacccagccctttgccttagaataggagcctgtctacttcagtctggtcttgccatcacatctcccgactgcctctctctctctctgtctctctctctctctctctctctctctctmtatatatatatatatatatatatatatatatataattatacatatacccacacacatatacatatatatgtatacctacacacacacacatacataaatttctttaattcgctttaggcattccatgtgatattagacacgtgtctcccagaaagattgagtgca

SEQ ID NO: 626875 - DNA, 557 bp, Homo sapiens
ttaagccatcctagtgagccctttcatgggagtttggattattggtctataaaaattaaagctgtgtttccttggaaagttaaaatagaaagatgtgaagcttcaaaattattcccagtatttctcagtagtgcttagtaagagataagaatgaaccaattacttaaaaagaaaccaaagagagaacagatacagagccccagaggtatttcagtcctggacgtggttgttcccaaggcccagttcctatattctgtattcctttttacctaaggcacttaacactgaaattacatcatttgcaaacaaaagtgccctaactcatatagcatcaaatatataccctttgacactctggagacatattgttaactcacaaagggaaactaacacaatccatttctgtttttaagaaaaatacatgtatgtatatgttaagaaaaatatggaagaatctagaccaaaggtccaagagtaamtatttctagacaatggatttttggaggacggcctctctgaattttctaaatttttcccagctagcatgtattacttgt

SEQ ID NO: 626876 - DNA, 354 bp, Homo sapiens
attctgactcttctgggtcaatcttgctttcaacttctttttagtgtcagcttcctcagtatggcaaatggacactatgacctttttgtttactcttattgttttttgtctctagtatctgcaaaatatgaaaaggaaggcctttgaaaccaacatgtctaatcaccttccctaccttaactcatggaaggtgtgagcctgaacaacgctaagcctagagaataaaagcaacttattttcagctctttttttttttttttttttttccaagcaggagtctcgcactgtygcccaggctggagtgcagtggtgcaatttcggctcactgcaacctccacctcctaggttcaaagg

SEQ ID NO: 626877 - DNA, 438 bp, Homo sapiens
gagttgcttattggagctcggagagagctagagttctggatgaggggacttgcctcctgggtctgagcctgagtggtgcagttcttacaagtcagcccgcatggtacagaacacagcataggagagtaaagaatggatgtggtggggtagggaggaaacagaggataaayaggacagtgataaatagaaatccacagtttaaaacttagtatctaataaacattagattcatttaaaagctcctcaacctcacaaataagtactaaattgtaatttttagaacgattttctcacattaggttggcaacattgaaaaaacaggcataatatttagtgttgctgaggatgagtagaaatgagaactcttatacattattgatagctttctggagaataatttgccattagttatttctgtttaaaatactatttaaacca

SEQ ID NO: 626878 - DNA, 438 bp, Homo sapiens
gagttgcttattggagctcggagagagctagagttctggatgaggggacttgcctcctgggtctgagcctgagtggtgcagttcttacaagtcagcccgcatggtacagaacacagcataggagagtaaagaatggatgtggtggggtagggaggaaacagaggataaataggacagtgataaatagaaatccacagtttaaaacttagtatctaataaacattagattcatttaaaagctcctcaacctcacaaataagtactaaattgtaatttttagaamgattttctcacattaggttggcaacattgaaaaaacaggcataatatttagtgttgctgaggatgagtagaaatgagaactcttatacattattgatagctttctggagaataatttgccattagttatttctgtttaaaatactatttaaacca

SEQ ID NO: 626879 - DNA, 556 bp, Homo sapiens
attatgcatttgttatgggtctagatacactttaacatgtctttttcctgtttcatttttttttttttacaatttctttttatgtaagtctagaattcacagcactgtaaacttctggaggtcaagtttatacttattttgatttcttctcttgtttgcagcacaatataaggacacagtggcctcccaatgaatggttgctgaagtcaaattggatcaaaaggttcactaaarcactaaaactgtccaagagaatacaaaatacaaacccagcggccacattactaaacatcttctgaataccgtgacaagcctttagttcttctgagatttttctagggtgaaaagagggaactgatgttaatttaataattcatctatatataggattatactttaggttttcaagtcacaaatccttatgagtctcatgcactattttggttaggtaagccaaaggtattgataatcaaatttggaagatgaagaatgagcagacttgctgagggccacatggaaaaagatgagatcatctattgaaaaatataggatcaaa

SEQ ID NO: 626880 - DNA, 556 bp, Homo sapiens
attatgcatttgttatgggtctagatacactttaacatgtctttttcctgtttcatttttttttttttacaatttctttttatgtaagtctagaattcacagcactgtaaacttctggaggtcaagtttatacttattttgatttcttctcttgtttgcagcacaatataaggacacagtggcctcccaatgaatggttgctgaagtcaaattggatcaaaaggttcactaaaacactaaaactgtccaagagaatacaaaatacaaacccarcggccacattactaaacatcttctgaataccgtgacaagcctttagttcttctgagatttttctagggtgaaaagagggaactgatgttaatttaataattcatctatatataggattatactttaggttttcaagtcacaaatccttatgagtctcatgcactattttggttaggtaagccaaaggtattgataatcaaatttggaagatgaagaatgagcagacttgctgagggccacatggaaaaagatgagatcatctattgaaaaatataggatcaaa

SEQ ID NO: 626881 - DNA, 506 bp, Homo sapiens
ctaccttaccctgaggcactgtcttcttctgtctgaattactgcaatagcctcctaactcataagaaggcagagccctgcttctgcctgtccctcttacagtttattttcaacagatcagctgaagcaatcatttaaaagcataagtcagatgatgtccattctctgcaggatgccctgcagcatgccctttttactcagaataaaagcattgtctttacaatgggccatgtaattccccacccmattccctgagctcatcccctattactcttcccctttgcccactcccctcacaacattgactggcttccttgatgtttcttctgcatgccaaaggtatttccactctggagttttcacagtcactatttcctctgcctgaaatgttttccacaaatattcatatggccgacaactttacctcctttaggtttttgttcagttgtctttttaatgaggcctactctgggaatgctattaatgttaaaaatttctacccatatt

SEQ ID NO: 626882 - DNA, 506 bp, Homo sapiens
ctaccttaccctgaggcactgtcttcttctgtctgaattactgcaatagcctcctaactcataagaaggcagagccctgcttctgcctgtccctcttacagtttattttcaacagatcagctgaagcaatcatttaaaagcataagtcagatgatgtccattctctgcaggatgccctgcagcatgccctttttactcagaataaaagcattgtctttacaatgggccatgtaattccccacccaattccctgagctcatcccctattactcttcccctttgcccactcccctcacaacattgactggcytccttgatgtttcttctgcatgccaaaggtatttccactctggagttttcacagtcactatttcctctgcctgaaatgttttccacaaatattcatatggccgacaactttacctcctttaggtttttgttcagttgtctttttaatgaggcctactctgggaatgctattaatgttaaaaatttctacccatatt

SEQ ID NO: 626883 - DNA, 506 bp, Homo sapiens
ctaccttaccctgaggcactgtcttcttctgtctgaattactgcaatagcctcctaactcataagaaggcagagccctgcttctgcctgtccctcttacagtttattttcaacagatcagctgaagcaatcatttaaaagcataagtcagatgatgtccattctctgcaggatgccctgcagcatgccctttttactcagaataaaagcattgtctttacaatgggccatgtaattccccacccaattccctgagctcatcccctattactcttcccctttgcccactcccctcacaacattgactggcttccttgatgtttcttctgcatgccaaaggtatttccactctggagttttcacagtcactatttcctctgcctgaaatgttttccacaaatattcatatggcygacaactttacctcctttaggtttttgttcagttgtctttttaatgaggcctactctgggaatgctattaatgttaaaaatttctacccatatt

SEQ ID NO: 626884 - DNA, 535 bp, Homo sapiens
tggttgggaagaagcaaacaggagtgcaaagaggcaaggatggctcctagattctgacttggctaatgggggtggatggcaatgtctttcaataagataaggagtggaagaaagaagaataataggtttggggccaatgagagtagtggattacctttgagcatgttctaagatatctgtgggacacccaaatggagatgtccagtggaaaaatggagaaatgagcctgaaactcagcagaggtctgaggatcttaaggtagcaatgtccgttaggcaaaagcaggtgggatccaaagcatggcatggacctgttagcaagtatcacaagccatgagttcctttggtgtctccttaagggaaattacagagtgaaaggatctgacagccaaagattgaaacttgcacaactcttgtgtctaaggatcagaaaagaagagaagagcccacaaarcaaagagcaaccaaagatgtacacaaataaaaattggagagaaaagtgaacagaatagagaacttcaagaaggaagtggtca

SEQ ID NO: 626885 - DNA, 504 bp, Homo sapiens
ttaaacattaaatttattaaaaattcatctatttctctttacttttttaaatgtgcttacaataaatatataattaaaatgtggcttagcattgtatttctgatggacatataaccaatgaaggaaaagagaaagctaaaaactacacgttcagcatttaagggccagtcttattgaccaggactcagtcacacagacccaaattaaaaccagtggagactgggaaatgaaatatttctaygggtccatgaaaaagaaaatgaaatgggatttagtggacacatagcattacttctgccatcacacatatgatgaatgaaggctcatgcatgacatcttcccacagtcacataattctaaatagctgagctgttacatggccacttcctggtggaagaaggtctagggtgcaagtaacagtgacattattgtaaaaataaccttgaatctacactaatttttttaaaagaacctttacaaactttggctattaacacactataa

SEQ ID NO: 626886 - DNA, 504 bp, Homo sapiens
ttaaacattaaatttattaaaaattcatctatttctctttacttttttaaatgtgcttacaataaatatataattaaaatgtggcttagcattgtatttctgatggacatataaccaatgaaggaaaagagaaagctaaaaactacacgttcagcatttaagggccagtcttattgaccaggactcagtcacacagacccaaattaaaaccagtggagactgggaaatgaaatatttctatgggtccatgaaaaagaaaatgaaatgggatttagtggacrcatagcattacttctgccatcacacatatgatgaatgaaggctcatgcatgacatcttcccacagtcacataattctaaatagctgagctgttacatggccacttcctggtggaagaaggtctagggtgcaagtaacagtgacattattgtaaaaataaccttgaatctacactaatttttttaaaagaacctttacaaactttggctattaacacactataa

SEQ ID NO: 626887 - DNA, 598 bp, Homo sapiens
gcgaggaatcagtggccttgagggcaccgagrcattgtcatccagaatcccgaaacctctcaccttaggttattaaaataagttatcttattgccacccctctgattaccctgccagaaagattctctgaattggatatagaaagctcttctcccgtccccaatgcccccatgcaagtcgggacttaccagatgcccaggatccctatcagggctggaagtttgagattcaattcagagcaaggttcatcttctcattgcaataataataataacaacaacttcaagccttatttgacagcttgttggcctttttctttttttaatttacagatgagaaatttgctcccacaaattccaagactctagtctcaaccctaccagacaagccccgttcctccccactcacccctcactcaaattacagatgaagagggaggtgtgcaggatgtgtgcggtgacaggtgatgcgaatgggggggattccctgtccctactgccctcacccactcttcctgtgttctgagctcccccctaaccccaacgctagaccttctattcccccgggggccaagccagctgggctcgcaaggcccgac

SEQ ID NO: 626888 - DNA, 612 bp, Homo sapiens
ttaagaactgagaaaatcggagctcagagaatctaagtgaagttctcagaatcacacagctagcacacggccaagcaggattcacctgcagtccagcccagcgttctttccagtctaccagcaaggggacaaaggatcagttctttgctaccaagctgtcatatctgtccaagaataagggccaaggcttctgttcccagcagatctmgttctggggctgtgcatgctgagcctgtctcaagggtgagtggaggatttgccaatgaaaatgttaccagctgaactagcattggccagccatattggggccaagaaggaggagaactaaaattaatcctctcattaccagtctgacctgcagaaggatgagcagcaccaagccaggaagaagaactccagcaacatctgctgctgcttgctcgactttcatttcctctgcccctcctgggaatgccatgcgggtaccaggatgctgagatgtggtgcatgtgcgcacccccactcacacagaagcacatatgctggagacagaattaggagcccgctgagatagcgctttgaaaagaagagaagttggtggaatatgtgggttttctcccttgtgccaagtcc

SEQ ID NO: 626889 - DNA, 560 bp, Homo sapiens
tgaatgcaacaggaccgctaagaagtaaagacagtcttcagctatgcaagaagagcagctagaaatagacaaactgaagaagagtttatggaaggaggagctgttttgtccagagagcagcctggtagttttccgttttcaaatgcttggctttcagggctctgatgtttccctgcacagttgtgtccaatcatgacagagacaagggaaacagccaaggctacaatatcaggtaatgaggggactttcctgacggtgagggctgtgaaacatggctttcaccacttctgggggtcttcaggattaggagaggcagtcctctatccagggaaaacaatacagagctatcctggatgaattctgagtagcatttctaactctagaaaactctgcacatctaggagcatataccagggcagaatttagcaccggagtagggctgggatgkggacagagtagtgctagcaggaaactgctcagctcctcaacccagcctggttctcctctggcttcagatgagtggctggtatatttccccatagtcctggcagatatatttc

SEQ ID NO: 626890 - DNA, 462 bp, Homo sapiens
aatgaattttctcaagctcccattttccctctctctctccctctttctccctccctcccacctcctcattttctcagaccacacacacacacacacacacacacacacacacacacacaccccttgtcagcacagcagacttttccctccagggtgcctcagctgatggaaatttctatctgcaatgaaaatcaacttcggaaaacgtcacagcaagggactttttttcctggctgccccaagattgatctggtccataggatgccccagatcattgcattcggtaatttcattctgcttatgatctatttcttatacgatcaatatgataaatgcgctggagagcaaagtgggttasggcccgacgccggtgaagtgaggaggagaaaggagcactgggctgccgcgctgtgtgtttcatgaagcagaaaagcaattcagtcagactaaaggctacagaca

SEQ ID NO: 626891 - DNA, 602 bp, Homo sapiens
atttgttaaagcccctaatatcatcctcaaggatgagttaactctaagaataatggcagctctattgttgtaaaaagtaacttcccaaccatgtgtattatttttcatagatatgaatgtacaatcggttgtgtgcacacacacacctgtgtgtgtgttctctttgattagtgagaaactgtcagaaggccaagaatagggacataaatgtaacatatttgagatctttattttttattaacccatttattcctcacatcactgcaaattagtcaactaagatccagagaggttaggaaagaacccagataccttgtctcctggcccactgttctctgccctatgaggtacctcatacataacaatccagcctttatttctgctggagggtcagcagagagagaaaaggaaggaggaaatctccaataccactctttgcatgtgttggagttacacagyactcctcagtttggccaggatgcctgagttctatttgccatctgctaattatgcgcatgctggcaccgagcctgtgtgtatgtgtgacagaggagtgagagggaacaagttatcctgattctgtttatattggataaaagctt

SEQ ID NO: 626892 - DNA, 680 bp, Homo sapiens
tcaggtccaaaactggaaccaaggatttaataactattatgagcaaatatatggaaattacaatagtgcctatggcagggatcaaaactgtgactacctattttaatgtgttggcctgaaaaccaaaatataccaggatgccatgcttcttgctttccagaggaggaaaataaggctgtctgatttcccaaagccacatcaccagttagtgacagaacaatgactgtcacagagaaactgtcctgtaagtagcagtttttcttgtgccagacactgtggtttacaagcctctcatttaattctcataacaactctatgatgttcacattcttttcccattttaccattgaggagactgacattagatagaggttaagcaactttgctgaaaccacagtggaatgagccctggagccaggaatcaaacccactctgaaatctgtgctcttagcaayagcaatggaacccggcagtcttcttagtatgtatctacctgcttctaatgtacatgaaaactttgtcaatgacaacttgctatacacttgaccacattcattattaatattaactgttaaatgtaattatgacattaagagaagttagcattcgttggactttaaagctcatcaaaagcacagaggtgattcataggtcctgggatgaggtacatatagaaactg

SEQ ID NO: 626893 - DNA, 680 bp, Homo sapiens
tcaggtccaaaactggaaccaaggatttaataactattatgagcaaatatatggaaattacaatagtgcctatggcagggatcaaaactgtgactacctattttaatgtgttggcctgaaaaccaaaatataccaggatgccatgcttcttgctttccagaggaggaaaataaggctgtctgatttcccaaagccacatcaccagttagtgacagaacaatgactgtcacagagaaactgtcctgtaagtagcagtttttcttgtgccagacactgtggtttacaagcctctcatttaattctcataacaactctatgatgttcacattcttttcccattttaccattgaggagactgacattagatagaggttaagcaactttgctgaaaccacagtggaatgagccctggagccaggaatcaaacccactctgaaatctgtgctcttagcaacagcaatggaacccggcagtcttcttagtatgtatctacctgcttctaatgtacatgaaaactttgtcaatgacaacttgctatacacwtgaccacattcattattaatattaactgttaaatgtaattatgacattaagagaagttagcattcgttggactttaaagctcatcaaaagcacagaggtgattcataggtcctgggatgaggtacatatagaaactg

SEQ ID NO: 626894 - DNA, 563 bp, Homo sapiens
tctcacctggcctgaaggaggccctgagggggtacttcctggaggaggtgaggcctaagccaaaatgcaggagtggaaatgtgrgttctttggaaaacgtacagtgtaatataaatataaagctgttcttgttatgcctgagctcagatttcttagaaacttggtctctcagacctaagcatttggagaggatgagacttttgacacagagttattgagcgctcaacatcactctcagcaggtctcagcatctggcgtcctcaaattcacttcagaagaggcctttatcactcgcttctacctctgttcacctaaggaccctatgcttttgtggtctattaacatatatgtggcatgtgaatgtgtatgtgtgtggcatgtgtggtgtgtgtacatatgtggtgtgtgtatgagtctgttgtgtgtatgtgtatgatgtgtatgtgttgtgtgtgtatgagtctgttgtatgtatatgatgtgtgttggatgtgtgatatgtatgtgtgtggtgtgtgtaaatctgttgtgtgcatgagtgtggtgtgtatgtgttgtatgta

SEQ ID NO: 626895 - DNA, 563 bp, Homo sapiens
tctcacctggcctgaaggaggccctgagggggtacttcctggaggaggtgaggcctaagccaaaatgcaggagtggaaatgtgggttctttggaaaacgtacagtgtaatataaatataaagctgttcttgttatgcctgagctcagatttcttagaaacttggtctctcagacctaagcatttggagaggatgagacttttgacacagagttattgagcgctcaacatcactctcagcaggtctcagcatctggcgtcctcaaattcacttcagaagaggmctttatcactcgcttctacctctgttcacctaaggaccctatgcttttgtggtctattaacatatatgtggcatgtgaatgtgtatgtgtgtggcatgtgtggtgtgtgtacatatgtggtgtgtgtatgagtctgttgtgtgtatgtgtatgatgtgtatgtgttgtgtgtgtatgagtctgttgtatgtatatgatgtgtgttggatgtgtgatatgtatgtgtgtggtgtgtgtaaatctgttgtgtgcatgagtgtggtgtgtatgtgttgtatgta

SEQ ID NO: 626896 - DNA, 610 bp, Homo sapiens
ctctgtgtgtctccttttgtttggttttccaagaaagcctgaatcagcagatttcaagagaaagccaaaacatctgacaggcttagagaaatgatgagtgccacgcaaaaaatattaattgaaaaaaaaagacccacttttcacttatatagcagtttttacccagtctctaaataagttgtagatattaattaaatgttgccatgcatcacttgtcactttcattttattaacccaagtggaaaaatcaagtttgattactgttagaggtggggaaactgaggcaatgtggaaggactgataaaatagtcaacgaagaagtgaagggagctgtcacctttatttgaaccactccaatctcattcatctcatgagaactgccatggaaatgccaaacggaatacagttcactctaatccaggcaccctcactctcatcagttgctattttcttcttacccagagctgattgagctgtctccttatgggtcagcttaatggccattactggagtaktagttttctatggcagtgtaacaaatgactacaaacttacaagcttacaacaacacacatttattgcttcacagtttctgtgggtcaaaagtccg

SEQ ID NO: 626897 - DNA, 433 bp, Homo sapiens
aggattaatacactcaactagcagccagaaaatgtacaaaaatagccaccttcacatcccgttttttagtttcgggaaaaaggaggaataaacaagagaaattcagttcaattcaatgaagatttattgaatgcctactttttgctcacatcatccaaaagctagataaataaaggacacttacagactggagcagtgtttttcaaagtgtgttcctcagctggatcagmgttacctgcagactgtgtgacaaaaggcaagcatctgggggctatcgatctcagacctattgagtcaaactctctaagtgcatactccagtaatctacattgtaacaagaaccagggggatctcattcacactgaagtttgagaaacaggggtggagcatcacttgggacactttaataatatgacccagctgaggccctgtt

SEQ ID NO: 626898 - DNA, 428 bp, Homo sapiens
tcaactagcagccagaaaatgtacaaaaatagccaccttcacatcccgttttttagtttcgggaaaaaggaggaataaacaagagaaattcagttcaattcaatgaagatttattgaatgcctactttttgctcacatcatccaaaagctagataaataaaggacacttacagactggagcagtgtttttcaaagtgtgttcctcagctggatcagagttacctgcagactgtgtgacaaaaggcaagcatctgggkgctatcgatctcagacctattgagtcaaactctctaagtgcatactccagtaatctacattgtaacaagaaccagggggatctcattcacactgaagtttgagaaacaggggtggagcatcacttgggacactttaataatatgacccagctgaggccctgttaggatgaa

SEQ ID NO: 626899 - DNA, 260 bp, Homo sapiens
ccactggggtccctgctgtagacgagaagccagagccaggtgccagagagggagaggggggggtctttgggggtgggggacggtgctgggccccactcctgcttatcyacccctcagtttcttttacctgggaaacagatcaccaagagaggcccgtctgatgctttaagctgggaatttggtttattctggggcagatgaaaaagaaattgcactgtagcatcttacaaaactgcccccttttcaactgggactgagag

SEQ ID NO: 626900 - DNA, 609 bp, Homo sapiens
agagttggaattgactcttggcagttccatagatagttttgagttatgaaaaataatacatatgtgtctgccaacctaagagattgtccccaatctgaaaaaagtagccttgcacatggacccatctttccttccaataaactgataaaaaccaatgcacctcttacaacttcagagcctgctatgttggcctttaaagccacctgcacaattcctctggatgtgacctcaagttgcttctattcaaagagatgtgtgtagcaaaagaacaggagatgttagaatgaaarggaagagctggcatgtagagaacttcagttgcattcttcaaggagaggcattcgcgtttcagctcttggaaagattgcagtttgtggaaggtttggtccagcttggaagagctgcagtgttagaaaacaaggcatttccaggcactgtctacttcctgggggagtggagtgggtctttgtaaagataatcatgtttatattgagaagctgatgaaaacattttgcaaatatccaaaccaagtatgtgacctggaaaatggaggtatccactctatgtgcagccttttgcagggcagaggcttggtaaggaagaagacag

SEQ ID NO: 626901 - DNA, 609 bp, Homo sapiens
agagttggaattgactcttggcagttccatagatagttttgagttatgaaaaataatacatatgtgtctgccaacctaagagattgtccccaatctgaaaaaagtagccttgcacatggacccatctttccttccaataaactgataaaaaccaatgcacctcttacaacttcagagcctgctatgttggcctttaaagccacctgcacaattcctctggatgtgacctcaagttgcttctattcaaagagatgtgtgtagcaaaagaacaggagatgttagaatgaaagggaagagctggcatgtagagaacttcagttgcattcttcaaggagaggcattcgcgtttcagctcttggaaagattgcagtttgkggaaggtttggtccagcttggaagagctgcagtgttagaaaacaaggcatttccaggcactgtctacttcctgggggagtggagtgggtctttgtaaagataatcatgtttatattgagaagctgatgaaaacattttgcaaatatccaaaccaagtatgtgacctggaaaatggaggtatccactctatgtgcagccttttgcagggcagaggcttggtaaggaagaagacag

SEQ ID NO: 626902 - DNA, 492 bp, Homo sapiens
ggtctctattccttctctctttctgtgggtaaatttgttatttttatgatttatctttcaatastgtattcttccacacattactctaagcaaattcagagatatatttgtatccttctgactcttcgaggctcagttccagtgttgctcctctgaggcatcaccaccatgaatggagtactcatcaaactgattacagccagaggtgtaccctgcctgacaatatactggaatggacacactaattgttcatagtcaccctccattctgattgttcactcctctgttgtaattattggtgcctgagtcttacccgattacaattcattgcattcatgcctgcctcctttggtagcaaaaattactaggatttcctagaaagccgaaaccagaccaacccttacacagctttacattccacgcagccacagcctcaatgaaaatttgctaaattaaatgcataaatcagtgtctctcagccctggataagca

SEQ ID NO: 626903 - DNA, 492 bp, Homo sapiens
ggtctctattccttctctctttctgtgggtaaatttgttatttttatgatttatctttcaatagtgtattcttccacacattactctaagcaaattcagagatatatttgtatccttctgactcttcgaggctcagttccagtgttgctcctctgaggcatcaccaccatgaatggagtactcatcaaactgattacagccagaggtgtaccctgcctgacaatatactggaatggacacactaattgttcatagtyaccctccattctgattgttcactcctctgttgtaattattggtgcctgagtcttacccgattacaattcattgcattcatgcctgcctcctttggtagcaaaaattactaggatttcctagaaagccgaaaccagaccaacccttacacagctttacattccacgcagccacagcctcaatgaaaatttgctaaattaaatgcataaatcagtgtctctcagccctggataagca

SEQ ID NO: 626904 - DNA, 492 bp, Homo sapiens
ggtctctattccttctctctttctgtgggtaaatttgttatttttatgatttatctttcaatagtgtattcttccacacattactctaagcaaattcagagatatatttgtatccttctgactcttcgaggctcagttccagtgttgctcctctgaggcatcaccaccatgaatggagtactcatcaaactgattacagccagaggtgtaccctgcctgacaatatactggaatggacacactaattgttcatagtcaccctccattctgattgttcactcctctgttgtarttattggtgcctgagtcttacccgattacaattcattgcattcatgcctgcctcctttggtagcaaaaattactaggatttcctagaaagccgaaaccagaccaacccttacacagctttacattccacgcagccacagcctcaatgaaaatttgctaaattaaatgcataaatcagtgtctctcagccctggataagca

SEQ ID NO: 626905 - DNA, 601 bp, Homo sapiens
ggcgttttgctctcccggctccccgtggatttccacaaagaccgactggcatgttctctttaaggggtgggggtgacacgggttgcacccaattatcccattattctgaaaggcaggcgtggccacatatgtggtgttgtacagggcagaggtgacagaagctagcagagatttgcatgtattggcaacttctttcctacaggccaattcccattattaaacacacacccactataaaatagaggagaattgagctcattagtatgatcgtttaaaaaaatcatgaaaacaattacaacaacatgctctcctttgtaagagaaaacgatgctcctgaccctcrgcagaactaaagctctgcgatgctttgcctgattcgtgatgagtctgggggcattctcctgtggcaggggctccaggtctttggccggggaaatgctaagaagcaggctgaggcctgttgcttcccacttactggctttcaaactcccacattgatgggcccccacactttcatcactttctcctcatcagaaaagggcaaaattcgagaaaatgggtgccagatcagcctgcatttacattctggccataccacaca

SEQ ID NO: 626906 - DNA, 581 bp, Homo sapiens
agatctgaggttatagaatctgtagggttattgccatgctttctttaaaaatatgtgccaaagcagtaattatggactgtatatagttccattaaaggaagaaatttagtaaatttgctcttcataaatatttgcgtaataaatgaatgaatacccagatcaaagggagaaggttaacgagcagatgtaaagactagaggttcaggtataccgctgttgcctcagaggatgtcaaatctaaatacgaaccatgaacccaaggttttggtttttttttaaattctcagagcatgttatrgtaattagatgtttagctaataagatccatatttgttctagcctattaggactaaatataacaacaatctttccattttgatgatactattacttcttccaacacgcttacatatatctattttaattcccccagttgtctggagagtgaagatagaaattcccatcttacagatggacaaactgtggcctagagaagttagaggtacttcatccacggtacctcccagtagatcaagttagcgctctttccattgctatgctgaccacaggctcttccatag

SEQ ID NO: 626907 - DNA, 557 bp, Homo sapiens
tattgccatgctttctttaaaaatatgtgccaaagcagtaattatggactgtatatagttccattaaaggaagaaatttagtaaatttgctcttcataaatatttgcgtaataaatgaatgaatacccagatcaaagggagaaggttaacgagcagatgtaaagactagaggttcaggtataccgctgttgcctcagaggatgtcaaatctaaatacgaaccatgaacccaaggttttggtttttttttaaattctcagagcatgttatagtaattagatgtttagctaataagatccatatttgttctagcctattaggactaaatataacaacaatctttccattttgatgatactattacttcttccaacacgcttacatatatctattttaattcccccagttgtctggagagtgaagayagaaattcccatcttacagatggacaaactgtggcctagagaagttagaggtacttcatccacggtacctcccagtagatcaagttagcgctctttccattgctatgctgaccacaggctcttccatagtctc

SEQ ID NO: 626908 - DNA, 557 bp, Homo sapiens
tattgccatgctttctttaaaaatatgtgccaaagcagtaattatggactgtatatagttccattaaaggaagaaatttagtaaatttgctcttcataaatatttgcgtaataaatgaatgaatacccagatcaaagggagaaggttaacgagcagatgtaaagactagaggttcaggtataccgctgttgcctcagaggatgtcaaatctaaatacgaaccatgaacccaaggttttggtttttttttaaattctcagagcatgttatagtaattagatgtttagctaataagatccatatttgttctagcctattaggactaaatataacaacaatctttccattttgatgatactattacttcttccaacacgcttacatatatctattttaattcccccagttgtctggagagtgaagatagaaattcccatcttacagatggacaaactgtggcctagagaagttagaggtacttcatccackgtacctcccagtagatcaagttagcgctctttccattgctatgctgaccacaggctcttccatagtctc

SEQ ID NO: 626909 - DNA, 588 bp, Homo sapiens
gggtgagtggaagagtctgtttcattttatgcttccttgctcttcattctaagatttatttctggaccacaggagtggagggtggcatatgagaaaattatttcaattgtatcataatcttcccaaggtgtgattaaattgaggcatagggaagagaggtgacctcttccagagtcagacaccacttgatttagaaccagagggccctaattttcagcttggagctttatcaattagatatctccaatcctaccacggctggtcttaggtgtagctggccaaactccatgaacaaatggaggaagtgttccaaaatcttctagcatcttcttcaaatcatcttttttaataaattgtggtttagattcagtctacccagagataaaacgatcractagtctgtctgcatggggagacaagatctacttataaaaataaataaataataatacagggtaaatatgataatttattggtgtgttaccaacaatgaatgctaaagaagtttcaaggaaagaacaggtatggatcaggcaacacagcttagacagattctttgtggtcccacaggacaaaactagcagtagc

SEQ ID NO: 626910 - DNA, 588 bp, Homo sapiens
gggtgagtggaagagtctgtttcattttatgcttccttgctcttcattctaagatttatttctggaccacaggagtggagggtggcatatgagaaaattatttcaattgtatcataatcttcccaaggtgtgattaaattgaggcatagggaagagaggtgacctcttccagagtcagacaccacttgatttagaaccagagggccctaattttcagcttggagctttatcaattagatatctccaatcctaccacggctggtcttaggtgtagctggccaaactccatgaacaaatggaggaagtgttccaaaatcttctagcatcttcttcaaatcatcttttttaataaattgtggtttagattcagtctacccagagataaaacgatcaactagtctgtctgcatggggagacaagatctacttataaaaataaataaataataayacagggtaaatatgataatttattggtgtgttaccaacaatgaatgctaaagaagtttcaaggaaagaacaggtatggatcaggcaacacagcttagacagattctttgtggtcccacaggacaaaactagcagtagc

SEQ ID NO: 626911 - DNA, 560 bp, Homo sapiens
gaaactccttgtgtccctctgattgccagatcagtctagctggccctgacccaggcatgggagggaggaacacagaactaggtagaacacggcagccagatatctgatactcaacagcatctcattgttgcgtggcttccacacaggaacgtcatctcattcaatctgcccaacaggctggaagaaagacaagcctwctttatccccaatctgcagacagatataccaaggctctgagaggtttagagcacagatttggttttggtctcctgaatcttgccataaacatttttgaggacctgctatgtgctaaggatagcattcatgctctggggcacagaaacaaatgcaacacagatcatgccacagaaaccagtgctgttttcctatgtcacataattcatagattaattattctcagagagggcccactgggccttgtactataatagacttttacacgtccccatctctccactgctattttaaaaagatcaagttcatttctaccttgtagagacaggaaggaattactgcaagtggcatgagggaatcacatc

SEQ ID NO: 626912 - DNA, 588 bp, Homo sapiens
gggtgagtggaagagtctgtttcattttatgcttccttgctcttcattctaagatttatttctggaccacaggagtggagggtggcatatgagaaaattatttcaattgtatcataatcttcccaaggtgtgattaaattgaggcatagggaagagaggtgacctcttccagagtcagacaccacttgatttagaaccagagggccctaattttcagcttggagctttatcaattagatatctccaatcctaccacggctggtcttaggtgtagctggccaaactccatgaacaaatggaggaagtgttccaaaatcttctagcatcttcttcaaatcatcttttttaataaattgtggtttagattcagtctacccagagataaaacgatcaactagtctgtctgcatggggagacaagatctacttataaaaataaataaataataatacagggtaaatatgataatttattggtgtgttaccaacaatgaatgctaaagaagtttsaaggaaagaacaggtatggatcaggcaacacagcttagacagattctttgtggtcccacaggacaaaactagcagtagc

SEQ ID NO: 626913 - DNA, 395 bp, Homo sapiens
aagaccaagagagctaaccaaagtgaaaccccatgtacctagatcttagcaagcataactatagccaccggttatctgggcatgctagcagcctcagaatttttaagctgtccttgcccccacttttgtttcattttgatatatgtcttctaatcattttgtwtgtctcttctcaccttcaggccattgaactccaaatggtcaagcaaccggagcctcgaacaatggccctccttttaccagggatccttagataggcctctgagagagatctgactgctgttttcacaatacagcaccaccagtcagcagaaagcatttaagatcagttgttatcgtccttatccttatccttgtccttgtccttgtccttatcctaatggcagttagatgta

SEQ ID NO: 626914 - DNA, 395 bp, Homo sapiens
aagaccaagagagctaaccaaagtgaaaccccatgtacctagatcttagcaagcataactatagccaccggttatctgggcatgctagcagcctcagaatttttaagctgtccttgcccccacttttgtttcattttgatatatgtcttctaatcattttgtttgtctcttctcamcttcaggccattgaactccaaatggtcaagcaaccggagcctcgaacaatggccctccttttaccagggatccttagataggcctctgagagagatctgactgctgttttcacaatacagcaccaccagtcagcagaaagcatttaagatcagttgttatcgtccttatccttatccttgtccttgtccttgtccttatcctaatggcagttagatgta

SEQ ID NO: 626915 - DNA, 608 bp, Homo sapiens
atatagcgcagcactgcccaatgcaattataatgcaagctatatatataattttacatttttttgtaggcacaacttagaaaaataagcaagtaaaataaattcaataatatattttgtttaaccaaatatgtccatatagtataatttcaacatgcaataagtattttaaacatattaagtatataagtatatattttacactctttttttatgctaagattttgaaatctggtgagtattttttacatttatagtttatatcaatttggatcaaccatatttcaagtgtttattagccacatacaactagtatctactgtattagacaacaaagtctggaaatttttttgaagactgttccayacatggccatggaaatgctgaactgttgctaccatttggaaaagaataaaggtatatttttaggcctcaagatatgagggttcttataaggctgatatagaagtagactaaaacagagtttatcaactctgtttatcaacttcagcactattgacatttttggctgaataattatttgctgtggtggggctgtcttgatcattatagaatatttagcaacaactctggccttttcccaataga

SEQ ID NO: 626916 - DNA, 476 bp, Homo sapiens
ggtcactcacattggcttaaaataaagctcttaaaatatgttacaaagtttagctttttcatcaacaacatttataagtaaagtaactgaggaacagaaaggtttagtaacttgctcaatgtcaaaatatagtggcaaaccagaagtttgaaatcaggcarcttgtctctattatctgtcctctaaaccactatgtgaacttgcctaactagtaagaggcagaaatggggaaggaaaactagtctgtctgattccagaaactgccattttccactacacaaaggtgactccaaaggcaccgtgcttgtacaatttgggaaatcattctcttttgattgattgtaggtagagtctacatggaaaattggtaacataattgttaggtgacctttaggaaaaaatacgcatttttcaggtatttgaaggtgatttttcatgagaaattatgggatttctacaaaagtgactgggaatca

SEQ ID NO: 626917 - DNA, 505 bp, Homo sapiens
aggtgtatgccactggtcagttcatcaacatgcagaaatggttgagttttgtgtcacctcactaccacctcctcccttgtcatacccagaaacagctgagaagaaaatgtgaaaaaacagcaagctgtttctttaaaaggataacaatgggagcaggaggctaagacataatctttctaacatctcttatgcttatgtgattgacaaatagaagattgttagaaaaaaaccgtgtattctatttttgtgttttttttttcagggtaatatctctttagagatgtaaaatktgtagaaaccaaatttcgagcaaggtgaagtgacttgctcaatgcacacactataaaagtgacaaaattaaggtttataactcaaactttctgaattctactccagggctttccagcagacatcactcaagtattgataatgttttatttcctatgtgctaaaagcccaggatgtcttactttgattgtaacactgaactgctatcatctgccta

SEQ ID NO: 626918 - DNA, 656 bp, Homo sapiens
catattaagatgtttcctccaaactagcaagtaggatctagatttaatcttcaactattcaataccgattctacaaaagcatagaggtgaacagagtgctgggacctacagtgtcatttcttccccctattaccttaatgaatgtagccagtttgcttacttcacttttgctcttggatattgacaactggctgtcttcttcttcaggtggtcaggtgctagttgttactcagtgaatccccagttctctaggcttctctgagagatarccaagacttgttttcagtcaccaatgcctttaatcaaactcgcttaaatagcaacccagtttttaccacatgccaaagtctatcactgacagaaattttaatgtttcatctaacccacatctccctcaaaactttgctaaaatgccatttttttctgtgattacttccatttatttttctccgtagctttcttcaccttatgacctataatataatgtactaattatgtttgttttcacttttcctacactagtacatgagctctaataaggcagaggtttttgcctgtatacttcactgatatattcttggaacacagaagactaccaggtatatagaaagtgctcataaaaatttgttgaattaattaatctagcacaattgatt

SEQ ID NO: 626919 - DNA, 656 bp, Homo sapiens
catattaagatgtttcctccaaactagcaagtaggatctagatttaatcttcaactattcaataccgattctacaaaagcatagaggtgaacagagtgctgggacctacagtgtcatttcttccccctattaccttaatgaatgtagccagtttgcttacttcacttttgctcttggatattgacaactggctgtcttcttcttcaggtggtcaggtgctagttgttactcagtgaatccccagttctctaggcttctctgagagatagccaagacttgttttcagtcaccaatgcctttaatcaaactcgcttaaatagcaacccagtttttaccacatgccaaagtctatcactgacagaaattttaatgtttcatctaacccacatctccctcaaaactttgctaaaatgccatttttttctgtgattacttccrtttatttttctccgtagctttcttcaccttatgacctataatataatgtactaattatgtttgttttcacttttcctacactagtacatgagctctaataaggcagaggtttttgcctgtatacttcactgatatattcttggaacacagaagactaccaggtatatagaaagtgctcataaaaatttgttgaattaattaatctagcacaattgatt

SEQ ID NO: 626920 - DNA, 460 bp, Homo sapiens
ttaaatctaagcctgaaactataaaagttttagaagataacaccggaaaaacccttctcatatatatatgaaggaatactcttcagccataaaaaggaacaaattaatggcgtttgcaggaacctggatggaaccggagactgttattctaagtaactcaggaatggaaaaaccaaacatcctgtgttctcactcataagtgggagctaagctatgagtatgcaaaggcataagaacgatacaatgtactttggaaactcaggggaaagggtaggaagggagtgagggataaaaaactacaaattgggttcaatgtatactgctcgggtcatgrgtgcaccaaagtctcacaaatcaccactaaagaacttactcaggtaacagaataccacctcttccccagaaacctatggaaataatttttaagtcattttaaaaattattcacaaaaagcttgagg

SEQ ID NO: 626921 - DNA, 592 bp, Homo sapiens
ctctttctgccctgggacttttattttcacatgtgcatgcacaaatcaagaaatgccaagacttaacatgccatggtgtagctcttgactaatggggaatagaggctgatgaatacttgttcccctattctgtgccctaggcagaaaactctgaggtgcattctacatatcttctcagagagtttcagtgaaatggagcttagttgtcctcagcgaccaggatggtaagacgtccttacattggttttcagtattttcatgttttagtctccccagtcctctgctcctgttaactgacactgctttcaccgcaagcctttattttcagccttttctttcctcagagtgggtggggggactggggtaagatagaaatcagcagctaatgtttaaaattgtaaatcaagaaatagcagtattaataaattgtttagaaaatgtgttataagaattaaagagctaaaaatggctgcttttgtagacagaaaattaggaakgagatggagtgggacattaacttatggtttcctttaaacatagcacattggttcttgccatccaaaaataaacccaaagtcacgttaaatcaata

SEQ ID NO: 626922 - DNA, 570 bp, Homo sapiens
aaatgaactgcaagggaaataaatgatcatcaacagatgtgataagcaaattgtgataaacataaaagggaattctactcaacaataaaaaggaacataccgctgatacagacaacagtttaactaaatctccaacacaggatgctgagtgaaataagtcagatacaaaaagctacaaatgtgtgattccacctgtatgaagttatcagaaggctatgtctaatctacagtggcaggaagaagatcagtttacctgggacagggtctgggagtcccttagccaagtcccaggtaattgactaagaagggacacattggaagcatttgtggttgatggaaattttctgtcttgatygtggtaatgtttacatggctacataaatttacaaaaacttactgaactatatattaattgaatttgtacatgttatgcaaattatatcacatacataatactatacatatatatacacaaaaatacacctattctatttcctcactaaaacacaccaaaactagtgaagaaagtaaaagagagaataaaactctttaataaaattataaaacagc

SEQ ID NO: 626923 - DNA, 589 bp, Homo sapiens
atgaaaaaacttcacacaaatttctattgagggacatgctrtaaaatacgtgatcagtactccagaaaattgccatgttatctaaaacaaagaaattctgagaaattgtcacagccaagataagtctgaggagaaccaatgactaaaagtcatgtggtaacctgaatgagatcttgaaacagaaaaatggacaaccagaatttttcaaattacctagaaagtaaacttcaggctggcttcagagttttattgaaacatccggtgtcaaaatataacaacagttgaatggaaagaataagacagacaatatgtgtgatcccagaatcttatacctaagttacaaattaaatatttaaaatatttaaagaatatattgtctaaatgaaaagtaacacaaaatttacaatacccacagaacattttcaaatattttcttgaactagtcactgggtcaaattaaataactcagaacttggaaatgtggacatgggggtataaaagaacctgaatggatgactaataaaacaattacagaattgaggacaagcaattgtgattaaagaatggaacataaaatgaaaataattgg

SEQ ID NO: 626924 - DNA, 585 bp, Homo sapiens
ataaagatcataaataaataaataaaaattagaaataaataaaatagacatgagaaatacaatagaaaagattaataaagctaagagttagttttaaaaaatataaacaaaatttaaaaaattttagctagacaaggaaaatagaaagaagactcaaataaataaaactataaatgaaaaaggagtcattatagctgatatgacagaaatacaaagaatcatagacaactactatgaacagttatatgccaacaaattaagtaacctggaataaatggttaaatttcttgaaacatacaccctgccaagactgaatcataaagaaattgaaaaactgaaaagaccaataatgaataaccgcaaaaagcctatgacttgatggctttattactggattctaccaaacaattaaggaagaattaatgctaatacttctcaaactcttgaaaagtagaagagggggagctctttttatttcaaagcataaggcaagcattaccttsgtatcaaagctagacaaagacattacaagaaatgaaaattctagaccaatatccctgatgaacatagattaaaaaaatctac

SEQ ID NO: 626925 - DNA, 500 bp, Homo sapiens
tttgctcttaaagatgaaaattatcagccatgacatacaaacttagttaaaaattaatggttgtaataaagtatcacaagtaattttctaatcagatcccaaccgaatgtttgtaatgcctcctggaagtatgtaagagacaaattacagatttaaatgatttgatgcacatgcatgtacccacaaaggtacacgtgcaaatattctctctgtctctctcagtcaatatacagtgaatgattgaaagcatgttcattgacacttctcaaaagaagacatttatgcagccaaaaaacacatgaaaaaatgctcatcatcactggccawcagagaaatgcaaatcaaaaccacaatgagataccaactcacaccagttagagtggcaatcattaaaaagtcaggaaacaacaggtgctggagaggatgtggagaaataggaacacttttacactgttggtgggactgtaaactagttcaaccattgtggaagtcggtgaggt

SEQ ID NO: 626926 - DNA, 500 bp, Homo sapiens
tttgctcttaaagatgaaaattatcagccatgacatacaaacttagttaaaaattaatggttgtaataaagtatcacaagtaattttctaatcagatcccaaccgaatgtttgtaatgcctcctggaagtatgtaagagacaaattacagatttaaatgatttgatgcacatgcatgtacccacaaaggtacacgtgcaaatattctctctgtctctctcagtcaatatacagtgaatgattgaaagcatgttcattgacacttctcaaaagaagacatttatgcagccaaaaaacacatgaaaaaatgctcatcatcactggccatyagagaaatgcaaatcaaaaccacaatgagataccaactcacaccagttagagtggcaatcattaaaaagtcaggaaacaacaggtgctggagaggatgtggagaaataggaacacttttacactgttggtgggactgtaaactagttcaaccattgtggaagtcggtgaggt

SEQ ID NO: 626927 - DNA, 496 bp, Homo sapiens
tcttaaagatgaaaattatcagccatgacatacaaacttagttaaaaattaatggttgtaataaagtatcacaagtaattttctaatcagatcccaaccgaatgtttgtaatgcctcctggaagtatgtaagagacaaattacagatttaaatgatttgatgcacatgcatgtacccacaaaggtacacgtgcaaatattctctctgtctctctcagtcaatatacagtgaatgattgaaagcatgttcattgacacttctcaaaagaagacatttatgcagccaaaaaacacatgaaaaaatgctcatcatcactggccatcagagaaatgcaaatcaaaaccacaatgagataccawctcacaccagttagagtggcaatcattaaaaagtcaggaaacaacaggtgctggagaggatgtggagaaataggaacacttttacactgttggtgggactgtaaactagttcaaccattgtggaagtcggtgaggtg

SEQ ID NO: 626928 - DNA, 500 bp, Homo sapiens
tttgctcttaaagatgaaaattatcagccatgacatacaaacttagttaaaaattaatggttgtaataaagtatcacaagtaattttctaatcagatcccaaccgaatgtttgtaatgcctcctggaagtatgtaagagacaaattacagatttaaatgatttgatgcacatgcatgtacccacaaaggtacacgtgcaaatattctctctgtctctctcagtcaatatacagtgaatgattgaaagcatgttcattgacacttctcaaaagaagacatttatgcagccaaaaaacacatgaaaaaatgctcatcatcactggccatcagagaaatgcaaatcaaaaccacaatgagataccaactcacaccagttagartggcaatcattaaaaagtcaggaaacaacaggtgctggagaggatgtggagaaataggaacacttttacactgttggtgggactgtaaactagttcaaccattgtggaagtcggtgaggt

SEQ ID NO: 626929 - DNA, 608 bp, Homo sapiens
aaatactaagcctcagagaagtttagcagcatatgttattgaaatcgtcactgtagtaaaggttattcatatacttaaggggctctaagactgctggtccttgctgcagagcagtaatgatgaaggaagacccagggagagttggacctgaggatgctgtattttttgttggatttgcttttctgattattacagtgatacatgcctataacagagcatctggaggtagacagtgaaggtagacaaggacagttgctcattccgccacccagagataactactgttgagactttggcatatcttcttttagtcttctatgcatattgtatatagtgatatgaaaatcctacactatrtatagaactttatcctgatttttcgacatttatctgatgtctcattccatgaactctttgtaaacattgctgttaatggctgcaataaagtttcatggtatcagtgtagcatcattatcttaaccacactgacagtgttggattctgattgtttccaattttcctccaatataaataacactgcaaagaacatctttatggatccatttctgcctagatttcaaattgcttctttaggaaaaaataatcca

SEQ ID NO: 626930 - DNA, 567 bp, Homo sapiens
aataatagcagcagcagcaatggacttttcaggctggagcattaaaaatatgctgatatttataagccatacttcaccttctataatgcctacatacaccaacctctgctactctttgccattcacctacccctagctatcatttttttttaccagtctgcaaaacaaggacaatagtgatctttcatccaccaacatacaatacattttgagaccttgcccaaaatgaaatgattataaatagtgacaaataaargagttaattaacttagaatctcctacccttatgctactccctagcacccactgaacataattgattgaattattcagaacatggtgtcctttccacagaagccccagtgagctgtacaggctgtaccacaaacaagccagtgaacctgtacttgaaaaagggagaaaaacaagaaacttgttttaagtcatccctgcatggatttacaaaatttggataaaataatgtaacctaccatcagatatgaaatatagttatcacatgctggcagaatttgtcatcaggaagaaaatacattaattacacactca

SEQ ID NO: 626931 - DNA, 626 bp, Homo sapiens
atgccaaatgcagacacttatatagtatatacttaacgaagtatatactttaaaatagttaaaatggtaaattttatgtatatttttaccacaataactaaaaaaaccaaattaagttgattgtatgttttggattataccagcggtacttgtttgtgctagaaaactctgggggaaaacagaaaaggaaaaaaaaagaaaaakaacgtaacacctccatttggaatacataaatctttaatgttttgatttgaccatgtttctttttaactaccctccccttgtcagcaaaaatgacaatcactttctaccacttcccgtataggtggcaaaatagtgcctacttattccctgtgaaatttccatgtcttaattcacaaacagaaaagaaagaagaaagacctgagcagtgaaaaacatcgcttccctgctgggcattctgttgtaaacctatccttagcaaggcggtagttcccaggccatgacatcttgggagcagctaccaagacaagcacaaggacctggggtcagcaggtctggcttccagctccagtcgtatgaaagatatgagccagggctttcaagtcttcagtcattctcacatcccttactaagccacagagcaa

SEQ ID NO: 626932 - DNA, 626 bp, Homo sapiens
atgccaaatgcagacacttatatagtatatacttaacgaagtatatactttaaaatagttaaaatggtaaattttatgtatatttttaccacaataactaaaaaaaccaaattaagttgattgtatgttttggattataccagcggtacttgtttgtgctagaaaactctgggggaaaacagaaaaggaaaaaaaaagaaaaagaacgtaacacctycatttggaatacataaatctttaatgttttgatttgaccatgtttctttttaactaccctccccttgtcagcaaaaatgacaatcactttctaccacttcccgtataggtggcaaaatagtgcctacttattccctgtgaaatttccatgtcttaattcacaaacagaaaagaaagaagaaagacctgagcagtgaaaaacatcgcttccctgctgggcattctgttgtaaacctatccttagcaaggcggtagttcccaggccatgacatcttgggagcagctaccaagacaagcacaaggacctggggtcagcaggtctggcttccagctccagtcgtatgaaagatatgagccagggctttcaagtcttcagtcattctcacatcccttactaagccacagagcaa

SEQ ID NO: 626933 - DNA, 576 bp, Homo sapiens
gttaaaggctgtggaaaattgtactgatactatttcacgaacatcctgtccttacagacccgacagagttctacaaggagtagtgtatcccagtataaccgcctggatcagtatgaaatcagaagcctcctgatgtgctacctgtatatagtaaaaatgatttcagaaggtgagttaccatcatattaagcatggactgtactagacatacaccctcacaggttcacaaattcatgcaacaatatttgatcatcatctggaggcagagcacatgcacattataaacagttatttggagactctgactttaaaatgtttcttaaattgaacytcaaaataggttcatgtcagtcacacaagttcgagtctttgaaataattttaacataattttgcaaatgaatttctaaaatgaggcaatggttttagaagtgctaaacattttgttttcatgcagagcatttaattcattaaatgaccaatgtaactgaaaggaaataataaccaccagaattcatatttaatacttcagcttttatttaacccaggatttgacaaataagaaacaaaaagacag

SEQ ID NO: 626934 - DNA, 621 bp, Homo sapiens
tattaagtcttaatataaattatatttggggtttttatacagtttttattataaaattttraggaaataatttcatatgaaacatcatcattaaaaattactactgtctgcccaccttggtttagaatagagtgttgagacatggctctggttgaatctgaatatctcaaagttcatcagcaattaatgactggatgtctaccgtgtgccaggtattctaagtgctgggattaaagaagtaaacaaataaaagaaaatccctgccctcaaatagtcagagaggtgaaatagatggtatatcagattgtggtaagttcaatgaaggaaaaaaaatgataggaaggtaaatagtgggatcccattcccagttcagtaccatgcacatgagaatcttggtatatttctttctttttctttccgccccccgctcccccgcagttgcaggggtcaagggctggtggtgtgcatgcatgacagctgtgggtgcatgtacagtagtgatggccagtggtggaagtcagggtcacctcatatggctgtgggggttgaggcttatggcatgcacacctgtgacaatgaaaactagtgatgatagacattgaagtcagttgcatgtgtaca

SEQ ID NO: 626935 - DNA, 621 bp, Homo sapiens
tattaagtcttaatataaattatatttggggtttttatacagtttttattataaaattttaaggaaataatttcatatgaaacatcatcattaaaaattactactgtctgcccaccttggtttagaatagagtgttgagacatggctctggttgaatctgaatatctcaaagttcatcagcaattaatgactggatgtctaccgtgtgccaggtattctaagtgctgggattaaagaagtaaacaaataaaagaaaatccctgccctcaaatagtcagagaggtgaaatagatggtatatcagattgtggtaagttcaatgaaggaaaaaaaatgataggaaggtaaatagtgggatcccattcccagttyagtaccatgcacatgagaatcttggtatatttctttctttttctttccgccccccgctcccccgcagttgcaggggtcaagggctggtggtgtgcatgcatgacagctgtgggtgcatgtacagtagtgatggccagtggtggaagtcagggtcacctcatatggctgtgggggttgaggcttatggcatgcacacctgtgacaatgaaaactagtgatgatagacattgaagtcagttgcatgtgtaca

SEQ ID NO: 626936 - DNA, 576 bp, Homo sapiens
  misc_feature 440, 444: n = A,T,C or G
ccttatgctcaaggttcagatctgaaaatttgcttagttatcacatttttgtaagcacacattttaaaaaatttatgataaatattaagctaggttgtcctggaaaaaaattaacttcacacatattcaggttctgtctgtgtataaaatattgcactggttcttgttttaagagatgataaaatcagatttacaaattgggtgtaaattttaagatagtctaaagggaagaaaggttcataaaatatcagtcaggaacagagttacaaagaatgcagactggaatttagtttttatatttggcacaaaataataaaattgtattcttattgaatgacttgagaccaataccatttcatctgttcrttttttaaactatatatatttccaataaaacaaaaattgggcaaattattttttttagttgaaaaattatttcntatnaaagtggacagtaaaatactttcatgtaattcaagctaatatgacaaaactaaaatattttgtagcgtttttatactatcttaatatatatttttatatatttaatatgtttttaaaactgttatgaaagag

SEQ ID NO: 626937 - DNA, 270 bp, Homo sapiens
tttagaacctaggtggcaagtatatgggtgtttgctgttcagttatttcagcttttctgtgggttaaaaaaatcctcataatataaaatccttccatgactcctttttaaatttttgatcaagagagtgaaatgtgcccagaatgtgctcttaggcaaaataatggtagatagtaatgaagttttagtatcttaacagcaattatgaataaagatatagaaaactgtgtttcactagartgatattacatttgttaatcttagaaattga

SEQ ID NO: 626938 - DNA, 576 bp, Homo sapiens
ctcccagtttaccagatagcaccttagaaacagtttttcttaatataaatgttgtagtcttaaaatattacaaaaaagagtcaattgaaggtatcagcagctttaagtttataaaccataaaatacaacattgtaagcaattttattttaaaaattaggatgactatttgaaagaagaaatttttcaattaaataccagtgataaggaattaaagacaggtatagctaagaaattaaaatacatatatactaagaataattgttccatttatattactccaatattcagatactcaatatgaagaatacctttaaatgctctttaatgtacttgcatatgttttttaataaarcattttatttttcgatagattttgttagaactttatctccctcagtgtaattaaaatatatcagtcaataaagaaacataccaaatgatgtatttttaatgatttttagccccctttttcactttcagaagtgttcttgattggatgatgataatataattatcctacctctgctctgtttcctccttcttcctgtcaccagagctcagccagcctgaaagat

SEQ ID NO: 626939 - DNA, 449 bp, Homo sapiens
taactctgtggattatttcttttgctgtgctgaaactttttagtttaattaagtcccatctattaacccttrtttttattgcatttgcttttgggttcttggtcatgaagtctttgcttaagccaatgtctagaagggtttttttctcagtgttatctgctagaatttttatggtttcaagtcttagatttaagacttcgatttatcttgagctgatttctgtataaagtgagagatgaggatccagttccattcttctacatgtggcttgccaattattccaacactatttgttgaataggatgtcatttccccactttacatttttgtttgctttcttgaagattagttggctgtatttggctttatttctgggttttctattctactccaatgatctgtgtgcctgtttttataccagtaccatgctgttttggtgactttataat

SEQ ID NO: 626940 - DNA, 600 bp, Homo sapiens
acatggacttgattgaatgtgagatattgggatctggaagggcttcaagatttttgataactggcaggtgctctgaaccgctgtggggaaagttctgtctgcaatactgtctccctggcagctgcttcctggagaagttggactttcaccycaggagatacaaagataatgaaaactacattcaaaatgcatgcaggaggtgtttaaaatagcagtatcaaagacagggaatgcaatcagatccagagaaatgactgagataaagctctaggctccagacaagcctttctattccatcctctttgggatggagccaggtacatacaccttatccctaaattgagggaataaaggacatggacttctctagtaagaacagtatcagcaattgcagctcgtctcccttccatcagccatctttgtgttgaagtcattaaaagtattctatttgcatatattaataaatagagattataaaataagaaacataacacggatggatatacggaaaggttctaaattcatgttttgtaaaaataataaacttatgctactttacagtatcaccaaatacagacatttaaaaagcaaaatgaattc

SEQ ID NO: 626941 - DNA, 621 bp, Homo sapiens
aacttttaacagcaaagtctacataataaaattatgcattacatttttatgtagacagtggtcacagtcacacacatatataccataacatccttggtatggcaaaataaaaataaaataaaataactattatcttmgtttttaacatttagaaaaatcacaaaacaatgctttgacttagaatatgatatttagggaaccactgcataatacatttcaatatcctggagattcaggcttcattagcctgaaaactcacaatgtttgaaaagtaagaagcaaaacaaaggcaaaagaattgaaatcttacaattcaatttaaagttatctattgagcacctccaaatagattttatggtagtcatgttacacatcactatattaatctccttctactttatgggtgattaggtataacttcatgccattcagctgacttcctattgtacttgctttgacagtttgcatttttgttagagcctggttaagcactagcctggcattttgaaattaagggcatagaaacatgcataagtgaagattgaaagttgaaaataacatatttggcacctaagctctgtttattatgtttatttttggctatgatatttctactattat

SEQ ID NO: 626942 - DNA, 621 bp, Homo sapiens
aacttttaacagcaaagtctacataataaaattatgcattacatttttatgtagacagtggtcacagtcacacacatatataccataacatccttggtatggcaaaataaaaataaaataaaataactattatcttcgtttttaacatttagaaaaatcacaaaacaatgctttgacttagaatatgatatttagggaaccactgcataatacatttcaatatcctggagattcaggcttcattagcctgaaaactcacaatgtttgaaaagtaagaagcaaaacaaaggcaaragaattgaaatcttacaattcaatttaaagttatctattgagcacctccaaatagattttatggtagtcatgttacacatcactatattaatctccttctactttatgggtgattaggtataacttcatgccattcagctgacttcctattgtacttgctttgacagtttgcatttttgttagagcctggttaagcactagcctggcattttgaaattaagggcatagaaacatgcataagtgaagattgaaagttgaaaataacatatttggcacctaagctctgtttattatgtttatttttggctatgatatttctactattat

SEQ ID NO: 626943 - DNA, 610 bp, Homo sapiens
gcaaacatgctaagcattcacttgcactagtaaatgtccttggccatattaataagcttgaccatttcatttttaattttcttctatctttctcctagtttgaagttcttttttgaaattaacatccaagaggaaatttaggcttaaattcttttaaaactttcttctctttttaagcacaagttctgaaaaatacatatatgaaagaattaaaaaaaaaaaaaaggaagacattttctcctttcttttttaacctgaccaattttctgggtcaagctcagtgtgagctcacttgrttggcagcaggggaagccagggtgcccctgaagaaggtcatttctgacttttctccgccactgctatgccacattactcactgtcttatggccactagttaaaaaacacatgtaagcaatcaagtactggaaagagtacgaagaaaagagaaagccagaattaaaaataaatcctaaatttaaaagtgaactagttaaaaaaaatcatttactataatttcttctgctcaaatactacagaagtatgaagttgttagcctagagtaaacccaatttaatttttcacaatttactctaaagatataggccatttt

SEQ ID NO: 626944 - DNA, 612 bp, Homo sapiens
atagttaaatcacactcagatcagaggatttgagagctggcatttatccattgttggaaagagtgatcatagatgttaaaggcttcgcttggttatcttcccttgtctttagctcaactcaattaatgggagaattgacaacttaaaccccttcgtgccatgtcttcaggaaatagcccatgaaggakgtatgaaaaaacggttctatgtattttgattataccatgaataacattgctattctacacatgtatagggagccactatcagagaaagggtttttgggaaaaaaaaaatcagatacaggcacatatatcagagaaatatcaacaggctaaatagacatgtgtctgaagaatggtagagattcttatagtttcaatgtttgtccatattcatcttcactgtacttaaggattaactgaaatttgtctattccgaagtatcactacaataatttaaatacatctcaattcactttcattattttacaacatcactcaggcctcaaacattttcaagaaaatgctgaaaagataaaacttacgatttccatgtatgaataattgtagccagaaagctaaactaattttttaatgccaaaggcaatca

SEQ ID NO: 626945 - DNA, 612 bp, Homo sapiens
atagttaaatcacactcagatcagaggatttgagagctggcatttatccattgttggaaagagtgatcatagatgttaaaggcttcgcttggttatcttcccttgtctttagctcaactcaattaatgggagaattgacaacttaaaccccttcgtgccatgtcttcaggaaatagcccatgaaggaggtatgaaaaaacggttctrtgtattttgattataccatgaataacattgctattctacacatgtatagggagccactatcagagaaagggtttttgggaaaaaaaaaatcagatacaggcacatatatcagagaaatatcaacaggctaaatagacatgtgtctgaagaatggtagagattcttatagtttcaatgtttgtccatattcatcttcactgtacttaaggattaactgaaatttgtctattccgaagtatcactacaataatttaaatacatctcaattcactttcattattttacaacatcactcaggcctcaaacattttcaagaaaatgctgaaaagataaaacttacgatttccatgtatgaataattgtagccagaaagctaaactaattttttaatgccaaaggcaatca

SEQ ID NO: 626946 - DNA, 596 bp, Homo sapiens
tgggtggatattggtataccatctgacaaaacagtgacaaaatggaaagtcatacaggatgactggtccagtgttaaacaaatttggttttagatgtgggtgtttgtctccaaggatctggaattcaagggagggatttttatatatatagattttaggtagwtgaatttgagaatcatcatgtcataagtgatgatggaagagtgaaagtaaattagatcatccaaggggaaaaatcagttgtcttttgtcatttgtgttgctgcagttaatgagattataatggtgtaaacaaaaaatactgtgagatcatatcagcaaaagatgactatgtttgggagagattatggaagataccacatagacgacaacattaagattgagaagtttggtgtctttttttttttttttttgagatgagatggagccttgcccaggctggagtgcagtggcacaatctcggcttactgcaacctccccctcccaggttcaagcgattctcctgcctcagcctcccaagtagctgggattacaggcacctgccaccacgcccagctcattttttttgtatttttaatagagatggggtttcacta

SEQ ID NO: 626947 - DNA, 400 bp, Homo sapiens
tatgttctcttttttacatataagaatgcccaaggtcatgtgacatagagcagyattatttaagttaagtgattttttttttctttgagacagagtctcgctctgttgcccagggtggattgcagtggcactatctcggctcactgaaacctccaggttcaagtgattctactccctcggcctcccaaggaggagctggatctacaggcacgcactaccatgcctggctaatttttctattttttagtagagatgggatttcaccatgttggccaatctggtcttgaattccaggcctccagtaatctgtctgcctcaacttctcaaagtgctggcattacaggtgtgagcccctagtcccgcccttaattgagtgacttttttctaaaacacaaaatat

SEQ ID NO: 626948 - DNA, 615 bp, Homo sapiens
ttacaatgtatagttttacagatttggactcgtatttcttgcatcacaaattctagtgataggtttccacaattaatgtttatacaacaaatctacactgtcaaaaaaatgagaaaatgattactaaatatgcttaatcaatgggattatctttgggagattttaagaaaaatatgtctgagcctccagacccaatcatagacattttaataaagtttgtttgcagtacaatatctctttcacactctctctgtatatttaaataatcacacatattcattaaaatatataaaaatattcccatgagcaaaggaatggtgagagtgttacttaacatgacattttagaaaacaatttgggaaaattaaagaggcacatagcctttgaaccagcaattctacctctatgagtttatactttagctgtgcctacattgttacatttaacagctattcatggcagcgttgtattagaggagaaatactgggaaaagaccaaccaacctccacctaaaagacgtgaatagtaacagttctctgtattatctctataacatagaataactgctgatgaccacttagaggtrgtaggctccttcctttcttagtacaacct

SEQ ID NO: 626949 - DNA, 636 bp, Homo sapiens
ggatattttgtgcacatagttccaaacatctggctattggaaaatacataggaaatagcttgaacatttctttttgcttcatggttttaattatataaacccaggctaacaatatttaattcttttctaataagaatggcactgctgcctaaattctttttaggggcccccttaaaggatgttactacgcattaggcaggtctctsttttgggggtatgaagtcccattgggtgagatgctatttaatcaaactgttaggaaaattctaacagaatatgcctgtgatactaactcctgtggtgattaaattggaaaggtggacatcagagagtgtagcgaaaaatagcatatttagggtatttgttattttttaaagctcagttaagtcaaaaagcctgtggctgctgaggaatgattttgtctacttatatctcaaattctttgttgcacagtccaaaaacataagcattagcaccattaccagtattccacacagcagaatttattcagctgtatggagaaagaacagctttctcaagacattttgattaatgaaagctcctattaaaggcaccaattaataaaaaataaaaagtacatttttctcttggactcaaagctaaactgagtgaaaa

SEQ ID NO: 626950 - DNA, 603 bp, Homo sapiens
ccctttcttcccggtacccttgttttcctatctaacatcacactttgaaacccagcacaggagcggggaaaccttaatcacactgcaaactgccagaaaactgcaagcctgtttactagtgacatttcattcacttgttgtgaatgttaattcatttgttgtacattctgcaaactgctgtcttatgaagattacatcttatgtaatcttcataagaacccagtaaggactacattgtttgggggaatattaattccacagctatgaggatggtagaagtataataaaagtagttatttttcattaaaaktatatcatttatattaacatcaaatgggtttgctattatttttaatgaataattttaaaaattttgttttagtttctaatatggtaaatagatacaatccaaattttaaatagaagctatgtgggataatttttaaaaatgtacagggtcttgagaccaaagagtttgagaagtgctgcctcagtccacatcagtaacgcacagagggttctgagagcgagccctgtgggtggaagctgcccttctgccccaatatgggggagatacaaaggggcaatgccctcctctggaca

SEQ ID NO: 626951 - DNA, 606 bp, Homo sapiens
ggacagcttctaaggcagcatttaacataaatatgtaaaggtacaagtattggccacagtggactgtgccaaggaacaacagtggggacaagcaatagatagaccaagaagcatgggaagagattaggaaaggggttatatgtgggtaaaatggctttttaaagctcctagatayactgagaaattgagaaaaccataagactagccaaggatggatacatgtacagaaaaagccagagaagaccctaagctttcacctctggatgaccattaggctctgcacaagcacgaagtgaaggctgaggtagacttgtaagcaatgtggctaagctatgaatgagtgccccaacacagatctaatatgtcaacactgagagtagatttttctttctcctggtctaagcatttaaggaaaccctgtcaaaataataactgaccaccaagctaatggaccacatacttcagtgatcacacacaacaaagaatatcatctttacaaaattagtttagaaaaggcactatacaaataagcataaataaggcaagcagcaacaaaaactcaagagaagtggtgagaatctaatctcctgagttaccacaaaataa

SEQ ID NO: 626952 - DNA, 532 bp, Homo sapiens
aatacatcatgtggtcctggattgtattctagaccaggaaaatgacattagtggtcaattggtgaaatctgaataaattccattgatgaaattagagtgttttatcaatattaatttcctaattttgataattgtgcttttgttgtgtaagacattcacatatataagaattcattgtagtattttacagcattttttaagttagaaattatttcaaaagaaagggttgaaatattttgtttaattaaacaacatgaatgagtgaccaggaatccacagtatcaggaatctgggcttctttcatcctgttgttttatcttacccaaattgtttcyctcatatgcatgttccaggctggtataccctcacatacatccatgttccaggcaacaggatgaagcaggtaagaaggacacaatctggaaattgcaagtgtcacttccacttgtattccactggccagaacttagttacatagtcacacctacctgcaagaaatgccaggacttatctttatttgctcatctaaaaa

SEQ ID NO: 626953 - DNA, 541 bp, Homo sapiens
gtctgtgtataatataaagtgcaccagaaagaggaatggatggagggtgagagatggctgttcctcaggcagaggaaaagaaggaataatttatttaaacctggccatctgcctcctcctgtccctacaagtttgtagggacaattagttgaggatatactaggttacggtgtagtagtaactccaaatcttagtcgcttaacgcaagaaatatttatttgtctctcatatccagtgtaggtctgagggactttctagcatgactgtatctctatgtgtcaactaagctagtcagcctgatggaggctttaccatccggtaattgtaccattttaaacacatgsttgttttaaacttgcttgatgtaacttgggaagaaagagtttgaggctcagctacatgctaccctctaactgggcacctttcttctcaatgcaactagactcatctctctaaaatgcaaactggttcacgccactcccttgcttacaactcccactgccattacagtaaagtccaaattctgattccatggtttgta

SEQ ID NO: 626954 - DNA, 541 bp, Homo sapiens
gtctgtgtataatataaagtgcaccagaaagaggaatggatggagggtgagagatggctgttcctcaggcagaggaaaagaaggaataatttatttaaacctggccatctgcctcctcctgtccctacaagtttgtagggacaattagttgaggatatactaggttacggtgtagtagtaactccaaatcttagtcgcttaacgcaagaaatatttatttgtctctcatatccagtgtaggtctgagggactttctagcatgactgtatctctatgtgtcaactaagctagtcagcctgatggaggctttaccatccggtaattgtaccattttaaacacatggttgttttaaacttgcttgatgtaacwtgggaagaaagagtttgaggctcagctacatgctaccctctaactgggcacctttcttctcaatgcaactagactcatctctctaaaatgcaaactggttcacgccactcccttgcttacaactcccactgccattacagtaaagtccaaattctgattccatggtttgta

SEQ ID NO: 626955 - DNA, 367 bp, Homo sapiens
ctgccctctgcaaaaaagcccagctaagttgctagcagctggtggtgactggcatgaaggctctggctccctcaagctctgcctgactgccccaaaccctgagggaatcaataattcttgccctacttataatcccttgacagtaccccagtgtctcaaggtccttcaattgggaagctctgctttattaaatctttcactagaactacacaatgggatgggagaaagacttgccattttaggccttcacaagaggggcrtcccacatgcagtcactctccctcaacctctctctctaaagtccctctggctttcccaccgtcttcctcgggaagctatagcctagtcttctcctcaagagaaagag

SEQ ID NO: 626956 - DNA, 367 bp, Homo sapiens
ctgccctctgcaaaaaagcccagctaagttgctagcagctggtggtgactggcatgaaggctctggctccctcaagctctgcctgactgccccaaaccctgagggaatcaataattcttgccctacttataatcccttgacagtaccccagtgtctcaaggtccttcaattgggaagctctgctttattaaatctttcactagaactacacaatgggatgggagaaagacttgccattttaggccttcacaagaggggcatcccacatgcagtcactctccctcaaccyctctctctaaagtccctctggctttcccaccgtcttcctcgggaagctatagcctagtcttctcctcaagagaaagag

SEQ ID NO: 626957 - DNA, 599 bp, Homo sapiens
acaagattttcaccttctcttcttcacttttcactgagatagaggactggataagctgcaactgacctcctgcagatgtttcagatttagtggttcattgattcccattgtcaagttttccctctggttttagaatcctgttttcttttggcattaaggaaacctgggttgtacactctgtcactaactcactacatcaacttgggcaggtctcatctcttaaagctgtgattcacaaattcactctgggctctggcattgtctaactatgcctattgttgttgctgttgttgctagggtgatgggactaccattgattccctatcccaattgtctttaatgttgtttaaaaccctttcttggtccagtgttgtggctcacacctgtaatcccagcaatttgggaagccaaggcaggaggatcacttgaggccaagagtttgagaccaacctgggcaatatagggaggcaccgtctctacaaaaaataaaaaattagccagstgtggtggtatgcctgcagtcccaacagattgggagactgaggagggaggatcgcttgagcccaggaggtcaaggttacggtgagctatgactgcac

SEQ ID NO: 626958 - DNA, 565 bp, Homo sapiens
gggcggggaacatcaaaccccgggacctgtcgtgggttggggagcagggggagggatagcaytaggagaaatacctaatgtaaatgacgagttaatgggtgcagcaaaccaacatggcacatgtatacctatgtaacaaacctgcacgttgtgcacatgtaccctagaacttaaagtataataataaaaaaaagaatagcccacatttgtaatgcaaggaacctcaatttatgattgataaatctgaatggacacagctgatggtaacccagcaattttttatttttatttttatttttgtttatttatttattttggtcacaaggtagcagcatttccagcagcacgtctccatctgatggattatgggaattccttttctgtgcataaaacaaaccaaaaatttttttaaaccaacaacaaactactaacagcttaattgtaaacctgctggagaggaagttgaaacacctggcactttttccattcaaatatccatcaatgaatgactgatgatactgctgttcatgaaaactaagatttgttctgaaagcagggagctgat

SEQ ID NO: 626959 - DNA, 533 bp, Homo sapiens
taatgaagaccactgtcctgaatttgatatgtaacattttcatgcatatatatgtgtgtgtgtrtatatatatatatacatttttaataaatacatatccatgaatgatttttagtagttttcccttatcaaacattatacaaatggcattatcttgcatttattattttgtagctagctcttttgctcaaccttatgtctgtgaaagttctcatgctgatacatatagttctaattcattttaatgtctctgtagtattcaactgaatgaatgtgccacaatttattcatccattcgcctgttgattgtcacctaggtggttcctaatttggttattacaaacaatgcagcaattatcatttttatgctagtctacttatatacacatggaagagattctctgggtttttacctagaagtggaattgctaggttttgggatatgtgcaccctgcccatcctccctaccagatgttttcacagcttattaacaattatttaacttcagtttctctgagaatttatgagtgcct

SEQ ID NO: 626960 - DNA, 533 bp, Homo sapiens
taatgaagaccactgtcctgaatttgatatgtaacattttcatgcatatatatgtgtgtgtgtatatatatatatatacatttttaataaatacatatccatgaatgatttttagtagttttcccttatcaaacattatacaaatggcattatcttgcatttattattttgtagctagctcttttgctcaaccttatgtctgtgaaagttctcatgctgatacatatagttctaattcattttaatgtctctgtagtattcaactgaatgaatgtgccacaatttattcatccattcgcctrttgattgtcacctaggtggttcctaatttggttattacaaacaatgcagcaattatcatttttatgctagtctacttatatacacatggaagagattctctgggtttttacctagaagtggaattgctaggttttgggatatgtgcaccctgcccatcctccctaccagatgttttcacagcttattaacaattatttaacttcagtttctctgagaatttatgagtgcct

SEQ ID NO: 626961 - DNA, 553 bp, Homo sapiens
agaattctgttggctgagtttttacagagcagagcaggggctctaaaacagtatctgtatgtatataacccaaatatcagccttaattaagttgatttttaacaacagagatctcaaaagaaaaatwctttgaaatcttttattactagattttagctgagacaaacagcctatatttctggcttttgaaatttttttttataaaaggtaacttcatatgtgaaatcaataagccttaactgaacttatgcataaccacagatgcataagatggcaagtcatttttacaagatctgaattgccccaaaagtagctcagagaaaggaaaattcaagacaggatatcagaagctgtccctggagggaaaaataatcactaaatggcaaaagctgcacaagtattaatccagaaagggctcattccctaaccagaaatagaacccaggccaccattagtaaaaggccaaggccttagctagtgagttacaacatggggaagtcgccattgcttttcccataaggagtctagggtagtcatttttgagcttggaaag

SEQ ID NO: 626962 - DNA, 517 bp, Homo sapiens
ctttgcctctctttgcctcaagttaggcaaagatctattagatatgactccaaaaagcatgaacaatagaagaaaattgaacttcatgaaaattactaactcttcaaaagataagactagaaaaatgaaaaggagagccacagactagaagaaaatatttgcaaatcacatatctgataagaggcatgtattcagaatatataattaactctcaaaactcaatcataagaaaacaaacaacccagtttaaaaatcggcagcaaggatgaataagttctagagatctgctgtacaacatagtgcttatagtttacaagacagtattgtgcacttaaaaactcaagatggtagatctcatgttaagcattcttacyacaaaaaaaggggggaaatgcaagaaaatttttggtggtgatggatatgtttattaccttgattgtggtgatagtatcatgagagtatgcatatgtccaaactcatcaagttgtatacattaaacgtgtgcagtttttatatg

SEQ ID NO: 626963 - DNA, 437 bp, Homo sapiens
aagatcatgccattgcattccagcctgggcgacaagagcgaaactcaagaaagaaagagagaaagagagaaggaaaaagaaagaaagagagaaagagagaaggaaaaagaaagaaagaaagagagagagagggagggagggaggaaggaaggaaggaaggaaggaaggaaggaaggaaggaaggaaggaaggcaggcaggcaggcaggcaggcaggmaggaaggaaggaaggaagggagtttctctctctgagaagataaataccacctgatctcatttatatgttgaatctaaaaaagttaaactaatagaagcagagagcagaatggtggtaaccacatgctgggtggtaaggtattggggagatgttggtcaaaggatacaaaaattcagttaaatgggaggaataaattcaaaagatatattgtacaacacag

SEQ ID NO: 626964 - DNA, 437 bp, Homo sapiens
aagatcatgccattgcattccagcctgggcgacaagagcgaaactcaagaaagaaagagagaaagagagaaggaaaaagaaagaaagagagaaagagagaaggaaaaagaaagaaagaaagagagagagagggagggagggaggaaggaaggaaggaaggaaggaaggaaggaaggaaggaaggaaggaaggcaggcaggcaggcaggcaggcaggcaggaaggaaggaaggaagggagtttctctctctgagaagataaataccacctgatctcatttatatgttgaatctaaaaaagttaaactmatagaagcagagagcagaatggtggtaaccacatgctgggtggtaaggtattggggagatgttggtcaaaggatacaaaaattcagttaaatgggaggaataaattcaaaagatatattgtacaacacag

SEQ ID NO: 626965 - DNA, 395 bp, Homo sapiens
ctgcagaatggcaaagattgctgcctgctcctttctctggaagctttgtcccagaaggcagtagcctgatgacagccagagctctcctgtatgaggtgtctgtcgacccctgtttggaggtctctcccagtcaggaggcatggggtttaggggcccacttgagcaggcagttggtccctttgcagagctgatgtgctgtgctgggagaatcacccttgtcaggatcagctgctctcttcagacccagcaggcaggaaagattaagtctgctgaacctgcgcccacagctacscctcccctcaggtgctctgtcccagggagatgagagttttatctgtaagcccctgactggggctgctgcatttccttcagagatgccctgcccagtgaggggg

SEQ ID NO: 626966 - DNA, 586 bp, Homo sapiens
gagataactggagaagtaagtctaaaataaaaataaatcctgagtctttaaacatttactctgcatttgtttgctagagttatttaacaatggttttatctgcaggaaatgctttctctctcacagtagtggtatgctagtatatttatatagaatatttttattggtaaataatgtgtagcacacaagttacaaatactgataaaatatacaatactctttattataaattccatatggctaattgattctcccagaatactttaattaatttttcctaagctcttgtatccatagctaatgtctggcttcaatttaaccataatttgacaaatataactgcatcccagcctactaactcttttctcaataactttattgtcattaaacctgatwtataattatagataaactatatttcacctttgtacacattacattcattttgtatggcaaaaactgaaacatgtttctacttcagcattatgtatggcaaaaattcacttgtttatccatgatagatgtgacttttttgctgagccaaataacagttttcaaattctggaagaatattttcttaatgttt

SEQ ID NO: 626967 - DNA, 597 bp, Homo sapiens
cttggttggtggtcagatgtcctcagtttctggttgccatctcccctctcccagagctagtttggtcagtaacaacagctctccatagagtggctcctacatgcagggctcttgtacagactaatccttttattgtggtaaaatatacatcacataaaatttaccaactgtaactatttataagcatagttcagkggcattaagcacttcacactgttatacaaccatcaccaccatccatctccagagctttttcatcttctcaaactgaaactctgtacccgccatcccaactaattttgactcctggctatgatggatcactctccagttgctttcaaccctatctctgcagcatagatacagtgggagtccccttccagtcctaaattcttcctcatttggggaaaatgtgcggcttgctcaaataatgttcccctttcatgcttctcttgcttttcatcgtcacaatgctgctttctccctccctaattcaccttcacaattgtataccttgaaacccacatctcacaggtcctagaaaatgcaaactgcgtgagaaatccagcttcccccttctggctctgctccctgctt

SEQ ID NO: 626968 - DNA, 477 bp, Homo sapiens
cccaactaattttgactcctggctatgatggatcactctccagttgctttcaaccctatctctgcagcatagatacagtgggagtccccttccagtcctaaattcttcctcatttggggaaaatgtgcggcttgctcaaataatgttcccctttcatgcttctcttgcttttcatcgtcacaatgctgctttctccctccctaattcaccttcacaattgtataccttgaaacccacatctcacaggtcctagaaaatgcaaactgcgtgagaaatccagcttcccccttctggctctgctccctgcttccccttgtgaagagcccccggccctcttggcctcccccacaatacaccgtccgctttrtattcagccttgtcttacactgaagagacatctcttttctcttctcccagggccccagcggctacctctctggcctcctgcattcttagcccacttgttgtacatattcc

SEQ ID NO: 626969 - DNA, 384 bp, Homo sapiens
cctgccttcttgtccactgtcttcagcccagcgcacttccaaacacctctctgtcctccctaacccattttctggttgagttatttttctacccsactgaaacttaaaattcagcctctttgtttgccttcccttggttcctccctcctttctccttctcttacagactaagagatatctgagccactggttctttcttttctcctttccctctgctcctacctctctcccaagacaaagttaatacccaatgtcctttgccagtagcactgctgagccaccaaaccccttgtcctgccagtgatttcttgtgctacgcccatgtcctatctttggccctccctaaagcctgcagtggaaacaatttccaaaccaaaatcagaa

SEQ ID NO: 626970 - DNA, 384 bp, Homo sapiens
cctgccttcttgtccactgtcttcagcccagcgcacttccaaacacctctctgtcctccctaacccattttctggttgagttatttttctaccccactgaaacttaaaattcagcctctttgtttgccttcccttggttcctccytcctttctccttctcttacagactaagagatatctgagccactggttctttcttttctcctttccctctgctcctacctctctcccaagacaaagttaatacccaatgtcctttgccagtagcactgctgagccaccaaaccccttgtcctgccagtgatttcttgtgctacgcccatgtcctatctttggccctccctaaagcctgcagtggaaacaatttccaaaccaaaatcagaa

SEQ ID NO: 626971 - DNA, 384 bp, Homo sapiens
cctgccttcttgtccactgtcttcagcccagcgcacttccaaacacctctctgtcctccctaacccattttctggttgagttatttttctaccccactgaaacttaaaattcagcctctttgtttgccttcccttggttcctccctcctttctccttctcttacagactaagagatatctgagccactggttctttcttttctcctttccctctgctcctacctctctcccaagacaaagttaatacccaatgtcctttgccagtagcactgctgrgccaccaaaccccttgtcctgccagtgatttcttgtgctacgcccatgtcctatctttggccctccctaaagcctgcagtggaaacaatttccaaaccaaaatcagaa

SEQ ID NO: 626972 - DNA, 609 bp, Homo sapiens
tgaaagactgaaagtttttcctgtaagatcaagaatgaggcaaggatgccaactctaactgcttctgttcaacatagtactgaaagtactagctgaagcaatttggcaagaaaaagaaataaaaggcatccaaattaaaaaaagaagtaaaattatctatgcttacagacaacatgatcttatgtgtagaaaacccttaaaggttacacaacaaaaagttaaagtagtaaacaaattcagcaaggttgcaggatataaaatcaacacataaatttcaatttagtttttatacactaacaatgaacaatccaaaaaggaaattaagaaaacaattgcatttacaatggcatcaaaaagaataaaattggccaggcatggtggctcatgcctgtaacaccagcaatttgggaggctgaggcgggtggatcacctgaggtcaggagttcgagaygagcctggtcaatttggtgaaaccctgtctctactaaaaatacaaaaattagctgggtgtggtggtgcgtgcctgtagtcccagctacttgggaggccgaggtggaagaatcacttgaacccaggaggcagaggttgcagtgagccgagataatgcca

SEQ ID NO: 626973 - DNA, 545 bp, Homo sapiens
agcaccactccctgcttctattgtgtcatagctgcgaaaacaaagagacaagcctcatttattcgctgattcattcagcatttattgaatgcccaatatgtgcaaagcagagatgacataaaggaawcagacactgagcccattctcaacttgcttttgatccagtggtggagaagagctgtgtacataggtaccgaacagaaagtaaagcatgctgtatgagcagtgcagataatgtgccatgggcattctgaggaggggtgaattacgaacacctgagggttcagagaaggtttcttggaggaggtggcatttgatctgggtcttggaaattgatagggttggaaatatggagatggagagaagggcatttcaggcagaaagaggagtacaagcaaaatcccaaggcataacacataatagatgcttaatatattttcttaaaaagttgaatgagaaagttccagccagagcaatcaggcaagagaaagaaatgaaaagcatccaagtaggaaaataaggagtcaaactatctcttttcactg

SEQ ID NO: 626974 - DNA, 617 bp, Homo sapiens
gccccctctctctcagcttcaacaggctcctctgcttaagccctctttgactaatccttaatggctaattagttgtcccatcattaaaaggaatcagagaaaggcaaaggaatggggctcccatgacctgctgaccctgttgtgtcattaaaaggagatagctttgagtcgaaacttggtgggtttcttctatatgagtctcattttatccagcatcctcttgcttccaagaccctcccctccactcgaccccacacacacaaatccttattacttatatttttctgttttaagaaaataagttaatatttataaagttcttagaacagtacctgacatatataattactataagaatgtttgttaagtaaactagagcaaacattatcattaaaaattccagataatgcaaaaatatraagagaattaagaaaatcacatataatcccacactagaaaacccataactaaaattttgatgtaggtgcaggtgtaggtttctttatcgtgtacaaagaaacattttttaatgaaaaagaaagattattttatgcatattgtttttgtatccttattttctcacagtaatatgctgaggacatcgtttaatgccagta

SEQ ID NO: 626975 - DNA, 646 bp, Homo sapiens
taggtgcaggtgtaggtttctttatcgtgtacaaagaaacattttttaatgaaaaagaaagattattttatgcatattgtttttgtatccttattttctcacagtaatatgctraggacatcgtttaatgccagtaaatacagatttacattatcatttttaacacatccgtaatattcattggtatggatacaccaatagtatagttaactaaattccactgacaaatatttcaattatttctaatatgttgtttttgtaaacaagactgtaacaaaaaccttgataaaaacaagctctccttgtgatagctctttgcatccttcatgcattcctccagatcaccctgcagaaagtttgcaccattctaatggacaataaatttctctgattaatagtttgattgaatatattttcaaatctttattaacttttgatctcttttccattcatgttctttgctcgtttttctttttcttatagatttttaagaacttttctacattgaaatgattaactctttcgtcatgtatgatgcaaaatattttttgcaatttgttgtttcagtgggctgtgcaaaagttttggatttatgtgtaacagaatctgtcaatatcttgcattatagttcttgtctttaagaaaa

SEQ ID NO: 626976 - DNA, 646 bp, Homo sapiens
taggtgcaggtgtaggtttctttatcgtgtacaaagaaacattttttaatgaaaaagaaagattattttatgcatattgtttttgtatccttattttctcacagtaatatgctgaggacatcgtttaatgccagtaaatacagatttacattatcatttttaacacatccgtaatattcattggtrtggatacaccaatagtatagttaactaaattccactgacaaatatttcaattatttctaatatgttgtttttgtaaacaagactgtaacaaaaaccttgataaaaacaagctctccttgtgatagctctttgcatccttcatgcattcctccagatcaccctgcagaaagtttgcaccattctaatggacaataaatttctctgattaatagtttgattgaatatattttcaaatctttattaacttttgatctcttttccattcatgttctttgctcgtttttctttttcttatagatttttaagaacttttctacattgaaatgattaactctttcgtcatgtatgatgcaaaatattttttgcaatttgttgtttcagtgggctgtgcaaaagttttggatttatgtgtaacagaatctgtcaatatcttgcattatagttcttgtctttaagaaaa

SEQ ID NO: 626977 - DNA, 615 bp, Homo sapiens
aatttctctgattaatagtttgattgaatatattttcaaatctttattaacttttgatctcttttccattcatgttctttgctcgtttttctttttcttatagatttttaagaacttttctacattgaaatgattaactctttcgtcatgtatgatgcaaaatattttttgcaatttgttgtttcagtgggctgtgcaaaagttttggatttatgtgtaacagaatctgtcaatatcttgcattatagttcttgtctttaagaaaaaaatgccttctgcccttcaagagtgtaaaaatattcacttatatgttcttctacatatctatggttttatttttcacatttaaatatcttcccgacttagaatttgccatggtgtatttccagggactttaaaccaacccttcaaatctttgacattaaatttctaacatactcttttcttgaatgaggaaaaatgaggacttctgtatctctgaagaaaaastgtaatatagaaactgaccagcatttgagcctatcattcaaagacttgcagtacttttctcagaatggcatttcttttttttttccactatttatttatttatttattttattatactttaagttt

SEQ ID NO: 626978 - DNA, 615 bp, Homo sapiens
aatttctctgattaatagtttgattgaatatattttcaaatctttattaacttttgatctcttttccattcatgttctttgctcgtttttctttttcttatagatttttaagaacttttctacattgaaatgattaactctttcgtcatgtatgatgcaaaatattttttgcaatttgttgtttcagtgggctgtgcaaaagttttggatttatgtgtaacagaatctgtcaatatcttgcattatagttcttgtctttaagaaaaaaatgccttctgcccttcaagagtgtaaaaatattcacttatatgttcttctacatatctatggttttatttttcacatttaaatatcttcccgacttagaatttgccatggtgtatttccagggactttaaaccaacccttcaaatctttgacattaaatttctaacatactcttttcttgaatgaggaaaaatgaggacttctgtatctctgaagaaaaagtgtaatatagaaactgaccagcatttgagcctatcattcaaagacttgcagtacttttctcagaatggcatttcttttttttttccactatttatttatttwtttattttattatactttaagttt

SEQ ID NO: 626979 - DNA, 558 bp, Homo sapiens
tgtaccttgcctgtgggtctgttttgaaatacacataatgactaccatctccaacttttccagcaggctaggtgtttgaggcttttctcccacaagaggatttcatcacttatttactctttcattaatgaagtaaacattgactgaggcagcatgtgcaaggcactgtcggcttttgtttctgctcattggcttttcattgagctttagcattagggccctagttaattgcttgctttattttattttatttagagatggagtctgtctctgtcacccaaactgkattgcagtggtgtaatcataggtcactgcagtctcaaattcctgggctcaagcaatcttctcaccttagcctcctgagtagctgggatctcaggcatgttccaccacttacagctaatttattttgttttattttctttttagagatagagtctcactatgttgcccaggctggtcttgaacttttgggctcaagttttcttcccacttcagcctcttaaatacttgggattgcaggtacaagccaccacacccagcttgcttgcttgaaat

SEQ ID NO: 626980 - DNA, 558 bp, Homo sapiens
tgtaccttgcctgtgggtctgttttgaaatacacataatgactaccatctccaacttttccagcaggctaggtgtttgaggcttttctcccacaagaggatttcatcacttatttactctttcattaatgaagtaaacattgactgaggcagcatgtgcaaggcactgtcggcttttgtttctgctcattggcttttcattgagctttagcattagggccctagttaattgcttgctttattttattttatttagagatggagtctgtctctgtcacccaaactgtaktgcagtggtgtaatcataggtcactgcagtctcaaattcctgggctcaagcaatcttctcaccttagcctcctgagtagctgggatctcaggcatgttccaccacttacagctaatttattttgttttattttctttttagagatagagtctcactatgttgcccaggctggtcttgaacttttgggctcaagttttcttcccacttcagcctcttaaatacttgggattgcaggtacaagccaccacacccagcttgcttgcttgaaat

SEQ ID NO: 626981 - DNA, 470 bp, Homo sapiens
tcatctcttctcccctgactcagtctcctcttctccccatcttccctcctggtcccttatggtagcccagccttatctcacctcgcagctcctcatcttgccagatacatgagcccctttgcccttctcccatgacctcccaaaaatgttactgttcttcatgcatcaagcaccctctcactcttcttctcactcttcttacagragccaaagcaatagtgtcttgagaagacactatttttgagaagaaataggcatgaaagtgtcctttcaagttaataattatggaggtcattggtgacttgtctaaaacaactgcatgggattgtacaggactgaggaactggagttgaggtagtagagaagatgactgtatataacttttttgagaagtttgtgaaaggagcttgggtagtagctaaaagtgtgtgtgaaattaaggagagtggttgtttctgtaagacaggaga

SEQ ID NO: 626982 - DNA, 488 bp, Homo sapiens
attgatgagcacaaaggcacaccttctccagagtgtgcaggaaaatgtgaacaatatatcattttatggtcatgttcaatataccatttggcactttatagcacacatgtagaatgacacatcttccaaacatgttctctcttgaaccccataggccataatcacatccatctctttctatgttgactggacccttacattytacacaccaccaccagcagggaggatggactaggggcccattagtggagtgagaagaggggtaccattcatgtaaggaatgtctgtccatcttctggcagggattaagatcaactttggagagcatggcatcaccatattgatcacaggcaagagaagatattaatcagagagctctgttggtgatgaaaaacaatgatctcaaaagctctcagaggagacaggtgacctccagaagacagcttgacaagtggcatgaagcctgcagaggaggtggaataacaccc

SEQ ID NO: 626983 - DNA, 533 bp, Homo sapiens
tatagcacacatgtagaatgacacatcttccaaacatgttctctcttgaaccccataggccataatcacatccatctctttctatgttgactggacccttacattttacacaccaccaccagcagggaggatggactaggggcccattagtggagtgagaagaggggtaccattcatgtaaggaatgtctgtccatcttctggcagggawtaagatcaactttggagagcatggcatcaccatattgatcacaggcaagagaagatattaatcagagagctctgttggtgatgaaaaacaatgatctcaaaagctctcagaggagacaggtgacctccagaagacagcttgacaagtggcatgaagcctgcagaggaggtggaataacaccctgggtgccagtagtggtaagtgggggtggaggaggcacacaggttaaataatacctgccaccacctcccccaaccattgagtgctgtagacagaaagtgggaccacggtctgatgtgcatatgtggcacaagcccaggggt

SEQ ID NO: 626984 - DNA, 488 bp, Homo sapiens
attgatgagcacaaaggcacaccttctccagagtgtgcaggaaaatgtgaacaatatatcattttatggtcatgttcaatataccatttggcactttatagcacacatgtagaatgacacatcttccaaacatgttctctcttgaaccccataggccataatcacatccatctctttctatgttgactggacccttacattttacacaccaccaccagcagggaggatggactaggggcccattagtggagtgagaagaggggtaccattcatgtaaggaatgtctgtccatcttctggcagggattaagatcaactttggagagcatggcatcaccatattgatcacaggcaagagaagatattaatcagagagctctgttggtgatgaaaamcaatgatctcaaaagctctcagaggagacaggtgacctccagaagacagcttgacaagtggcatgaagcctgcagaggaggtggaataacaccc

SEQ ID NO: 626985 - DNA, 488 bp, Homo sapiens
attgatgagcacaaaggcacaccttctccagagtgtgcaggaaaatgtgaacaatatatcattttatggtcatgttcaatataccatttggcactttatagcacacatgtagaatgacacatcttccaaacatgttctctcttgaaccccataggccataatcacatccatctctttctatgttgactggacccttacattttacacaccaccaccagcagggaggatggactaggggcccattagtggagtgagaagaggggtaccattcatgtaaggaatgtctgtccatcttctggcagggattaagatcaactttggagagcatggcatcaccatattgatcacaggcaagagaagatattaatcagagagctctgttggtgatgaaaaacaatgatctcaaaagctctcagaggagacaggtracctccagaagacagcttgacaagtggcatgaagcctgcagaggaggtggaataacaccc

SEQ ID NO: 626986 - DNA, 533 bp, Homo sapiens
tatagcacacatgtagaatgacacatcttccaaacatgttctctcttgaaccccataggccataatcacatccatctctttctatgttgactggacccttacattttacacaccaccaccagcagggaggatggactaggggcccattagtggagtgagaagaggggtaccattcatgtaaggaatgtctgtccatcttctggcagggattaagatcaactttggagagcatggcatcaccatattgatcacaggcaagagaagatattaatcagagagctctgttggtgatgaaaaacaatgatctcaaaagctctcagaggagacaggtgaccyccagaagacagcttgacaagtggcatgaagcctgcagaggaggtggaataacaccctgggtgccagtagtggtaagtgggggtggaggaggcacacaggttaaataatacctgccaccacctcccccaaccattgagtgctgtagacagaaagtgggaccacggtctgatgtgcatatgtggcacaagcccaggggt

SEQ ID NO: 626987 - DNA, 611 bp, Homo sapiens
gcaccagtcaacagaggtatcttctcaccgggcctaccacctggaaccatggcgcagccattaagtcttgggacaaccctataggtgtagakgtccagagctccttgtggcatctgatcaaccccacatgtgggatatagggtctgagagttctgtggaagggaagacgtggggatggaggtccatgagggtcttggttcaggctcaaggtgctctgcctggccagcactgctgtccttgagtagtccaaggcatgggacaagggggactcagaaaatgttttgagggctctccaaagcatggtgcttcttgaaacatgaggccagagcagggttcctcttgccgcagactaagaacagtactggatgaagtgatggaccatgtggggtctaagctggggagggagggaagggaagacaggaggataccaatggataggaaaactgaaggatcattgctttaaagtactgatatagttgaataactgataaactgagaataaatacattagcaagctggaagttgaggaggtcaggtagtacataagccatatgaatttgtgatttcaaaagtacagcaggtataagtgataacttccagagtcaccatgg

SEQ ID NO: 626988 - DNA, 611 bp, Homo sapiens
gcaccagtcaacagaggtatcttctcaccgggcctaccacctggaaccatggcgcagccattaagtcttgggacaaccctataggtgtagaggtccagagctccttgtggcatctgatcaaccccacatgtgggatatagggtctgagagttctgtggaagggaagacgtggggatggaggtccatgagggtcttggttcaggctcaaggtgctctgcctggccagcactgctgtccttgagtagtccaaggcatgggacaagggggactcagaaaatgttttgagggctctccaaagcatggtgcttcttgaaacatgaggccagagcagggttcytcttgccgcagactaagaacagtactggatgaagtgatggaccatgtggggtctaagctggggagggagggaagggaagacaggaggataccaatggataggaaaactgaaggatcattgctttaaagtactgatatagttgaataactgataaactgagaataaatacattagcaagctggaagttgaggaggtcaggtagtacataagccatatgaatttgtgatttcaaaagtacagcaggtataagtgataacttccagagtcaccatgg

SEQ ID NO: 626989 - DNA, 611 bp, Homo sapiens
gcaccagtcaacagaggtatcttctcaccgggcctaccacctggaaccatggcgcagccattaagtcttgggacaaccctataggtgtagaggtccagagctccttgtggcatctgatcaaccccacatgtgggatatagggtctgagagttctgtggaagggaagacgtggggatggaggtccatgagggtcttggttcaggctcaaggtgctctgcctggccagcactgctgtccttgagtagtccaaggcatgggacaagggggactcagaaaatgttttgagggctctccaaagcatggtgcttcttgaaacatgaggccagagcagggttcctcttgccgcagactaagaacagtactggatgaagtgatggaccatgtggggtctaagctggggagggagggaagggaagacaggaggataccaatggataggaaaactgaaggatcattgctttaaagtactgatatagttgaataactgataaactgagaataaatacattagcaagctggaagttgaggagrtcaggtagtacataagccatatgaatttgtgatttcaaaagtacagcaggtataagtgataacttccagagtcaccatgg

SEQ ID NO: 626990 - DNA, 533 bp, Homo sapiens
ttgggttggatgctggaggccagtgaggggaccaaaatatttgaccaagcaacctagagtagattcagactatggcatctgccggatgtggtgggcccataaatcagttcttgcattgagatctgctcttcagctgtgtgtccctggctctagattacccctaactttcatttctcactgatactttcatttgcaagaatcctgattcttggagcttcctctcatatatagacccayggagagaaagattcttctctgattaaccaaaacttttcatagtgaacatgcagatgagcactttgtcgtggtcccactgactaagggaaccactattctatagtagtaaccaagctaaaaccaagaggtttctctctgtgtctctctttttctctctctttctgtatgtatgtgtgtgtatgtgtgtgtgtgtgtgtaattagcttgcttttctgtcagactcatcatagctggcattatgggccccgccatgcagcctccaaggtaggtttctgaatggtccccaagcagactgt

SEQ ID NO: 626991 - DNA, 486 bp, Homo sapiens
attcttatacatactaaagttggtgaactacttctataaaccacttactctccagttctctgtcaccaacatttaagtctgtgctactctaatctcttgcctgggttgtcagactaaccactaaaatgttttgcctactactaaaattggaaagccactggtctaaagagcaagtgaatagttcaggaacaatctaaagaaaactctcaagggaaagttgaactctagtttgaaagaaaatgataagtatgatgactatccaataccttggaagaagagtgaggaaatggccaagaccctaaagaaaggagtgtttgaaagccacttttttagagaggggagaygggatattagtgactgaaagtcattggcaatatcaaatgttgatagcctgataattatgctgtgaaatctggccagatcagcagaagggaactctggagaaggagccaacttctgagaggtagattgggcttgagaaattgc

SEQ ID NO: 626992 - DNA, 579 bp, Homo sapiens
actggggcatggtgaagttattctcggagaggattgaacagagggtctccagactggggacaccaggaaaagtggaggacagtagcctctccacaaaacaagggattgtgtgaatgcatgtaacccaaatgttgaaagcagagaaccctgtcacctttgaccctcttggctcccagaacactggcacctgaatattttccctccaggcaggagactggaaaaattagaytggttgcagcatcacatgcacaaaagggaaaagaggtggataaatctgtagactgagctcaggagtgtggcccttatggttcatgcagtcagtgggcactaaagggttttttcaacagactgtgatgtaatgagaggaagagataagggatgtggacactcaagatttttatatttaaatacatttgtaattgtggtaaaatacacataagataaaatagctatcttaaccatctttaagtgttaaccaccatccctctgcagaacttgttcatcttcccaaactgaaactctatacccagcaacgactaactccccactccccctccaccagcccctgacacccaccat

SEQ ID NO: 626993 - DNA, 591 bp, Homo sapiens
tgctggaattataggtgtgagccaccgagatggaacgtgagtcactatttttaaaaatccataacaaatccacaaagctgtaagctctgtgaggtagaaaccatgtcttatgcatctagaatactgcatggtataaaagggaactccataaatgtctatcagagaataaagcttggtttatatatttggrtttgcaattcatgatggtatttttaccatagtattaaaatactattgatactttatgcatgttcatgtcaagtttgtatagtgcaccatgtggagatggtctcagagagggggctatcctaccttctgagcagggctgggaaagcaccagggcagttgttatcaccactgtgtctgcagcctcttctttgtactctcatcgcatcctgtgcttctctgtttagaactctcatcatgtttcacagttgctttttcactgtctgccttttcaaattgtgagccccatgagagcaggtatttttgtctgtcctggtcactgctgtatccccaacacctagtttagtgcctggcatatagtaggcacttgataaatatttgttgattgatggaatgaagacaata

SEQ ID NO: 626994 - DNA, 591 bp, Homo sapiens
tgctggaattataggtgtgagccaccgagatggaacgtgagtcactatttttaaaaatccataacaaatccacaaagctgtaagctctgtgaggtagaaaccatgtcttatgcatctagaatactgcatggtataaaagggaactccataaatgtctatcagagaataaagcttggtttatatatttgggtttgcaattcatgatggtatttttaccatagtattaaaatactattgatactttatgcatgttcatgtcaagtttgtatagtgcaccatgtggagatggtctcagagagggggctatcctaccttctgagcagggctgggaaagcaccagggcagttgttatcaccactgtgtctgcagcctcttctttgtactctcatcgcatcctgtgcttctctgtttagaactctcatcrtgtttcacagttgctttttcactgtctgccttttcaaattgtgagccccatgagagcaggtatttttgtctgtcctggtcactgctgtatccccaacacctagtttagtgcctggcatatagtaggcacttgataaatatttgttgattgatggaatgaagacaata

SEQ ID NO: 626995 - DNA, 395 bp, Homo sapiens
ataaattgaagtatattcataaaataatactatagcagcagtaaaagtaaatgagttatagtgtatatgtatcaacacgaaaaattacaagaacacagtattgagtgaagaaagcacattgtgggaggctgaagtgtgctgtcatttatgtaaagtttaaatgcatacaaaacaattatatgtatatgtatatatatacacatatatagttacatatgtatatatagttrtatatgtatatattatatatatattatatatatagtttcagaatgtgtaaacctgtaataaaattagagaaacatacatgggaatgataaaaaagacaagtttaagatagcggttagctctaggaagacaggaattgaagtaaggagggaattgcatcaattgga

SEQ ID NO: 626996 - DNA, 538 bp, Homo sapiens
tcccctcctttgctccccttcctttggcttcctcctcctcttctctgcaatgcttggccctattggccacttaagccactaatgcactcatatacttctgaagttcagtattagagatcattttcctcagcagcccgattcttttgtcttttatcattttaagtcctttcaataagctctttctttgcacctggacttacatactctttattgtataagcgtcatcygttggattcaaagtctctaagagagcaagggttggggcatctttctggtgcccttctttttggggaaatcctatttcctcttttggtcaacttaagatagtaactgagtaattgggtctgtgaggcatttcccagaatatttccactatgttcctagctaattctatggaattaccttcaagttcatcaattcccaactctttttttaaaaccaggatttcctttgccatttcatttcctaatctttcatggttttgcttttctatgtcttcttccttcttctccacttggtcacctacttactgagagtt

SEQ ID NO: 626997 - DNA, 495 bp, Homo sapiens
aaaagaatcgaggtgggagttgcactcacatattgctgaagggagtggctttggggtttatttgtcatttaactaggtctgttcctatgcaagacaaatcaatgtggagccacacttagtcatcattgatcaagttccatgatcaattcagatttgttctcttgagagtttttaaataagtttagctaaaagggaacttgctgcctgtctgcattagcttttgcagaaaaatatttstgtatttctctatgacatggagttgatatatgacaataaccagagacttgcttattttgaaatcagaaaccctagaggctggcttttaatttcaacacctttgttatggaaaattcatttaaaaggaaacttccttggccatgtcaaacttttcatcacctctgggagaagacttttttccctcactgagcacattgtggggagcagggggcaatacatcacaaacctgaggcttgtggggagtggggccaatacatc

SEQ ID NO: 626998 - DNA, 559 bp, Homo sapiens
ctaacaagtatacacacacacacacacaagttgcaagaaaacaaatgaagatgatagatgagtcaggccaaatccagtccttaacttaaaagtgattatcatctcagcatcttcccactccatctttgcccctgttccctagctgaagtgtcatttaactggggggaaattcttgtgcaaataacttgatgctttctcggagcacacaggtttggcagaataaaaaagtaagaggagtatccagtgggtggatggaggactggattgacctgcctactttgtagctccaacttcaaggtgaatgttttcaattcaattgctttccttctaacacttagttgccttataaactgacccttcacccccaacaaccwttttgttttctttgttactgaagtgggttagggaacacacctaaaaaaatgctggagtgaaagcattagtatagcctgaggagactgaagatcaggaaatagggaggagggaaaagacccagtcaattgtaacactgaaagaaaaaacacaaaattcatctccaaaatccccctgtagcaccaag

SEQ ID NO: 626999 - DNA, 592 bp, Homo sapiens
acctgcctactttgtagctccaacttcaaggtgaatgttttcaattcaattgctttccttctaacacttagttgccttataaactgacccttcacccccaacaacctttttgttttctttgttactgaagtgggttagggaacacacctaaaaaaatgctggagtgaaagcattagtatagcctgaggagactgaagatcaggaaatagggaggagggaaaagacccagtcaattgtaacactgaaagaaaaaacacaaaattcatctccaaaatccccctgtagcaccaagcacagtgccaggcacagtkgtttgtttaggaaatggtagttgaattgaagtgactttttccattaccaactttgggtaaatctctcctttgcctaccactccataaaaggaaatttctgcttgaagactctagaactccctttggtgccctcagacctggtattttcctccattgtgccttacctacctttggaggactagtgcagtcatacataactgagtgcaatgtttctatggaaaaatgtcctcagagttccaaaagtaggatgtacaaataagcttttggtgcacagcctgttc

SEQ ID NO: 627000 - DNA, 472 bp, Homo sapiens
taagcttttggtgcacagcctgttcatcagtaaactggggatgacttatgttcttccaacactttaattaggagaaacagtggtccgattttcattgtctgcctcattaagctgcagacaattaaaagcaaggcacttattacctcagaatgtgataagagcaaaactataaatgggttttgactactgcattcatgacaaagaaataatggataatgcttcctgagtctcaggcactgttctggatgctttacctagattaacttatgtgatcttcgtaacaaccccataagggagctactattagtatcctaattttaaagattaggtacagtggcacatagaggctaagcaacttgcttaaaaacatagctaccaggyggccaagctggaattcaaatccaggcagcctggttccaacttggcattattgtgcctccattgtctacctctaagtctttgctcatagtac

SEQ ID NO: 627001 - DNA, 472 bp, Homo sapiens
taagcttttggtgcacagcctgttcatcagtaaactggggatgacttatgttcttccaacactttaattaggagaaacagtggtccgattttcattgtctgcctcattaagctgcagacaattaaaagcaaggcacttattacctcagaatgtgataagagcaaaactataaatgggttttgactactgcattcatgacaaagaaataatggataatgcttcctgagtctcaggcactgttctggatgctttacctagattaacttatgtgatcttcgtaacaaccccataagggagctactattagtatcctaattttaaagattaggtacagtggcacatagaggctaagcaacttgcttaaaaacatagctaccaggtggccaagctggaattcaaatccaggcagcctggttccaacttggcattaytgtgcctccattgtctacctctaagtctttgctcatagtac

SEQ ID NO: 627002 - DNA, 586 bp, Homo sapiens
ctcactgtctacaagcagtgtcctggacatggcaggtgcctcttctctcatggagtcagtctgtgcccatgtatgcagccctgttgattggaaggtctttctggggttgggttagaaatctgccttcctcatgtctgtgagcccttgttctgcccaccacctgctgcacccaaaggtcacaccactgcaagtctatcttcttctttcagttattttggcagtttggttctgatcaactcttcagttatccacttgagaatatgatgcaaatgattgaaataactgtacttcgtcatcacacccaccaaattggattaccctttcagctatttgatggattacttagcaaatagmcccaagggggctgaaatgattgattcctatttgccatgtatagatattgtcaaggggagagtgcctctttgttaaatgcttaaatggaagaataacacctatccactcatggtgagggactgtagccaccaatctcttgtgctccatagatcttggtgtgagcgttctccccttcatattacacaaggtgttctgggaacaagtacttttttcctctctatctttctctgga

SEQ ID NO: 627003 - DNA, 562 bp, Homo sapiens
tcttcagttatccacttgagaatatgatgcaaatgattgaaataactgtacttcgtcatcacacccaccaaattggattaccctttcagctatttgatggattacttagcaaatagacccaagggggctgaaatgattgattcctatttgccatgtatagatattgtcaaggggagagtgcctctttgttaaatgcttaaatggaagaataacayctatccactcatggtgagggactgtagccaccaatctcttgtgctccatagatcttggtgtgagcgttctccccttcatattacacaaggtgttctgggaacaagtacttttttcctctctatctttctctggagttttccatgactcttcctggcctgaacttcaggtatatgagacaggagctataaaaaaaaatgttcaattttaaactttgaacaaaagttgtaggaacaggacatctggacagtttataaatggactcaacattagagttatcttaacaaaggttctaattccattgattccattttatttgctgctctattttgggtccaatgccaaggat

SEQ ID NO: 627004 - DNA, 562 bp, Homo sapiens
tcttcagttatccacttgagaatatgatgcaaatgattgaaataactgtacttcgtcatcacacccaccaaattggattaccctttcagctatttgatggattacttagcaaatagacccaagggggctgaaatgattgattcctatttgccatgtatagatattgtcaaggggagagtgcctctttgttaaatgcttaaatggaagaataacacctatccactcatggtgagggactgtagccaccaatctcttgtgctccatagatcttggtgtgagcgttctccccttcatattacacaagrtgttctgggaacaagtacttttttcctctctatctttctctggagttttccatgactcttcctggcctgaacttcaggtatatgagacaggagctataaaaaaaaatgttcaattttaaactttgaacaaaagttgtaggaacaggacatctggacagtttataaatggactcaacattagagttatcttaacaaaggttctaattccattgattccattttatttgctgctctattttgggtccaatgccaaggat

SEQ ID NO: 627005 - DNA, 562 bp, Homo sapiens
tcttcagttatccacttgagaatatgatgcaaatgattgaaataactgtacttcgtcatcacacccaccaaattggattaccctttcagctatttgatggattacttagcaaatagacccaagggggctgaaatgattgattcctatttgccatgtatagatattgtcaaggggagagtgcctctttgttaaatgcttaaatggaagaataacacctatccactcatggtgagggactgtagccaccaatctcttgtgctccatagatcttggtgtgagcgttctccccttcatattacacaaggtgttctgggaacaagtacttttttcctctctatctttctmtggagttttccatgactcttcctggcctgaacttcaggtatatgagacaggagctataaaaaaaaatgttcaattttaaactttgaacaaaagttgtaggaacaggacatctggacagtttataaatggactcaacattagagttatcttaacaaaggttctaattccattgattccattttatttgctgctctattttgggtccaatgccaaggat

SEQ ID NO: 627006 - DNA, 563 bp, Homo sapiens
tggctaaaaggggacaaggtacagcttgggttgttgcttcagaaggctcaagccccaagccttggcagctttcacatggtgttgggcctacagatgtgcagaaggcaagagttaaggcttggaagcctccacctagatttcagaggatggatggaaatrtatggatgtccaagcagaagtctgcagcaggggtggagccctcgtggataacctctactagggcagtgcagaggggaaatgtagggttggaactcccacacagagaccttactgggacactgcctagtggagctgtgggaagaggaccaccatcctccagatcccagaatggtagatccactgtcacctttcactgtgagcctagaaaagcctcaggcactcaatgccagcccatgaaagcaaccatgggagctgtaccccacagagccacaggggcagagctgcacaagaccttgggagcctacctcttgcatcaacataccctggatgtgagacatggagtcaagggagattattttggacctttaagacttaatgactgccctactgggttttggacttgc

SEQ ID NO: 627007 - DNA, 563 bp, Homo sapiens
tggctaaaaggggacaaggtacagcttgggttgttgcttcagaaggctcaagccccaagccttggcagctttcacatggtgttgggcctacagatgtgcagaaggcaagagttaaggcttggaagcctccacctagatttcagaggatggatggaaatatatggatgtccaagcagaagtctgcagcaggggtggagccctcgtggataacctctactagggcagtgcagaggggaaatgtagggttggaactcccacacagagaccttactgggacactgcctagtggagctgtgggaagaggaccaccatcctccagatcccagaatggtagatccactgtcacctttcactgtgagcctagaaaagcctcaggcactcaatgccagcccatgaaagcarccatgggagctgtaccccacagagccacaggggcagagctgcacaagaccttgggagcctacctcttgcatcaacataccctggatgtgagacatggagtcaagggagattattttggacctttaagacttaatgactgccctactgggttttggacttgc

SEQ ID NO: 627008 - DNA, 563 bp, Homo sapiens
tggctaaaaggggacaaggtacagcttgggttgttgcttcagaaggctcaagccccaagccttggcagctttcacatggtgttgggcctacagatgtgcagaaggcaagagttaaggcttggaagcctccacctagatttcagaggatggatggaaatatatggatgtccaagcagaagtctgcagcaggggtggagccctcgtggataacctctactagggcagtgcagaggggaaatgtagggttggaactcccacacagagaccttactgggacactgcctagtggagctgtgggaagaggaccaccatcctccagatcccagaatggtagatccactgtcacctttcactgtgagcctagaaaagcctcaggcactcaatgccagcccatgaaagcaaccatgggagctgtaccccrcagagccacaggggcagagctgcacaagaccttgggagcctacctcttgcatcaacataccctggatgtgagacatggagtcaagggagattattttggacctttaagacttaatgactgccctactgggttttggacttgc

SEQ ID NO: 627009 - DNA, 595 bp, Homo sapiens
ggttctttatagcagtgtgagaacagactaatgtactaagcaataagaaagatgtccaggcccaaatgccccaacctgacacctagctggctcttaaagagggtagctactgtgaagagggagaaaaaggccttggcatctgcagaccctctttctttatgatcctttaaatataaaggatgtgtttatgtctgtcttcctragtaggaagttttattctttaaactaaatttgacctactggcatgtgacaagaatcactgacttgtcattactggcatgtgacaagaatcactgacttgtcatctaactgacatctgaagttcctaacatcctaagggatggggacaagtaggaggaagctacagaaaaacatatatgtctgagtttttgttttaaatgtgtgaggtaaaagcaaattgtttctgttctgcttaaactgttatttgaaagtatgttgcctaggcatttgctaagctctctcaaattcacatcttctcttattctctcattctctgcctccagtggtttctatttagaggtggatcaacccattagcagtcttggactctgctccttttctgcttctcagaaac

SEQ ID NO: 627010 - DNA, 526 bp, Homo sapiens
gggggggaataatcactggaggcttttattcagctgtttttctccacctcccttgttaattgatgtcttaaaccattcacatttaagtgattattgatataattggattartatccaccatatttgtaatcgttttctattcattgctttgttctttgtttctcaggggttttttttgccagttttttgtttttttgtttgtattagtccattctcacgctgctataaagatactacctgtggctgggttataaaggaaaaaggtttaattgacttacagttctgcatggctagggaggcctcaggaaacttacaattatggcagaaggtgaaggagaagcaggcaccttcttcatagggcagcaggagagacagagagtgcaggggaaaatgccacttttaaaagcatcagctctcacaagaactcccatgatctaatcaccccccaccaggtccctccatcaacacgtgtggtttacaattcgagatgagatttgggtggggatacagaaccaaagcatatcat

SEQ ID NO: 627011 - DNA, 617 bp, Homo sapiens
tatccatcacctcaagcatttatcctttctatgcattacaaacaaactagttatactcttttagttatttttaaatgtatacattattcttgacaataatcacccagttgtgctataaaatactagatcttattgattttatytaactatatttttgtacacatgaaccatccccccacctgacccccactatccttcccagactctggtaatcatcgttttactctctattaccgtgagttcaattgttttaatttttagctaccacaaataagtgagaacatatgaagtttgtctttctgtgcctagcttatttcacttaacataatgacctctggttccatccatgttgttgcaaatgacaggatctcatgctttttatggctgaatagtactccattgtgtctatgtatcacattttcttcatccatctatctgttgatgtacacttaggttgcttccaaatcttggctattgtgaatagtgctgtgataaacatgggagtgatacctgaatagacatttatcaaaagaggacatagaaatggcaaacaggtatgtgaaaaggtgctcaacatcactgatcatcagataaatgcaaatcaatactacaaggag

SEQ ID NO: 627012 - DNA, 617 bp, Homo sapiens
tatccatcacctcaagcatttatcctttctatgcattacaaacaaactagttatactcttttagttatttttaaatgtatacattattcttgacaataatcacccagttgtgctataaaatactagatcttattgattttatctaactatatttttgtacacatgaaccatccccccacctgacccccactatccttcccagactctggtaatcatcgttttactctctattaccgtgagttcaattgttttaatttttagctaccacaaataagtgagaacatatgaagtttgtctttctgtgcctagcttatttcacttaacataatgacctctggttccatccatgttgttgcaaatgacaggatctcatgctttttatggctgaatagtactccattgtgtctatgtatcacattttcttcatccatctatctgttgatgtacacttaggttgcttccaaatcttggctattgtgaatagtgctgtgataaacatgggagtgatacctgaatagacatttatcaaaagaggacatasaaatggcaaacaggtatgtgaaaaggtgctcaacatcactgatcatcagataaatgcaaatcaatactacaaggag

SEQ ID NO: 627013 - DNA, 646 bp, Homo sapiens
gcatcaatgaaaggaaagaaaaaaagaaatacttgcacaaatatggaaataagtagataagataatatttaacagagttctgttcaggacgacggaaagaaaaaaactacatgtacaacacgggaatggctaaattaattctggttcatgcacaaaataaaatactatgcagttattaaaataaccaaatgtatgcaactgtatatatttttaaacaaaaccgatttatatacacacatacatatatttacatgaaaataggaaaacataacattacaaactgcaacattatgctgtgtgattgcaattcaatatgtatatgagtacatgcatgttgataggaccttatacatcatagggaaccaaaaaacctctggaggcatatataacaaaatttaactatagttttggtggcaggatgaatagtgattttttttcttcttttgcttacctgtatcttaggatgtttttataatcgacaagtaaacgtgcaatactgtagaaaattatttcaaaacctaaaaaagmtgtttttgagtttctggcttgatgaatttcgtgaagataatggcactatgtattgtaggggatatacaaaacttgtttggaatcagttaacaagtccaacattacatgaatatgacat

SEQ ID NO: 627014 - DNA, 518 bp, Homo sapiens
ctttaccggctctcattctctctcctgcctccccctgtgaagaggtgacttagccatgatggtaaatttcctgagggatttccagccatgcagaactgtgagtcaattaaagctcttttctttatcaattacccagtcttcggcagttctttatagaagcgtgaaaatggactaatacaggctgccataacaaaataatcacaaattaaataacagaaatgtattttctcatagttctgcagtgtagaatttcaccattaatttgtcagcagtgttgaatttttctgagggctgagagagaatgaatgatctgctgtaagcctctctcctaacttctgaggtcttgctagcaatctttcatagtccttgactagtagacacatcacccccwtctctgcctttatcatcacagggcattcttcctgttcacgtctgcattcaaatttctcctttttataaggacatcagaaatataggattaggggcctaatctactctcatatgacctcatcatatat

SEQ ID NO: 627015 - DNA, 648 bp, Homo sapiens
agttccattattatgcccatttgacagatgaggacattaaggcacagagagattgagtccttgtccaagttcctgcagctggtaagatgcagctttctaatttgaacccaggtgatgtggctctgaagtttagcccattgaccacttctctgcactggacttgaaatgttgccttcattatattttctcacctctgccacttggtgtcacttcctttgacctcagtagttcgagttctcacacttctccagaatttagtgctgccttgagygctgtaagttcagatgatgggctgatggtgtcttgatgaggtccagatgtggtccctgagccactggacatcaggcaggaacatctcatggtcacgtatttgtacatggttatggctaccaggaaggccagaagggaagacaggaggggagtgaggtcctgcttcctgagaatgtaagacaaatagtgacataccattctatgaacttgaaatcatgccactccactcaccattcaggcctgagagcagttagtcctgatgtccccaggtgttaaatcatgtgacctgtgaaagtgtgtcaagctacctacttgtattttatgaagcccccctataagtgctgtttttattgttttaaataaacgaatttgtcaaat

SEQ ID NO: 627016 - DNA, 629 bp, Homo sapiens
gccctgactaatatgatgttcttttgatgaaaatccatctttgtaataaaattacaggactcttttctcaagctatgtccataactactttttcacaagtggaactactgagaaatgtacgcagaaaaaaagtcatggtcaaataatcgcgataaatatttgaaaaaaagtaacactggcttcttttttwttgatacaaaagattttacatatttatggggtacacgtgagtatttgttacatgcatgggatgtataaagatcaggtcagaatatctgggttatccatcaccttatgtatttatcatttccatgtgttggtaacatttcaggtctcctcttctagttactttaaaatatacaatacattggtgctaaccatagtcaccttactctgccattgaatattcgggcttatttcttgtacctctctgtaagtttgtacccattaacagcctctctttatcccctctccaatcaacaagcccttctcaacctgtggtatctatcattgtattctctaccatcatgatatcagttttaattcagctctcacatctggatgagagtatgcagcatctgtctttctgttcctggcttattttacttaacataataacttccagttcc

SEQ ID NO: 627017 - DNA, 537 bp, Homo sapiens
ctgctttcccctcgccttctgccatgattgtaagttccctgaggcctccctagaagcagatgctgccattcttcctttacagcctgtggaacagtgtgccaattaaacttcttttttttacaaattacccagtctcagatatttctttatagcagtgtgagaactgactaatgcactactagacctaagaaatattgagatagcaacataacaagagtgggagacttcaatacacygctgatagcactagacaggtcatcaaaacataaagtcaacaaagaaacaatggacttaaatactctagaacaaatgtacttaacatatatttatagaacattctacccaacaacagaagaatgtacatttctctcatcagcaagtggaacattctccaagatagaccatataataggccacaaaaaaagtctcactaaattttaaaaaattgaaatcttatcaagtatctttgcaggccacagtggaaaaaactagaaatcaactccaaaaagaaccctcaaaactatacgaatgcatgga

SEQ ID NO: 627018 - DNA, 540 bp, Homo sapiens
acagaaatatgaaagatcacttgagactatgatgaacaactttatgctcacaaagtagaaaacctagaggaaatggataacttcctggaaacatacaatcctagattaaatcaggaagaaatagaaaccctgaacagaccaataacaagcagtgaaattgaatcagcaataaaaataaattgacaacaacaaaaggcccaggggcagatagatgaattcacaagtgaattttaccagacattcaaagaagaattggtaccaattctactgaaactattccaaaagattgagaaagagggaatcctccctaggtcattcgacgaagttggtatcatcctgatactaaaaccagggaaggacataacaaaaaaaaagaaaactacagaccagtatccctgataaacatcgacgcaaaaattctcaacaaaatactagcaaaccagatccaaargcataatcaaaaaaataataaatcatgatcaagtgggtttcatcccagggatgtatgaatggtttatcatacacaagtcaataaacatg

SEQ ID NO: 627019 - DNA, 537 bp, Homo sapiens
gccaacaaacatgaagtgatgctttacatcactaagcatcaggaaaatgcaaattagtaccacartgaaataccaccttactccttcaggaatggccattattaaaacgtcgaaaaccaatatatgttggcatgggtgtggtgaaaggggaatgcttatggcttatgcactgctgatgactggcatgtagattagtacagcctctagagaaaacagtatggagatagctcaggcaactaaaagtagatccgccattcaatccatcagtcccactgctggttatctacccaaaggaaaagaaatctttatatgagaaagacacatacacacatatgtttatagcagcacaactcacagttgcaaagatatggaaccaatctaagagcccatcaaccagtgagtagataaggaaaatatagtatatatgcaccatagaaaactactcagccatgaaaaggaacacaataatgtcttttgcagcaacctggatggagctgggggccattgctctaagtgaagtaactcaggaatgaaaaa

SEQ ID NO: 627020 - DNA, 489 bp, Homo sapiens
caatataataaactttacttctccaaccatcactagatcccaaggcattttatactatactatggttgatgaaagccagttcacagaataattgatttttaaaaagcagaacctattttagaaatattaaaaaagccaaccatttcactttacagattagaaaattgaggctgaagaggtgaagagagtttcgarcctaggacaaaacttgtctgcatagtggtcattgcacaataatgcctatttaactggtcaaatatcagagataattgatgcttttatttgaaaggttattaaagtcaaaatgaatcagcataatattttaatattaaaatattccagatgactctgagctgtgaaatttcttctgcagcattcccgattaggtgtcaggaagtttctgttaatgagtgggaagttaggctagaagtttctgtaaagtaaaatatgttatctgtgagtgtggacaagagtttgccaagccagaaa

SEQ ID NO: 627021 - DNA, 546 bp, Homo sapiens
catggtgctggtacaggaacaaatacatataccaagggaattgaatagaaaacccataaataaggccgcacctacaactatctgatcttcaacaaacttgacaaaaacaagcaatggggaaaggaatccctatttaatacctagtgctgggagtgctggctaactatatgcagtaaattaaaactgtaccccttccttacaccatatacataaattaactcaacatggattaaagagttatatgcaaagccccaagctataaaaaccctataagaaaatctaggcaataccattcaggtcataggcacrggcaaagatttcatgactcaaataccaaaagcaatggcaacaaaagcaaaaatttctacccctatatctttttttaattcctctttaaggccaataacttttagatttgcccatttgaggccattttctggatcctataggcatgtttcattgtttttcactcttctttcttttgtctcctctgaatgtttattttcaaataggctgtcttcaagctcacttattcattcttctgct

SEQ ID NO: 627022 - DNA, 656 bp, Homo sapiens
tatttcacaatttgttgaaacctgttttgtgtcttaaagtatggtctattctggagaatattttatcttctactaaaagaatgtgtattttgcggtggttgggtaamatgttctaaaaatgttagttaaagctatttgttgtagcgtgcagtttaactctgatgtttctttgttgattttctgtctagatgatctgtctattactgagattggagcattgaaatctactattatattattgtcatctatgtctttctttggatctattaatgtttgttttatatacttaggtgctccagtgttgggtgaatatttataatttgtatatcctcttgctgaattgatccttttatcatatagtaatggtttctgtcttttttgtttttacaggctttgactagtattctcttttatcagatataactctttttgctcttttctggcttccacttgcatgaactatatttttccttcactttcagtctatgcatatatttgtagttgaggtgggtaccttgtaggtggcatatagttgggtcatgtttctttatccatttggccactctcagtcagagaatggagcctatttacattcagtgttaatattgatttttaaaaagggcttactactggtattttgttgcttgttttctgtt

SEQ ID NO: 627023 - DNA, 396 bp, Homo sapiens
acaaggaccaattctagatctaacaatctgtaaatgcatttttaaattttttgagcattattaaagtctccagctactgtgtacatgtattagataggaatattcttttttggcttggggcttatttaattttattcttctgtacttaatacatcatatatacactttgcaaaattgttttgtactaaatgggtgggttttgccacagctttaaagaaaccattagtgatagcagatgtgaattctacaracccttgttgtggttactcttagttttgaacaaggcttaagaggtatgttgtcagccacaaaaatcatagcacttgagtttaactgtgcgctttcatgtgtaacacctgttcccagtatcctcctgactaaacagaatattgttaa

SEQ ID NO: 627024 - DNA, 533 bp, Homo sapiens
attacttccccttctctcctctagccacatagttccattaagggctgataaaagtgttccttctgtgctagaatggtttatatttttgcaactgacactgagacttcagtatttgttacataacatttctatgcatacatatatttattctctctttaaccagatcatcagttccctaggggaaagggccatgtcttatacacgtatgtattctcaacagtacctagtatagtacaggttttgtaaatatgtgttgatttgatttagagctatttatacaattatttccctactccattatatctatatggaactattcacatattatggcaataagagaagtaaaaatgttaaggtaaaatattactatattgccarataaaaagtcacactgctccctaacctttgtgtcaaaatagatcttgctggtttcctgttgtaatacccacaacaacatatgttccaagcagcagttggaatctatcaagaagactgaaactgacacaaatagctattccataagtataaaatgc

SEQ ID NO: 627025 - DNA, 614 bp, Homo sapiens
cagtccaacacatgagtttatacaacttgctcatcagaactaattcttttctccttaatctcttgccttatattaacagtatgacacactcaatgatctgggtagcaacttattttaattacttacttgcatacacaaccatgttgtttcaagagaggagatggaaaaagcaaatatttcattttgaattactggcgttttgtaaagttttaggaattttgataaattccccattcccatcttattttgctgaagaaattagctgaaagaaaggggctacaggccagacataagtctgaaacccagcagggcagtaattaaaccttaaacctccaaaataattcttggctccatgttcttcatccagggcagtggtacaaagtgtgtgttttcagggccttaggcatcgccacccctgtggatttgcagggtgcatccctcatggctgctttgatgggctggagttgagtgcctacagcttttccagactgagggtgcatgctgycactgactctactatttttggatctggaggacagtaacccctcttccactgctccattaggcagtgccccagtggtgactccgtgtgggggccccaagcccacatttcc

SEQ ID NO: 627026 - DNA, 659 bp, Homo sapiens
cataggctttcttcatttttttattatttattttttaatcttactggattatttggaaaaaaacctgtgtttcaggttctgaaattgtttcttctacttgatctagtctatagttgaagttctcaattttattatttattttattcattgaatacttcagttttaggatttttgtgtgtttcttgtttaggatttgtatctctttgataaatttctcattagtatcctgattggttttctgatttttttgtattatttatctttgttctctcatatctccctgagcttctttgatatcattattttgaatacgttttttaggcttttcacaaatttctttttcattggaacttgttgctgggaaaatattgtgttcctttggatgtgttgtatttccttgcttgttcttgttttttgtgaccttacattgatatttgtatatctggtataacagtcacttttaatgttttggattggcttttgtaggagaaagatttttataaagatgtatctatggtttgggttgcatagggcactttatttytgatttttggtgtatgcagcagggcagtctctgtataatttatttcattgttaagaacaacggtgggtatctgtggttttctcagtggcttaggctgctgttgttagtggaggct

SEQ ID NO: 627027 - DNA, 529 bp, Homo sapiens
agaccctagaagtttcttctgcataaaatggggtctcctgaaaaagtataggcaactggtagtgaaatggagactaaggtcttttgcaaatgttacattctttctttactatcactttwtaatggaatgtaagaattttgtcttaaagtttaagctaagaatggcatgtatcaactaacctgttttcagtacttcagtctagtgttctttgtttattgttgagatgtagtatacttattggcaagcaaaaggaacagccaaatatagagcatatattacttaggcagtgcattttctcatcaacattttatatctttctttggatcattgataagttcttcaaagaaactagtatggtatttgggaatgtgtgtgccaaaagaatatacatacattgaattagaaaaggaatatacccatttaagaggggactgactaatgtaaatggaatgcatatagaaattgaattctgagatctttaacatggttttcctcttatactcctacaaatggcttatttattcctctg

SEQ ID NO: 627028 - DNA, 584 bp, Homo sapiens
cttttaaaacagaaactaaaatcattatcatagcctacagtgttctatatggtgtggcctcagcctaattcttcaatcacaccttgttccattctctcctttgttcggctccctccagcatcactggctttgtttgcttcctgcctgattcagagyctttgaaatgttgctccttcttcctggattgttcttcctgctttctccttctcttagttaatgcatcttcatccttcagatcttatcccgaaagtcacttgcttagggtaaccttcacatatcttagaccagcctatatgtgaatgaaataccttagagtgttactcaattaatttagtcagggacacagttattttccacattccaagaagcaaaaaaaaggcattagctattttagtacacctactggaagggggagtaaggtagtgtatgtaaaagggagaatgcatgtgaagtatctcacatggtgagaataaatactatgtaaaatcatacagtagacaatttcataaatattagtttcattttctttctgtttatgtagatactcaagttttcagggaaatcctgatgattacgaaagtaga

SEQ ID NO: 627029 - DNA, 541 bp, Homo sapiens
ggaggatgaagttaatgcatgcagtttttattaattttatttttgcttatttgtttatgcaaagtgttaagttgttatctggttaaaataacgggttacatratagtatctgcaagcctcatgaaaatttcaaaccaaaaaaacttacaatggatacacaaaaaataaaaagcaagagactaaataatatcaccagagaaaatcacctgcactaaaggaagataggaaggaaagaaagaaggaacagaagaccacgaaacaatcagaaaacaagtaacaaaatggcaggagtaagtctttacttatcaataataacattgaatgtaaatttagcaaactctctaatcaaaagacataaattggctgaaaggataataaaacaagacccattgatctcttccctacaagaaacacacttcacctgtaaagacacacatagactgaaaaaggaatggaaaaagatattacatgacaatggaaaccaaaaaagaggaggagtcactatatttaaatcagataacatagatttcaagaccaaatg

SEQ ID NO: 627030 - DNA, 604 bp, Homo sapiens
ttcaggaatttccctaagtcaaaactaatttcatattaatgccaaatattggccttttctcacttattttcttgtgagggtacagtggagatttctacaggttgagatgtgacattggaaaagattgactatagaagcacatgtgagaacataggcattaagccacactcctacatgagtaccactctcctaaagcttcttgcagatcatttttaataagcaatgctatttatagtaacatgtaatgggttattttatagtaacttaagatgttcttagttttaatttctgatatgataaacatccatatatagcccacataaaagattcctggggttctcaataatttttaagagtgtaaaagggacctgagacaaagtttgagaactggtttaagacttaaaatttaataaacacctgccttttgccgtgtaaaaaaccccaaatcttttcctraaatctctcccattatcccttaagtccttgtcttgtttattacaatatctgcagcatcagtcagacaaacgaatacaaaagaccagtaagtggtgactgtaatacacttctatagctaaatctataagccaaaatataaggcagagta

SEQ ID NO: 627031 - DNA, 620 bp, Homo sapiens
gttcaatctctgctcttgatctaatacaaaatattgtaagaaattatatttatctttttgaaaactacaattctgaaaagacttarggatgcatagaaataaaaaatttcaaaccattttcaatatttgcctgataaaaaattacaagagaataagaaaaaaggcagtagtttacacatttatgcagcttttttgttaaccacaacaatacacactttctcaccccattacagaagtgtaatgccactaaaagcataaatgtttatgttttagctttcaaacatgcagcagacagttttattctaagtgacactgacactaggtggtgctatgtgggcttgtatttaggactgcttcatggaaaacaacattcaaatatttagtattcatcttactatttcaaatatttccaatgtctgtattcaggataaatgtacttattttgtctaaggtttcatctaattttcccccaattttttttatataaatatgctcagatgataatttaactcttcagtgagactagatggaattactcattggaaacacaacaaatttggggaaaaaaggatgtgaggtgacgaatatgctagttagcttgcctgtggtaatcatttcac

SEQ ID NO: 627032 - DNA, 620 bp, Homo sapiens
gttcaatctctgctcttgatctaatacaaaatattgtaagaaattatatttatctttttgaaaactacaattctgaaaagacttagggatgcatagaaataaaaaatttcaaaccattttcaatatttgcctgataaaaaattacaagagaataagaaaaaaggcagtagtttacacatttatgcagcttttttgttaaccacaacaatacacactttctcaccccattacagaagtgtaatgccactaaaagcataaatgtttatgttttagctttcaaacatgcagcagacagttttattctaagtgacactgacactaggtggtgctatgtgggcttgtatttaggactgcttcatggaaaacaacattcaaatatttagtattcatcttactatttcaaatatttccaatgtctgtattcaggataaatgtacttawtttgtctaaggtttcatctaattttcccccaattttttttatataaatatgctcagatgataatttaactcttcagtgagactagatggaattactcattggaaacacaacaaatttggggaaaaaaggatgtgaggtgacgaatatgctagttagcttgcctgtggtaatcatttcac

SEQ ID NO: 627033 - DNA, 564 bp, Homo sapiens
ttaaactttgcagaactgaatttctccagcagctttcacacagggcyttaataccagagaaatcccttttagaacaaagaattatcctttcttacccagtcattatcccaactctgctaaaatttgccctatgttccagaatctctctccttttatacagcacgttgaaatcctctgattctacatatgatcctaggatacttaagattttcttctctcaatttttcttttcatccaaaaaaaaggtgtttaaataaaaactcaaagcttagtcattcaaaaattgtgtactgagcatctgcaatgggtcacatattgttctaatcataggagaatatatggaagtacacagtgcatcaaatatctctgcttttgtggaacattacagactggggatagagacaataaacaagcaacagcaactccaaccccctaccagattatttcctttactggacatcaaagtgaaatgagtttcttagaaaacaatttgatagatcatccttaagctcaaacatggaaattatcttgacttggaaattaatcttgacttgtgaattttgc

SEQ ID NO: 627034 - DNA, 565 bp, Homo sapiens
ttttttccctttttgaaaaaaaaaagaaaaacaattcaagactcagaaaacatacctacaagaggggaaacataatgtaggctaccataaaaagtaatacgttctttcagaataaaaatcaactaactcaatctcaggataagacccccctcaccttcactgcccaaaagacttagaagaacactaatccattaacacacactgctagatatttcaaataactaattcttaacatctgttttaaacaaagattggttttaatactaaaattttgaaactaaaacgttagaaattgatcttattaaataaaaataagctcaaagacacttgttgtgtgaccaactaatcaagaactggatgattagcaaattcatgacaaacatccatttcaaaaccataagctgcattattaccaccatgtcaaagaaaaatctctgagaagatagcraagaaatctcataccttaagatattaaaaacaagactctggaagaaaaaagatctaaagtaaatcctacttgagcattccatagataaaacatgagaactgggaggtcgacacgggc

SEQ ID NO: 627035 - DNA, 575 bp, Homo sapiens
tgggtttccaggtaaaagaacagtacacatacttctctccccgaaaaataaagcatgaatatttaatctatacctacaacttgcttatttaaactaaaagacaatctgaagcaattatatacacctgtaaactgcaccgtgtaaattcaattaacgttrtaactatggaacttccaaaaaataacatgcttaatttaagcaggttctactagaaattttgcaaattctcgtgtaagttctagtcgctacagaaatccacacaaataatttaagaagccatctacacacctgctgtataactctttaacttatttcacaatgaatgaaaaatcagccatttatccaaccctaagcctcacgtcacaagaatctgaagacctgatcactaccaaactcgcacatgctaatatttgcagaaacagttaaaaatagaaaggtaataggtccaagctagcttggaagcgatttctgcattcaaaaaccccttcacggctttggccctctgcaaataaagcggggcgaaggaggtgtaggaggccgataacccagctcccactccaggagcccagggccgg

SEQ ID NO: 627036 - DNA, 575 bp, Homo sapiens
tgggtttccaggtaaaagaacagtacacatacttctctccccgaaaaataaagcatgaatatttaatctatacctacaacttgcttatttaaactaaaagacaatctgaagcaattatatacacctgtaaactgcaccgtgtaaattcaattaacgttgtaactatggaacttccaaaaaataacatgcttaatttaagcaggttctackagaaattttgcaaattctcgtgtaagttctagtcgctacagaaatccacacaaataatttaagaagccatctacacacctgctgtataactctttaacttatttcacaatgaatgaaaaatcagccatttatccaaccctaagcctcacgtcacaagaatctgaagacctgatcactaccaaactcgcacatgctaatatttgcagaaacagttaaaaatagaaaggtaataggtccaagctagcttggaagcgatttctgcattcaaaaaccccttcacggctttggccctctgcaaataaagcggggcgaaggaggtgtaggaggccgataacccagctcccactccaggagcccagggccgg

SEQ ID NO: 627037 - DNA, 641 bp, Homo sapiens
taactttagaattgcaaatttagaaatgttagtggatgttaccacagaagtgatttaacgttgtaaaaagtttaatagaagaattttactggttttaaaaattatttgcccccacccccatatttaactatctccagactcatcagtattaatcaagagtagtgtaataaattggaagaagaaaaggtaccaaggttaggaggaaaaaaaggtatgatgttaaaattcagaggggaatttactatgtgccagacattattctagcataaataacctgcccacagtcatacagctaatatgtttgggtcatgtttcagacctaggcaactatgcagactcacatctctcagtttgcagatatacagacaacataaggaggaaaaactgaagaatgtaatcattcctgtgataacgaagttgagatgaggcggtaactcaagtagaattgtactaaaatgtagcagaaaaaaccctagtgagacagccgggttcctgacctctgacaatgaaattaaacaccacatgcaaatgaagtaaataaaaattagcattaaagcacrtatgaattatatgtctccactctgggggaaggccctccttggcaaccatgagggctgtgtaccaccaggaagagattataa

SEQ ID NO: 627038 - DNA, 563 bp, Homo sapiens
ttgtgattcagccattctactcctaggtatttgaccaaaaggaataaaagcatatgtctacataaagacttgtacaagcatattcatagtagctttatctttaacaatcaaaagctagaaacaactcaaatgtccatcaataaatgaatttataagcaagctgtggtatagccatacaatggaacaccacttgtcaataaaaaggaacactacaacatggatgaatattaatataattgtacggagtaaaagaagccaaaacccagtacaaactgtaatattccatttatgtacagttcaagaaaatacaaactaatatatagtgattaaaagcaaatcagtgttacctgggacaaagtggaggaagggagggaaaagttggtaagaggygtgagaaaactttgggggatgatggatatacagtacatgttcatacaaatgtatgaacattatgtatgatatggatatacagtacatgttagttatgcacgaacattatatatgatatgccaaaacttatcaaattgaacacttttaagtgcagcttattgtaatgtcaatta

SEQ ID NO: 627039 - DNA, 571 bp, Homo sapiens
agatggatagataggtgacaaatttcctcaaatgggtaaaccaggtgagatgacaattctactcctagatatacacacccaggagaattaaaaacatatgcccacacaaaaacttgaacacaatgcttatagcagtattattcataatagctaaaagagagaaataatctaaatgtccatcagcagcagaattgataaataagatgtgatatagtcatacaatggaatattattcagccataaaaagcaagtacttttacaagcaacaacatgaatgaaacttaacttcattatgctaaatgaatgaagacagtcaccaaagattacatattatattatttcatttatatgaaatgctcagaataagaaaaactatagagatagaaagtgggttagtggctgcttaggcctaggggagtggggatttggggagtgatggctagtgagtacaggtttcatttttgtagtagtgaaaatgtaaaattgattgcaatatacaatgcccaactttatcaatatattaaaagacattgrattgtacactttaaatggatgaattgtatggtatgtg

SEQ ID NO: 627040 - DNA, 601 bp, Homo sapiens
atgtgaccagaacttcacatttttcttcctatacatcaaaaattccagaaattctagtattctgtgtctctaaattaaatcccctaggtaagaaggaggatgtctccttcataggcagaatctcagtcattaacttgaacatactcaccttaataagaagcttcaattcatagtctccaaaacattgtgaagttgaggaagaattgctgatcttagaaaccccaaaatcactgccttctccatctatgcacaaaagtggccctgcccacaaaggtcagatagaaccagatcaattaaagggatgttactcaagagtagaatgtaaaatttaaggacagagattctggaatcaatcagattgggacccattttatcccatgggttccaaattactatttctccataactaatcttatttgttactrtcagcacttaaagcaatattttccagtatgacagttccctgaactttttattttggattaacaaatggttatgttcatcatatctttaaattgcactctttctttcaatatgtttttgctttagtgaaccaatcaatatcttgaaaatgttaagatagccaaatttgcaataaaac

SEQ ID NO: 627041 - DNA, 601 bp, Homo sapiens
atgtgaccagaacttcacatttttcttcctatacatcaaaaattccagaaattctagtattctgtgtctctaaattaaatcccctaggtaagaaggaggatgtctccttcataggcagaatctcagtcattaacttgaacatactcaccttaataagaagcttcaattcatagtctccaaaacattgtgaagttgaggaagaattgctgatcttagaaaccccaaaatcactgccttctccatctatgcacaaaagtggccctgcccacaaaggtcagatagaaccagatcaattaaagggatgttactcaagagtagaatgtaaaatttaaggacagagattctggaatcaatcagattgggacccattttatcccatgggttccaaattactatttctccataactaatcttatttgttactgtcagcacttaaagcaatattttccagtatgacagttccctgaactttttattttgrattaacaaatggttatgttcatcatatctttaaattgcactctttctttcaatatgtttttgctttagtgaaccaatcaatatcttgaaaatgttaagatagccaaatttgcaataaaac

SEQ ID NO: 627042 - DNA, 515 bp, Homo sapiens
gcttgaactgggacccgggaggcagaggtagcagtgagctgagacggtgccactgcactctagcctgggcaacagagcgagactctgtctcaaaaacaaacaaacaaacaaataaataaataaactgattataatctttaatcacatgtaaaaaacatcttcatagcaatacctagattggattgtgattaaatagctgaggactttaacctattcaagttgacacatcagaaataccatcacagtataagagagaataatcattaatactcatagtttgaaacagcaacatcaagaaatgtatgcattatttttagttagtggtgacccaaaagattttgtgtggagagacttagaggcagtaaactaattagaatgggagcttaaacagcatttatagtgtactttatataaggtagaaaaatgacagttgtctatttcaaagaatggggcaggcatcaraaaaatatggaaggtgctaaagttgccatctaatttcaccccttggaactatt

SEQ ID NO: 627043 - DNA, 617 bp, Homo sapiens
tgaattcctcctcagagcatcttgcatgtaaaccaccctgacctcagggttttcttaagagtacacaacccagcccagtgtttaacagccctcactgtcagatattttactcctaaagacttacccacctcccttgggccatatgttccattctaacttccagaacatcttttactaacatttcatataattgaattaaattaaacttcccataaaaactggattgaactaaaaagagtgaaaactctattccataagaattttattttcaactaagtgaattctcagcttaaataatcatagtckgctctttgagctccaggggcacaagcaattcaggcagacaacatagtctcctctggagtacaacgttcatccaccttctcaggagaatttgcctttcctgctgcaaacagcttcgtccagctgccagtagaatatttggatgacattgccttagagtcaacacacaagaattctagtcaagggaggcagtctgacatcatagttaagtgtgcaggctctgtactcctacacacttgcatctaaatcctggttctactaggtgctcaaactaggtgacttcaggcatgtttccctctgcccctctctgatcc

SEQ ID NO: 627044 - DNA, 480 bp, Homo sapiens
ccacactccagtacaatgtgatattttgatctgtgtacacattgtagaaatattcagtmaagctaacatatccatcacctcatcaacttatgatttttttgtggtgagaacattaatctattcttttagcgattttgaaatacacattgttatcaattgtggtcagcatgcagtacaatggatcaccaaaacttaatcctctgctctgagagtttgtaccctttgatcaacatattccctttcctcatccctccttctccctcccagcctctggtaacctcctttctaatttgtttctatgagatcgacttttttagattccacatataagtgagatcatacagtatttgtctctttgtgcctggcttatttcacttagcataatgccctccagttccaccttctgagtttatatccaaaggaattgaaattggcatattgaagagatatctgcattcctgtattccttgcagcattatt

SEQ ID NO: 627045 - DNA, 404 bp, Homo sapiens
gtctgctttgtttctaggtgtttaaggtatattttaatttcttcatagtaaatatattattggacatacaaattaaagatttttagatatttatggaatatctatgtcgtaatgtgtattttatcaattttaaacagcctagaaaaatgtcaaataagccagtatatgacgtggaaattaccctcatatcctgaaaatattaagagctaattgtaacagctacatttcatttctgctctattccaactttttaaacatyagtatttcattttaatctttaaaaaataattttattaaatatctagatttttatttcattacattatataataagatcgataacttggaatgttaaaggcttctctcaaacctcaacaaaaatagagaaagggatatttcctgaa

SEQ ID NO: 627046 - DNA, 404 bp, Homo sapiens
gtctgctttgtttctaggtgtttaaggtatattttaatttcttcatagtaaatatattattggacatacaaattaaagatttttagatatttatggaatatctatgtcgtaatgtgtattttatcaattttaaacagcctagaaaaatgtcaaataagccagtatatgacgtggaaattaccctcatatcctgaaaatattaagagctaattgtaacagctacatttcatttctgctctattccaactttttaaacattagtatttcattttaatctttaaaaaataattttattaaatatctagatttttatttcattacattatataataagatcgataacttggaatgytaaaggcttctctcaaacctcaacaaaaatagagaaagggatatttcctgaa

SEQ ID NO: 627047 - DNA, 583 bp, Homo sapiens
aggttgttcaagattcatctgtgtgtgtgtgtatgtttatgacgtgacaagggtgtgtatatacatacatatagatatgcaaaatgtcagaaggtacaacttagttttagttttgaaatttgtgaggctaatgttatttggaaaaaattgcttaaattagtaattccacatgagtctacagtatgtggtcaagtttttttttcaaggtttttcattggggtaaactctccagagcgaaaggatgcaattccagtcaagacctaatcatcttctgaaatggcttcttaattaatttcctataaactggactactctaatcctgtggtgttttccaagtatatattctaaagcaagatgtgacctacaaatgactaatctgatctatctcaggagtaaatcctagaaagtttctctggacaatgattcatatcagatatttgcatttataatttttgatktaattaatatactttaataaaaatagctttaggtttacagaaaaattaagcagctaatacagataattcccatttactttaatttgttcctaatcttagagaaaaacctctcatcttttcaccac

SEQ ID NO: 627048 - DNA, 617 bp, Homo sapiens
ataaaaatgaatacatagggcaatgatayagaattaagagcccggaaataaacccatgtatatgtatagtcaactgatttttgacaaaaatacctagaagatacaatggaaaaatcagtttcttcaataaatggtgctgtaaatagtggatattcacatggaagtgaatggagttagaccttttttacactacatataaaaactaactcaaaatgaattaaagatgtaaacatgacctagaattgtaaaacttttataagaaagcagggaaaaacttccttgacattggttttggcaatgattttttaggtatgacaccaaaaacacaggcaaaaagacaaaaataaataaataagcagcactatattaaactaaaaactttctgcacagcaaaagaaacaatcaaaatgaaaagatagcctatagaatgggagaacatatttgtaaactatatatctgatagggaattaacatccataatatacaagaaattcatataactcaatagcaaaaaacaagtaatccaaccaaaaactggttaaatgagatattcctatggtttgaatgatggtgttcccttcgaaatttatattggaatttaatcctcaatacagcag

SEQ ID NO: 627049 - DNA, 483 bp, Homo sapiens
tcctaccttacctagcccttggtaaccactattctgctctctacttctatgtgagcaactttattagattccacatacaagtcagatcatgtagtatttatttttgtgtgcctggcttatttcacttaacataatgtcctccaggttcattcacattgccacagatgactgagtttctttgttttttaatamctcaatagtgttccatatgtaccacattttctttatacattcatcctttgatggacatttaggatgagtccatctcttggatactgtgaataatgctgcaataaacatgggagtgtagatatctctttaacatgctgatttcaattcctttagatatatacctagacgtagaatggctggatcgtatgatagttttatttttaatttttgaggaacccttatactattttctataatggctgcactaccttacatgcccaccaacaatgcatgagtttccctttctccaca

SEQ ID NO: 627050 - DNA, 544 bp, Homo sapiens
cacaatgtgcattatttgtaacgaaatactgcgttttagaatgattactacatcaatattgtctgtctgtttttggactctattttttctcattctttatcttcatattttttataatccaattttttaatatactctgtctaggatttacctcaaatatataatcatttttccattttgagattgaatatattttattctttacttcaatctagttctagttcatgttaataccatacagtacattttaaaaattaagataagtattttttcacacattaatactatctttaaaacttgatttttgtaattaatataattctatgaaaattgatattcatatycataatccattgtttcaatgaaaaaaatttgtagatttttaaaatattagaagaatataaatgttaaaatgtttatttctagaatggaaaattagacttcttttttattcaacttatgctccttacatttttttatttgtctttaagtgatatgtacaattaatcatgttaactcttcaatatgtacactgtataaccct

SEQ ID NO: 627051 - DNA, 636 bp, Homo sapiens
gatccacccacctcagcctcccaaagtgctgggattacaggtgtgagccactgtgccccagccagaaatttgtgtgtttttaaaacctgttgcaataacattttattgagaaaaacttggtctttatattttgccattttatctatgatttaaaaagtttgaatcacatacacacacacacacacagagactgctttaactaatataatttaaattaagtaaaaaggaagcaatagggaaaaaatgcctcctttgtctttttctccatcagaatgtcatattattcagcagaaatgagaaacagatgtccaaaaaattggagggtatgttctacctgtgaatctaagacatgcagaaggggttaccaagccctgcttgtggaagataagtaaaagggctggggcttcagctacagtctgtaaagggactccaatatcagaaatgaataacatgtcaaagccttgggagaaaagaaggggtccagacgtkgttgctcatgcctgtaatcccagcactttgggaggcctggatgggaggattgcttgaggccaaaagttccagaccaaaaaaaaaaaagcagacagagttgaaaaactgattttattaattttacagaattagtttctcaactgggct

SEQ ID NO: 627052 - DNA, 617 bp, Homo sapiens
gtatttttaagttgtatattgcatataatagaaaaattatctccatacctcacacaagacagggaaataactatagggttatatcctttgcataattgatttctaaatkttagaaatgttatgattatgtcactaagtaatttgcaaatcaatggctcctaagggtcttgtatcctttggaaaaagctatatttaacagttcgtttatattgtattttcctaaatgcaaaatatctacagtgctgctagaacacctggctttagggtcatccagtgaaactaatttgaaacatatcttagaaatgtttacttttccaactacattatgtgaaaaatagtgtatctatgcttttatgtagatatatgaccacactatttttacatgtgcattagtactagatgagaaatgtctgaattgtctatatgtcaaatcccaagtgatttacaggaagaacacctgatactgtacctaacacaagggttctccttaacccttgccatgatggccatagaatctttctccaattctatgctaaagcctttctactacacagttagaccaacttatcaattacagaagtttcatctaggcagataaaactctcaatgtattctaa

SEQ ID NO: 627053 - DNA, 622 bp, Homo sapiens
aaatagagatgagatagggggcagtggttcagaaaatataattgattcgttacacattgtaagggaaagcatcctattggataagccatcctactggataaaggattctattggataaagtttatgattataggactgttttgatggtcgtatggtcaactagaataaggaattctaaagaagaaaaggttattaggttaatttgtggtcagtacagtgaaaatataattcaatttctttccatgcctgtgcctattcattgaaatgtaactttccgtagtccattaagtgggcaggataatcgacatcctaactataaataattggacaaaatctacaatcctgaccaragatggattagtcataatcctttccctgaaattgtaagaagaagacaactgcctttgattgactaaactgggcttgaaacaattctactcctagatatgttcctaaccaaaattcatgcacatgggcaccaaaaggcatgtactagtgtcaattccagtattagctgtaatagcttcaaacaagaaataacccatcgaatattcatccaaagtcaaatgatgactgtattgtaaattcctcacacaagggaataatatgcagccttaaagaa

SEQ ID NO: 627054 - DNA, 523 bp, Homo sapiens
taaacaatacattaagctaataatcatattaatgatttgttctcccttctgcttttcagacatgtgrcaggcaagttaatcttcagtggaatatgcaaataggatttctgaatttggcatgcaaatgaatttgagaggtaaatgtaaaagttaactttactaagaaaatcagtgcctgcaaaactttcatattttgggatttgtgtgttgaatccatatcagttgcatttaagaaacactattcaattcagactttcatttatttatttatttttagtgcttaaatatctgtcttgaatctgggtctctaaaaagacacagtattttcaaagagccttcaaaatacttccaatagtgatgaaataaatttacgagttttacatttttactgccggattgtgagagaagtgaggagaattttatgaaaaaaaaatcctagattagcattctttctttattagctaactttcaaggaaaattgccctttttaggaccttagtcataaccatttgaattattaatg

SEQ ID NO: 627055 - DNA, 523 bp, Homo sapiens
taaacaatacattaagctaataatcatattaatgatttgttctcccttctgcttttcagacatgtgacaggcaagttaatcttcagtggaatatgcaaataggatttctgaatttggcatgcaaatgaatttgagaggtaaatgtaaaagttaactttactaagaaaatcagtgcctgcaaaactttcatattttgggatttgtgtgttgaatccatatcagttgcatttaagaaacactattcaattcagactttcatttatttatttatttttagtgcttaaatatctgtcttgaatctgggtctctaaaaagacacagtattttcaaagagccttcaaaatacttccaatagtgatgaaataaatttacgagttttacmtttttactgccggattgtgagagaagtgaggagaattttatgaaaaaaaaatcctagattagcattctttctttattagctaactttcaaggaaaattgccctttttaggaccttagtcataaccatttgaattattaatg

SEQ ID NO: 627056 - DNA, 523 bp, Homo sapiens
taaacaatacattaagctaataatcatattaatgatttgttctcccttctgcttttcagacatgtgacaggcaagttaatcttcagtggaatatgcaaataggatttctgaatttggcatgcaaatgaatttgagaggtaaatgtaaaagttaactttactaagaaaatcagtgcctgcaaaactttcatattttgggatttgtgtgttgaatccatatcagttgcatttaagaaacactattcaattcagactttcatttatttatttatttttagtgcttaaatatctgtcttgaatctgggtctctaaaaagacacagtattttcaaagagccttcaaaatacttccaatagtgatgaaataaatttacgagttttacatttttrctgccggattgtgagagaagtgaggagaattttatgaaaaaaaaatcctagattagcattctttctttattagctaactttcaaggaaaattgccctttttaggaccttagtcataaccatttgaattattaatg

SEQ ID NO: 627057 - DNA, 579 bp, Homo sapiens
acagtctgagatgaaaaattttctctttcccagttattttaacctagcataggaataaaagagaaggaaaaacgaataaaatgaatttataatattgggaatattggtaaaattaactgaataaaatcaactatctcaatgactagttaaagatatgaagatggctacattttaatagacaacctggaaatgaacctaaagtctaacactgagtatgtgccttggtcaataaytagaaacatgaaggtcaattttcatttggcagcttagaggagccttgtatagatggcggtgacaaattattacagtgatggaaagagaaagaacaaaatggccctctaagccaatttcctctggtatttttgtccttgagcagtgattttaattgattatggttgtcctgtattacctgttcagcaattttccaagtcatttctcccctaaagtttgtggtacagacacactaatatagtgtctccaacacccaagccatttgatcaaggcatcctatttgcatgtaggagagaaataaggactatttaatggtagctgctgcaataattatagttattattgttt

SEQ ID NO: 627058 - DNA, 579 bp, Homo sapiens
acagtctgagatgaaaaattttctctttcccagttattttaacctagcataggaataaaagagaaggaaaaacgaataaaatgaatttataatattgggaatattggtaaaattaactgaataaaatcaactatctcaatgactagttaaagatatgaagatggctacattttaatagacaacctggaaatgaacctaaagtctaacactgagtatgtgccttggtcaataactagaaacatgaaggtcaattttcatttggcagcttagaggagccttgtatagatggcggtgacaaattattacagtgatggaaagagaaagaacaaaatggccctctaagccaatttcctctggtatttttgtccttgagmagtgattttaattgattatggttgtcctgtattacctgttcagcaattttccaagtcatttctcccctaaagtttgtggtacagacacactaatatagtgtctccaacacccaagccatttgatcaaggcatcctatttgcatgtaggagagaaataaggactatttaatggtagctgctgcaataattatagttattattgttt

SEQ ID NO: 627059 - DNA, 561 bp, Homo sapiens
ctggtgaattctacacagactggtactctgctcttgaaccctgtttcctgttaagatgtttatcgaygacaatgcttgcacagtgggacttgaaacttcatcagaaattgtagttttgccctggccttgtgaccttgtcctgcccatttgccttgtgatattttattgcctttgaagcatgtgatctctgtgacccacactgtgttcgtacactccctcccctttgaaaattgctaataaaaacttgctggttttgtggctcagggggcatcacggaacctgccgatgtgatgtctcccctggacacccagctttaaaatttctctcttttgtgctctttccctttatttctcagactggccgacacttagggaaaatagaaaagaacctatgttgaaatattggggtctggttcccctgataccttctgcaaaatatttctgtaaatctaaatctattgaagaataaaatactttagaaaatgatctcagtaatgttacatagtaaattttaacacaatgaagtccatcaataatttaaattctgtttcttatttcgttc

SEQ ID NO: 627060 - DNA, 361 bp, Homo sapiens
caccaataagatactccatgagaagctcaaccccaagacacataatcgtcagattctccaggttgaaatgaaggaaaaaatattaggggcagccagagagaaaggtcaggtcacctacaaagggaagctgatcagactcacagtggacctctcaacagaaactccacaagccagaagatattgrgggccaatattcaacattcttttttttttccagcaaaaagaggagctttattttcaggctcatataactggggagaaggtcttctccagcaactgccctacccgtagacccctcagtcttccatttatggggttttggctaagacttgataaatggtgctatacaggtcacttagat

SEQ ID NO: 627061 - DNA, 515 bp, Homo sapiens
ggtgctatacaggtcacttagaktataggcatggaacaatacatatttgcattgttttgttttttaaaggcattcagattacttgcagacaatagccacctagcatgtgaggacaattatcctgaaatcacactgcaccaattaacaacacaggtcccagaaaagggcttgaaacagttggtcagttctggaactattgaatcccttaaatatctctctagaattcttatctgcatggtattaatttgtttagcagagctttcttcacaggcagataaaaagattttacacataatgtctgaatgactctgggttcttagtgggatctgattcagtaagatattcattggtgtacatgttctttcaggtatttttcatgtaggttctttacaaacttgcagaattcattccacggaaggcaggttctgcattaggcttaattctaagaaatttgaacttcctgtgtttataagtaaacactgggaatttgagatgacagggctctttgccagtct

SEQ ID NO: 627062 - DNA, 528 bp, Homo sapiens
aagttttctgttggaacatagccatccaaaaaaatgtttatggcttctcttacactaaaaggcatagtgacaactccataggcgcttggtacaccatataaacagcagatgaagtcggagagatagtctaatacacttagatcatgttccaccacaatgatatatctatctggatttattagagatcgtatagtaatagcagsctttaaacgctgcttgacatctaggtaactagaagcctcatcaaacatgaaaatatcagctttctgtatgcaaatgacagcacaagcaaatctctgcaactctcctcctgaaagatcttcaacatttcgttctttcaggtggattaaatcaagctgctgacatacaactgcctgtgtctttgtttcatcttttcggtccaaaatagatcccactgtccccttgcaaatgaagagaagttaaaaagatgtgtatgtataaatatccaggaatgaagaaaaaaatgggagagtttgagctagcaattgtagctagagagtttacaga

SEQ ID NO: 627063 - DNA, 528 bp, Homo sapiens
aagttttctgttggaacatagccatccaaaaaaatgtttatggcttctcttacactaaaaggcatagtgacaactccataggcgcttggtacaccatataaacagcagatgaagtcggagagatagtctaatacacttagatcatgttccaccacaatgatatatctatctggatttattagagatcgtatagtaatagcagcctttaaacgctgcttgacatctaggtaacyagaagcctcatcaaacatgaaaatatcagctttctgtatgcaaatgacagcacaagcaaatctctgcaactctcctcctgaaagatcttcaacatttcgttctttcaggtggattaaatcaagctgctgacatacaactgcctgtgtctttgtttcatcttttcggtccaaaatagatcccactgtccccttgcaaatgaagagaagttaaaaagatgtgtatgtataaatatccaggaatgaagaaaaaaatgggagagtttgagctagcaattgtagctagagagtttacaga

SEQ ID NO: 627064 - DNA, 483 bp, Homo sapiens
acttaaacctgaggaaggaggagaagtaccagttctaaatgtcagttataagccacagaaaattagtcgcaaatcaactggaagtgttcgccagttactacatgaaaagataagagatgcttatactcacccacaatttgtgaccgatgtaatgaagcctctgcaaattgaaaacatcactgatcaagaggtgcagacattatctggtggtgaactacagygagtagctttagccctttgtttgggcaaacctgctgatgtctatttaattgatgaaccatctgcatgtttggattctgagcaaagactgatggcagctcgagttgtcaaacgtttcatactccaagaaaaaagacagcctttgttgtggaacatgacttcatcatggccacctatctagcggatcgcgtcatcgtttttgatggtgttccatctaagaacacagttgcaaacagtcctcaaacccttttggctggcatgaat

SEQ ID NO: 627065 - DNA, 400 bp, Homo sapiens
atagcattttaaaaatttaacctcaagagttacacatcataacttttgtcatactgcattattaaagcagtcacaaaatcctatgtcttcctacattcaaggggggaggatgtaaatactacccctgaatagaagtattgatgccatattgtaagcagagtgtgtgggatgggagatattattgaggactttttattttttggggaatgcaagaagaattttcgtttttaatctttcataattgacctttaggcacaacaatccacattgttcttacctaagaaattcatgtatcttttcttctaataaccaagttatatctcattaggtcatcagttcaaagcctagactctctttayaaaactcaggtccatgtttagattagcattatcaggtatag

SEQ ID NO: 627066 - DNA, 611 bp, Homo sapiens
attactatcattttatgggagttaacagaggtgaatatttaaaactgtttttagtataaagtcttaaaatcaatttcttcttttcaactgatatttattcattcattgatttttttccaatttctgaatatatatgagaccccttgtatccaacatatggtctcatataaatcacgttaaagttttcagtgagccttccatccttggagagtgatagtatgtgatatgtttgactctgtgtccccacccaaatctcgtttcaaattgtaattcccaagttcagggaggaaactggtgggaggtgattggatcatgggggcagatttccccctttgctctactcatgataatgagtgagttctcatgatatctggttgttttaaaatgtgtagcatgtcccccacatgtaaagacatgctcgcttcctctttgccttctgccatgattgtacatttcctgaggcctccctgagccatgcttcctacagagcctatggaaccatgagccaattaaacctcttaaaawaaaattaccaagtctcaggtagttctgtgtagcaattggagaacagattcatacggtatgtaaggtaaataactataaatatgtgt

SEQ ID NO: 627067 - DNA, 546 bp, Homo sapiens
gtttcagcttggattactttggttcaaaccttggactttatttataaaacagcatatgttaatagtactccctttgtcgctattgctccttttgatgcccttgtcatcaattggcatgaccaatgctacctttaagtgacaaaattgaaccaaatgctcagtaccttaccattctgtaattcagatcaatatgatgacactatttttgatagtagctctaaacatattttgtaacagaaacccgatttgagataataaaacaaatgtaacaaaactactatctagtattttctttcaccattttgtcctgaattttgaacatgaaatgataaccaaaattaaacttcgtgagtcaatttggctaaagtttagagcaaagtttcagggtttcctattatttttttcatgagaaagtgacatattttccacaccactctcatatcartatcttagcaaaggaggtaaaatttagtgttgcccttcacagagtcaagttcgacaagggagtatatgaatggaaatggaagagactcatatagagaagtt

SEQ ID NO: 627068 - DNA, 516 bp, Homo sapiens
cattcaatagctcattctcttgagtagtggttctcaaagtgtggtccccagattagcagcatcagcaccacctgcaacttgttagaaatgcacattttggggcccaccacagaccctctgcatcatgaattttggaggtgaggagcaggaatctcaatcttgttgtaataagcccttcacatggttctgatgcccactaactttatagaactgttgttgtcttgtggccagtggttagaattcttcagaaacatccctacctctaacagtgatttgctagagcctgacttccttctctgtaggcacagcttctacaaacaccaggatcattgtattttcttcaaaagtgacaccrcagttgatcttttatttgcagttagtcccttatcactcaaattaacttatatattcttctgttattaggatataaaacagaaaataatccttatcaaaagtatgaaaagtagaataggctctttatgaaaactgaaacaatacagtagtgtatgaagcaga

SEQ ID NO: 627069 - DNA, 562 bp, Homo sapiens
ctcttgttaagatttgcacaacccattctgtttatagcaaaatcaatcccactacctgctcttgataaatatatatattgtttccaagttttagcagtcgcaagcagtgttgcattgagcatttgtgttacacatctctgcttacgcatggatttctatagtataaawccctagatagtaaattagtgagtcaaataaaatacatacatgcattagcatattttcttattttctctattcttgatgctctggcatctggagtgtttctgtccctggacagattgccccttccaaggttagattattcctagacatagcaaaaaagcaaccattggttggtttgtatagcaaaagcacacttttatttttttggcctaaaagtgtgcttttgatatacgaatcaaccaatcccaagtccatactctcaaccacctattctgtctggttcttatactccaggaggcaatattcatctgtccaaattatcccagggctgggtatcaggcaactagagataacccctgtatctcagagcccactgaaattattcaaactacccagt

SEQ ID NO: 627070 - DNA, 564 bp, Homo sapiens
tttacaaattatatactgataagtaattaatatctagaatatataaagaatttttaaaacttaactaccaaaaaaactgattcaaaaaggtacaaaggacttaaacatttctccaaataacatgtataaaaatggccaataagcccttgaaaagatgatcaacattaataattattagggtgaaagtcaaaactacaacaagataccatctcacacccattaagatgacaactatcaaaataacagaaaataagaagtgttagcaaggatgyagataaattaaaaacttttgcactattagtgggaaaataaagtggtactcctgctttggaaaagaggataaaagttcctcaaaaaattaaaaaatagaattactatacaatctagcagtttcacttctgggtatatacccagaagaactaaaagcaggaccttgaaaagcatatgtatacccaatttcatacaagcattactcacaacagctgaagtgtagaagcaacctgtcttagtctgttttgtggtgtaataaaggaatacctgaggctaagtaatttacaaagaaaa

SEQ ID NO: 627071 - DNA, 635 bp, Homo sapiens
tggactgtaacatagctcagagtgcagcaaaacaaactttactcattaaaggagaccaccaaaggagagagtccatttctgctggaaatttactatgaaccaatacaggtaaaatttctgccttgaggacccatgagttacacttattctactgcttctcagtctctaatctggaggaaataaattcaaaattaaccactctgcaagtgctttgcaattatcatcttctttgcatgtgtttcccgtaagtgttctagcaaagcagagttgctactgcaatagtagagaytcacattaggtgttttttgaaacatgctgaatattggctctagatgccttttccaaatgaatttgtgttgttacaggaagattttttttttttgtataaaatgttgtaaactcttccaaggcatgccagaccttgaactctagggaaatgtggtctggaagtttgagaaggcacattacttcctcaactttactttttgttccagatggaagtacttaaatgaagtcatagccttgtgtgcatggagcagaggccaagaaaaagaaatacaaacagctgttcccatatatgtatgtcttgatacacatatatatgtatatgtgtgtatatatacacacacacacac

SEQ ID NO: 627072 - DNA, 450 bp, Homo sapiens
cctaagcctagcttgcatttgatgttgcttgtacacattttagtatatcttattatttaaatttgatttaagagtttggaggaaggagggaggcagaggtacctgtagagtgatcatatcctataaaaagttgcaggcctgggaagccttgagatccctctcccctgtgacaggcagtagtcaatctctcagtggtacaaagtaaaggattaggttggtgcaaaagtaattgcggtttttgccattactttcaattattttaataggtgaagggcaagaaacagaattgtggtaaacagttctaggacagcagaagattctaattgtcagcatggggttcatttctccttcagccaacatccaaaccactgcttaagtatacaagggaaggcttcaggatatcaatagcatcttaaygttcaaaattcacagtgataatcagtgactgca

SEQ ID NO: 627073 - DNA, 462 bp, Homo sapiens
aggcagaagaggaaaagagtaatacatgtctacctgttctcttgcctccttgccaacaaagaacgaagtctgattaaggggaaagctaggggagttccctcaacttcctaaagatgctcactccctgtctgcccctgttatttccctctctttttwattaaatctcatgtccacagtaaataatagtaaaatttataatcctggttctcattttgttatctaaccagttaacctattgactttttgacttttagttcattctaaccttattcactcttgttttatctgtctgcctaggacaaaagtgatcattttccatgaagtgtaactacttttaagaattagaccaccttgttcttcaaatatttggaggacctcttactaagaccctagcaaggggaactctctgctcctgagggctctgctgtattgctgaataatccactgggccatcctagaata

SEQ ID NO: 627074 - DNA, 556 bp, Homo sapiens
cacatttttcttggaatgggtaaagaaaagagaataaattacatttattaaatacctactatgtgccagtgattttacaaacaatagttcattccagggctctgtttttgaatttgcaaaattgggagggagttactctagtatttctattatttttttacttccagatggaaattcaataaggacagtttctgtctcttgctatatcaacatctcttatatcagaggaaaattgaaaataaaattccaaattagtgcaaacacattcctgactttcatgagttcacttttaggtcacttctaaatcagtgttctatttattggaacaggttggttcattmcactgattggtgttctctttccaaggctcaataaaattccatgaagcatcaacctgaagaataacagccatgcaaaaaaagctcatcatcactggtcattagagaaatgcaaattaaaaccacaatgagataccatcttatgacagaatggtgattattaaaaagtcaggaaacaacagatgctggtgaggctgtggagaaataacaacactttt

SEQ ID NO: 627075 - DNA, 597 bp, Homo sapiens
ttacccaggcacatttttcttggaatgggtaaagaaaagagaataaattacatttattaaatacctactatgtgccagtgattttacaaacaatagttcattccagggctctgtttttgaatttgcaaaattgggagggagttactctagtatttctattatttttttacttccagatggaaattcaataaggacagtttctgtctcttgctatatcaacatctcttatatcagaggaaaattgaaaataaaattccaaattagtgcaaacacattcctgactttcatgagttcacttttaggtcacttctaaatcagtgttctatttattggaacaggttggttcattccactgattggtgttctctttccaaggctcaataaaattccatgaagcatcaacctgaagaataacagccatgcaaaaaaagctcatcatcactggtcattagagaaatgcaaattaaaaccacaatgagataccatcttatgacagaatggtgattattaaaaagtcaggaaacaacagatgctggtgargctgtggagaaataacaacacttttacactgccattgtggaagacagtgtggcgatt

SEQ ID NO: 627076 - DNA, 573 bp, Homo sapiens
gtttctttgtgttgtagttggatatacctcttgcagttatctttagaaatttgggggttgctttttcattcccttaatggtgtcttttgaaatacaraagttttatattttagcatagtccaaattttattgttttatgtacaggtactgctttgtgtgttatagtaaagaaatttttccttcaagatcatttaaaagctttgctattttgcttttatatctagaataccccaaaattgatttttgtataaggtctggggtagggatccagatatttttctcatttattaaaagaatcattcttttcccactgcactggaaagctgctcttatcaaaactaaggtgaccatatatatatatgggtctgcttccagactctttttttcttttccaagatcaattgtttattcttgtactaatgttaccctgtttcaattactacagctttataacagacttttaatctgggagtgtaaatcttccagccttgttcttttccttcaagattacttggtggctattcttggccctttgcatttgtcaatttacacaaatacaactgccatgatttt

SEQ ID NO: 627077 - DNA, 573 bp, Homo sapiens
gtttctttgtgttgtagttggatatacctcttgcagttatctttagaaatttgggggttgctttttcattcccttaatggtgtcttttgaaatacagaagttttatattttagcatagtccaaattttattgttttatgtacaggtactgctttgtgtgttatagtaaagaaatttttccttcaagatcatttaaaagctttgctattttgcttttatatctagaataccccaaaattgatttttgtataaggtctgrggtagggatccagatatttttctcatttattaaaagaatcattcttttcccactgcactggaaagctgctcttatcaaaactaaggtgaccatatatatatatgggtctgcttccagactctttttttcttttccaagatcaattgtttattcttgtactaatgttaccctgtttcaattactacagctttataacagacttttaatctgggagtgtaaatcttccagccttgttcttttccttcaagattacttggtggctattcttggccctttgcatttgtcaatttacacaaatacaactgccatgatttt

SEQ ID NO: 627078 - DNA, 573 bp, Homo sapiens
gtttctttgtgttgtagttggatatacctcttgcagttatctttagaaatttgggggttgctttttcattcccttaatggtgtcttttgaaatacagaagttttatattttagcatagtccaaattttattgttttatgtacaggtactgctttgtgtgttatagtaaagaaatttttccttcaagatcatttaaaagctttgctattttgcttttatatctagaataccccaaaattgatttttgtataaggtctggggtagggatccagatatttttctcatttattaaaagaatcattcttttcccactgcactggaaagctgctcttatcaaaactaaggtgaccatatatatatatgggtctgyttccagactctttttttcttttccaagatcaattgtttattcttgtactaatgttaccctgtttcaattactacagctttataacagacttttaatctgggagtgtaaatcttccagccttgttcttttccttcaagattacttggtggctattcttggccctttgcatttgtcaatttacacaaatacaactgccatgatttt

SEQ ID NO: 627079 - DNA, 548 bp, Homo sapiens
catggtatatatgtaccacattttctttacccagtctaccattgatgggcacttaggttgattccatgtctttgttagtgtgaatagtgctgcaataaacatacatgggcatgcatctttatgatagaataatttacattaaaaatgtatattcctttgggtatatgcccagtaatggaattgctgggtcaaatggtagttctgtgtttaggtctttgaggaattgccatactgtgttccacaatagtctaattaatttacactcccaccaacagtgtatatacattccttgttcttcataacytcaccagtacctgttattttctgatgttttaataatagccattctgactgatgtgaaacatgatagtatctcattacagttttgatttgcatttctctaataatcagtgatgttgagctttctttcgtatgtttgttggctgcatgtatgtcttcttttgaaaagcgtgtgtccatatattttgtccactttttaatggggttgtttgtaaatttgtttaaattccttatagacgctggatata

SEQ ID NO: 627080 - DNA, 548 bp, Homo sapiens
catggtatatatgtaccacattttctttacccagtctaccattgatgggcacttaggttgattccatgtctttgttagtgtgaatagtgctgcaataaacatacatgggcatgcatctttatgatagaataatttacattaaaaatgtatattcctttgggtatatgcccagtaatggaattgctgggtcaaatggtagttctgtgtttaggtctttgaggaattgccatactgtgttccacaatagtctaattaatttacactcccaccaacagtgtatatacattccttgttcttcataacctcaccagtacctgttattttctgatgttttartaatagccattctgactgatgtgaaacatgatagtatctcattacagttttgatttgcatttctctaataatcagtgatgttgagctttctttcgtatgtttgttggctgcatgtatgtcttcttttgaaaagcgtgtgtccatatattttgtccactttttaatggggttgtttgtaaatttgtttaaattccttatagacgctggatata

SEQ ID NO: 627081 - DNA, 513 bp, Homo sapiens
ttgtatgtgtgatacagtgcttctaaarccttatcatgcattggaattatctgggggcatgttaaaacacagattgctgggccccaccgctagagtttctgattcagtaggaccggggcaggtctaagaagttcgcaggtgttgctaatgttgctgttacgaggatcagattttgagaaccactggtacgataaagtggaaagactaatcctattgatctatgccaaattcaaagacatttttgctcttcaaaacatcagtaactcgaggaaataagagtcagagttaattttgataatatctactttgataagaggaacagagccaaaaaaataataaggaaggggtgtgtttttgataacctccaagttttttattttaagagcttacagtcttcttgtttctgagggtctttagctcaactggattatagatgttatactggcaggcagggccagtttcatggccatgggacctgtgaagtcacacttggtttaatgctcttctgtctct

SEQ ID NO: 627082 - DNA, 513 bp, Homo sapiens
ttgtatgtgtgatacagtgcttctaaagccttatcatgcattggaattatctgggggcatgttaaaacacagattgctgggccccaccgctagagtttctgattcagtaggaccggggcaggtctaagaagttcgcaggtgttgctaatgttgctgttacgaggatcagatttkgagaaccactggtacgataaagtggaaagactaatcctattgatctatgccaaattcaaagacatttttgctcttcaaaacatcagtaactcgaggaaataagagtcagagttaattttgataatatctactttgataagaggaacagagccaaaaaaataataaggaaggggtgtgtttttgataacctccaagttttttattttaagagcttacagtcttcttgtttctgagggtctttagctcaactggattatagatgttatactggcaggcagggccagtttcatggccatgggacctgtgaagtcacacttggtttaatgctcttctgtctct

SEQ ID NO: 627083 - DNA, 513 bp, Homo sapiens
ttgtatgtgtgatacagtgcttctaaagccttatcatgcattggaattatctgggggcatgttaaaacacagattgctgggccccaccgctagagtttctgattcagtaggaccggggcaggtctaagaagttcgcaggtgttgctaatgttgctgttacgaggatcagattttgagaaccactggtacgataaagtggaaagactaatcctattgatctatgccaaattcaaagacayttttgctcttcaaaacatcagtaactcgaggaaataagagtcagagttaattttgataatatctactttgataagaggaacagagccaaaaaaataataaggaaggggtgtgtttttgataacctccaagttttttattttaagagcttacagtcttcttgtttctgagggtctttagctcaactggattatagatgttatactggcaggcagggccagtttcatggccatgggacctgtgaagtcacacttggtttaatgctcttctgtctct

SEQ ID NO: 627084 - DNA, 521 bp, Homo sapiens
tccaaaatttaggtggtatgaagtgaggcctgataaagttgtattttaaaataattatcttccataatatagatgctgacagtctttgatccgcagttaaaggaaaacccatattgaaacagaactaaatgactttaatcttggtgacctcacctggtggtttgcacctacctttcacctctggggtaaggacaggagcacattcatctagcttactcttccttgtcctccaaaattcagctcagtaattattttatcaataaaatttttcttgacattgtatttcctacttccctcagttattctttgtctctgtttcaatygtgtagtggacattcatcttttattatgcctctcagcagttttttccccttctggctgtaactgtaccctgaatttcatctgggtaccatcttttccctctttcccagtcgcggtgctctaagcagagttggttgctcccctgaatcagagtccaaacatggctatgtttggtcaattagagcatcgcattcccctca

SEQ ID NO: 627085 - DNA, 607 bp, Homo sapiens
agaatcagaatctccagggatggggccagtgaatttcatcctcaaaagattctgatttgcagctaggtctaaagaccagtggagtaaaccaccattccccagctactggtccaaggacactgaggagttacttcaatktctttttttgtatttccttaaattttgattacttaattccttttatgagcctgcacaagaaatagagtatggcaagtaataaattgcctacctcaataaattaactcctgttccctactccttaataatcaacaatatcaccattattttctgatatctcaaacctacacatttcatctgctaatagtgacatatttgaacataattaaaatattgaaacccttctcttccctgttggtgagttgctcaagattggattattttatgctcctggagcatattttatagttgaagaatatacattctattgaaaaaaaagtttttaaaaagtgatgcaattttatgtaataataagttcaataataacaataagtttttaaaaacaagataagggaaaaaaagtaagaaagataaatgatgacaagtttcaggaaaggcctttctgaggaggagacattttatatgacaa

SEQ ID NO: 627086 - DNA, 544 bp, Homo sapiens
tttctccaccctgttcttgccccatgaagctgacctctgaggactggacaaacaggctcttttgccctcttggcaagagataagaggattaaaggaagagattaggctatttgtttccctctactttcctgcctagtttccatggactggtggcatctttctaccaaaggctatagctcctgtcagagccctttccacacaactcccctctccagattcccagtcccactctccccttccccttttcagcctaggagaaataaygatcccttgttggcttcctacactctgcccacacctaaataaaaaaataaccctttattaaactctcttcagttacccagtttgaaaattttgtctgcttcttgccaggactctgactaatgcagtaaccctctaggaatttaagggattcaataatttcagtgttactcatagagaatccagcttgggagcacacaactagggtctcaccagtcactgagcaaacccatcacaaatgtcctcaaaagatacccctcctaataattccagttcttaccca

SEQ ID NO: 627087 - DNA, 486 bp, Homo sapiens
ttctatatttgtgcaatccaacatggtagccactagccacaggtggctattgagcacttgaaatgtcactagtgaggctgaagaactgaattgtgtgttttatatgttttaattaatttaaattcwaataactactagtggctaatggctatgatattggatagtatgactctagaatctatataatctggggcgaggaaaggttgataggaagaaaaatattttctaattaacattcttcagtctttattttactttttacatttttttttcgtaattttgactttaattttggttcaggaggtggatgtacaagtttgttacatgggtatattgtgtgatgctgaggtttttggtatgaatgatcttgtcacccagatagtgaacatggtacccaatagttagtttttcaagcccatgcccccttcccttcctaccctctctggtaatttccagtgtttattgttgccatctttatgcccatgc

SEQ ID NO: 627088 - DNA, 667 bp, Homo sapiens
attggatagtatgactctagaatctatataatctggggcgaggaaaggttgataggaagaaaaatattttctaattaacattcttcagtctttattttactttttacatttttttttcgtaattttgactttaattttggttcaggaggtggatgtacargtttgttacatgggtatattgtgtgatgctgaggtttttggtatgaatgatcttgtcacccagatagtgaacatggtacccaatagttagtttttcaagcccatgcccccttcccttcctaccctctctggtaatttccagtgtttattgttgccatctttatgcccatgcccatgaatacccaatgtttagctcccacttataagtgagaacatgtggtatttgatttttctgttcctgtgttaattcactaaggacaatggcctctagctccatccattttcctgcaaagaacatcattttattcttgtttatggctccataatattccatacagcatatgtaacaggttttattatttatttatttatttatccagtccaccatggataggtatctgggttgattccatgtctgctattgtgaatattgctgcaatgaacatacaaaagtgcaagtgtctttttggtaaacaatttattttcttttggatatatacccagaaat

SEQ ID NO: 627089 - DNA, 667 bp, Homo sapiens
attggatagtatgactctagaatctatataatctggggcgaggaaaggttgataggaagaaaaatattttctaattaacattcttcagtctttattttactttttacatttttttttcgtaattttgactttaattttggttcaggaggtggatgtacaagtttgttacatgggtatattgtgtgatgctgaggtttttggtatgaatgatcttgtcacccagatagtgaacatggtacccaatagttagtttttcaagcccatgcccccttcccttcctaccctctctggtaatttccagtgtttattgttgccatctttatgcccatgcccatgaatacccaatgtttagctcccacttataagtgagaacatgtggtatttgatttttctgttcctgtgttaattcactaaggacaatggcctctagctccatccattttcctgcaaagaacatcattttattcttgtttatggctscataatattccatacagcatatgtaacaggttttattatttatttatttatttatccagtccaccatggataggtatctgggttgattccatgtctgctattgtgaatattgctgcaatgaacatacaaaagtgcaagtgtctttttggtaaacaatttattttcttttggatatatacccagaaat

SEQ ID NO: 627090 - DNA, 559 bp, Homo sapiens
aatgcaagcaggtttagttttctatatatttcatactttgccaagtgagtatatagttcatgtgatgacagttctagtcaaggaataaggaaatctcacagaaatggacaacttgattttaaatgtaagcgtaacatagacacatttttatcattgtttttatattactcaggaagtcctatagcagacttgtgcaggagacagagaaagacaagcctagggtccatccttcaaggacttgatagcccagttcgggaaagaaacatgggtctatgggcagtaaaactataacaaaaagagtaagtgcaaaaagccagatgaataataaagatatgattaattaatgaagttcagaggraagagagaaagagaaccttttagcagtggcaggatttgaatctgaaagtgaagcatagctgagatgatcttagttggagaagctggagcagttctctccaactaagataatccctccaattcattgcatgtgagggacagagagaatggtttgggaaaaatttatgcaacaggatatgatcactttaattccgggccaaat

SEQ ID NO: 627091 - DNA, 533 bp, Homo sapiens
  misc_feature 1, 2, 3, 4, 5, 6, 7, 8, 9, 10, 11, 12, 13, 14, 15, 16: n = A,T,C or G
nnnnnnnnnnnnnnnngattatgcaacttagaacactttctgctgaactcagccccattccagtctctctctgctcttcccattattggggtaggctggggtgcagtctccactattacactgtaatcttcttgaggacttagactctgtatttattcatatttattattcaccattccttgcacagtgacctgcccagagcaggggcaatttattcatggatattttgaaaccaaaccagaggcatgatgcacactttcctttctccactatttggaaggacttgaggtttcctttcacattttcagattcaccagtagtgaaaacaaattagcaactccaatcctgcctaagcccatgtaaagtagatgtcagtgaagtcttttatctgtacgttgttgtgctttttttttttttttttttttggacgtaagcaatggcratggcgatttttgaggcaaaactgaaaatctatgtataaaattctgaattgctgaaccaggcttaacacaattgatggctctttaaacaat

SEQ ID NO: 627092 - DNA, 428 bp, Homo sapiens
aaactgaaaatctatgtataaaattctgaattgctgaaccaggcttaacacaattgatggctctttaaacaatccagctttccctttaatgggtcttcatcargcactctccatgctttccaagtgttccaaatgaatgcagtaaaaccaaactagcgtagtggccaatttctttttggacagtttctccatctccactctccccacactcgccaaatcccaccatgcagcctgctgtggtagaaacctgcttaccagggaggtgtgggtgatgggttttaaacagttctaagtcagcagaggggaagtgttaatgcttcagaaaatcagccatctggccttggaatgagaatgccaggaagattcggaagggaaatcaagaaagaagagaagaaaggccctgctggggctctggggagaagggcaca

SEQ ID NO: 627093 - DNA, 428 bp, Homo sapiens
aaactgaaaatctatgtataaaattctgaattgctgaaccaggcttaacacaattgatggctctttaaacaatccagctttccctttaatgggtcttcatcaagcaytctccatgctttccaagtgttccaaatgaatgcagtaaaaccaaactagcgtagtggccaatttctttttggacagtttctccatctccactctccccacactcgccaaatcccaccatgcagcctgctgtggtagaaacctgcttaccagggaggtgtgggtgatgggttttaaacagttctaagtcagcagaggggaagtgttaatgcttcagaaaatcagccatctggccttggaatgagaatgccaggaagattcggaagggaaatcaagaaagaagagaagaaaggccctgctggggctctggggagaagggcaca

SEQ ID NO: 627094 - DNA, 605 bp, Homo sapiens
atttttttcataaggaaattactaatcccagaaagactaccccaaataactcatgttcctgacatttgtaatgaaatagttctaatttattaccactgataaaatatataggcagaaaaggatcactgtragtctattaatcttaaattgaatgtagctctaaatcgttggtcgcaagtcttacggagaccagcattatacgtatgtaagaaaccaaaatttgcttgatataaaacaatcattttaatcaataaatacattaatgatgagatattttcaaccactacaaaaattgtagaataggccaattctttctttaacaataaaataattttagtttctgcattgcatttctctgaacaatttcatgtgaagaggagaatatctttgcaaagtctcttattaacccagttttaacaagaagtacaaaatagaaggcaatcagcctttgtacatagcattatgatgatggtaatcgaaaccatgcaatcacatggatattttgctctctataactagctctgaataatcagtgattttcaatgcaagaaaaggggctattccaaattgcaacactagcaaagcattgtgatgtttacatttaa

SEQ ID NO: 627095 - DNA, 527 bp, Homo sapiens
taacatgttcatcacttaagaggactcaatgttgagatrttaattttccctaaactcatctatagaattaatatgattgcaatcaaactccagcagacttttttttttaaaagaaattgacaaactgtttcaaaaatttatttggaactgcattgttaatagttttgctacatggttttcctgatgtttcctgcacatgccaaagaactgctccccatcctcaattaggtattaaccaggcaggaatcctctatggaattaatccatgtgaatagtgaaagagattcacaaagatgccaaatatatttacatttcataatgagataaattggtggaattttaagaatgtgacagactgacttaaaaattttggtggtatgcatatgatctgtttacccagggagatgccaccatctactaaggttatggtaggttgagaatgtgccacaagggcaacccctctgccggcatttttcagcaacttagttttctcatgagaccacagatgctctaaaaatgttttttaa

SEQ ID NO: 627096 - DNA, 423 bp, Homo sapiens
acatttcataatgagataaattggtggaattttaagaatgtgacagactgacttaaaaattttggtggtatgcatatgatctgtttacccagggagatgccaccatctactaaggttatggtaggttgagaatgtgccacaagggcaacccctctgccggcatttytcagcaacttagttttctcatgagaccacagatgctctaaaaatgttttttaaatgttgtttgtttgtttgttttctcataatgctttccttagcactagtggctgtttccaagaattgtaagagggatatttgtaagagcaagaacagcttacattacaaaaaattatctacaatatttcatcattaataactgtggtttctttctataacaacaactgcttataaaaggcagacttcattaacattcctcagtcc

SEQ ID NO: 627097 - DNA, 574 bp, Homo sapiens
ctcctcctgctgggattccagaggcccatggtgagagtggtttgctctttgccagctaaacttaaccattttcctggcrtcactgggggccaggaatgagtcccagtctattgtagcaatgtgcagggttctctggttcttcccacttcagcccagcttctgtgtcttccctctgtccactctcagtgccttccctctgaagatcagttaggagttcgccagtcatcctggtccctctgtggcagctgtttcacctggctgcatctagttagccatcttacccaaatcccaatacctttatttcaaagggaaacagttcagcagattcagggaaagagcactaggttgtaggtagcagcagcaagtgagtatctagcctcctgttttgtgctctgggtgaacatgaaggtaaacctactaaagaaaagctttcacaaacttgtgtttcttcctaagtaacaccttaattgcttgaaaatacaattttgtgccattcaaacattctctcatcctcaaaactcgaaagtatctttctcaggttcttaaaggaagaaaaaacaaattgagttaggaa

SEQ ID NO: 627098 - DNA, 491 bp, Homo sapiens
ggtattcatacctttctttactcatttttcatattaagaagagctgacttgtataacaaataagatattgcagaaataaagatatatgatgtgtgacttccaagctaggttataaaagacatgtggcttccaccttactctgtcttataacacttgttctaagtgaagccagtcactgcatgatgatgctactcaagtagctgtatagggaagttcatgtagtaaggaactgaggcctcctgcccatagccagtattaacctgccagccacatgagtgaaccatgcaggaagtaagtcctccagttcccatcaagccattaggtaatgcagctccagttgacatcttgactgtgacatcatgagactctgatccrgaatcactcagataagctgctgtcagattgcagccccacaaaaactgaatgaggtaataagcgtatcttgttttaaactgctctgttttagaataatttgatatgcagcaataaat

SEQ ID NO: 627099 - DNA, 503 bp, Homo sapiens
gtcagattgcagccccacaaaaactgaatgaggtaataagcgtatcttgttttaaactgctctgttttagaataatttgatatgcagcaataaataactctcgccttcgaataatcactacttaatttgatgtgaaaagcattatagaacattagtgtttawtccaggaaaaataatttgggaagtaacagcaactttcctttttaaaaaaatccaacaagaggcagttatttatgatcttggaatataaaggacaatggtagtgacaccaaggcaataccaggagtcaaaagaagcatccacagactaaggcttccaggagggagtgaggaaattataattgaaaatataattaaggaaaataagagagttatattggtcttcaaagaaagaaggtcaattcccattactttgtcatagaaagaaaaaggtttgaagaaactggaggggaacgcagcatcaaataaaataatctttaccatttcaggtattaccaataatgc

SEQ ID NO: 627100 - DNA, 593 bp, Homo sapiens
agtggtgacggctatgggtgagtctcttctgctcttggaaaggaaatgaaagaatggaaagaactgcatcttgtggtttgagtgccaactcaaccacaatacaatagaaaaccaggtagatattatgtctaaggcttttgactctagacattgactttcagacagcatgtttggatccacctggggcctgggagaactcactgccctgaagggaagccatgggtgtttctggctttgccctctattgattgtacagcttgagggctgagggcctcgagcaaacatagtcagcagccaggaaatggttacagctggccttgggtgagacccagygctgtgatagcttcaggtcttacccaaagcagtcatagcggtgatggcaacaggggtgcttgtctcacaccatccctagcttcaagtgactcaggagaaagagggagagagagagagagagagaagagagactctaggagaaggtaagggaaaagagcaagagtctctacctataaatccacagaattctccttgattttgttcaagaccatcaaggtagtacctctatgggtctgcaaaaaccacagcattgctgagct

SEQ ID NO: 627101 - DNA, 511 bp, Homo sapiens
aaaagccttacatgatgtttaaaataacattcaaaatcgtttacatagcctataaagggcatgatgtagctctttcttacgttaawcacctaatcttgtgccactttctcccttattcactacacagcagccacagccacgctagcattttaaaattttctctaatataccaacctaggcctttgtctatgatatttaatatgttaatatatgtaaagcccttagcgcagaatctaacttgtagtgagatcccaataaataacttctgtattttattatttatttattaatagttaataatcataaaatcttatgaagtaagtcttattccattttataggaaaactactacacagagagagcaagtaacttcaaagatggcatagctgatagatggtaaaatggtggggctggaatacaacccaagaagactactaagtaagtaatatattaattcctttttgtagacaaagactctacaaagccaactcttaagtaatagctgtaatca

SEQ ID NO: 627102 - DNA, 511 bp, Homo sapiens
aaaagccttacatgatgtttaaaataacattcaaaatcgtttacatagcctataaagggcatgatgtagctctttcttacgttaaacacctaatcttgtgccactttctcccttattcactacacagcagccacagccackctagcattttaaaattttctctaatataccaacctaggcctttgtctatgatatttaatatgttaatatatgtaaagcccttagcgcagaatctaacttgtagtgagatcccaataaataacttctgtattttattatttatttattaatagttaataatcataaaatcttatgaagtaagtcttattccattttataggaaaactactacacagagagagcaagtaacttcaaagatggcatagctgatagatggtaaaatggtggggctggaatacaacccaagaagactactaagtaagtaatatattaattcctttttgtagacaaagactctacaaagccaactcttaagtaatagctgtaatca

SEQ ID NO: 627103 - DNA, 474 bp, Homo sapiens
aaagccttacatgatgtttaaaataacattcaaaatcgtttacatagcctataaagggcatgatgtagctctttcttacgttaaacacctaatcttgtgccactttctcccttattcactacacagcagccacagccacgctagcattttaaaattttctctaatataccaacctaggcctttgtctatgatatttaatatgttaatatatgtaaagcccttagcgcagaatctaacttgtagtgagatcccaataaataacttctgtattttattatttatttattaatagttaataatcataaaatcttatgaagtaagtcttattccattttataggaaaactactacacagagagagcaagtaacttcaaagatggcrtagctgatagatggtaaaatggtggggctggaatacaacccaagaagactactaagtaagtaatatattaattcctttttgtagacaaagac

SEQ ID NO: 627104 - DNA, 474 bp, Homo sapiens
aaagccttacatgatgtttaaaataacattcaaaatcgtttacatagcctataaagggcatgatgtagctctttcttacgttaaacacctaatcttgtgccactttctcccttattcactacacagcagccacagccacgctagcattttaaaattttctctaatataccaacctaggcctttgtctatgatatttaatatgttaatatatgtaaagcccttagcgcagaatctaacttgtagtgagatcccaataaataacttctgtattttattatttatttattaatagttaataatcataaaatcttatgaagtaagtcttattccattttataggaaaactactacacagagagagcaagtaacttcaaagatggcatagctgatagatggtaaaatggtggggctggaatacaacccaagaagactacwaagtaagtaatatattaattcctttttgtagacaaagac

SEQ ID NO: 627105 - DNA, 633 bp, Homo sapiens
tctgcatcatcaatataaacacacacacacacacataaaacaaagtgatgtttaaagttatcccaatatttaggcttctataacaaaatagcataaagtgggtggattataaacaacagaattttatttttcactgttctggggagtctggaagctcaagatcatgatgtcacaatgactaggttctggcgaggtcagtcttccagttttgaagatggctatcttctcattttatcctcacatggaaaaagtggtgaggaacttcttcagtcctttatgtaagggcattaatcccattcatcctatgacccaatcacttcctaaggcattaccttctaataccatcataacataaccacataggggttgggatttcaacatgtcaatctggagggaagacaaacattcagtctatwgcaggaacattattttaaaaatacagaaagtactagggggtgtattttaatgacgttgacgcttattcctggaaagccactggagggttttgagcagcacattcacattatgtgacttacattttgagtggaccactaatgagtcctctctggagaaggttaggtggaagcagagggactagttaggaggctattgcaataatctatatgctgaaag

SEQ ID NO: 627106 - DNA, 609 bp, Homo sapiens
agggtgaagagtggaggaatggaaaggaaaattttctgagtataaaagttttgatttttgcaccatataaattttttaattcaagcaataaaataaatcaagaagattaataaatgagactctaaaattaaaaacaaamccaaaggtcataacagttctcaagtaaataacttaagcatatggagaaaaaaaaactgaattcaagtaacatttgaaattgtactctggcaaggatatagtctaaatacacataaaacagaaagaaatcttgaactttactcgtcatgtttgtcttttggaactcatattggcttcatattctgaaattgtatattctaggatagaataaatatgaatattatttgaaggcagggttctcacagtggaataaaggaaatacaaatattgaatgggggcaggttaggaagaaccctgtggtagctttagcactgaccactgaagaagtctaatatcaatgacaccccagtagcaatcagtatatctagtaacaagatcttagtgcctaacatattctccactaaaaggaagcaggatttcctgaagaaatgtttggatccaggtttgaggcagagaaactatacggttctg

SEQ ID NO: 627107 - DNA, 540 bp, Homo sapiens
agactctaaaattaaaaacaaaaccaaaggtcataacagttctcaagtaaataacttaagcatatggagaaaaaaaaactgaattcaagtaacatttgaaattgtactctggcaaggatatagtctaaatacacataaaacagaaagaaatcttgaactttactcgtcatgtttgtcttttggaactcatattggcttcatattctgaaattgtatattctaggatagaataaatatgaatattatttgaaggcagggttctcacagtggaataaaggaaatacaaatattgaatgggggcaggttaggaagaaccctgtggtagctttagcactgaccactgaagaagtctaatatcaatgacaccccagtagcaatcagtatatctagtaacaagatcttagtgcctaacatattctccactaaaaggaagcargatttcctgaagaaatgtttggatccaggtttgaggcagagaaactatacggttctggatatgttttgaagcttgagttcactagatttacagaaagtttagtt

SEQ ID NO: 627108 - DNA, 522 bp, Homo sapiens
ctttccattgtgttccttcaaaagtctaatgaatcttggttttctgaaaattttcacaaatgagggccttattaatcagaattaggaggtggggtgagtttttctagtatttttgatattaattctttcactggtagtgaattggactgatgctaaaggaatagacagctgtgcaggcctttagtgtgccaaagaccttgycccaagggtatcatgtttctgtgcccatggtgacatattctgtaggtaagataccctattttaaaattaattatccctttggccatccccatcagctacctatctatgcctaatctcttacgtttctaatgttggggtttctccatgatttcatgtgaaaactcagtttccttcagtgtctttttccacctgtattgcactgtggtttctcagtcctgtgggttttcatgtcatactggtctcatttacatgataatatgtagatatttctcatagttcctgactcactaatgtcacctactcaattttccaagattgtta

SEQ ID NO: 627109 - DNA, 573 bp, Homo sapiens
gtttttttttttcctttgggatcttttaaggaaaatattttaaaagttttaaattcttattttagattcaggtggtacatgtgcatttttgttacaagggtatattgtgttgctgaggtgtagccttctattgatcctgtcactcggatagttaatatagtacccaataagtactatattaaacttaatataataaaaacttcataagaagtttttcaggccttgccctcatccatccctcctttcttttggagtccccggtgtctactgttcccrtctttatgttcaggtgaacccattttagctcccacttataaatgagagtatgtaatatacgattttctgtttctatgttagtttgccaactgcatccatattgatgcaaaaaaagtaactttgttttttatggctgcacagtattctatggtgtatatcaaccacattttacgtatacaatccactattgattggcacctaggttgattacaagcctttgctattgtgtacaatgctgtcaacatacatgggcatgtgactttttggtagaactatttattttctcatggatatata

SEQ ID NO: 627110 - DNA, 540 bp, Homo sapiens
aatattatagttcccctgtagaaattcctagataaatgcaaagtttcatactttctatctacttttttccatggtcactattagttgaaaagtttataaattctgcccttacgtctttatttggtaaaattatccaacacagtaatttgttgcctaatacttcttttttgtttgtttgtttcttgagacagagtctcactctgtcacccaggttggagtgcagtggtgcaatcttggcycactgtaacatccaccttctggattcaagagattcttgtgcctcaacctcctgagtagctaggattatagtcgtgtgccaccatgcatctagctagtttttttaaattttaggagagatggggtttcaccatgttggccaggctggtctcaaactcctggcctcaaatgatccacccgccttggtctcccaaagtgctgaaattacaggcatgagccatcatgcctggtgcctaatacttcttatatgaagtattacactaatatttatctcaaagataaggacctagtcagagaggttgc

SEQ ID NO: 627111 - DNA, 556 bp, Homo sapiens
cttagaccataaccacttgttacaccacacttcaagaatgtcaatgctactctaccagcccatgctaatgcctttccttcctctcttctcctgtcctctcttctcactttttccccatcaccatttttctcttgttcctttatgattcttgtttgtctcctcttttttcctttatactccataataatattatgttacaggatctttggggtgttgcttttctggctggaaacctctgtggccagtggtgtctttgcccgagttcttgtcctgyatccaggaaaaatgaggtacacagacaaatggagggtgagcaacatgaagagaagcctttttgagggttacaacagctcagaggagacctgcagtgggtagctcctctctgtaggcaggtcgtcccatcaagtgttcagctcttaggagagaggaggctttggagagggtggatcctctctgcaggcaggtggtctgaacaagtgttcagctttcagcagagaggatagctcctctctgcagctggtcattctaccaactgcagctctcagcagagaggagg

SEQ ID NO: 627112 - DNA, 426 bp, Homo sapiens
ggatattatatataccacatcttagtctgttcattcttgtatagaaacttggattgcttccattttttgctattgtgaataatgctcttatgaacacaggcatataagtatgtatttgagtttctgcttccatttcttttggacatatactcaaaagataaattgctacatcatatggtaatttatgtttaawtttttgaggaatagccatgctgtttttcacagcagtagcatcattttacattcctgccagcaatgcacaaggattccaatttctccacattcttgccaatactttgtattttctgttattgatttattaattgttataatagccattctaatggttgtaaattactaatgaggttttattttacatttctctaatgattaatgatattaaacatttttttcatgagttcattc

SEQ ID NO: 627113 - DNA, 517 bp, Homo sapiens
tcacttgagactaaatgatgcattatcttaatttgagttttagttctgcccagagaatggagaacatatattttcaaaatcatttggtcagatttctttagagttattttagaaacgttttcaatccaaggaatattgaaaaactgcaaaggcttctattttactaggtttttcttctagtgttttctttgatacatggtatatcatttataaaattacaattgccttatcctccagttgcttataatgcaaataagacatttgaccaaatatctcaattttgcaggccaccatatgaattttgttttactgccaatcaaactgcaccacattattcattggttccactcaaatgttttccacaatcagtctagttagtacctttggccttcaaagcaaattaaagtaatggacaagtttctttgataggttaattaagccacactgatctaaagctggtttctgaaaggytttctttttatgttttagtcattcagtttaaaaggagaaaaattca

SEQ ID NO: 627114 - DNA, 553 bp, Homo sapiens
aacctgatgggattccctttgtatgtcacctgcccccttctctctagttgtctttaacattttttctttcatttcaaccttgaacaatttgatgattatgtgtcttggggatgatcttcttgtgtagtatttcataggggtttctgaatttgaatgttggcatctctcgtgaggttggggaaatgttaatggatagtgttctgaaatatgtttttcaagttgcttactttttctccttttctttgaaggatgccaatgagtcatagtttagtctgtttacataagcccatgtttctcagagattttgttcattctttttattgkttttctatatttttgtctgagttactttgaaaagcaggtcttcaagctctgagattctttcctcaccttggtcagttctgctgttaatagttgcagttgtgttctgaaattcttaaagtgggattttcagctctattagctcagtttggttctttcttaaaatgacaaattcatcttttatttcctgtactgttttattgtatttcttagaattatttgattgggtttt

SEQ ID NO: 627115 - DNA, 446 bp, Homo sapiens
gtggaaccctgtaagaccctgaatagccaaagcaatcttgagcaaaaacaatgaaggtggaagcatcacactacatgatttcaaaatgcactgcaaagctatagtaatcaaaacagcatgttactgccatgaaaacagacctataccctactggaacaaaagtgagagcccagagataaattcacacatttagttaaatgatctttggcaaaggtgctaagaacatacaatggggaaaggaaartctctttaataaatggtattgggaaaactggataaccacatgcagaagaatgacatttgacccttatttcaaaccatatacaaaaatcaactcaagctggattgaagacttaaacataagacctgatactatcaaactcataaagaaagcacagggagaaatcttgacattgttctgggcagtaatattttggataaaatat

SEQ ID NO: 627116 - DNA, 446 bp, Homo sapiens
gtggaaccctgtaagaccctgaatagccaaagcaatcttgagcaaaaacaatgaaggtggaagcatcacactacatgatttcaaaatgcactgcaaagctatagtaatcaaaacagcatgttactgccatgaaaacagacctataccctactggaacaaaagtgagagcccagagataaattcacacatttagttaaatgatctttggcaaaggtgctaagaacatacaatggggaaaggaaaatctctttaataaatggtattgggaaaactggataaccacatgcagaagaatgacatttgacccttatttcaaaccatatacaaaaatcaactcaagctggattgaagacttaaacataagacctgatactatcaaactcataaagaaagcacagggrgaaatcttgacattgttctgggcagtaatattttggataaaatat

SEQ ID NO: 627117 - DNA, 616 bp, Homo sapiens
tatgggattaaaactagtctagaactcaatactaagtatatgtgtaaaacatatccttgatcaaatactgacatacacatttttccagaggacagaggcagatatataggtctggaggttcatggagtggggatttgccattagtgcttctgaatgagggcagagaatggtttgttgtgaaggagatggcaggagagtcaggcatgattgcaagctgtggagatagagggtgggagccccyagccagatggataaacctgagcctggctggcgtttctgcctgtatattcccatattcatgggcgagcatttattttaaatgaagtgttaaggatgcctgatccctccacttgtgttaagactgattactgatctttgatgggaaagctgctttgatctgtgataaagtcagccaggcagtcagcatcccaaattgcttctacatattttctgatgacttcacgcagaggcttttcttggacaagtctcagtataacaacagcagcagaggagaggaaggcaaaggtccctgcttatccctggtaaacagcacgtgtctcatggcatgcatctgggcaccccattgttacaagttcagcagccttcaaaagtcggt

SEQ ID NO: 627118 - DNA, 616 bp, Homo sapiens
tatgggattaaaactagtctagaactcaatactaagtatatgtgtaaaacatatccttgatcaaatactgacatacacatttttccagaggacagaggcagatatataggtctggaggttcatggagtggggatttgccattagtgcttctgaatgagggcagagaatggtttgttgtgaaggagatggcaggagagtcaggcatgattgcaagctgtggagatagagggtgggagcccccrgccagatggataaacctgagcctggctggcgtttctgcctgtatattcccatattcatgggcgagcatttattttaaatgaagtgttaaggatgcctgatccctccacttgtgttaagactgattactgatctttgatgggaaagctgctttgatctgtgataaagtcagccaggcagtcagcatcccaaattgcttctacatattttctgatgacttcacgcagaggcttttcttggacaagtctcagtataacaacagcagcagaggagaggaaggcaaaggtccctgcttatccctggtaaacagcacgtgtctcatggcatgcatctgggcaccccattgttacaagttcagcagccttcaaaagtcggt

SEQ ID NO: 627119 - DNA, 616 bp, Homo sapiens
tatgggattaaaactagtctagaactcaatactaagtatatgtgtaaaacatatccttgatcaaatactgacatacacatttttccagaggacagaggcagatatataggtctggaggttcatggagtggggatttgccattagtgcttctgaatgagggcagagaatggtttgttgtgaaggagatggcaggagagtcaggcatgattgcaagctgtggagatagagggtgggagcccccagccagatggataaacctgagcctggctggcgtttctgcctgtatattcccatattcatgggcgagcatttattttaaatgaagtgttaaggatgcctgatccctccacttgtgttaagactgattactgatctttgatgggaaagctgctttgatctgtgataaagtcagccaggcagtcagcatcccaaattgcttctacatattttctgatgacttcacgcrgaggcttttcttggacaagtctcagtataacaacagcagcagaggagaggaaggcaaaggtccctgcttatccctggtaaacagcacgtgtctcatggcatgcatctgggcaccccattgttacaagttcagcagccttcaaaagtcggt

SEQ ID NO: 627120 - DNA, 441 bp, Homo sapiens
acttgtgttaagactgattactgatctttgatgggaaagctgctttgatctgtgataaagtcagccaggcagtcagcatcccaaattgcttctacatattttctgatgacttcacgcagaggcttttcttggacaagtctcagtataacaacagcagcagaggagaggaaggcaaaggtccctgcttatccctggtaaacagcacgtgtctcatggcatgcatctgggcaccccattgttacaagttcagcagccttcaaaagtcrgtgagcctgtggactacatccctcctgcagcaaggaggcaggactgtaacgggtgggacctgtgcctactgctaaatcaaacatctgcagcctcttggttaacccccattctggtatatttttctagcatttctttctggcctcctttaagattagcatagcttgagagaagaga

SEQ ID NO: 627121 - DNA, 441 bp, Homo sapiens
acttgtgttaagactgattactgatctttgatgggaaagctgctttgatctgtgataaagtcagccaggcagtcagcatcccaaattgcttctacatattttctgatgacttcacgcagaggcttttcttggacaagtctcagtataacaacagcagcagaggagaggaaggcaaaggtccctgcttatccctggtaaacagcacgtgtctcatggcatgcatctgggcaccccattgttacaagttcagcagccttcaaaagtcggtgagcctgtggactacatccctcctgcagcaaggaggcaggactgtaacgggtgggacctgtgcctactgctaaatcaaacatctgcagcctcttggttaacccccattctrgtatatttttctagcatttctttctggcctcctttaagattagcatagcttgagagaagaga

SEQ ID NO: 627122 - DNA, 601 bp, Homo sapiens
gagaaagaactgtgtgggtctcaagcggctccaagaatcaaagtggaatttttttcttaatggtcacaagactactgcacacttacatgacatgttaagaaattaaagatttaaatcagtcttccatatctctaaatttggaaacagttgatagattcttcagctatagattcaataaaaataagatcagataaaagcagaaatgactgcacaatttatgcaatatttaatccatcctacaaaaagactctgcatggagcacaaacagaagctacatgacaagttttgctctgttcaatttttctctttaaactctactgtgtrctgtttggtaaacgctattatttcagaagggagaatctcatctggaatcagaagatatgacgacatatgccactgaggggtctcactgattttctaggaaagaaactttgatgaattcacagtgaattctttctgtcctttaagggccgttgagcagacctcaccaccagaacatcagcatcattaccagccttttatatgacattttacaccttggagatggagcagggacccctcttaggggcaccccctccaacccctgcatgaaaataaagga

SEQ ID NO: 627123 - DNA, 178 bp, Homo sapiens
cttgtaaaggaacatagagaaaatcttttcagctttgtagccattttttgttctttgtcacaactctgctgctgttgatccgaaacagccrttgataactgcagccatagacggatggacctggttgtgttcccgtaaaacttaatattaataaataacagatggtgggctggatttg

SEQ ID NO: 627124 - DNA, 556 bp, Homo sapiens
agagagacggagtctcactcttgtcacccaggctggagtgcatggtatgatcttggctcactgcaacctccgcctcccaggctcaagcacttctcctgcctcagcctcccaagtagctggcattacaggtgcccgccactacacccggctaatttttgtatttttagtaggacagggttttgccacattggccaggctggtctcaaactcctggccaaagtgctgggattacaggcttgagccacagtgcctggcccccatacaataatttaataagcaacagaccttcaaattttcccaactggctccaaaatgtcttttatagctatgtttcccccaaaatcacacagacacctccacatagaaaatgaggcagtcccagtgcactgctgaggtctcgggacaagagagccaagccaccataagataamtgttatcacacacagccatcttatcaggcacaggtggccaagagattctggcagcctaagctacctcccttactacaaagaagccacatcagcctaaaaaccattaagaaatccagggcatggcc

SEQ ID NO: 627125 - DNA, 556 bp, Homo sapiens
agagagacggagtctcactcttgtcacccaggctggagtgcatggtatgatcttggctcactgcaacctccgcctcccaggctcaagcacttctcctgcctcagcctcccaagtagctggcattacaggtgcccgccactacacccggctaatttttgtatttttagtaggacagggttttgccacattggccaggctggtctcaaactcctggccaaagtgctgggattacaggcttgagccacagtgcctggcccccatacaataatttaataagcaacagaccttcaaattttcccaactggctccaaaatgtcttttatagctatgtttcccccaaaatcacacagacacctccacatagaaaatgaggcagtcccagtgcactgctgaggtctcgggacaagagagccaagccaccataagataactgttatcacacacagccatcttatcaggcacaggtggccaagagattctggcagcctaagctacctccctyactacaaagaagccacatcagcctaaaaaccattaagaaatccagggcatggcc

SEQ ID NO: 627126 - DNA, 618 bp, Homo sapiens
tttgttcctgcccctggcaaggcagcaggtgcccatttggaagaatggcacaggccatggttttgatctctgctgttcctcagcgtttcgtttccctgaatccacattttcctccttccctgactttcttgcttcgctctaagccacttctgtctttctccccctgcccttgtttttctctttttgccttctgtagattcaggacattctgaaggtgctggtgtccaaccttaaccattccaatggggtagcgctctcccattggacaaatggaaggtgaggcagtgttgagacccctctctggcttgctctctccagctgtgcatgcccctgaggcttatctggtttgggggatactttggcttattttatgttgctgccattaaccttcagcctgtctgcttcttcacctgcttgattaattgagttttttccttccctgcatcttttatcatcttggagaaggtgagacataccttaaagtttaaaagtaatttgggaataatgtatagagcaggcatgtgggatctggggctttttgttgttgtcrttgttgagacggggtctcactctgtcacccagactggagtgccacggtgtgatctctgcttacttcaa

SEQ ID NO: 627127 - DNA, 614 bp, Homo sapiens
gttttatgttgtctttaattgacacataataactgtacatatttatggggtacaatttatgggggaaatgttgtttccatacatgccaacattgtgtaatgatcaaaacagggtaattagtaaatgtatcatctcaaacatttatcattcctttgtggtgaaawcattaaaaaatctcaggatttaatagcatttttaggaattgtcactttgaaattggacaaatgtgtcaaaatgatagactatactctatgataaaatgcaaaagtcataatgtaatgaaccttatattcttcagaggacacaagtcgaataatagtgacagaactatattactgttttccctaaaaccaaaataaaatacataagtcaatgataaaaatgttcaaattgcctacctcaaactcacgacgtttctcataaattggaacgatcaacttggaaatctcagaaattatttcataacgttctgccttccataagccatccacacattgttctagcaactccagcaagacctcctgcattaagagaaaaatccaattaggaattaaaaatagttttagagttttggacaaataaattttgaagcatttcaagttggtagaaaacaa

SEQ ID NO: 627128 - DNA, 515 bp, Homo sapiens
cctgcatgcttactgcatgtgcctttcatagaaaatcagtgaaaactatcatatgagcaggtaaaggctgcagtgtggaagctgtagaccattcattcatccatcacacatttattgaccacccactgtgaaccaggtatatgaatgatcaaggcaatatttcacaggcagataatgcagatgggatgttataatctaaaagataattcaaaagtagtcttcttctgtcaataacgaatcttccaaattctgtattcttgaagagagacatcttatgtctctgatgaatgtgagtaatagttcctagtactgatatattgkaacaattaatatgttgattgagaagcaaaagctaagccattatagatgtggaattatgttcaatgcaaagctgaccagctcctatagtactcatgcagtgggttatttcagaattcttctgtggcatagtcaggatttgagataccttcagagccacgatgatatcatgtaatagtactatgtcctccctcccc

SEQ ID NO: 627129 - DNA, 512 bp, Homo sapiens
taccacacttttttaaaaaatgccatagcttccaaaaaaaaaaaaaaaaaaaaacatttyaagccccatgaaatctgttcttaccagagtataataattttggtatccaaacatttttttaaaaatcttgccaggatcaggaattggagggaatataataatcttgagcctttaagaaaacagagacatttgattcaaaccttccagtccataggagtgtcccacataaataccaccatattaaaagaaggcatggacaaaagacatggtacacaagtcatctttattgacaaggcagttgtgaagaaatttctaaaatagggtacacaaaaatcaatgttctaagggcattaagttctactcttgcccataggtggagcacagggaccatcagaataaatgaattacttataccctatcatctaaataatatgctactctacttttaacagaccagatgggcgcttgctctgtataattttgaaaagaataatctgagaacaggatacatt

SEQ ID NO: 627130 - DNA, 358 bp, Homo sapiens
tcattcactaaatagttcctaccagcctgtgtaaagagctgagaggccaagcaaatgatgaagggacatcctttcaatatttcatacagaggttgagaaaaaaaaaaccccactcagggggctagtataccctattactggccatttagaatcgtagacctgttggggaatcacaagcgtcaactaccagtgagggatcaagttgcaaattgatgtccctcctcccctggaccatctcccatatatagaaattccaaacttgccgaatcaacctgtagatttacgtctctargctcttgttcaaatgtaaatccccctgcatagtttactggctcttcagagaccactaagagaagga

SEQ ID NO: 627131 - DNA, 542 bp, Homo sapiens
attttttttttttttgagaacggggtctcactctgttacagacccaggctggttttgaactcctgggctcaggtgatccttccacctcagcctccagaatagctgggattacaggtgcatgccaccatgcctggattctggaatttattctgaaccgttagccaaaagaatcaacatcctgagattcagcacaggcaggccctcctcctggaagcttcccttgctccttccctcccaaaaggtaccctttttgtatcccataattccttgttcttgcccttatcattgcccctcagactgactgcagctttctgttagcagagcttgcttttggtgagtgtcttcaacagttcctggaacaatttcataaatatttattgartttgagagccttaattccaagagtggaacctttgttgtgaataggttaaacaaccctgtgccctttgggtggggtctagactaggtatattatcagcatttttattgctatactttttgtaactgttttcaggtatatgcattggcttaattcggccaaa

SEQ ID NO: 627132 - DNA, 523 bp, Homo sapiens
ctctaactactgtcccagaatctgtggtttaacaagatcctcaagtcattcacatacacagaaaaatttgaaagccacaccttttattaaatgtaccagaaaactgagccagagatctaaagtaggtatctaataaatagttctcaagctagttatctaaataaaatgtgttagtaaaaatttgctgatcaattaattcattggtcctgaagaaatagtaacatcaaaattataacaaacattattaagagcaaagttttagttactaacaaaataccaataattgaatgataagttaaattacatgacaatacattggagtataattccacagttcataaatatttctaagctccatcataagaactacttagtaagtacttgcattaaatgaaataaaaatattacttttggttttatgtactagttsctttgttttgggtctggcctgggttaggtcaatacaacctctaaaaagcacaccaaagtcttggtcactaagcaagatttctaggatttctaa

SEQ ID NO: 627133 - DNA, 443 bp, Homo sapiens
ccttgtctgtgtgctaacagagtttcatattcatacaccatatacacgatgattagtgacactttacactctcaagaatcttagagtgtagaaaacaagtggaataaaagagtattatctaatgcaccaacaatttaaatgcatatgtgataaaatggttgcttttagtatagtatgcacggaatgagatcttcaaaatttctcggtagcaggtgctagatatataaataracatctagaactttatatttggcttctcccgatttgttaccctttctctgttacacttctttttttttttttaagacattgaccttattgctattcaataaaaggttacccgaggtgattttcatgttcttcagattcgaataacaaaggtatagttattttgtgctttcataaaattcatctatccacctagaatacttccttatgaaggg

SEQ ID NO: 627134 - DNA, 539 bp, Homo sapiens
cataatatcataaaatattatctttatccaatcatctgttgatgagtgcttaggttaattccatatctttacaatcatgaatcatgctgctataaacatacaagtgcagacatctttttgatataatgattccttttctttgcatatatacctggtagcaggattgctggatcaaatgatcattccgtttttagtcctttttaaycctttggaaaatctccatactgttttccaaaaatgttgtactaatttacatccccaccaaaagtgtataaacatttctttttctccatatcctcaccaacagctgctgtttttagactttttaataatagccattctaactggtatcagatgatatctcattgtggttttgatttgcattactttgatgattcgtaataatgagcatttcttcaagtttgttggtcacctgtatgtctcctttagaaagtgcctgttcatgtcttttgcccactttttaatgggattatttattgttttcttgtagagttgtttgagtttcttgtagattctgg

SEQ ID NO: 627135 - DNA, 579 bp, Homo sapiens
taatttatatatttagggggtaaaaatgcagttttcttacatgtgtatattgcatagtggtgaagtctaggctttcagcgtacccattaccccaatagtgaacaatgcacccaataagtaatttttcaatcctcaatcccctcccactctcccacattttgtagtctcacgtgtcattattacactctgtatgtccaggtgtaccctttgtttagctcccacttataagtgagaacatgcagtattcaaattctgtttctgagttatttcacttagtacaatggcctccagttccatttatgatgccgcaaaggacataatatcataaaatattatctttatccaatcatctgttgatgagtgcttaggttaattccatatctttacaatcatgaatcatgctgctataaacatacaagtgcagacatctttttgatataatgattccttttctttgcatatatacctggtagcaggattgctggatcaaatgatcattccgtttttagtcctttttaatcctttggaaaatctccatactgktttccaaaaatgttgtactaatttacatccccacca

SEQ ID NO: 627136 - DNA, 577 bp, Homo sapiens
aattcttctcaaagaaaggacaaatcatgaaaaaaggccccttctggacttttgtaatctttaacgccttgtcagaattcatagatttattatgtattctctaaggagaaaagcactacgtggaagaatgaatagttaaaggaatacattgtattttcttaactctaaatatgtgaatatcttaatatataatatgtgtaattctataatttgataaatgaaataatttggtatatatacatatatatataatcttgagtttatatgtattaagtgcacagtattcactgcaattgcttatctaacttcaacgtttgtgaaatgtcctactatgtgtctatgagtacacagtgctttgtatcagtgtcaaatgaatatgcatgcatgcaaattcaaaaagagcatcttgctagtttcttctagtatggtggttcttctcaagttttaacttatcctataatgcttctcttttagccaaaatggtaaactaattaaagtagcatgatataagaatrcacagatattaccaccatctataggcaaattattaaatttagtttttaaaataaaaaatatc

SEQ ID NO: 627137 - DNA, 462 bp, Homo sapiens
acctactcccacatcatattgctaagacactgtatgaattttgtttcctttctacctgggttatcagacactgtatgaatttttatttcctttctacctgagttatcagccttgaaattgttaaatgcattctgttccttttagctaatccacagtttgccaaggattaaaaaaaagttcctgtgrattaagtcatatgggggataatttaaataaatatgtctatataggctttattcaaagcctgtccatagttgtttgagcaaatattaaaaatcattgggaatactttgagtggctgttcaggactgctatactttgcagtggaaatgctgaatgctagtccagactctgacatctgctgtttcttttaccttcaacaggtcttcctctttgggcctcagtttgtttatctcaaaaccgagtgtgttgagttttaaagatttcaagcccctcataaga

SEQ ID NO: 627138 - DNA, 619 bp, Homo sapiens
cactcttttgtttaacctaatttctgtgggacatgtgtgagacagaaagagaatataaatgtgtacacttttagattgctcttttaatccatcrtgttttaagtttttggatactgtgtatcccttggcatacttcctttttgaaaagatcattgtgctaagtaattgatgaattcttttaatataaaattttaattactttaatcttataaatgttcttgcattattactttgataatttctattccagttactatgttgtaacaaactattccaaaatttaattgcttaaaataaaaataaaataaattttaattttaacccattgcaataaagccataggttgtcaagaatcagcttctcatttggagtccttcatgtggttacagttaaatggtgacaggagatagggctagaataatctaaaactttactggctatttaggctcttttttggttacatatgagttttaggatagttgtttgctaattctgtataaaatgacattggaattttgatggagataatgttgaatctaaaattactttggacagtatggtcattttaatgatattgattcttccaacccattagcatggaatatttttccatttattt

SEQ ID NO: 627139 - DNA, 522 bp, Homo sapiens
atgataatatggcttttgcttgtaattctgtttgtgtggtgaatcacatttcttttttttttctttgatgttgcaaagggacataaatggattgttcattgcacctttctttctgcagccacttccaaggtccttttgttcttcataatgagacaaaaataaaagtttaatcaataggaatgagcttggttccaagataagagttaaccttggatttgaatgattctattgatttggcgttatgaacctgaggcaggatttcatctaaggattggggtgtactttagtttaaaatgagtgcttcttaagttgttggcaaatagagtggaattgccaataaacttggctgacacgggctcaaacaataactaagctcatagaaarataataactcagataaatacaggagtcagaaaatgttccctttaaaaaaacctttctacactgtaattatcaaaataaatatcaccagttatgagaagtgaagctaactaaaataccttaaggacacatgaccttcac

SEQ ID NO: 627140 - DNA, 607 bp, Homo sapiens
ctccttgggtttgggatctgccgagccaggtggagatataatctcctggtgtgccgtttgctaagaccattggaaaagtgcaatatttgggtgggagtgtcccgtttttccaggtactgtctgtcatggcttcccttggctaggaaagggaaataccccgactccttgtgcattctgggtgaggcgatgccccaccctgcttcggctcaccctccatgggctgcacccactgcccaaccagtcccaatgagatgaaccaggtacctcagttggaaatgcaaaaatcacccatcttctgtgtcaatcatgctgagagatgcagtccagagctgttcctattcrgccatcttgtaatggaccctaaccagtctatgactgatggacatttaggttgattccatgtatttgctattgtgaatagtgttgcaatgaatatacgtgtgcatgtaactttatggtaggacaatttatatttcttagtgtatatacccagtaatgggattgctgagtctaatggtatttctgtttttaggtctttgaggaattgccacactgtcttccagaatgattgactaatttatccttctaccaatagtgcataagcatt

SEQ ID NO: 627141 - DNA, 607 bp, Homo sapiens
ctccttgggtttgggatctgccgagccaggtggagatataatctcctggtgtgccgtttgctaagaccattggaaaagtgcaatatttgggtgggagtgtcccgtttttccaggtactgtctgtcatggcttcccttggctaggaaagggaaataccccgactccttgtgcattctgggtgaggcgatgccccaccctgcttcggctcaccctccatgggctgcacccactgcccaaccagtcccaatgagatgaaccaggtacctcagttggaaatgcaaaaatcacccatcttctgtgtcaatcatgctgagagatgcagtccagagctgttcctattcggccatcttgtaatggaccctaaccagtctatgactgatggacatttaggttgattccatgtatttgctattgtgaatagtgttgcaatgaatataygtgtgcatgtaactttatggtaggacaatttatatttcttagtgtatatacccagtaatgggattgctgagtctaatggtatttctgtttttaggtctttgaggaattgccacactgtcttccagaatgattgactaatttatccttctaccaatagtgcataagcatt

SEQ ID NO: 627142 - DNA, 608 bp, Homo sapiens
ggattactattcagcaataaaaaggaatgacatcttttcatttgcaacaacatgaatggaactggaggtctttctgttaattaaaataagtcaggcatggaaagactaacttcatatgttgtcacttatttgtgggtgctaaaaatcaaaacaattgaactcatagagatcaagagtaggatggttaccagaggctggaaggtaatgagggtttgaggggaagtggaggtagttaatgggcacacaaacaaaaaaatagttaaagagtgaataagacctagtatttgatagcacagcagggtgactaaataataatcatttaattgtacattttataataactataatgttataattggatttttagtaacacaaaggataaatccttgaggggatgtataccccattttccatgatgtgattattacatattacatgcctgcatcaaagcacctcatgtaccccataaatayatacaccaactatgtacccacaaaaataatgaaacaaaaataaataaataaaaaacaaaagggaacttttttttgagcattaagacttatttatcctttaatacacaatattaactaaaatgcatgtatagaaca

SEQ ID NO: 627143 - DNA, 620 bp, Homo sapiens
gagatctttctcctccttggttaggtatatttctatgtattttatcatttttgcagctgttgtgaaaggggttgagttcttgatttctcagctttgccattgttgttgtatagcagtgctacttatttgtaagcattgattttgtatcttgaaactttactgaattcatttatcagatctagaagtcttttggatgagtctttagattttctwggtatacaaacatatcattagtgaacagtgacagttggcttcctctttaccaatgtggatgctttttatttttttctcttgtctgattggtctggctagaacttccagtacgatgttgaatagaagcggtgaaagtgggcatccctgtattgttcgagctctcagggggaatgcttttaactcttcctcattcaatataatgttggctgtgtgtttgtcatggatggcttttattaccttgagatatgtctcttctatgccaattttgctgagggttttgatcataaatagaggctggattttgtcaaatactttttctgcatctgttgagataatcatatgattcttatttttaattctctttatgtgatgtattacacttattgatttgcatatgttaaaccacc

SEQ ID NO: 627144 - DNA, 657 bp, Homo sapiens
aaacaaatcaacaaaatacaaccaaatagtttcatttaaaaaaaggggggggaaggacatgaacaaggacttttcaaaagaaaacatacaagtggcaaacaaatgcatgagaaaaactcaacatcactaatcatcagaggaatgcaaatgaaaaccacaatgagataccttttcaaatcattcagagtggctactactaaaaagtaaaaaaaaaaataagatgttggagagactaatgagaaaaaggaatagttatacactgttggtgagaatgtaaattagtttggccactgtggaaagcagtttgaatatttctcaaagaacttaaaacagagctgttatttgacccagtaattatattagtgggtagatgcccraaagaaaataaattgttctatcaataagaaacatacactagtatattctttagagcactattcacaatagcaaagacatgaatcagcctaggtgcccatcactggtgaattggataaagaaaacatggtacacaagggctttggaatactatgtagccatgaaaaagaatgaaataatattctttgcagcaacatggatgcaactgggggtcatcatcctaagttaattaatgcaggaaaagaaaatcaatatcatatgttctcatttataagtgagaga

SEQ ID NO: 627145 - DNA, 657 bp, Homo sapiens
aaacaaatcaacaaaatacaaccaaatagtttcatttaaaaaaaggggggggaaggacatgaacaaggacttttcaaaagaaaacatacaagtggcaaacaaatgcatgagaaaaactcaacatcactaatcatcagaggaatgcaaatgaaaaccacaatgagataccttttcaaatcattcagagtggctactactaaaaagtaaaaaaaaaaataagatgttggagagactaatgagaaaaaggaatagttatacactgttggtgagaatgtaaattagtttggccactgtggaaagcagtttgaatatttctcaaagaacttaaaacagagctgttatttgacccagtaattatattagtgggtagatgcccgaaagaaaataaattgttctatcaataagaaacatacactagtatattctttagagcactattcacaatagcaaagacatgaatcagcctaggtgcccatcactggtgaattggataaagaaaayatggtacacaagggctttggaatactatgtagccatgaaaaagaatgaaataatattctttgcagcaacatggatgcaactgggggtcatcatcctaagttaattaatgcaggaaaagaaaatcaatatcatatgttctcatttataagtgagaga

SEQ ID NO: 627146 - DNA, 612 bp, Homo sapiens
aagaataatactggatttctctcttactgtatacaaaaatcaactcaagatggagtaagctaaatctaaggtttgagattataaaaactttagaagaaaatgtatttaaaaaaaaaactcttctggacattggcctaggcaaagaattaaaaaataagaccccaaaagcaaatgcaacagaaataaataaacaaatgggacttaattaaaccaaaaaaattcttcacaacaacaaaaaatcagattaaacagataacctatagaacaagataaaatattttcagattatatatctgacaaaggactaatatccagaatctacaaggaacccaaacaaatcagcaagataaaagcaaataatcctattaaaaagtggccaaaggatatgaatagacatttctcaaaagaagatacataggcagctcccacacatayggacagagcagtgtgtggagactcatatcatgaacttttgttccagaactactgcaggaataagccagggaagccataaaatcccaaagaccctctgaaataaagtggattgatcctgcaagacccaggagacaccacaaatactgtgagtgcccaagcagttaatgtaggaaagag

SEQ ID NO: 627147 - DNA, 611 bp, Homo sapiens
ggtccctgacccccaagcctcctgactgggagaaacctcccaacaggggtcgacagatacctcatacaggagagctccggctggcatcaggccggtgcccctctgggatgaagcttccagaggaaggagcaggcagaaatctttgctgttctkcagcttccgctggtgatagccaggtgaacagggtctggagcggacttccagaaaactgcagcagacctgcagaagagggacctggctgtcagaagaaaaactaacaaacagaaatcaacaacatcaacatcaacataaaagacccccacacaaaaagctcatccaaaggtcatcagcctcaaagatcaaaggtagatgactccaccaaaatgaggaaaaaacagcacaaaatcgatgaaaattccaaaaaccagaatgactcttctccaaatgatcacaactgctctccagcaagggcagaaaactgggtggagaatgagactgacgaattgacagaagtaggctccagaaggtgggtaataacaaagtcctctgagctaaagaagtgtgttctaacctaatgcaaggaagctaagaaccttgctaaaaggttacaggaactgctaactagaataacc

SEQ ID NO: 627148 - DNA, 600 bp, Homo sapiens
aaacccaattaagctcaattagaaatgaaacagaaggcattagaactgacaccacagaaatacaaaaggttatttaaggctactatgaacacctttacacacgtaaactagaaaacctagaaaagatgaataaatttctgaaaaaatacaattctcctaccttaaatcaggaaaaattagatatcctgaacagtccaataacaagcagcgagattgaaatggtaagttaaaaattatcagcaaaataaagtccagaaccagacggaattctaccagtcattcaaagaattcacagctgaattctactagccattcaaagaaaattggtatcaatcctgttgacactattccacaaaatagacaaagagggaatcctccctaaaccattctctaaagccagtattaccctaataccaaaaccaggaaaggacttaaccaaaaaagaacactacagaccagtatccctgatgaacatagatgccaaaatygcaacaaaatactagctaaccaaatccaacaacattaaaaagatagtccattgtgatcaagtaggtttcataccagagatgcagggatggtatgcaagtcaataaatgtgac

SEQ ID NO: 627149 - DNA, 648 bp, Homo sapiens
ttcccatcaaaatatcaccatcattcttcacagagcagaaaaaaccatcctaaaattcatagaaagccaaaaaagagcccacatagccaaagcaagactaagcaaaaagaacaaatctgsaggcatcacattatctgatttcaagctatactataaggccatagtcaccaaacagcatggtactggcataaaaataggaacatagaccattggaacagaatagagaacccagaaataaacccaaatccttacagccaactgatctttgtcatagcaaacaaaaacataaagtggggaaaggacaccctattcaacaaatggtgctgagataatcggcaagccacatgtaggagaatgaaactggatcctcacctctctctttatacaaaaacaaacttaagatagatcaaggacttaaatctatgtcctgaaactataataattctagaagataacattgggaaaacccttctagacattcgcttaggcaacaatttcatgaccaagaacccaaaagcaaatgcaataaaaacaaagataaatagctgggacttaattaaactaaagagcttttgcacgtcaaaaggaacagtcagcagagtaaacagacaacccatagagtgggagaaaatcttcacaatctataca

SEQ ID NO: 627150 - DNA, 471 bp, Homo sapiens
cagaatctacaatgaactcaaacaaattagcaaggaaaaacccaccaaaaagtgggttaaggacatgaatagataatcttaaaagaagatatacaaatggccaacaaacatattaaaaaattatccacattactaatgatcagagaaatgtaaatcataactacaatgcgataccaccctactcctgcaagaatggccataatcaaaaaattwaaaaaaaaaagatgttggcatggatgtggtgaggagggaacacttctacactgctggtgggaatgtaaactagtgcagccactatggaaaacagtatggagattccgtaaagaaataaaagtagatctatcatttaatccagcaatctcactacccagaggaaaagaagtaatcatacgaaaaagatacttgctcacgcatgtttacagcagcacaatttgcaattgcagaaatgtgggaccaacccaaatgcccatc

SEQ ID NO: 627151 - DNA, 471 bp, Homo sapiens
cagaatctacaatgaactcaaacaaattagcaaggaaaaacccaccaaaaagtgggttaaggacatgaatagataatcttaaaagaagatatacaaatggccaacaaacatattaaaaaattatccacattactaatgatcagagaaatgtaaatcataactacaatgcgataccaccctactcctgcaagaatggccataatcaaaaaattaaaaaaaaaaagatgttggcatggatgtggtgaggagggaacacttctacactgctggtgggaatgtaaactagtgcagccactatggaaaacagtatggagattccgtaaagaaataaaagtagatctaycatttaatccagcaatctcactacccagaggaaaagaagtaatcatacgaaaaagatacttgctcacgcatgtttacagcagcacaatttgcaattgcagaaatgtgggaccaacccaaatgcccatc

SEQ ID NO: 627152 - DNA, 518 bp, Homo sapiens
agggcagagttctcatgaatgatttaatacaatccttccttggtactgtatagttagtgagttcccacgtgatsttattgcttataagtgtatagcacctcctcctgcgcttcctcctgctctggccatgtaagatgttcctgcttccccttggccttttgtcatgattggaagtttcttgaggcctcctcagaaaaagaagttgctatgcttcctatacagcccacaaaccatgatccaattaagcctcttttctttataaattacccactgtcaggtatttctttatagcaatgtgagaatggactaatgcagaaaattggtactgaagacagagcattgctataaagatacttgaaaatgtggaggtgaattcagaactgggtaatgggcagaagttagaagagtgtggagggctcagaagaagacaagaagatgagggaaaatttgtaacttcctagagacttgttaaatagttgtgaccaagaagttgatagtgatatggacagtgagtccag

SEQ ID NO: 627153 - DNA, 580 bp, Homo sapiens
ttttattttacaagctcataagtggaaggggcttttctggtctcagatgagactttggacttttgagttaatgttggaatgagttaagagcttggggcattgttaagaaggcatgattgtgtttttygatgtgagaagcatgtgatatttgggagaggccagaggcagaatggtatggtttggatctatgtccccacccaaatctcatgttaaattgtaatccccaatgttggaggtaggccctgatgggaggagattgggccatgggggcagatttccctctttgtactgtcctcacgatagtgagtgtattctcctgagatctggttgtttaaaagtgtgtggcatctctactctccctcctcttcctcctgtcttagccatgtaagacatacctgtttcccctttgctttctgccatgattgtaagtttcctgaggcttccccagaagtagatcccaccatgcttccagtatagcatgcagaatgcagaaccaaaagccaactactcatcttatctttataaattactcagtgtcagatatttatttatagcagtgcaagaaaaaactaataaaccc

SEQ ID NO: 627154 - DNA, 644 bp, Homo sapiens
aatgccaatgattatgacttagtactaacataacraccttcttattaaatacaagccaatctttattccttttatcagcacacaggctatttgtaaatcccttttccagaatttatgattcttttatttcctctgtggatggcaaagcaaatcattatataaatgtttttaatcttattttgcatatttaatgcatacaacatttttaggtattgtaataaaacactgaaaatgggtgtagccaccaaatctataaaccaaacatatgcaaatatggaaaatcttttgtaagttatcttataatatctggtacagtacttttcaagtaatttttacataaaaaatatcattattatagaaacaaaatatgttattttccaaggactatattttgtttacatgcatagtcctcattaagaattgctgatacagaataaatatatgtcatcctttaagtatttactttgtgcttcttcatatttgaaataaaaagtatttataagtgtttctgtatttattgtttcaaatatctatttgtagatatttccgtggacatattttagttaatctcatttcttagaatgttttctcataatgtgatatttagcaggcttctttcacaggaaaattactttctttaaatg

SEQ ID NO: 627155 - DNA, 591 bp, Homo sapiens
accaattagcagtctcttcccattttcgcccaacttatcccccacctccatcccttggcaaccactaatctgccttctatctctatggatttgcctattctgaacatttattataaatggaatcacataatatgtgtgtggcctttggtatctggcttctttaacttagcaaaacgttttcaggtcaatctccattgtaatttgtatcattacagcargtctcaattttgttcaatgctgtttggttataattttgatgagaaaatagattcccagctggggccactgtttgtggagtttgcaagttctcaccatgtcttcatgagttttctccaggtagttcagtttcctcgtacatcccaaagaagtgcattttaggttaactggcatgcctaaatgatcccagtatgagtgtgtgtgtgtgtgtgtgtgtgtgtgtgtgtgtgtgttccctgtgatggactggagtcctgtctaggatgggttcccgccttgccttctgagctgctaaaataggctgcagcgatccactactgtaaactggaataagcatgtaaataattatcttgttcttattgttcttaattctat

SEQ ID NO: 627156 - DNA, 591 bp, Homo sapiens
accaattagcagtctcttcccattttcgcccaacttatcccccacctccatcccttggcaaccactaatctgccttctatctctatggatttgcctattctgaacatttattataaatggaatcacataatatgtgtgtggcctttggtatctggcttctttaacttagcaaaacgttttcaggtcaatctccattgtaatttgtatcattacagcaggtctcaattttgttcaatgctgtttggttataattttgatgagaaaatagattcccagctggggccactgtttgtggagtttgcaagttctcaccatgtcttcatgagttttctccaggtagttcagtttcctcgtacatcccaaagaagtgcattttargttaactggcatgcctaaatgatcccagtatgagtgtgtgtgtgtgtgtgtgtgtgtgtgtgtgtgtgtgttccctgtgatggactggagtcctgtctaggatgggttcccgccttgccttctgagctgctaaaataggctgcagcgatccactactgtaaactggaataagcatgtaaataattatcttgttcttattgttcttaattctat

SEQ ID NO: 627157 - DNA, 591 bp, Homo sapiens
accaattagcagtctcttcccattttcgcccaacttatcccccacctccatcccttggcaaccactaatctgccttctatctctatggatttgcctattctgaacatttattataaatggaatcacataatatgtgtgtggcctttggtatctggcttctttaacttagcaaaacgttttcaggtcaatctccattgtaatttgtatcattacagcaggtctcaattttgttcaatgctgtttggttataattttgatgagaaaatagattcccagctggggccactgtttgtggagtttgcaagttctcaccatgtcttcatgagttttctccaggtagttcagtttcctcgtacatcccaaagaagtgcattttaggttaactggcatgcctaaatgatcccagtatgagtgtgtgtgtgtgtgtgtgtgtgtgtgtgtgtgtgtgttccctgtgatggactggagtcctgtctargatgggttcccgccttgccttctgagctgctaaaataggctgcagcgatccactactgtaaactggaataagcatgtaaataattatcttgttcttattgttcttaattctat

SEQ ID NO: 627158 - DNA, 623 bp, Homo sapiens
ccctcctctactccacatttcagcaatagtcttggaaataccagcttacattcccagtatagaaggtagcagaatgtatttcaattacaaaacattgtaataatttattttctccagtctaatggctctctggaagaccaggccaaaatgcttgcctttgttctttgtaacttggaactcagtgcaaagcaggtactcagygggttttcactttaaatatttacaggaagacatattaatcactgctgactgaggtaataaaaaaactgttggggcaaatggactaaccaaaaagcttgatgagaaagatttgggaattactttctatataaattttagaataattttttataattttgtgaaaaatgtcattggtaatttgataggaatagtttttaatctttaaattgctttaagtactatggccattttaacaatattgtctcttcctatacatgagcatagaatatttctgcaatttgtttgtcttgtttctgatttctttcagtagtgttttgtaataatcattgtagagctcttttactgccttaactagctgtattcctaggtattttgttatttttgtggatattgtgaatgaaattgtgttatttgtttggcta

SEQ ID NO: 627159 - DNA, 654 bp, Homo sapiens
atttctgtgtggttatttaagtatttttgtaagtctctaagaacttgtttaatagacctgggtgctccagtattgggtacatatatatttaggatggttaagtctacttgtggaattgaaccctttgttatcatgtaatgctgttmtttgtcttttttgatacttgttggtttaaagtctgttttacctgaaattagaatagcaaacactgctctttattttctgtttgcttgataggtctttccctatccctttgagcctatgtgtgtcctttcatgtgagatgggtctctggtagacagcatacaattgagtcttgcatctttatctaagtagtcaccttatgctttttaattggggcatttagcccatttacattcaaagttaaaattgacatgtgcagatttgatcctgtcatcatattgttagcctgttgttatgtagacttcattgtatcattgctttatagtgtaaatggtctatgtgttacactgagtttttgtgttggcctataatagtcttttgtttctgtgtttagcactccttaaggatctcttttaaggcatgtctggtggtaagaaattcccttagcatttttttgtctgaaacagattgtatttcttttttgcttctgaagcttagttaggctggatgt

SEQ ID NO: 627160 - DNA, 634 bp, Homo sapiens
gcaagatgtcaattcttcccaacttgatctatagattcaatgcaatcacaatgaaaatctcaccaagttattttgtggatatcaacaaaaaactcacttcaaaattttattaaacaattgcttgtattagcagcataattgaccaagctgaggaaataatttcagaggttgaagacttgttctctaaaataactcagtcagaaaaaattaaaaaaaaataaagaagaattattaaaaaccaccatgaaatktggcattttttaaaaaagaccaaatttttgactaattggcatcccctaaatagaggaataagagccttttcagacaagtaaaatctaaagaaatttgttaccatcagaccttttttataagtagttcttaagagagtgctaaatatggaaaagaaagactgttactggccaccacaaatacacacgcacatagaccactgacagtataaagcaaccacacaaacaagtgttcaaaatgaccaactaacaacaagatggtaggatcaaacccacacatgtaaatattaagctttaatgcaagccagctgaatgcctcagttgaaaagcacagcatggcaagttggataaagtagcaaggcccaactgtatgggtctacaagaga

SEQ ID NO: 627161 - DNA, 634 bp, Homo sapiens
gcaagatgtcaattcttcccaacttgatctatagattcaatgcaatcacaatgaaaatctcaccaagttattttgtggatatcaacaaaaaactcacttcaaaattttattaaacaattgcttgtattagcagcataattgaccaagctgaggaaataatttcagaggttgaagacttgttctctaaaataactcagtcagaaaaaattaaaaaaaaataaagaagaattattaaaaaccaccatgaaatttggcattttttaaaaaagaccaaatttttgactaattggcatcccctaaatagaggaataagagccttttcagacaagtaaaatctaaagaaatttgttaccatcagaccttttttataagtagttcttaagagagtgctaaatatggaaaagaaagactgttactggccaccacaaatacacacgcacatagaccaytgacagtataaagcaaccacacaaacaagtgttcaaaatgaccaactaacaacaagatggtaggatcaaacccacacatgtaaatattaagctttaatgcaagccagctgaatgcctcagttgaaaagcacagcatggcaagttggataaagtagcaaggcccaactgtatgggtctacaagaga

SEQ ID NO: 627162 - DNA, 568 bp, Homo sapiens
gaagataaataggggtagaaagtttattaaaagggatactagcagagaactttagaaacctagagaaaggtattaatatctaagcacaagaacattataaaccataagcagatttaactcaaaggaaactaccttaaggcatttaataatcaaagtyacaaaggtcaaggataaagaaagaatcctaaaagcagcaagagaaaagaaacaaataatatacaatggagctccaatacacctggcagcagacttttcagtagaaacctttcaagccaggagagagttgcatgacatatttaaagtgctaaagaaataaaaaaaattttacactaaaattatgtatgcagtgaaagtatcctttaagtatgaaggagaaataaagaccttcccagacaaacaaaatctgaggaatttcattaagactagatctctcttacaagaaatgctaacgggagttattgaatcagaagataaaggatgttaatgagcaacaataattcatctgaaggtacaaaactcactactaacagcacacagaaaaacacagagtattataacactgttatgg

SEQ ID NO: 627163 - DNA, 589 bp, Homo sapiens
acaaaatctgaggaatttcattaagactagatctctcttacaagaaatgctaacgggagttattgaatcagaagataaaggatgttaatgagcaacaataattcatctgaaggtacaaaactcactactaacagcacacagaaaaacacagagtattataacactgttatggtagtgtgtactcttaaattaaaagaccgaatgataaaccaatcaaaaataatacgtgcaacatgttttctagacatagtacaataagacataaagagaaacaaagtaaaaaagtagggagataaggttaagatatagagtttttgttagttttatctttgcttatttattttgcatgcaatcagtgttaagttcttgtcaatttaaaayaatgtgttacaagatagtacttataagcctcacggtaaccttaaatcagaaaacatacaacaaattcaaaaataaaataaaaagcaaaacattgaataataccaccagagaaaatcaccttcactaaaaggaagacagaaagaatggaaaaaaggaaaggaagactataaaacaaccagaaaacaaataacaagacagtgggagtaag

SEQ ID NO: 627164 - DNA, 427 bp, Homo sapiens
tgatcttttgttgttttttttaatagtaatccttacaagtgtgaggtgatatctcattgtgattttgatttgcatttctctaactattagtaatgtcaagcacctttccatatatgtgttggtcatttatatgtgctaatttttgacaagggtgccaaaaacacaccacagagaaaggacagtctctttgacatatgctgctgggaaaactggatatccacatacaaaagaataaaattggactcttttcttacaccatacacaaaaatcaatttaaaatrgattaaagacttaaacctaagacctgaaactgtaaaactcctaaaagaaaacataggggaaaagatttacagcattggtcttggcaacaattaatcctatatgacaccaaaagcacaggcaacaaaggcaaaaacaagcaacaagc

SEQ ID NO: 627165 - DNA, 572 bp, Homo sapiens
gtcttccattgtatatgtcataatttaaacaatctccaatattgacatgtttccaattttttggttctaaacatgatatttacatagtctcagagtatatccccacaagatacttgttaactactttatagtagagaaatcttgcaggcaccattgcaacaaaatgatgccagtgaacattgccagtaatgggaccaatcaatttcacgtgccctattgatatgatgcactaagaattcagaattgcttctgtggtgatcctgccaaaagtgcttaagctaaaactaatcataagaaacaaaaaataaacccaaatggagagacattctacataattacagacctatacatttcaaaactgccaatgttgtaaaatacaaataaagccttgaaattttcccaataaaataagacactgaacacaatacaaaacacaactgaacacaatacataattctgagttttcttttgctataaggastgtattaggacaattggcaaaaactcaataacatctatacactagataatagtattatatcaatgtcaagttgttaattttgataagtgtt

SEQ ID NO: 627166 - DNA, 600 bp, Homo sapiens
acatctttcagcttctgtctgtactctactatctcttgaccttttccgtggtgtttggagtttcaaatctccaggtgatataatggcttcatctcaaggatgagcctgtcttcatacttgagatggtactatcatccaacacaaaactacctggatgggccaagctcccttgtctctttaccataagctgctgatctcccctcaagtccagctgcctctgggtcaggtatgtaacctgttcaatccgtgtggcaagattgcagtgtctcatracaaaacatggaggcttattcagaggaaacctcttctgcatgttttgtgaagaagatgatggcatgtggcagatgctttagaatatcagtgtcagggattatttagttagtataaattattattcagtacattatgagaccaggaaatgtgactgaggaatgtgcccttcccctagcccttgaccttccttagatgtactaatacttgatatggtgtcataatttcttctttgtcctctgcaacttctttctctttcatgttcccttttcagttgcccaactagccctccacaagtctagtggtctgcttacagagatcatactttct

SEQ ID NO: 627167 - DNA, 572 bp, Homo sapiens
ctgtgttttcctttagttatttgagcatataaaagacagttgatgtaaagtctttgtctagtaagtccaatacttgtttttcttcaggggtggtttctcccagtttattttctttctttgaatgaacatgtttttcagtttctttatatgccttgtgattattatttgtgtgttgataattgagcatttgaaaaaacaaccacctctttcagtctttacagatttgctctgtgcttkaacagtcctgcacaattagtcaggtatgcatgccctgagtcttgggatcagcctgaggtgatagctgaaggtcttcttaagtcttttctgtgtatatgtcttgcttgggccctggtgtggctttttaaatcccctgtatagatagctgaaatttgaatatcttagtttccaaaaatgtctcattccagtttctccttgggacattagatggtccattgtatgtctccacctatattttcttgtcccacacaactacaggtctgttgctctcttgcagctttcaaaagcaatgcctgctgctttcctgcatgagctctgagttaggcaaaactgaa

SEQ ID NO: 627168 - DNA, 518 bp, Homo sapiens
agtgtgattattcacaagtctattgatgctagttataccttgtatattacataacatggtaatggtgaaggacaagtgcaaagggaaaaacagactcatttccaggaaaaaaaaaattgcaactgattaaaggacagctactgaaaaaaaaaataaaaaagctatcaaattgtggatgaaacaactataaatgattggttaagggtgggaatcacaaacattcagaaggactccatacccaaattrtataacaagtcctgttaaattggtggtctacttcaaagaaaccaaaactggaaatcatagaggatgcattatattgtggtttctgaaagaaaaaataccagtggtataccggttacaagagccaattattaaattttcaggaattgtgtgagtctgttattaaatattgccattattaataattaaatgatacaaacttaagttatattaaaaataaaagtactaaatacagaagattcatcacttcctaaatattttactgcattttacag

SEQ ID NO: 627169 - DNA, 565 bp, Homo sapiens
attaagctaattatcctgtattctcttgtttcttttgattttcccttctcccaaattcatgcagtgcctttcattgccttgggaaaaggtaagatggtgtctgactgttaaaaacttatttgagttgcaggaatatgggatgtcgagtttccaaagcctcaaccctgaaaatcttggaacttcgagtttatgccaaattcgggagtcaaagccagttttcctatcccgaactaaagagtccacaggctggggaagaaagaagtgaaggaagagcgagatattaatgggtccctgaaaaaaaatggccctgggaaatatcttccactctaggggactatatgctgtaggggtaattaaatcccataaggatgtagagaacaggaggatagaaatgttctgtgtctccctttctgggatgtttttctatgtcctccaaacccrgcaggaaataggagcagaaaatagagatggctgcattcagagtctggaaaaatagatctcagagtgccccattgttccgtaagatatgggaatggtacatgttatctatattctcaagaagaac

SEQ ID NO: 627170 - DNA, 565 bp, Homo sapiens
gtgccccattgttccgtaagatatgggaatggtacrtgttatctatattctcaagaagaacagggaactaacttgaccaatcagtctgtgacagggatgagtaggatgcaacagggatcttgatggaccaaggccagggtttagacaggagtggagacttaccaacatagatgatgaagacagaaacatatcacccataaaataaaaacaaattaaggagagagataggcaatctgagataactgaggaaaacttgaattgttgaggttatttctacaacccagcttattgaaaccagagatcagaatttcagttcagagacattagctgctcaccaaagtttaaaaactcagaacttacacccactgtatctttgtctctgatatccaagccagggtcagggatattaaaaacactcaaaattttatttttggtaacttatagaagatctgcattttagccaggaatggtggctgacacctataatctcagagttttgggaggctgagacaggagaattgcttgaggccaggagttcaagactatcttgggcaacataacaaga

SEQ ID NO: 627171 - DNA, 554 bp, Homo sapiens
tactcctgttgttactttagactttttcaaactcaactcttgaacagttggctcaatagtcctgatattgattctatcctttgacttggtgtttgtgtgtgcttttctaaatgttttaactccaacttattctctacggaattttactcggctctccatccctgcttttttaaactcattttaatgagttggacaggaaatgccctgcttcatctcaaaacacacagtacccaaccctcacatttcccattaatcagtggccrtctgggccagccctctcccataacaaacttcaaaggagaaacaaaaggagggtggccaaaaacattataccatactactaccattttggtaatagcccacctaaaatgacagggtcagatttggagagcagaatcccgtgaaccactttgggaattaaatcagcaaaagcaatcaagtggcaattaagtggtatcaagctctaacccaagagctcccaatctctgtaccatagatgcctgagagactaatcagttcttacaaagattttgccaatccatatatataggaat

SEQ ID NO: 627172 - DNA, 512 bp, Homo sapiens
tttcatttgcttgtttcatctatgatttctttcrgcagtgttttgtagttcttgtagaactttcacctccttggttaaatctattcctagggattttacttttttgcagctactgtaaaagggtttgagtttttgattgattctcagtttggttgttgtcgatgtatagcagtgctactgatttgtgtagattcatttcgtagcatgagacattactgaattcatttatcagatctttagagtctttagggttttccatgtatacgatcatattgttggtgaacagtgatagtccgctttcctcttttccaatttggatgccctttatttctttctttcgccagattgctctggctaggacttccagtactatgttgaatagaagtggtaaacatgggcatcctcgtcttgttccagttctttggggaagtgctttcaaattttccccattcagtatgatgttgactatgggtttagacattttaatttaattttatttatttttgagacag

SEQ ID NO: 627173 - DNA, 554 bp, Homo sapiens
tagaaaataaactttagaaaatcttggtgacaaattctaacatttgatttgatrgacatatataaaagtaagttgaaggaagagaaaataaatatagaagcagaaattaatgaatagaaaaaaaagccaatcaataaaagttaatttgtagaaaatactgataaacaagaaaaacacctgggaagaaggaataaggagaaaatgaacaaataatattgggaataaaaggataacataagaatagatagaagatatcataaaagactaaacgattttgaaaactaaaatcatttatatagtttgtgccctatagaagcttaaaataatgtagatctcttcctgactcctccatgaaatgatgtattggacacctttctccatcttccatgcagtcaacccacattttactgtagtcattgttgtgccaaacagctttgcatgggtgtgacctaatagctgtggtcacctcatttttctttccaatgtgcaggaagccatagcactcatatgcatatgccatctggaagtaagagggatttaatagcccatggggt

SEQ ID NO: 627174 - DNA, 554 bp, Homo sapiens
tagaaaataaactttagaaaatcttggtgacaaattctaacatttgatttgatggacatatataaaagtaagttgaaggaagagaaaataaatatagaagcagaaattaatgaatagaaaaaaaagccaatcaataaaagttaatttgtagaaaatactgataaacaagaaaaacacctgggaagaaggaataaggagaaaatgaacaaataatattgggaataaaaggataacataagaatagatagaagatatcataaaagactaaacgattttgaaaactaaaatcatwtatatagtttgtgccctatagaagcttaaaataatgtagatctcttcctgactcctccatgaaatgatgtattggacacctttctccatcttccatgcagtcaacccacattttactgtagtcattgttgtgccaaacagctttgcatgggtgtgacctaatagctgtggtcacctcatttttctttccaatgtgcaggaagccatagcactcatatgcatatgccatctggaagtaagagggatttaatagcccatggggt

SEQ ID NO: 627175 - DNA, 587 bp, Homo sapiens
caataaaatgaaaagttgattttttgaaaagataacraaattggcaacctttaggtagactaagaaaaaaagagagaagacccaaataaataaaatcagaaatgaaaaaggaaacataacaactgacacttaagaaatccaaagaatcattagagactattatgaacaactatacactggcaaattggaaaacctagaagacatacgtaaattcctggatgcatactacctaccaagattgaaccatgatgaaacagaaaacctcaacaaaccaataataaataatgatatcaaagccataataaaaagtctcatctcaaagaaaagcccagaacctggtggcttccctgctgaattctaccaaacatataaagaaggactaatcctgcacgatttttaatttgattagatccatttttcctggcttttttgagataatcattctttccttccctccttttttctattaatatggtgaattacattataggtttgttaaactaactttccattcttgatataaacatatctttgtcattctgtattaacctttttatccattgctggattcagtttgctaatatttt

SEQ ID NO: 627176 - DNA, 582 bp, Homo sapiens
atattcatgcaggatataggcatgaagtcttytttttttgttgcatctctgtcaggttttggtatcaggaagatgctggcctcatagaatgagttgggaagaagtccttcctattttttgggaatagttttagtaggaatggtagcatctcttctttgtacatttggtacaattaggctgtgaatctatctagtactggacttttttggttggtaagctatttattactgattcattttcagagctcaatgttgttctgttcagggaatcaattttttcctggttcagtcttgggaggatgtatgtgtttaggaatttattaagcctgatgattaatctgtggggtcagtggtaacatcccttttgtcatttctaactaggttttttttgaatcttctttcttttcttctttgtctagctagtggcctatctgattagtttttttctaaaatccaacatttggatttgttgatcttttgagtgttttgtgtgtgtgtgtgtgtgtgtgtgtgtgtgtctcagtatccttcagttcagctctgactttggttatttcttgtgttctgctagcttggcattggt

SEQ ID NO: 627177 - DNA, 582 bp, Homo sapiens
atattcatgcaggatataggcatgaagtcttctttttttgttgcatctctgtcaggttttggtatcaggaagatgctggcctcatagaatgagttgggaagaagtccttcctattttttgggaatagttttagtaggaatggtagcatctcttctttgtacatttggtacaattaggctgtgaatctatctagtactggacttttttggttggtaagctatttattactgattcattttcagagctcaatgttgttctgttcagggaatcaattttttcctggttcagtcttgggaggatgtatgtgtttaggaatttattaagcctgatgattaatctgtggggtcagtggtaacatcccttttgtcatttctaactaggttttttttkaatcttctttcttttcttctttgtctagctagtggcctatctgattagtttttttctaaaatccaacatttggatttgttgatcttttgagtgttttgtgtgtgtgtgtgtgtgtgtgtgtgtgtgtctcagtatccttcagttcagctctgactttggttatttcttgtgttctgctagcttggcattggt

SEQ ID NO: 627178 - DNA, 627 bp, Homo sapiens
gctttactttctgactaatcctaaatgcaacattactatgtactaggatcctcagtttgttctcacattatcatgtaaaatcactgattttaacttgttttattccaactttttcagctttctatattaaaaggagtgtgcaaaaaaggtttacttacattctagcaaagyaacattttactactggttatcaaggttaggtcttggttttacttgtgcctgataaccttgatttacagtgggtagagtttatgtgtaggggtgggaaggcagggagaatttatgatcagcttggaacaaatattggtatagactcagtgttggaatgggtgactggatgatttttctgaaaataggaatctccaaaggaagtgtctgaatagattattacatagaataagagtttcaaatattgttaatgtcttctgccacccctaccactaaaagagctccattttgatgaggacgtatagttttttttttgtttttgttttgttttatttttggtgggggggtctttttgctttttatttttatactttaagttctagagtacatgtgcacaatgtgcaggtttgtaacataggtatacatgttttgttagctctgcctggtgttttgttttat

SEQ ID NO: 627179 - DNA, 573 bp, Homo sapiens
atggttataaaaagagaatgagtatcataacatttttgcctatatacacttttaaatatttatcaggatctacatttttcttaaactgttaatttggatgtgttgaaatgtagcctataaatttctttttaagtaattgttactaaaaaaccttatggatcttcacatgtctggttccaattaatctgcttagactaatggataaaataataaacctgatttagtcaatctggacttctatatgagttttctatgtgcctctttaaggtctaatgccttctcctacacatatttagttcttagttatactcttataaaacgtggtaattgaagaataattaatttgattcattttcttaaaaaaattttgcagttacatcmgtacaaaaaggcatcttcaaatgagtgtcaatgattatcaaaagaaaactatatacatctttgtgaatttaattaatcaagtatgtattgagcacctactatgtaccaggaactggggatacaaagaataagacatgggtggtccttgttctcagaaaattctcaatcttttaaggagactgacaaaaatac

SEQ ID NO: 627180 - DNA, 645 bp, Homo sapiens
gcatgtatgtgacaatcctatgcatgctaagtaaatgtagattttaactgtggccactctacttatttcagaagccacaaaacctttgctcagagcaaccccattcatcaaaagacctagtaaacttacagaaatttcatacaggaggttagaaattctgtagcaaggttaaatccatgtgacccgctgaatcagtgttaagaggtttgctgagggtgagattaaacattattagccctagtygctttgacttgaagaatatttcagtatctatcaatctcttcctatcactcacataccattaaagtcttctcagcactatggattatataaatattcaaaagaaatatgctgactttttagtatattttataatatatggagactggcatattaaaaaatttgttgacattgcaaatggcctatttcctacaattcaatcagaattttattcatgctactaagtcaccatagcaagagtaataactgtctttaatggaccacaaataaaagccatgggggaaatgttaaggccttaagtttgattcttttggtataaggaagcttcattagtaggtaactacactatttctgcatcaggttaatttgggggaaataagttatacaatcatctttatttaagta

SEQ ID NO: 627181 - DNA, 569 bp, Homo sapiens
atcacctggcatgttcttttcattccatttccatatgtccaaaattcaccaatttttaagacttgcaaatgctaccttttccacgaagccktctctgactcctccagatgaaaaatagtttctccttgttataaatcatgacaggaatttatatttctctaacagtttttctcacttgatttttgtttcttaatgaatatgctttaatgtctcctggtctacatacttttaagggaggacccttatctgatacatctttatatagccttaagtacctagcagagtatcttttatagagcagaagttcaataaacatttgttaagtgaaaaagaaaaataatgaaatatcaattctcctaagtattcccactaccatcctacttacattaatactatgctctatctatctcacccccatctctttccttataatcgccacttccaaattagtggaattggatttgatgtgattttatttggaacatacacacagttgggctcatagttaagtcatacctggcagtatccaattttgggattcctgtatgcataagctgtgagtacccttc

SEQ ID NO: 627182 - DNA, 569 bp, Homo sapiens
atcacctggcatgttcttttcattccatttccatatgtccaaaattcaccaatttttaagacttgcaaatgctaccttttccacgaagcctyctctgactcctccagatgaaaaatagtttctccttgttataaatcatgacaggaatttatatttctctaacagtttttctcacttgatttttgtttcttaatgaatatgctttaatgtctcctggtctacatacttttaagggaggacccttatctgatacatctttatatagccttaagtacctagcagagtatcttttatagagcagaagttcaataaacatttgttaagtgaaaaagaaaaataatgaaatatcaattctcctaagtattcccactaccatcctacttacattaatactatgctctatctatctcacccccatctctttccttataatcgccacttccaaattagtggaattggatttgatgtgattttatttggaacatacacacagttgggctcatagttaagtcatacctggcagtatccaattttgggattcctgtatgcataagctgtgagtacccttc

SEQ ID NO: 627183 - DNA, 553 bp, Homo sapiens
tatataaaacaccatgggtaaaagtttccattcaaaagagccagagcaaaaatgttcaaaaactttaagtttagttccttgaataatctactttattacactcttcaaaatttcaaacattaaactaccatctttgaaggtaaatgttttttattttatttcttttgtcatttttttaaattttctaaccacctactgcctgttgatgaaggtgaaggttttaacgtgactttatgaatacttaagaggcaataatggatagaactgacatacttgtcatcactcttataaatttatgtttagggtttcattgcttaagaggttatttttttccctctgggatacttttcctgtagtttagaacaatagataaactgatgattcagtcatttaaattaaaggaatgtgctgtgcttgagatccagactacaaccatgaattttccaacctgtatttgcaaaaatgtaaytcctcgttcaaacagctaaacttaatattaagttgtcaagtatgtgatttgtcaaaataagcatttaaaaaaaaaaagaaggga

SEQ ID NO: 627184 - DNA, 612 bp, Homo sapiens
ctgcaaaaaaaaaaaaagaaaaaaaagtcctatttacaccctataaaataatacaaaagattcaggaatcgattcttctggtttatgatttctaacaattccatagggtcaaaattgaaagcaacctttgcaagcatgaaacttgcccacaaatgaagatcaagttcaaaattattggcaaggattgacaacaacaaaaaccaggagataaagattcaaaattaaaatatagccatttaccttcattactgacaacagttcaaacatatgtccaccaagatgcaattcccttcggatgcatttrgccgtctctacataaaatcaatacatccatacaatttacagagaggtgctaggcactgtccctcctgcagagcctcaccacaccaagaacaatctttttaagataataaaagtacaacttgactatcacgggtaaatacatatgctagaaacttgctagaaaacatttcacgtgtgtgaaaagagaggagaattggagaagttaaaaaaaaaaaatcccaggttcaatatccactccttcctcccccattatcatacctccctggaaagcttttttttaaaatgcataattccaacaaaaatcccatt

SEQ ID NO: 627185 - DNA, 566 bp, Homo sapiens
agatctgcctggattttcttcctttgttgctgttactttggggctttgcctgcctactcctgccccggtgcccacctgtattattctgttctaatgctgctaataaagacataccagaaactgggcaatttataaagggaagaggtttaatggactcacagttccacgtsactggggaggcctcacaatcacggaggaagacgaagaaagagcaaaggcacatcttacatggcagcaggcaagagagagtttgtgcagggaaactcccatttaaaaaaccgtcagacctcatgagacttattcactgccatgagaacagtatggtggaaaccacccccattattcaattatttccacctggttctgtccttgacacatggggaattattacaattcaaggtgagatttagatgaggacacagtcaaaccatttcaccacctgctctgatccttaccctcctgcttcatcccctttgaagactgactggtgaggtgcccaccccatgctgctgactgtccacctccctcctttctggcaggattttactgaggatgatgtaaatctt

SEQ ID NO: 627186 - DNA, 546 bp, Homo sapiens
gcctactcctgccccggtgcccacctgtattattctgttctaatgctgctaataaagacataccagaaactgggcaatttataaagggaagaggtttaatggactcacagttccacgtcactggggaggcctcacaatcacggaggaagacgaagaaagagcaaaggcacatcttacatggcagcaggcaagagagagtttgtgcagggaaactcccatttaaaaaaccgtcagacctcatgagacttattcactgccatgagaacagtatggtggaaaccacccccattattcaattatttccacctggttctgtccttgacacatggggaattattacaattcaaggtgagatttagatgaggacacagtcaaaccatttcaccacctgctctgatccttaccctcctgcttcatcccctttgaagactgackggtgaggtgcccaccccatgctgctgactgtccacctccctcctttctggcaggattttactgaggatgatgtaaatcttcctcagagcaacaaaaatatttccagcaaag

SEQ ID NO: 627187 - DNA, 585 bp, Homo sapiens
gacacagacacaccacattgtcacatgcttccaagtaacacacattctgttccttggaatttccttcccattcttctgccagaactactggaacaagagtacttcctactcttttttcaaggcttccttcaagaacttcgttttggaagccctcccttaagaccagacagagcagttattctttccctgtgtgtacttggagggtgaagtgcctcctacgcagaccacggcctccacgagaaaaggacccaggccagtcttgcccatggtatgaagcccagcatttagcacaaggttggcacaatggcaagcactcagaaaatgtctgttggttgaaaaagtgactgaacatatgttagcatttatctcacaaaagcaattattyaaatatgccctgtcatcttcattagactatgatgtcattatggacaggggctgtttttattttcattatctccagtgcccaggacaatacttggcacatagcagcatgaataaaggaatgagtgtggctgactggctaactgaatgaatgaatgaagtgtacctaactgaatgaatgaatgaagtacagcaccctaatct

SEQ ID NO: 627188 - DNA, 535 bp, Homo sapiens
aatatgccctgtcatcttcattagactatgatgtcattatggacaggggctgtttttattttcattatctccagtgcccaggacaatacttggcacatagcagcatgaataaaggaatgagtgtggctgactggctaactgaatgaatgaatgaagtgtacctaactgaatgaatgaatgaagtacagcaccctaatctgaccttatctgatctatgctcatccaagataattttcctctttaataaacattttggtattcaaagcactctgcagccccacagtgaggacgctgggtatctattgctgaatagctgattattccaacaacctagtggctraaaacaacaaacatttattatcttgtagtttctatgggctgggaatctgggtatggctgagctaggtggttccagcttggggtctctcaccaggctgcacccaggtgttactgggcctgcagttacctcaaggctgactggggtctgtttgcaagctcattcatgtgtctgtagggaggccaccattcctgacca

SEQ ID NO: 627189 - DNA, 544 bp, Homo sapiens
atttgagttagttaaaaataaggcacaatgcttttcatgtattcctgagttttgtggactggtgttcaatttgcagcattcttagttgattaaatctgagatgaagaaagagtgtccaacactttcaccttggaaagctctggaaaarcaaaagggagagacaattagcttcatccattaactcacttagtcattatgcattcattcatgtaactaccaaacacgtactgagtgcctaacactcctgagacactgagaagtttcttgggaatacaaagatgaataaaaaccacgccaggcaggagttggaggaaggttctggatgccaccacgctctacctcctggctggacaccaggcaatgttggtaaccttctgcctccaatttctgcaaatacataattaataaacacaaggttatcttctaaacagttcttaaaatgagtcaactttgtttaaacttgttctttttagagaaaaatgtatttttgaaagagttggttagtgctaggggaaatgtctgggcacagctcagtctggtgtga

SEQ ID NO: 627190 - DNA, 505 bp, Homo sapiens
tcctctctgtttgtgtgttttgtgtatcagtttttacctgtgatgaaagtagctgcttcctcaccatcgccatgactcgccataaagtacctgtagactccagcctccaggtgccccagtgatcctcaattcctgatagtcacactcttgtgtartttccttccacatggtaccagggttggtctgcgagaccaaaagaacacagaagaggtgcttcttcattcctgatattgggttatgaaagacacggtggtttctagcttggtctttctttcttcttcttgggtcattccttctagggaggccctgttggcagcagccccacggagaggcccaagggtgaaaaaatgaggcctccgggccacagccatgagtatgatcccaaatgcagagcttccatccctagtccagtcttcagatgacggcagccttggctcacatctacagtgcaacctcatgagaggccctgatcctgaaatacccgactaagctgcttcatgattcc

SEQ ID NO: 627191 - DNA, 505 bp, Homo sapiens
tcctctctgtttgtgtgttttgtgtatcagtttttacctgtgatgaaagtagctgcttcctcaccatcgccatgactcgccataaagtacctgtagactccagcctccaggtgccccagtgatcctcaattcctgatagtcacactcttgtgtagtttccttccacatggtaccagggttggtctgcgagaccaaaagaacacagaagaggtgcttcttcattcctgatattgggttatgaaagacacggtggtttctagcttggtctttctttcttcttcttgggtcattccttctagggaggccctgttggcagcagccccacggagaggcccaagggtgaaaaaatgaggcctccgggccacagccatgagtatgatcccaaatgcagagcttccatccctagtccagtcttcagatgacggcagccttggctcacatctacagtgcaacctcatgagaggccctgakcctgaaatacccgactaagctgcttcatgattcc

SEQ ID NO: 627192 - DNA, 496 bp, Homo sapiens
catcattgtatgtctttgagctctcctttcttttaatgggaaatgctgcttagaagccaagaactaagctcgtatgctaccagctccgaggcatccctgcttttaaaaccctctgagtaggtaaagctaggatgtgtgtgtgtctgtgtgtgtgtgcgtgtgtgtgtgcatgtgtgtgtgtgctttaaatccctgttttattactayttcctggaaaattcacgaagacatggtttcttatcctttttgattttatgtgtgtataggtatatatatgtttgcactaataacattaacagttatttattctaaaagatacattaaatgatgtcaaaattatgatacccaaattactactaacaataaaaccactgagtgaattgcaagatttctctataattctcttcatcctttcaatataaccaccaaggatttaaagtcaggttgctgttttcaaagattacttgaaataatttttctccatgttattatgtta

SEQ ID NO: 627193 - DNA, 496 bp, Homo sapiens
catcattgtatgtctttgagctctcctttcttttaatgggaaatgctgcttagaagccaagaactaagctcgtatgctaccagctccgaggcatccctgcttttaaaaccctctgagtaggtaaagctaggatgtgtgtgtgtctgtgtgtgtgtgcgtgtgtgtgtgcatgtgtgtgtgtgctttaaatccctgttttattactacttcctggaaaattcacgaagacatggtttcttatcctttttgattttatgtgtgtataggtatrtatatgtttgcactaataacattaacagttatttattctaaaagatacattaaatgatgtcaaaattatgatacccaaattactactaacaataaaaccactgagtgaattgcaagatttctctataattctcttcatcctttcaatataaccaccaaggatttaaagtcaggttgctgttttcaaagattacttgaaataatttttctccatgttattatgtta

SEQ ID NO: 627194 - DNA, 576 bp, Homo sapiens
aaaattaattgtacattcaataaatccttaaaatactaatatctagtgtagattgttaataagtatatatctaataaatggatatgcacaattttttttctaggaaaataattctatagggctaatgtttcacttgcctcactttaggaaatgttgaccaagctaagccacagtgcccaaaaccattgataaaactttagtcaggtaacctgattcagatactggaattataaaacgatgattgacatgttaaaggmtttaatttaaaaaaaaagtacataatatgcaagaacagatgggtaaggtaagaagagagatggaaactctgggaaataacaaaacagaaatagtagaactcagaaaaaacctactataacacaaataaaacatgtcctttgatgagcttatcatggatgggagagacgggaagaaagagttgatgagcctgaaaatatggcaagagaaacttgccaaaatgagatggaaagaaaaaaaattgagaacagcaccaatgacgacagcacgaatgggacatcaaagatctctaggacaatgtgaaaaggtgaaaaacatgaa

SEQ ID NO: 627195 - DNA, 576 bp, Homo sapiens
aaaattaattgtacattcaataaatccttaaaatactaatatctagtgtagattgttaataagtatatatctaataaatggatatgcacaattttttttctaggaaaataattctatagggctaatgtttcacttgcctcactttaggaaatgttgaccaagctaagccacagtgcccaaaaccattgataaaactttagtcaggtaacctgattcagatactggaattataaaacgatgattgacatgttaaaggctttaatttaaaaaaaaagtacataatatgcaagaacagatgggtaaggtaagaagagagatggaaactctgggaaataacaaaacagaaatagtagaactcagaaaaaacctactataacacaaataaaacatgtcctttgatgagcttatcatggatgggagagamgggaagaaagagttgatgagcctgaaaatatggcaagagaaacttgccaaaatgagatggaaagaaaaaaaattgagaacagcaccaatgacgacagcacgaatgggacatcaaagatctctaggacaatgtgaaaaggtgaaaaacatgaa

SEQ ID NO: 627196 - DNA, 593 bp, Homo sapiens
atcataaaaatatatttcagatcccaatggaactaaaccagaaaccaaataatagcaaaaataactagaaaatttccaactatttggagattaaatagcacatttctaaataacatatagatcaaagtaaaagtctcaagagaaatgtaaaaagtaatttgaactaaataaagataaaaattactttaaaaagtggaagaaagtgaaagcattctttaaaagaaaatgtatagcatgaaatgratgtattagaaagatgaaaaatgtaaatcaatataatatttcaccttaggaatccagaaaaaggtgtacaatttaaccctatagcatgaggaaaaaatgtaatgaataaaatgagagcagaaatcaatgaagttgaaagtaaaaaaatagagaaaataaaataacatctaagtaaatagagatatagtccgtgttcatgaattggaggatttaatattgttgaagtgtctgtttttttccaaattgacctataaattcaatgcaatactaataaaagtctcagtgagccactttgtaactataaataacctgactctaacatttatatggaaagtcaagaaacatagact

SEQ ID NO: 627197 - DNA, 593 bp, Homo sapiens
atcataaaaatatatttcagatcccaatggaactaaaccagaaaccaaataatagcaaaaataactagaaaatttccaactatttggagattaaatagcacatttctaaataacatatagatcaaagtaaaagtctcaagagaaatgtaaaaagtaatttgaactaaataaagataaaaattactttaaaaagtggaagaaagtgaaagcattctttaaaagaaaatgtatagcatgaaatgaatgtattagaaagatgaaaaatgtaaatcaatataatatttcaccttaggaatccagaaaaaggtgtacaatttaaccctatagcatgaggaaaaaatgtaatgaataaaatgagagcagaaatcaatgaagttgaaagtraaaaaatagagaaaataaaataacatctaagtaaatagagatatagtccgtgttcatgaattggaggatttaatattgttgaagtgtctgtttttttccaaattgacctataaattcaatgcaatactaataaaagtctcagtgagccactttgtaactataaataacctgactctaacatttatatggaaagtcaagaaacatagact

SEQ ID NO: 627198 - DNA, 550 bp, Homo sapiens
accagtaatctagagatgatttaaaatattcaagaggatgttcatggggttatatgmaaagttacttaagcattttacctcagagacttgattatccatttgcatatgggttttggtttacatatgggtcctggaaccaatcccccatgggtacggaggggcagctgtactctgaaaaacagcaaaacactgttgaataaatttcaaaaaacctaaataaattttaaaataccctatgttcataaatcaaaagacctagtgttttttaaatgacaatactatccaaatctacagatccaaggttaagacagtgtgatattgttaataggacagacgtatagaccagtgggataaaactgagagcatggaaagaaacgcatatatttatagtccatcgttttttgacaagggtgtcgagacagctcagttaaacataaataggtcttttgaacaaatgatgctgggacaactagatatccagctataaaagaaataaattagaacccttccttctaccatgaacaaaaattaactcacaatggattaaaca

SEQ ID NO: 627199 - DNA, 550 bp, Homo sapiens
accagtaatctagagatgatttaaaatattcaagaggatgttcatggggttatatgcaaagttacttaagcattttacctcagagacttgattatccatttgcatatgggttttggtttrcatatgggtcctggaaccaatcccccatgggtacggaggggcagctgtactctgaaaaacagcaaaacactgttgaataaatttcaaaaaacctaaataaattttaaaataccctatgttcataaatcaaaagacctagtgttttttaaatgacaatactatccaaatctacagatccaaggttaagacagtgtgatattgttaataggacagacgtatagaccagtgggataaaactgagagcatggaaagaaacgcatatatttatagtccatcgttttttgacaagggtgtcgagacagctcagttaaacataaataggtcttttgaacaaatgatgctgggacaactagatatccagctataaaagaaataaattagaacccttccttctaccatgaacaaaaattaactcacaatggattaaaca

SEQ ID NO: 627200 - DNA, 556 bp, Homo sapiens
atgggttttggtttacatatgggtcctggaaccaatcccccatgggtacggaggggcagctgtactctgaaaaacagcaaaacactgttgaataaatttcaaaaaacctaaataaattttaaaataccctatgttcataaatcaaaagacctagtgttttttaaatgacaatactatccaaatctacagatccaaggttaaracagtgtgatattgttaataggacagacgtatagaccagtgggataaaactgagagcatggaaagaaacgcatatatttatagtccatcgttttttgacaagggtgtcgagacagctcagttaaacataaataggtcttttgaacaaatgatgctgggacaactagatatccagctataaaagaaataaattagaacccttccttctaccatgaacaaaaattaactcacaatggattaaacacctaagtgtaggaagtaaaactataaaacttttagaaggaagcacagacgtctatcatcatgaccttgaattagtcaaagttcccttaaatgagatactggaagcacaaag

SEQ ID NO: 627201 - DNA, 556 bp, Homo sapiens
atgggttttggtttacatatgggtcctggaaccaatcccccatgggtacggaggggcagctgtactctgaaaaacagcaaaacactgttgaataaatttcaaaaaacctaaataaattttaaaataccctatgttcataaatcaaaagacctagtgttttttaaatgacaatactatccaaatctacagatccaaggttaagacagtgtgatattgttaataggacagacgtatagaccagtgggataaaactgagagcatggaaagaaacrcatatatttatagtccatcgttttttgacaagggtgtcgagacagctcagttaaacataaataggtcttttgaacaaatgatgctgggacaactagatatccagctataaaagaaataaattagaacccttccttctaccatgaacaaaaattaactcacaatggattaaacacctaagtgtaggaagtaaaactataaaacttttagaaggaagcacagacgtctatcatcatgaccttgaattagtcaaagttcccttaaatgagatactggaagcacaaag

SEQ ID NO: 627202 - DNA, 556 bp, Homo sapiens
atgggttttggtttacatatgggtcctggaaccaatcccccatgggtacggaggggcagctgtactctgaaaaacagcaaaacactgttgaataaatttcaaaaaacctaaataaattttaaaataccctatgttcataaatcaaaagacctagtgttttttaaatgacaatactatccaaatctacagatccaaggttaagacagtgtgatattgttaataggacagacgtatagaccagtgggataaaactgagagcatggaaagaaacgcatatatttatagtccatcgttttttgacaagggtgtcgagacagctcagttaaacataaataggtcttttgaacaaatgatgctgggacaactagatatccagctataaaagaaataaattakaacccttccttctaccatgaacaaaaattaactcacaatggattaaacacctaagtgtaggaagtaaaactataaaacttttagaaggaagcacagacgtctatcatcatgaccttgaattagtcaaagttcccttaaatgagatactggaagcacaaag

SEQ ID NO: 627203 - DNA, 556 bp, Homo sapiens
atgggttttggtttacatatgggtcctggaaccaatcccccatgggtacggaggggcagctgtactctgaaaaacagcaaaacactgttgaataaatttcaaaaaacctaaataaattttaaaataccctatgttcataaatcaaaagacctagtgttttttaaatgacaatactatccaaatctacagatccaaggttaagacagtgtgatattgttaataggacagacgtatagaccagtgggataaaactgagagcatggaaagaaacgcatatatttatagtccatcgttttttgacaagggtgtcgagacagctcagttaaacataaataggtcttttgaacaaatgatgctgggacaactagatatccagctataaaagaaataaattagaacccttccttctaccatgaacaaaaattaactcacaatggattaaacacctaagtgtaggaagtaaaactataaaacttttakaaggaagcacagacgtctatcatcatgaccttgaattagtcaaagttcccttaaatgagatactggaagcacaaag

SEQ ID NO: 627204 - DNA, 584 bp, Homo sapiens
tagcagcatagtgcatcaatgcaattgtacccagatataattctattgtatttaagccagaaaaatcaaaactacctactaatgcagcacattttttcagcttgaatttttaatttaactgactcctccaaattgagcaaatgatgcataggtgcgtgtccagattcaatgatcaaattcttcaataaaaagggagggtggatgggaaggcagttccagatgagtcctatcagaatctaagatttgcagattctgtctaatgttactgtggattttcttccactttatgtcaagttactaaaccttatataagggtagagtaattaagccagcctagagaaattataagcacattgtcagaacaccyacgccaaagtccaggaatgactgtcagcaattttggatcccagactgttacacttgctttccttggcaagctctaatcaatgagccagccacagaggatcgaaggcaactgtgatgaaatgccaccttatgaagtaattggcttcatggatctgcccagatgaatcataaaactattcatcaatatcctcagttgtgcagcagtgagctgttacgtg

SEQ ID NO: 627205 - DNA, 601 bp, Homo sapiens
atctgcaggatcactggatggcagaggggcctttgcatggactccagcagtccagtggccaggtcagccgtgcggtgaccatgtgggcctaacataaycctcatcttcactggactccagacagacttctttctgaccttcctttgcttacagcattaactttagaaagacttgaaattgcaaatcatttctctgcccatgtgagatacaaatcttctcctagattcttgccagttttacactcaggaatatttttctcaaggagctagaagcgattcctttgaaatgtaatcatctctgtgggagagtgagagcctagttttataagcaccaatcagaaaatccagatggcttaattgcattggccgacctcactcctgacatcttcccatccctctccactggctcaccccagcacttaaactctatcctgccatttgtttcagtggagttgagttcaatctctctcccctattgccccagtcttgaataaagtcttccttgcctgtttatcccacctcatgcagtttttctttgatagcagtttaaggagattaaactagcaccacagggaacagcggggaaatgaaaaatcctgaag

SEQ ID NO: 627206 - DNA, 601 bp, Homo sapiens
atctgcaggatcactggatggcagaggggcctttgcatggactccagcagtccagtggccaggtcagccgtgcggtgaccatgtgggcctaacataatcctcatcttcactggactccagacagacttctttctgaccttcctttgcttacagcattaactttagaaagacttgaaattgcaaatcatttctctgcccatgtgagatacaaatcttctcctagattcttgccagttttacactcaggaatatttttctcaaggagctagaagcgattcctttgaaatgtaatcatctctgtgggagagtgagagcctagttttataagcaccaatcagaaaatccagatggcttaattgcattggccgacctcactcctgacatcttcccatccctctccactggctcaccccagcacttaaactctatcctgccatttgtttcagtggagttgagttcaatctctctcccctattgccccagtcttgaataaagtcttccttgcctgtttatcccacctcatgcagtttttctttgatagcagtttaagsagattaaactagcaccacagggaacagcggggaaatgaaaaatcctgaag

SEQ ID NO: 627207 - DNA, 636 bp, Homo sapiens
taatcatctctgtgggagagtgagagcctagttttataagcaccaatcagaaaatccagatggcttaattgcattggccgacctcactcctgacatcttcccatccctctccactggctcaccccagcacttaaactctatcctgccatttgtttcagtggagttgagttcaatctctctcccctattgccccagtcttgaataaagtcttccttgcctgtttatcccacctcatgcagtttttctttgatagcagtttaaggagattaaactagcaccacagggaacagcggggaaatgaaaaatcctgaaggaaataccaggcaggagaatttatttaaaatccagccaaaattcactaaarcctaaacagtgcagtcttctggaaatggaaagaggttgctcagggacaagcataggcatgagattcagggcagcctaggggagaagtggccatcagcggcacccaaggccaaagggacctagcttagtggatccactgctagataggaagacaagattaaagactgcatcattatcttgggtatgaacatctggaggtggatctgttcaaaaaccagatggacttgcatttctgcaggaagttctgagtcagtatcaggattaagtattacc

SEQ ID NO: 627208 - DNA, 567 bp, Homo sapiens
ttctggtacgaattgttctcataaaggtggtgtatcttttagaaaatttayttgagcaaaggagaacttatggaagaaatgagaggaaaggcaaaatagtaataataataccaaacctgtgtctgaaagcacaggaggcagagcagcagccagaccttgagtgtcaggaggcactggagagtctcatcagagtggagctgttgggatgaatcagccatggtgtttgttcttagtcctgcaccccttgacccaaaattccatgtcctggaagaagcatctgtttggcctcatctgagccctgggaaccgtcaggcagaacatcaactgcaaccaggctgcgcacagagggtgattgtcttaaaggaagccagaagcctatgcactgaccactgcacatcctgctggtgatggagggagccgcccaacagaagcatggcagaggaaaaaagctgagaactgagaatatttgcttggagctaagtggaagtccaaggatggtctattgtaaagtagaagcagatagaaggatgtcacaaccaataacctctttgtttttagtaagcaagc

SEQ ID NO: 627209 - DNA, 567 bp, Homo sapiens
ttctggtacgaattgttctcataaaggtggtgtatcttttagaaaatttatttgagcaaaggagaacttatggaagaaatgagaggaaaggcaaaatagtaataataataccaaacctgtgtctgaaagcacaggaggcagagcagcagccagaccttgagtgtcaggaggcactggagagtctcatcagagtggagctgttgggatgaatcagccatggtgtttgttcttagtcctgcaccccttgacccaaaaktccatgtcctggaagaagcatctgtttggcctcatctgagccctgggaaccgtcaggcagaacatcaactgcaaccaggctgcgcacagagggtgattgtcttaaaggaagccagaagcctatgcactgaccactgcacatcctgctggtgatggagggagccgcccaacagaagcatggcagaggaaaaaagctgagaactgagaatatttgcttggagctaagtggaagtccaaggatggtctattgtaaagtagaagcagatagaaggatgtcacaaccaataacctctttgtttttagtaagcaagc

SEQ ID NO: 627210 - DNA, 583 bp, Homo sapiens
agatttcaattatttaaaaggaacaaggtccacaggctcaggaaagcttgagtcacaaactcacagccgggtgagtgagaacccttaggtggggcaaaatggactctgcctctgcctctgtgaagacgggatcatgctaattctgctaatttgagggagaattttctctgtggaatggagataagaaggtaagaactgccgtctagattcagtttttgagctaactagctggatgacctcagtgagtccctgaactttcytatatgcacatttctaagctgagaagtgagcaactttggagcagcagtgcctgatatcaactgccccttactggccaggcaccatctgcctgcacggtgcatagcctggacatttactgaaccaagcacctatgcattcgctcttttgctaccagaactacgatgaagctggtgtcctcattggatagaaggtaatatctgctcaataaacattgttttatatttacaacaatggtaattacaagtatgacacaaaaaagtgacattttagggtagctttgtggcttaaaaaaaccttaataattttagtcagatgggtggta

SEQ ID NO: 627211 - DNA, 583 bp, Homo sapiens
agatttcaattatttaaaaggaacaaggtccacaggctcaggaaagcttgagtcacaaactcacagccgggtgagtgagaacccttaggtggggcaaaatggactctgcctctgcctctgtgaagacgggatcatgctaattctgctaatttgagggagaattttctctgtggaatggagataagaaggtaagaactgccgtctagattcagtttttgagctaactagctggatgacctcagtgagtccctgaactttcctatatgcacatttctaagctgagaagtgagcaactttggagcagcagtgcctgatatcaactgccccttactggccaggcaccatctgcctgcacggtgcrtagcctggacatttactgaaccaagcacctatgcattcgctcttttgctaccagaactacgatgaagctggtgtcctcattggatagaaggtaatatctgctcaataaacattgttttatatttacaacaatggtaattacaagtatgacacaaaaaagtgacattttagggtagctttgtggcttaaaaaaaccttaataattttagtcagatgggtggta

SEQ ID NO: 627212 - DNA, 582 bp, Homo sapiens
gccttctgcttcccggctttactgagaagggggaatgcagatgtaaatgaaaaagaaatgtgctggatggaccggagggaaatcagctcagctaagtgcacggccctgggtagctgtgaggttggggcaggtcatgggagattcatattttttccaggccagttctcccattcataatgtaacatttacaattttttttctgccccagtagaacggaaaggaatctaaccacaggttcttttctagcagcattggctcggagctgcctatccacctaccaagagactcccgtctcactctccaccttgtgtgttttttttacttcctccacgataccttcttctttttttttttcttcctkgtcccatttctctcttctgttatgaaaaagcaatagtagcggtgggttgcctgtaagataagtttgttttgttttcaacctttttattatttaaccctcacccacagggaggtaaactgataccctatcaaggaagagacagacaaacccaggaaacaggcagggggattgtgcggaaattccagatcaggatttgcttgggctagaagatttaatttgcc

SEQ ID NO: 627213 - DNA, 607 bp, Homo sapiens
atgaacagaggtgatactggattccccatatttaccacaatggcgaaaagagataattctgaattcctgagtctgtgcacccaggtcttgggggtggtggggtggggacagctatgtggaaagcatggtgacaggatgattcctggagtgctygggcacctcagaggctttgcctgtgggtggggacctgggcctggggcataatcaatggcctgatcaccaagatcacaaaactgcatcccctgcctggtcatctgctcatctgggtataaacggctggtcacagcggtgaccccggcctgtccctctcatccgggttggggagagtaagaggttggctggttccatgtccgctggctgggggatccagtatggaggtccagagctcccgctgcgaaggccaggactatccccggatggacagactgagggcccccaggctgagacccgggctccttctggggcactgccttcatggcgaggtggtcaccaggacctggggatggctcacgttcctggaagctaagccctgctgggcagcattccaaggcctctgtggactcaggcactcagccctcgccagggccccgcgggtggggctgctgtg

SEQ ID NO: 627214 - DNA, 607 bp, Homo sapiens
atgaacagaggtgatactggattccccatatttaccacaatggcgaaaagagataattctgaattcctgagtctgtgcacccaggtcttgggggtggtggggtggggacagctatgtggaaagcatggtgacaggatgattcctggagtgcttgggcacctcagaggctttgcctgtgggtggggacctgggccyggggcataatcaatggcctgatcaccaagatcacaaaactgcatcccctgcctggtcatctgctcatctgggtataaacggctggtcacagcggtgaccccggcctgtccctctcatccgggttggggagagtaagaggttggctggttccatgtccgctggctgggggatccagtatggaggtccagagctcccgctgcgaaggccaggactatccccggatggacagactgagggcccccaggctgagacccgggctccttctggggcactgccttcatggcgaggtggtcaccaggacctggggatggctcacgttcctggaagctaagccctgctgggcagcattccaaggcctctgtggactcaggcactcagccctcgccagggccccgcgggtggggctgctgtg

SEQ ID NO: 627215 - DNA, 607 bp, Homo sapiens
atgaacagaggtgatactggattccccatatttaccacaatggcgaaaagagataattctgaattcctgagtctgtgcacccaggtcttgggggtggtggggtggggacagctatgtggaaagcatggtgacaggatgattcctggagtgcttgggcacctcagaggctttgcctgtgggtggggacctgggcctggggcataatcaatggcctgatcaccaagatcacaaaactgcatcccctgcctggtcatctgctcatctgggtataaacggctggtcacagcggtgaccccggccygtccctctcatccgggttggggagagtaagaggttggctggttccatgtccgctggctgggggatccagtatggaggtccagagctcccgctgcgaaggccaggactatccccggatggacagactgagggcccccaggctgagacccgggctccttctggggcactgccttcatggcgaggtggtcaccaggacctggggatggctcacgttcctggaagctaagccctgctgggcagcattccaaggcctctgtggactcaggcactcagccctcgccagggccccgcgggtggggctgctgtg

SEQ ID NO: 627216 - DNA, 379 bp, Homo sapiens
attttggaccacagagtcttcgccgtgtgatggccaagaggcccccttgttccatttgttctcaattgtggcacagttaagaaaacactcaagcttctgtttggactttcattgtttctcttaaaagatccttctgctgtttaacaaaagtytgtgtgcagaacacccagatataccagtggtgattataacacagttcctctgcctggaggactgtgtcatccccgtctccacccctgccccccggagcctctctctccatgatttctttcttctgaatcataaaaggcctgagagattctccactatgttctgaattctggtgacacatacagtgggaattcacaagaggacaaagcctgcatttgcccagatcatc

SEQ ID NO: 627217 - DNA, 616 bp, Homo sapiens
cttggaagcctgaatttttccccccttttttcttggagtcatcactggaatcactttctttttagtgacctttgggcttcttcagtaattaatatctctcttacagtaagagatgtaagcaaatctataatcacccttccaatctcttttcctgacttgtttgatacttcactgactctgrttctgtggcgtaggtagcatatcactgtactcattccatttcaccctacttagttcccaggaagtctttgttttccatctatcttatggattttgtactcactgggccaaactgacatcaaacacaattctcctagaaaacactccttttccacttcattgatgttttccacagttctccttcacagcacatatatccaatctgttcagtgactgcagtactaaatatttagtagctattctctttttcctcactactaagttccaggacagggatggcaactgggcaatagtaagccctcaagaaatattagaaaggaaagaaatgaatgaatgaactgtcattttttgacacagcatttcactgtattgccaggctaaactacaagtcctgggctcaagcaattctcccacctcagcctcccaagtagctggc

SEQ ID NO: 627218 - DNA, 630 bp, Homo sapiens
gcacgtgtgtgtgttggtaggctgggggctaggaggaggcaatataaatcaatctaagattttctgggctcatatttttattgaaaatctgaagaactaatcacctagttactaactttgttttcctcctggagttctacaatcaaggyaaaaacacctagcgtgtgttcaattttgtgtctgatacgggagaaagcttagaggaccgaattttttgcccttggtttctgacccatcttactttgattccttgagtccttggaagagtagtctatacttgtaacctctacttttttccttcactccatgtcttaggttgggttctcagggaagcagattctgagacagagttagaaggcaggatattaattaatgagttctctagagatgcatgcctatggaagcagggttggccagaaggagaagatgcactgtgacacaggccctgtgattgctctgtcaacctcacaggaatctccagagtgagacaggcttccagtgcatccgagttaggccaaaatggctagacctttatactcaccagaggtcactccctttctcagggtagcacccatctaatgacagggatcagtcaatagatgggtgctaccctgaaaagggaagtgacat

SEQ ID NO: 627219 - DNA, 557 bp, Homo sapiens
ttatttcatctcatctctattgtcttcggttcaaactggtgatgtctctgctactatacttccatctctattcttggtttctgctgaaatgactgactagtaccttgtgtaatctccttatggagtgattgtccatccatacccttggttttctctccagaacatgctttcttattttttgtaatacacatagatttttaacatctatatttctgctaacaggaaatctaggatttttctagcctgcacatcaaaacttttccagactctgccaatcacccagytgtaaagccacttctccatttttacatatttttcactagcaccccaaattttggtaccaaaatctgtattagtcttctaggactgttgtaacagaataccacagactgggtggcttaaacaatagaaatgtatttcctcacagtcttggggactagaaattcaagatcaaggtgacagcatggttggtgtctggtgaaggctctctccttggattgcagacagctgccttctcactgtgtcctcacatagcctctttgtgcacacatggagag

SEQ ID NO: 627220 - DNA, 621 bp, Homo sapiens
ccgctagaggcagaatatatttcacccttcaactttgggctcaactatatgtcttactttgaccaataggacgttagcagatgtgatgcaagcaagggcttgaatgtgcttgaatagttggacwtgttctcttgcatttctgccatggccgtgagaagagttttcttggggcagctgttctacagcaaaataagtcctcttggaacatgagaaaagttggctgtatcacacacacacacacacacacacacacacacacacacacacatacacacacaccctggaagattgaagccaagcccagcagagccccgcttagatcagtggatccccagacaacccataattgttcgtatgagtaggaataaattattgtttaaagtcatttagttttggagtggtttgttacatagcatgattgtggcaatagtttactaatctgttctttcctactttctttgcttgccaaaattccacttttccttcaaactttagcttagatggcacctcttatgaaaccttctccagtctttacagtgaaaattaattgtattaattgctttctcccctgtaatatcatgctttatgtgcattttgctatattaactttttttttgcttt

SEQ ID NO: 627221 - DNA, 608 bp, Homo sapiens
tcctcagaaaaaaacgcatatagaaagaacatactcaacaaaataaaagctgtaaacgacagacmcataactagtatcatactgaatggggataaactaaaagcctttctcttaaaatcaggaacaaaacaaggatacccactgtcaccaccgttattcaacatagtactagaagtcctagctagagcaatctgacaagagaaagacataaagggcatccaaattggaaatgaagaggtcaaattatccttgtttgcagatgatataatcttatatttggaaaaacctaaagactccaccaaaaaactgttggaaccgataaacaaattcagtgaacttgcaggatataaaatcagcatacaaaaatcagtggcattttctatatgccaacagtgaacaatctgaaaaataaatcaagtaatcccatttacaatatctaaaaataaaatagaatacctaagaattaaccaaataggtgaaaattttccactatttccaaatagtggaaaaataaatcaagtaatcccatttacaatatctaaaagtaaaatacaatacctaagaattaaccaaataggtggaagatctctacaaggaaaactataaac

SEQ ID NO: 627222 - DNA, 597 bp, Homo sapiens
agaattcaagtccaggcagtctggctccagaatctaggctcttagcactacactgcaytgcctggggcttggagagagtaaagagaagtgtggggcaacaggagcctggggaggcagatggaggccaatccatgtgaggactttttaggcctgggaaggagtttttctttatcctatgagcagtgagtagcccctaaactatttttagcagagacatgacatgattttgttcacattttcacaagctcactctggcttcttgttgagaatagactgtaagggtcaagggtagagtcggcaagaccagttagtggttattgcagtcatccaggtgggagataaggaagaactggactaggatgatgacagtggagagaaatgaagggattcagtaaatatgtgggaggtagagttggcaggaccctcttagtaaaccaggtgagggaggttaggtggaaaaaaaagaaaaagagtaacaaatcaaagattactgataggtgtggatttgagcaaccagatggatggtggtacctaggttctttcttgccctttactcatgtggactctggctgcatcttgtctttctgacttctagga

SEQ ID NO: 627223 - DNA, 597 bp, Homo sapiens
agaattcaagtccaggcagtctggctccagaatctaggctcttagcactacactgcatygcctggggcttggagagagtaaagagaagtgtggggcaacaggagcctggggaggcagatggaggccaatccatgtgaggactttttaggcctgggaaggagtttttctttatcctatgagcagtgagtagcccctaaactatttttagcagagacatgacatgattttgttcacattttcacaagctcactctggcttcttgttgagaatagactgtaagggtcaagggtagagtcggcaagaccagttagtggttattgcagtcatccaggtgggagataaggaagaactggactaggatgatgacagtggagagaaatgaagggattcagtaaatatgtgggaggtagagttggcaggaccctcttagtaaaccaggtgagggaggttaggtggaaaaaaaagaaaaagagtaacaaatcaaagattactgataggtgtggatttgagcaaccagatggatggtggtacctaggttctttcttgccctttactcatgtggactctggctgcatcttgtctttctgacttctagga

SEQ ID NO: 627224 - DNA, 417 bp, Homo sapiens
gaattcaatgaccaaataaaattgaaaggaaaaaaataccttaacccccttcctcctgcctccaatgttagcttctataagacctaagatttttggtcttagggttcagtttcccagcaaatgctcctttggagtggggcatatgtagtgtagcaagaggtttcatactcttctgtgagagggtccaggttaatttctgagagtccaagctgcttggagttgagcccctgaggaacagtcttctggagttgcacagtttgcaattcatcctggaagtctgacatgtaaktccaataaatggcaggcctttgctgagtgtgggatcctgagagaccagtgcctgggaaccccttcctcccaattcattcattcaccaaatatttattaagcaccagatgatgcagaacaaggcgagta

SEQ ID NO: 627225 - DNA, 589 bp, Homo sapiens
gccaccattttgctgtggtccctttgcagcaataaaatggtggcataaatgaaaactttcagatcaaacacatatgagctgcctgtcatcagctttggtttcttcccaacttgcatgttgatataggatgtcttgagacctcaaataattttaaggggattttgcctccaattgagtcctgtaatatttaaaatgttccaacagacatgggcctgtaatgctctttcttccaaaacattacattctcacctcttaattgtaattgcatttgtaaaaaatactgcagaaaaaaaagtgataamggaggctaatttttaacataaacaaaagatttaaaaaaaaaatctttgaagatgtcctacagtgaacctcagaactaagtcctaagcaattattttgcttattttccaagaccctctcccctttagttgcaggggccatgctgcaaatacaatccaaaactaatgctttctaatttccattagtgattaatttaagccacagaatccagagggtgtgctgtaaatgcacagaaatcagttctaaaggttttggcctgctgttttctgctggatgatggtgaattctg

SEQ ID NO: 627226 - DNA, 589 bp, Homo sapiens
gccaccattttgctgtggtccctttgcagcaataaaatggtggcataaatgaaaactttcagatcaaacacatatgagctgcctgtcatcagctttggtttcttcccaacttgcatgttgatataggatgtcttgagacctcaaataattttaaggggattttgcctccaattgagtcctgtaatatttaaaatgttccaacagacatgggcctgtaatgctctttcttccaaaacattacattctcacctcttaattgtaattgcatttgtaaaaaatactgcagaaaaaaaagtgataaaggaggctaatttttaacatraacaaaagatttaaaaaaaaaatctttgaagatgtcctacagtgaacctcagaactaagtcctaagcaattattttgcttattttccaagaccctctcccctttagttgcaggggccatgctgcaaatacaatccaaaactaatgctttctaatttccattagtgattaatttaagccacagaatccagagggtgtgctgtaaatgcacagaaatcagttctaaaggttttggcctgctgttttctgctggatgatggtgaattctg

SEQ ID NO: 627227 - DNA, 598 bp, Homo sapiens
cttttgcttattattccccctttcctccagagagatagcctagaagtatttatagtatttatagagttcctactatgcacctgcattagtttgccagagctgccatagcaaaataccacaggctggttggcttaaacaacagacacttgttttctcacagttttggaggcttgaagtccaagatcaaggtgtcagcagggttggtctcttctgaggccacctctatttagcttgcagaaggctgctcctcacatggccatccctctgtgcatgtgcatccctgtgtctattccttttcttagaaggacaccggtcagattgaaatagggcctcatcttaccagccttattttaacttaagcacttctttaaaaaccttatcttcaagtatggttacatcctgacatactaggcattggaatttcaaaattcaaatattaggtggacacaattcagcccattacagtgcccaactcaatcctctgtattgtggggggatacagaagaggcaaggsttacattcttgccccagaggggttacgattcagttgtggaaatgaaactaaaatacaaaccaatcactaaagttccaagccagt

SEQ ID NO: 627228 - DNA, 577 bp, Homo sapiens
ataccacaaggtgagtcacaacaacctgtatttctgaggggaccacaatgaaaaccccatgtctggtcaagtgaggcagaggatgttatgtacccaagctgggcctagagcagtcaggaaaacagtaaagtggaaaattgctcctagaggggatagaaagccaagagagctgccctgaccagcagggattcgggttcaagataaacacttgcccatccaaggcaccagtatcagaaatattccatcccttcctttggaaagaataagacttttcttactsatgttcatgatgtaaatggcattattttactctatgctgttggggctcctgaggagtccaacctcagatctaaatgtagctagaagaaagcagattttagataaaaatctaaaagtggtaagagttggctaaagatagattttgctgcctcagggcatagtgagttcattctgggaatgtttgaagcagaagtgaaatgcttcttcttcaaatggaaatgcttccatttggcaggaaaggtgtggaagggaatcaaacatacttagagatggagaagctcagaggactctcctcaaa

SEQ ID NO: 627229 - DNA, 603 bp, Homo sapiens
caggtgtcttttttgtataatgactacttgttctctgggtagatacccaataatgggattgctggatcaaatggtagatctacttttaggtctttaaggaatctccacactgtttatcatagtggctgtactagtttacattcccatcagcagagtaaaagtgttccctttccaccacgtccacaccaacatctattatttttttattttttgattatggccattcttgcaggagtaagttgatatcatattgtgattttgatttgcgtttccctgataattagtgatgttgaacatkttttcgtatgtttgtcagtcatttgtatatcttctttttagaattgtctatttatgtccttaggccactttttgaagagatcatttgttttttattgctgatttgcttgagttccttgtagattctggatattagtcttttgtcaggcaccccattgcagtagccatgttctctttattggaagtgagttactaggtcctgctgacactcaggaaagtgagattacacaaggacatgaatattaggaggcagggatcaggggccgtttgtagaggttgcctaccactgtacccaaacatggtagc

SEQ ID NO: 627230 - DNA, 603 bp, Homo sapiens
caggtgtcttttttgtataatgactacttgttctctgggtagatacccaataatgggattgctggatcaaatggtagatctacttttaggtctttaaggaatctccacactgtttatcatagtggctgtactagtttacattcccatcagcagagtaaaagtgttccctttccaccacgtccacaccaacatctattatttttttattttttgattatggccattcttgcaggagtaagttgatatcatattgtgattttgatttgcgtttccctgataattagtgatgttgaacattttttcgtatgtttgtcagtcatttgtatatcttctttttagaattgtctatttatgtccttaggccactttttgaagagatcatttgttttttmttgctgatttgcttgagttccttgtagattctggatattagtcttttgtcaggcaccccattgcagtagccatgttctctttattggaagtgagttactaggtcctgctgacactcaggaaagtgagattacacaaggacatgaatattaggaggcagggatcaggggccgtttgtagaggttgcctaccactgtacccaaacatggtagc

SEQ ID NO: 627231 - DNA, 575 bp, Homo sapiens
tgtggggctctaatcactatttaatgttcactgactctgtcatggtacatttttctcctgaataattttaaaatgttttaaaattctgaccacatctttgttattatttttttttcctamgaaacacttgtgggaatacacctccggaatattcttccatcttcaatcaaatttaatattaattttcttgcttggacacacatggactgtgtaatcagtaaggatatgccaaacagagtctattttccaaatatatattttcaagaacacagacaaaagttacaaaaattagtcaaattctgggccacaaaaataactcattacaaatttctctgacctcttgtaattcaattagaagtaaatcacaaaatgataactagtaaatctacctatgtttgaaaatcaggcatttcacttctaagttaccaatggctttaaaaagaaactatgagaaattataaaatattttaactgaatgacaatggcaatgtgataaattaaaatcttgtgttatacggttaaataagaacttagagaaaatgttatgtccttaaatggatattaaaaatgaaaaa

SEQ ID NO: 627232 - DNA, 575 bp, Homo sapiens
tgtggggctctaatcactatttaatgttcactgactctgtcatggtacatttttctcctgaataattttaaaatgttttaaaattctgaccacatctttgttattatttttttttcctaagaaacacttgtgggaatacacctccggaatattcttccatcttcaatcaaatttaatattaattttcttgcttggacacacatggactgtgtaatcagtaaggatatgccaaacagagtctattttccaaatatatattttcaagaacacagacaaaagttacaaaaattagtcaaattctgggccacaaaaataactcattacaaatttctctgacctcttgtaattcaattagaagtaaatcacaaaatgataactagtaaatctacctatgtttgaaaatcaggcatttcacttctaagttaccaatggctttaaaaagaaactatgasaaattataaaatattttaactgaatgacaatggcaatgtgataaattaaaatcttgtgttatacggttaaataagaacttagagaaaatgttatgtccttaaatggatattaaaaatgaaaaa

SEQ ID NO: 627233 - DNA, 575 bp, Homo sapiens
tgtggggctctaatcactatttaatgttcactgactctgtcatggtacatttttctcctgaataattttaaaatgttttaaaattctgaccacatctttgttattatttttttttcctaagaaacacttgtgggaatacacctccggaatattcttccatcttcaatcaaatttaatattaattttcttgcttggacacacatggactgtgtaatcagtaaggatatgccaaacagagtctattttccaaatatatattttcaagaacacagacaaaagttacaaaaattagtcaaattctgggccacaaaaataactcattacaaatttctctgacctcttgtaattcaattagaagtaaatcacaaaatgataactagtaaatctacctatgtttgaaaatcaggcatttcacttctaagttaccaatggctttaaaaagaaactatgagaaattataaaatattttaactgaatgacaatggcaatgtgataaattaaartcttgtgttatacggttaaataagaacttagagaaaatgttatgtccttaaatggatattaaaaatgaaaaa

SEQ ID NO: 627234 - DNA, 526 bp, Homo sapiens
actttggcagttcatttctttgcagcaaattggagccattacataatgggttttatgatatataccagaaaagttcaaagaggggtctggtggatgatcctttgttttgcttacatccaaaccaaacaaagcaactagttaactcagcaacaaatcaaccaaccaacagacataaaagaattaagcagtaagatgttgctaacattacagaaaacaattgccttgacctttatcacagaatcaaataaaaatgatgagaataactgatatttattaagttcttttcataccccaactccatgctaagcactttcctgtatgttcctatttatgcttcataattcttccagatgtagtttaatatccatattttatagctgaaagaattagttagagarcaacttgccaaaagtcacattgtataaaagaggcaaagctgagattcaagtaaagattgttataactgaaaaacctggtgccttaaccagtacaccataagcatttatctaaaaataaaattacttat

SEQ ID NO: 627235 - DNA, 613 bp, Homo sapiens
tatccaatttcccctcatgccacagattctcccatttctctttctcaaaactctttgaaatgtttctcccatatccaagcagcatgttcctctttgtattctccatgttttccagatcaaaggtgatggaactaaagaggtaaaactcttgttagtgggtgagtttggaaaggatgtggcaaaatcttgtaacagtttttgtcctctcacaactataaaaagtgacccaatgctgagcaaatcaacatcaactagaagagcactggtgtcgagacaacaatgttagtwtaaacctcaccttgactttcaaggtatttgatagtgggaaatttacttaacttctctcaaagttcctgtcttcttttgtaaaatgtatgttaatacctactttatacctgctttacagataaggtttgtaaaatatttagcttttgggcctggcacacagtgagctcacaacaatctgtagctacggtctccctgaaaaaagttaaattgttatctggagccagatgtggtggctcacacctataatcccagtgcttttggaggccaaggtggggggatcacatgaggccaggagtttgagccatcctgggcaacaaagccaaac

SEQ ID NO: 627236 - DNA, 604 bp, Homo sapiens
gtctggtttcaaattctagcttcagtgtttactaagtgtattgctttgaacaaaccacttaggttttcaaatcctcagtctcctcagctataaaatggagaaaataccacttactttgtaagttgttatgaggattaaatgaacatataaagtactttgcacagttcctgtcaaatcgtaaaggcttagtatacataagacagtgccatcatgatcattaatataatyactttcaaaaatacatctttactgagctaataaaggctaaactttgtcttagacttggagaccaaagaaataagtaagacatgatccctattttcaagatgctctaagtcttgagataaataaaaagatgtatataaaccattggaaattactatgtgaataatagtaccagtgtctgctgataaatgcttaccaaccagcaatctgggggcaggaggaatacatatatacatacatacaagtattataaattttactaataatgtttttattgtttttttgctgaactcttgtatccatcatcaacttctggttacaactgaaaaaagaaggtagctttgctatgaatggttattgatatctttgtgtacattaa

SEQ ID NO: 627237 - DNA, 582 bp, Homo sapiens
gtagtctaatagtcaaattaaaaaaaatcaactgtcaccttacttgttagactggacaaattaggaagctggataatattacacagctgtgctgtgctcaaatgtctcygtgaatatgttggtagttcatctctgtgggagtttggttattgattctaaaaattccttctctgattgcacttcttcaggatcaggatgatatatcacttttttcttccttcaaataagtgtatttgaaaataaatacacatgagatttctatataatatcactatacacaaacaagaatggctaatatttaaaaagactgataatagtaaggattaatgaatatgtggataaatcagaattctcacatacttcagttgagtataatttgaaatagccactttgtacagttagtatttattatctactaaagctaaaggcatccttattttttgatctggcaattccacttttaggtatataaccaaaaaaataacatgcaatatgctcctcaaaatacaatcactgaaatgcttattgcagcattagttgtaaaagtcaaaaactgggtgtggggggcaatccccaataccc

SEQ ID NO: 627238 - DNA, 582 bp, Homo sapiens
gtagtctaatagtcaaattaaaaaaaatcaactgtcaccttacttgttagactggacaaattaggaagctggataatattacacagctgtgctgtgctcaaatgtctctgtgaatatgttggtagttcatctctgtgggagtttggttattgattctaaaaattccttctctgattgcacttcttcaggatcaggatgatatatcacttttttcttccttcaaataagtgtatttgaaaataaatacacatgagatttctatataatatcactatacacaaacaagaatggctaatatttaaaaagactgataatagtaaggattaatgaatatgtggatmaatcagaattctcacatacttcagttgagtataatttgaaatagccactttgtacagttagtatttattatctactaaagctaaaggcatccttattttttgatctggcaattccacttttaggtatataaccaaaaaaataacatgcaatatgctcctcaaaatacaatcactgaaatgcttattgcagcattagttgtaaaagtcaaaaactgggtgtggggggcaatccccaataccc

SEQ ID NO: 627239 - DNA, 633 bp, Homo sapiens
ttgaaatagccactttgtacagttagtatttattatctactaaagctaaaggcatccttattttttgatctggcaattccacttttaggtatataaccaaaaaaataacatgcaatatgctcctcaaaatacaatcactgaaatgcttattgcagcattagttgtaaaagtcaaaaactgggtgtggggggcaatccccaatacccatcagcatgataggtgaacaaatgtgatatatccacacaatgaaatattacacygatctacagacacatgcaaaaatatggaggagtctcacagacatggtgttgagcgaaaaaagccagaccaaaaaagagtacatactgtatgagccattttatataacacaaaaactagtggaactcctctatgctgctaggttacccctggatgggcagggctggagggagcctgggggggtttctgagatcctgttgttatcctgattttttatttggcttctggttatgtaaatgtgattagtttgtgaaaatttgttgtgctgaacacttaggatgtacatacttttctgcaggtatgttgtacttcaatagaatgcttttaaagtacatgtatgcagttttccctgcagaggctcagtgaagagggcaa

SEQ ID NO: 627240 - DNA, 416 bp, Homo sapiens
agtttctgactttgaagatggaagaagggaaccataagccaagaaatgtaggggcctctagaagccaggaaaggccctcaatggataactgcaataaaaaaggagacctcagtcctaaaatcacaaggaattgaattctgccaacagcccaaaggagcaagaaaatgaatcttgtcctagagcctacaaaaggaatgcaggtgccctgccaatgccttgattttagcccagtgaaattcatgccagactacagaactgtaagataatacacttgtgatgttttaagccactaagtttgtggaaaactgtcacagmagccatagaaaactactataccttttaaatcaaattctatgattctcagtctagtaggatatgacagaaaaatgaagtcagactttttcctcaagaactgt

SEQ ID NO: 627241 - DNA, 590 bp, Homo sapiens
agttgcctgtgcttttggggcattactcaagatatctttgtccagtccagtatcctatagagtttccccaatgttttcttttagtagtttcatagtttgaggtcttatatttatatttttaatccattttgatttggtttttgtatatggtgagaaatatggctctagtttcattctcctscttatggatagctggttttctcagcaccatttattgaagagaccgtccttttttcattgcatgttctcggcacctttgtaaaaaatgagttcactgtagatacatggatttatttctgggttatctattctgttccattggtatatatatcttttttttatgccagtaccatgctgttcaggttactgtagctcggtagtgtaatgtgaagtcagatcatgtgattcctctcattttgttctttttgctcaggattacttcactattctgggtcttttgtggtttcatataaattttagtattatttttctatttatgtgaagatatcatggttattttgatagagattgcattaagtctgtagattatttctttgggtagtatagacattttaacaatattgattctt

SEQ ID NO: 627242 - DNA, 663 bp, Homo sapiens
  misc_feature 620: n = A,T,C or G
tacagtttataccggcttcttttgttcaacattatatttgtgaaaattatatatgttacatgtagcattgtttttctgctgttgtatgaaaattccacaatttaggcattcattctattcttgatggacatttgagatagttttggtttggtgctggcacaaaaaattctgccatgcacatttttttacatgttttattgtgactatatgtatgcatttcttctggacatacgctcgcaaaggaaattgccaagtcatagagaatgtwcatggtcagctttcctagatacagtcaaatagtattccaaagtatttatatcaacccatactcccaccaagaatttaggagagttctggttgattcacaaaatcaccaacacttgggattgcttatttattttagctattcttgtaattgtgaaattatattggtttcaatcagcatttgaacttttttcctacgttggttggtcatttgaatatcttcttttgtaaagtgtcttttcatttcttttgcctactttatctattatgttatctgattttttttctattccctttttggagttttaaaatatatattctgtatatgaaaattttggtgatatctgtattgcaanatctttgttcattctgtggcttgtcttatcactgccttaaaaa

SEQ ID NO: 627243 - DNA, 663 bp, Homo sapiens
  misc_feature 620: n = A,T,C or G
tacagtttataccggcttcttttgttcaacattatatttgtgaaaattatatatgttacatgtagcattgtttttctgctgttgtatgaaaattccacaatttaggcattcattctattcttgatggacatttgagatagttttggtttggtgctggcacaaaaaattctgccatgcacatttttttacatgttttattgtgactatatgtatgcatttcttctggacatacgctcgcaaaggaaattgccaagtcatagagaatgttcatggtcagctttcctagatacagkcaaatagtattccaaagtatttatatcaacccatactcccaccaagaatttaggagagttctggttgattcacaaaatcaccaacacttgggattgcttatttattttagctattcttgtaattgtgaaattatattggtttcaatcagcatttgaacttttttcctacgttggttggtcatttgaatatcttcttttgtaaagtgtcttttcatttcttttgcctactttatctattatgttatctgattttttttctattccctttttggagttttaaaatatatattctgtatatgaaaattttggtgatatctgtattgcaanatctttgttcattctgtggcttgtcttatcactgccttaaaaa

SEQ ID NO: 627244 - DNA, 613 bp, Homo sapiens
aattattgctgagccaagtgaacttctgttttcaccttatgtatgttttaatcgcttcagctttcttacagtgaacatgtattcctttcataaggatacttttacagataaaaaggtcactcctaaaatgaaataaagaaaaaggggaagaaaaagaggcaaaagctactaggatttcaaattcagatgccaagatggtagctctgtcataaaagaaaaagascttcctagtctgaagtcatttatctggcaccatagctgtctgagcagatcaagtaaaacttcgagaagcaaattttaaatcttcaagtcttggtatctgtatgatttcccaagtagttcaaagaaaacattgggccaaccaacaatatagaaaaagctcaaatccatcatccacaatttttgtagggtctactaaaaaattatactatgcatattccatgggaaaagaaaggacaatcaaaatggcaagatctctggcttctagcatccagtagaaatgttgaggaggagacttcctgaacaagatccatctggataggttatactatcagatatgttgctatttctgcgatgtgaaatgagatgtgacataagtaataataaaagtagt

SEQ ID NO: 627245 - DNA, 618 bp, Homo sapiens
agtacatttaaagggaggaattgcaaataataatttaatttaattcaacacaattcattggtcagttgaggtgaatcaaattcctctagttataaatttctaaatttataaacattcacacaaggtatacatacaagmaaaagcatatcaaccctttctaccactaacagttttctcattcactagtatgtcactttaaactttgaaacaaacagccttatgaagctttccttgttcttaagcagaagccttccccctcccccacttttttgagatgaagtgtctctctattgcccaggctggagtgcagtggcgcaatcttggctcactgcaacctctgcctcctgggttcaagctattctcctgcctcagcctcccaagaagctgggactacaagcacccgccaccacacccaactaatttttgtatttttagtagagacggagtttcaccatgtcggccagcctggtctcaaactcctggcctctagtgatctgcccacctctgcctcccaaagtgctgggattacaggctgagccaccgcaccgggcccagaagaccttctattgtataatgacagaccttatcatgtactagatgctggaagtacaaagatga

SEQ ID NO: 627246 - DNA, 586 bp, Homo sapiens
tggtgggactgtaaattaattcagccactgttgaaagcagattggaaatttctctaagaacaaaaacaaaactaccatttgacccagcaatcccattactgagtatatactcaaagtatatatctattctaccaaaaagatacatacactcatatcttcattgcagcactattcacaatagcaaatatacggactcaatctatatacctattaatggtaggctggaaaaagaaaatgtggcacatatacagccatataatactatgcaaccgcaggaaaagcaaaatcatgttcttacccgaaacgtgcatgcagctggaggccattatcctaaatgaattaacacaggaacagmaaaccagataccacatgttctcacttataagtggaagctaaacattgagtacacatgggcacaaaggtgagaacaataaacactgaggcctgcttacagggagagggtaggtggaggatagagggtcaaaaaactaccctttgggtactatgctcactacccgggtgatgaaatcatttgtactccaaagtacggtgatacacaatttacccatctaacaaaccacacaaa

SEQ ID NO: 627247 - DNA, 530 bp, Homo sapiens
atttaacaactatctacaaataagaacacctttataagaaccaaaaatcaggttagcaatcatagtacctggttttgacatcaaattaaggaaagaggcactgaagaggagcataaaggtagtcttgaattgcctataccacccctccctgattcccctacagtggctgcatggcacagagccaagttcaatctgcgaacttggggaagggagagtatatgattgtaggactttgcattggagcccagtgtggacctgtcacagcrgaaagcaataccaggcagaacttagccagcatatacagaggaagaatttagaccagccctagccagaggcaaatcatccatcccagctattggaacctgagttctgtcaagccctgctactgtgagctaaaattccccggggtcataataaacttaaagaccagcctagtccacaaggactgcaattcctgggcaagttctggtgttgtgctggctcagagacagaggacttttggaacacacgacctagtgagataccagctg

SEQ ID NO: 627248 - DNA, 569 bp, Homo sapiens
aactgccctgggtgagaggggagcccacttccctaaagagagtcccaggcctggcarcattcaccaaataatgactgaagagtccttgggccttgagtgaacattggcggtgccaggcaatacttgccatgggcctgagtggtggtggccatggggagtcctgtttgaggaaatggcagggaagagtggggagggcattgtcttgcagcttaggtgccagctcagccagagtagaatagagtgccaggtagattcctaaagttcctgtctccaggccttggctcttgaaagtatctccagatccacgcagggctgggaggaactcactgtcctgaagggaaagacacaagcctggctggtcttccacctgctgattgtagagcccatgggcctaaagtgaacataggcaatagccaggcatttgtcactgcaggtctttgatgcatcccagtgctgtgctggctttgggtggagtcccagggatggaggccacaggggtactgtgtcacccactcccacaggtccaggcagctcagcacagagagagagagagagagagagagagagag

SEQ ID NO: 627249 - DNA, 569 bp, Homo sapiens
aactgccctgggtgagaggggagcccacttccctaaagagagtcccaggcctggcagcattcaccaaataatgactgaagagtccttgggccttgagtgaacattggcggtgccaggcaatacttgccatgggcctgagtggtggtggccatggggagtcctgtttgaggaaayggcagggaagagtggggagggcattgtcttgcagcttaggtgccagctcagccagagtagaatagagtgccaggtagattcctaaagttcctgtctccaggccttggctcttgaaagtatctccagatccacgcagggctgggaggaactcactgtcctgaagggaaagacacaagcctggctggtcttccacctgctgattgtagagcccatgggcctaaagtgaacataggcaatagccaggcatttgtcactgcaggtctttgatgcatcccagtgctgtgctggctttgggtggagtcccagggatggaggccacaggggtactgtgtcacccactcccacaggtccaggcagctcagcacagagagagagagagagagagagagagagag

SEQ ID NO: 627250 - DNA, 629 bp, Homo sapiens
gtgtgatggctcacgcctgyaatcccagcactttgggaggccaaggcgagtggattgcttgaacccaggagttcgagaccagcctgggcaaatggtgaaaccctgtctctacaaaaaagacaaaaattacaaaaattagctgggcatggtgacacagcctgtggtcccagctatgcggtaggctgagatgggaggattccctgagcccaggagacagaggtttcagtgagtcgagatcatgtcactgcactcctgtctgggtgacagagtgacacatgtttcaaacaaagataaaaattaaaaaataacaataatgcaaaaacagtcttgttttacttggacttctgtctggcttttcccagattaatgatcagttgtaatatcaattcatttagcacaatgaaaaaggttttaacaatgttaacaaaataaagagagtggcaattttgacctacggaaataaattattcaccctctttccttttcctcccccttctctgttgttttcttccctcctgtctactgaatccctcacctcttcctgtcttcctttcctttcttttctcatctttcttctcccatccttccctgaaggaagaaagggactttttagttggcttccacaaggc

SEQ ID NO: 627251 - DNA, 629 bp, Homo sapiens
gtgtgatggctcacgcctgcaatcccagcactttgggaggccaaggcgagtggattgcttgaacccaggagttcgagaccagcctgggcaaatggtgaaaccctgtctctacaaaaaagacaaaaattacaaaaattagctgggcatggtgacacagcctgtggtcccagctatgcggtaggctgagatgggaggattccctgagcccaggagacagaggtttcagtgagtcgagatcatgtcactgcactcctgtctgggtgacagagtgacacatgtttcaaacaaagataaaaattaaaaaataacaataatgcaaaaacagtcttgttttacttggacttctgtctggcttttcccagattaatgatcagttgtaatatcaattcatttagcacaatgaaaaaggttttaacaatgttaacaaaataaagagagtggcaattttgacctacggaaataaattattcaccctctttccttttcctcccccttctctgttgttttcttccctcctgtctactgaatccctcacctcttcctgtcttcctttcctttcttttctcmtctttcttctcccatccttccctgaaggaagaaagggactttttagttggcttccacaaggc

SEQ ID NO: 627252 - DNA, 566 bp, Homo sapiens
gcatgattttcttgggttaggtccaggcccaacatctgtggtgagttcagatcctatttgtggctggaccatggccggtcgtaagggtggtatgggatcaggaagtggtggcaatctggcccacagaaagataccagaaagtaaaaagacctgccatgttgttctaaagagaattatcactgttaaaagttaattttcaaaaaaaggataaatgatagtggataaaaggatcatcgctcttatagggatgaaaaatgaacttaaatatttaactcatacagttataactatggacatgttctaagcagttaaaaggagaagtcacaaaagcacacttttatattaagtaaaggaatgctgaaatgaatgtgcatgaggaggcaacactaattttttcctagttggagagagaagcccattaagcctctactagacaggacaaaattgcaagtctatrgacaataatttgtcagttattcatccttttcagatttatgaagtagtttctgcagaattacattaagataacctggaacagtgtgctgtagacaacatgtagttttctg

SEQ ID NO: 627253 - DNA, 560 bp, Homo sapiens
taaccttaacctgacctgagtttttcattctgcttttaatgtaattttcactctttgggtctttcttaaaacctaaactcttagcatttaagatcttcttccaacactcttagaaggcattttgataaaatgtttttcagggcaaaatacattcttactctgaaatgggagttctgtgtatcttttggtgatcgtgcagcatgggatagtattatttgataaggccaggaaagagtgtttgcactgcaaaatctgtgaatagcttaggttagtatctcaattttttttttttagatagggtctcactctgtcacccaggctggcatgcagtggcatgatcacagcttactgcagccttgacctcttgggctcaagccatcctcccacctcagctgcccaagtagctgggacaatgggtgtgcaccgccacaacagctaatktttaaataattttttgtagagatgggggtgtcaccatgttgcccaggctagtcttgaactcctgggctcaagtatcctccccctcggcctcccaaagtactgtggttacaggcgtaagc

SEQ ID NO: 627254 - DNA, 528 bp, Homo sapiens
aagaagcctggaattcaagagagtgagtctggagatcataatcatatcagacacacaggaagaagccatattgtgagccacaataaaaaaacttgcatttccctttaagtaggataggaagctaccagagaactctgagcaggtaactgacattatctaacatttttaaaagatcactgacctttgtaaatgagaactgattgtagaggcaagagtggtaacaaagaaacctaccagaaggctcttgccactgactatragagataacaatgactgaagtaaggtaagaatggtgagacagaaaaaggtgatgatgtgtccggagtttgttccctctggtgggtttgtggtctcgctgacgtcaagaatgaagccacggacctttgtggtgagtgttacagctcttaaaggtagcacggacccaaagagtgagcagcaccaagatttattgtgcagagtgaaagaacaaagcttccacagcatggaaggggacccgagccggttgctgctgctggctagggtgcccag

SEQ ID NO: 627255 - DNA, 583 bp, Homo sapiens
cctatttcataaatcatacctatataatgacaccccaattgtagaatccatgaaggtacatttcccagtccatcgaaacctacactgaaaaaccgaatattccgcgataaaaactggaaacaagctatttgtgaaaatgctttgtgatgtgtggattcatctcacagagttaaatgtttgttttggtaaaacaggttgttttgataaaacaggwtaaaaactctgaacactgaagctcagttaagcattctggtaggtgatacacattgtggtgatacacactgatgtatttggagggtgatgaagcttcctagcacagaagctttatgtttggaaccctcccagatctagctccatacaggtggttgtttgtatctgggggtctgcattcatggattcaaacaacagtggatcaaaacttgtagaggaaaaaatatcatgtctgtaccgaacacatagagacatttttcttgtcattatgccctatacagtatagttatttacataacatttacattgaattaggcatgataagtgatctagagaaattaaagtatataggaggatgtgcaaaggctttatg

SEQ ID NO: 627256 - DNA, 646 bp, Homo sapiens
cctgggcaacatggcaaaaacctgtctctacaaaaaatataaaaattagccaggcacgtggcacacacacctgtggttccagctacrtgggaggctgaggtgggaggattgcttgagcccaggaggcagagactgcagtgggctgcgattgtaccacttcactccagcctgggtgatgggagtgaaaccctgtctcaaaaaaagaatatacatatatgcgtgtgtgtgtgtgcgtgtgtgtgtgcacttacatatgtatatatgtatataactcccctatgctttcctatcacttaaaagttttttaaaggacattttaaacaaacaaaaaaaactcttataggcttatttttgctgaggttaaatgaattaattatatatcactcttctgcatacgtgaggcatacagacgctcaaagaaatacaagcaaaacaaattggttagggtattactaaaacttcagcttgcagtcaaattcctctaaatgagttttgacatgaaatcatcaagatttgtgttttgcaaaagatcttgtcctctgtgccaacaagggtgttgttgatgtggcatttcttaaatgagtgttccactctggactctgggatagccttccaagtggctggcacagacgcagagtttggcagt

SEQ ID NO: 627257 - DNA, 535 bp, Homo sapiens
tctcactctgtcactcaggctggagtgcagtggtgtaatcttggctcactgcaacctctgcctccccggtttcagtgaytttcctgcatcagcctcctgagtagctgggactacaggtgcccactaccatgtctggctaatttttgtatttttagtagagacggggtttcaccatggtggtcaggctggtcttgaactcctgacctcaagcaatcctcccaccttggcctcccaaagtgctgcgattacaggtgtgagccaccacaccaggccacaagctagtgatttttaagcaactcacttaacctctttcatcttaatgtaaatgagaaataatactactacttttgaatactaagtactcaaaaagtacttttaattagcaaaggatttaataagtaaaattaattgatttattactaacattaagaatgcagggggaggagggaattaaaaaaaaatgcagtggaaaacatgttctgggctgagtgattctctggccagtgggactcagtagctggcagcatggtgaact

SEQ ID NO: 627258 - DNA, 551 bp, Homo sapiens
gcattagaaaactccaaatccaaatgacagaagagccacttcttaaaaaaaaaaaaaaaaaagcaaatatcarcggaaggtgatattgttagtaatcaaactggattgatccagatataacactatcatacactacctttattatctgcttctcaaatttccttctctctatcgcattatctccctctagggacacttttgcctatcagtattaattaaatgtgaatgttaacatgtaggaagatttataacttccttggcctgacagctgtgctgaaactgaaatgcatcaaagaggatgaatggccccgtctgccacccatgaatgatgatcacttctccaaattggccagagagtttgaaaaagtattttggggaacttgccagctaagacttttccattccacctcctcacctctttctaaccactgccaccatcataaaagaagcacgtctatatgaagcactgtggaaaattggggcccaggtgtgaaaagtgaaaaaagtggagtgaagacctggtaatcaaatgccaaattgcaaagttgcaa

SEQ ID NO: 627259 - DNA, 578 bp, Homo sapiens
gtcagttcactgcaacttctgcctctcaggttcaaacgattctcctgcctcagcctcctgagtagctgagattacaggcatgcgccaccatgcccagttaatttctgtattttagtagagacagggttttgccatgttggccagcctggtctcgaactcctgacctcaggtgatccacctgcctcggcctcccaaagtgctgggattataggcatgagccacggagccctgcctcactattagcagcactgaaatggagtaaagcctyaccaattcacttcaactgctgaaagatgatgagaaattagtgaagaggctgacttattcaaaatcctttaagaaaagaggctttattatttgcaagtacatagagcaacacaaataagactcaaaactactcctagatgatttttccaagtatatgcttaatgaatagatagaaatgatctgaaattttcttggacacagtgtttatactcagacatataattctaaatgcttgtaaaaagtgcactaatgctttaaacatgatttgtttttatctttctttaaaaaaatcatactaagctgatgtttaa

SEQ ID NO: 627260 - DNA, 621 bp, Homo sapiens
acgttactcaaagaagcttctgcacctactaccttactttatttttttaaaaaaaaagtcctaggagagactcatgagagtgtttattactcctgttttacaaatgagaaaacttgagctcaaagaggtgctttaggaaatgaatggtggaaattggtctcttggtttcctgttcagctcttttcttctccccatcccatattatttttctattttagcttctctttgaacaagtaagaaatattaacacagactgggggcttgtacagattggtttatcttatggctgaagattttaggttttcctttgagtcgtttttctattattctaacagatcgatcttatacaaaaacagttcgtcttatgctaagccttctttttggagtgttaagattctgaatgtcctgtcactcaatgacctgttaggatgaagaccagtaagtgtttttaatcatttttaggagcaccatagtctctgctccgtcattcttccattactttagatatgtgagctaaagctttctttgcargctatttctcaggaaatcagtaaagcttccactagaaattgcctcaattggatgacatttctcaaataaaaagtcacaccatttgggacc

SEQ ID NO: 627261 - DNA, 561 bp, Homo sapiens
ctaggattacaggattcagggctaccgcacttggccctgattttgtatgttacatagtgtacttagttactccatgaaaagaatcaaattcttttcagacaacaacaacaacaacacagaaacaattatataagttaattgtcacatcatgtgataagaaattatgggttgttattaatcattttgaatagaaaataagtgacgtaagatgttggcagctgcatattatatggtaacacactaatasacagatcttgaaagtctagaaattgatttcattttcattcatccagtttgtgtttcttggtttattattcatacattctttaagcttgactttctaagaggctcattatagaggaaaaaaggtcataattctcagtatttattttgaaggggattggaatgatttattccataatgttacaaacagacaaaacagcattctctcctgggatctctgagattttacaggtcctgttcaatgatttttattgtattttccatcagtattatgtttattatctgacaggtttaagaagaggaaaaggataatattat

SEQ ID NO: 627262 - DNA, 564 bp, Homo sapiens
gttaatatttatgcaccgaaatgctcaacgccactttcataaagtaggacaaatccccatactgaggagagactgccaggcattgaatggaaacagaacagaacagggacaccaaaacttaagaaagaggatagccacaccgagctggaaagggaacacgtctcagaatgtggtgtgttcagatctaagtccatgtttggatctcagttcatagatctcaatgcagcacagtaacagcagaaaacgaagccctagaacaccggccctagggaagatattcccggcatcctcctctctaagaggataggaaagccgtgagctaaagcgtcattgtgcttgaatatcccatatgatgtaaatttaaaaraaaagattaagtggacagagaatattattcctatagataatgaaatcatgtcataaagacacgaacttacaataataaaaatattagtccaacatttccaaatgagcttagagaatttcagaaaatgattgtagctatggaagaatgccataaatcagaattagaaaatgagcctgtaatcttagcatttagggagg

SEQ ID NO: 627263 - DNA, 514 bp, Homo sapiens
ctgcttccaggcaaatctagcacatagacactaagggcttctagtcctgatactgtgttagctttcctaaggactttgagctcctccagtagttgaccaaaggagcattttgtccctcttggtagccaaatgcaactgccttaaccaggtcctatgagaagaatgaaagggtggcctcttttttcctaaaagccaacatgttcctccttttttcctgttttcatccactcaggccacagaaacagatgcctctctcagcacgttgctcactgagaccaaaaagagctctggagagataacacataccctgtcctgcctcagcttatcaggtacaagcagtatttcctccctagagcatctttggagattaacttttctcattcagtctttccagagtagggaggttaattgaaggcttggttcctagtcaggtcattgagtaccaagaggtccatttttcttttgagcctcrctggcattgcctgctagaatagggcagtgtctaactttctcc

SEQ ID NO: 627264 - DNA, 622 bp, Homo sapiens
tcacaaacaacaggattagaatgcttggggttgatgaataagaatgagttgtttcagtcacctgtcagagatggccttgattctctctttgtccaggaacagtttccaggagcagcctgggtatctgagactggctgctgtgggaacagccccagatacttcctttcctttcttaccatgttcctgtcaaggccaggtaggccaccaggtttttctttttgctgtccctaaagctactctacctgaaattcttctgacctcttttcctgggtggagcttgcagagggtttagtgtttgaagttttagggtttacttttgtttgtttggtgtcattgttccctttgattggtaccggratgaaccagaatcagcttctgtccctgctggccacctcacatggtccttcctatgagaaaagaagaagggagaagtgagggcagagtcctgagcaccgtgcctgtccttgtctgttctgcagatatctgctgttgatacattccaagccaaaagaagctctgaagggttctttctgggaagcaaactccccacttgggttttttagatcctaatgatttatggccattcagccacaattctccagcctatattggtaaatacagc

SEQ ID NO: 627265 - DNA, 519 bp, Homo sapiens
tatatgcataaaaaaggactaccaaaggagcatgatcttgtttttgttttttggggtttttttgagatggaatctcactctgttgcccgggctggagtgcagtggcatgatctcggctcaytgtaacctccgcctcccgggttcaagcaattctcctgcctcagcctcctgaatagctgggattacaggcatccgccaccatacctggctaatttttgtatttttagtagagaaggggtttcaccatgttggccaggctggtctcgacctcttgacctcaggtgatccacccaccttgaaccaccgcacccagcaggaggagtgtgatcttatttttgctattaaaatgacctctagcatacttttaaatatcttcaaaggcaattatcagtttttaaggtggattttattttcagaaagttaaaagtcatttgaagccaatgtggtaaatatagtgagtcaataagcaagcaaatttgaagggagctgaaaacctagggttgattataaagcaatgta

SEQ ID NO: 627266 - DNA, 527 bp, Homo sapiens
ctctaaactactcaaaaagagcttaaaaacaaagctaaaaaggaccaaagtaatctttaagtagcttaactgtaygccaggagaaaaaaaaaaattccaacactctttaaagaaatgtaacaaaatctagcacccaatcacactgcattcacaatatacaatatccaatcaaaaattactagacatataaaaaagcatgaaaatttgacctatgaccaggataaaaattagtcagtagaaacaggctcagaagttaccaagacaaaagaatcagtagacaaggacattaagcagctatcatatattaagaagtgggattacgaagtgtattaagaagtgggatctttaagaggtaatggcaaaactctcgtgattaatgtcattattgaggcagtgggttatttatctcaggagtttgggccccatttgctctctgtctcacatgcacttccccaccagggaatgccttccttcatgttataacacaacagaaaggccttcaccagatgtggccccttgatattaga

SEQ ID NO: 627267 - DNA, 554 bp, Homo sapiens
tcaccacaacttccgtctcccaggttcaagtgattctcctgcctcagccttccgaatagctaaactacacgtgtawgccaccatacttggctaatttttgtatttgtagtagaaacaggatttcaccatgttggccaggctggtctcgaactcctgacctcaagtgatctgcccaccttggcctcccaaagtgctgggattacaggcatgggccaccgtgcccagcctattacatgttttaaggtcataaaactgctacttctggaatatttcttaaacttgcttgatttgtctaaattgagctaaagctgtaaggtctggctgctgggctccctgaaaccttgcacatatcttactgtatgactgtatttcgttttgagtctctggattctggggtttggacagatgaccatagtgaggcctgcagaaatatgcatgtcctcagtgtttggactgccagctgcaaggcagagccaaacccaatatggccccatcatccctggctcagctgtgctacctggccatgctggaaggggtttgatcttccaggaatt

SEQ ID NO: 627268 - DNA, 549 bp, Homo sapiens
tttctgggtatagaattctgagttgactgctattttccttcagcccttgaaaaatattgtaccaattccttctggcctccatgatttctgatgagaaatccattgtcactgaattgtttgtttccttatagtgacattttcaagagttttttttctttgtctgatttcagaagtttaattttaacgtgtcttggcacagattatttgggtttatcttggttgaggtttcctcagcattttttctttttttttcttttttgagacagagactcactctgttgcccaggctggagtgcagtggtgtgattacagctcactgcagccttgacctcctgggcttgagtgatcctctcacagctgggaccacaggtgcatgccaacatacctggctaatattttgtgtgtgtggtttttttttkttgtttttgtttttgtttttttggtttggttttttttagagatggggttttaccatatttcccggtctggtcttgaactcctggcctcaagcagtctgccttcctctgtctcccaaagtgctgagattac

SEQ ID NO: 627269 - DNA, 626 bp, Homo sapiens
acatcttacattttacttttgaaactgtactgtaattatctatgtatctatgtatctgtcttcactcactagaccatgagttccttgaggagtgtgtcttattcccaaaactttgcatcttgagtacataatacgccctaatatttgttgaatgagtgaataagtgaatgaataaatgaatgaataatcaatttgcaaggtttctcttcagatactttaaagaagtaaacattgaatgggtatggtggctcatgcctgtaatccaagtactttgggaggccaaggtgggcagatcacttgagatcacaagtctgagacaagcctggccaacatggtgaaaccccatctctactaaaaatacaaaaattagctgggcatggtggcacatgcctgtaatcctacctgcttgggaggctgaggcatgagaatcacttgaatgcaggaggcagaggttgcagtgggctgagatatcaccactgtactccagcctatggactccatctcaaaaaaaaaaagaaagaagtaaacgtctaaggtaytcattgaagcagcactgcccagggctaaggccctggtctttgtaacatctaaagaactttctattacaggaatctgtgtgtttgtta

SEQ ID NO: 627270 - DNA, 516 bp, Homo sapiens
catactgtgcagtcagatgagaagagtgccaagtccagaacgtggagaatctgctcccatggtcaccccatttaggagactgaaagagggagagcatccagtgaaagaggagccagggggctgggggacccagagagagtgggagtcaatgatgctgctttcagaaataggatctggaccattkacagagcactttgcatccaagagcttgtctcgttctcacaataacaaagtcaatcgaaatggtcacaagaagctaggctcagataaccagcaggtcccagtcacactgctagttaataccagacctgaaccttgaacccaaattttctgacactaagccaggacattctccttcccctacccagcttccctttggttcaataagaaaaagttcctcctaccccttgtgatctgcaaggtcgtcaggtttctgttacctttttgtgtaggaattacttaggtgagaatcccacctccatacttttgctcatggagttctttggtcctagatgt

SEQ ID NO: 627271 - DNA, 575 bp, Homo sapiens
gtctttgcactaattatatagtatgtgaagtaacatttgacttcaggttaattttcttaaggttaaagtagttccaaggactcttgattgatttctcgagagacgctgctggaaggttttagtgtgtggtggatatggatrtaaaactgtctgtatttttgaaggattagtttaagcatggaccactaagattggcttgcaagcattcaaaatcatgatatatttatgctagtcagtatatatgctttcctctttgatagccaccagataatagactcatcaactttccctcattaaagtcataagataaaataaaactgtgtatatcaatttgttttttgaaagtcagttttttaacttcattttatgtgagagtttgaaaatgaattaaagaggctggtgccacaagaagtatttttatgagttaagtgtgagtcatgtaacacagactaggtaccgtctcaaaagccgctttctcaattgcaactgaattctatttgactgatattttctaggtagattttggtaatgtttgaaataatgaaatcatggttattgatcaaaggaaatttgtt

SEQ ID NO: 627272 - DNA, 530 bp, Homo sapiens
tttacagggaaaaatacctctcctcatgaaggacttgaaaagtttacaacctgcttggatttttgcccctttttttgtattgagtatagattccggctcatgggttgccatagagtctaggaacaaggagtatagtttctttatcttccaagagggtgctggggaggagaaagaggtgtgtttctcaaggttaacaggctgtagttctgcagggagagcctgaagtcctggtatgggctcttgattctgtgacaatttttttgrtccatctatttctctcactcctggctttctagccacattctgcacctccttcctgctttcctagagcctcggtatgctttccctcaaccgaccctggctcaggaggttgatgccatgggaacctgaacctgaaacacttcatggtagtaatttccctgttttccttgcctttttttttttttttttttttttttttctgagacagggtcttactctgtcgcccagactggaatgtggtggcatgaacatagctcactgttaccttg

SEQ ID NO: 627273 - DNA, 316 bp, Homo sapiens
tagttggcctgttggcagaatttatttaggaacagcccttttgaaagtgtcccagtaacaamgcacccagctgcagcaaggaggtggggaaggagggcaccccaaaggacagcgccttcttctcttccacccatgcacggccttgggtgatggaggcgggttccctgtggctgcgtggatcccataggatcaagcccttctttgcatgaagcagtgttgtgactcttctctctccccttcctctgcacttcctttctgtaatccctactgttcttcttagtcccagcttctgcccagggaggcttctacccagact

SEQ ID NO: 627274 - DNA, 589 bp, Homo sapiens
cctctttgctgccaggacagcatcagctcactcctcagcaataatctagggtatgtgggaaggtcagggctgtggtaaggaatagaatcaaagaggggagtgatacgggrtgggggcacttggccgcctgctaaacttggacattaattttatatcatgacccccttttaagccagtgagctgggcttcagtttttcccaggccatgcacatttaatttatttcagagaaactctaattgtattttcactgcagtatcttgtattttttatttgtgatttaagaaatgtgaagagaaaatacacagacacaataatggctaacattgtttctttcattccttgttctagagctaaccactctaaaattgtttggtaatgtcacttagtgtaattaattgtaacatattcttttaaataaattgatttattgatcaaacacttctttggtttcctagactacaaatcctttgggttgtgtgggaagaagtgaactgggacctttgagatttgagtcagagtggtcagtctgaaaagaagaaacatctaaccagttttcccaggtaactagtgtggcagttttttgagtgc

SEQ ID NO: 627275 - DNA, 593 bp, Homo sapiens
tgatttcttcttcaaatctaactactctcactcataatcacaaacatacatgcaaatgtgcacaaatatggtcaatcctatacaagatggcttttaaaagtttagggaatgtgtgcattatgaaaaaactatgaatggatttcaattttttgcaccaaaataaactcatacaaacttgttataacatgtctgtaaaggatccagcttgaggcactaagaataagacaatttgagaagagcccccataagagcaacatgaattctgctaagataaagaacaaattattaaacttattgtgaaaattgagtagaagaatggtgaaatcattgatgtttcatgacaatgccccaaataagtcaacagtttacaaatagatgattcattttaagaagagacaagwtggtgttaaagatgaagcccacagaagcagaccatccacatcaattcactaggaaaagtttaatcttttttgtgacctaattgaaaatgactgacaacagaataaacaatagccaataccatagacatctcaagtggttcagcttacacaatttttactaaaaaattatgcttgagcaaactttctactcaa

SEQ ID NO: 627276 - DNA, 593 bp, Homo sapiens
tgatttcttcttcaaatctaactactctcactcataatcacaaacatacatgcaaatgtgcacaaatatggtcaatcctatacaagatggcttttaaaagtttagggaatgtgtgcattatgaaaaaactatgaatggatttcaattttttgcaccaaaataaactcatacaaacttgttataacatgtctgtaaaggatccagcttgaggcactaagaataagacaatttgagaagagcccccataagagcaacatgaattctgctaagataaagaacaaattattaaacttattgtgaaaattgagtagaagaatggtgaaatcattgatgtttcatgacaatgccccaaataagtcaacagtttacaaatagatgattcattttaagaagagacaagatggtgttaaagatgaagcccacagaagcagaccatccacatcaattcactaggaaaagtttaatcttttttgtgacctaattgaaaatgactgacaacagaataaacaatagccaataccatagacatctcaagtggttcagcttacacaatttttacyaaaaaattatgcttgagcaaactttctactcaa

SEQ ID NO: 627277 - DNA, 575 bp, Homo sapiens
agagtgctcccttaggctaaggctaattctcagaaaggaatggtgctttatatttttagcatccaacactctctgctcaatcttccttttcttctcttcaacacgtgttgggtattaatctcaagaccactctctaataaatatttttatgctaacattttcccagrgttttctttccagggaatctaattggtgatataagatattatgtatttatataattaatatacgtatatacatatacacacatataaatgtctgtgtgtgtatacacattttatcagagacttcaaattccattacacatttaaaagcttgtttccaaagtcatctttttttttctttttttcacatcatcagctttatgttttacagaattcagatggtactttgtatttttttattagagttgacctgtaatcaacattttttctgtttttcactctataattaacttggttttcagataaacccaatacattcctgcagtaagctctcctgtggaatcaattacaattctgtactcagtcttattatcttaacaatgggtgattaaatagccctttctcccacaa

SEQ ID NO: 627278 - DNA, 681 bp, Homo sapiens
  misc_feature 432: n = A,T,C or G
gctttcattggttctaccattctggggtctggtgggtctagtggccctcttctcacagctccacttggcagtgacccagtgggagctcaatgtgggktctccaaccccacatttcctctccacacagccctagcagaggctatacattagagttctgcctctgcagcaaacttctgcctggacttcaggcatttccatatatcctctgaaatctaggcagagcttcccaaacttcaattcttgatattggtgcacctgcaggctcaacaccatgtggaaactgccaaggtttggggcttgcaccctgcaaagccatggcttggtctatatcttggtcacttttagccatggctgggacatagggcaccaagtcctgagactgcacaaagcagcaaggcccataggccaagcccacaaaaccatttttccctncgagacctccaggcctgtgatgggaggggctgctctgaagacctctgacatgacctggagatattttccacattgtcttggcaattaacatttgacttctccttacttatgcaaatttttgcagccggcttgaatttctcctcagaaaatgagattttcttttctatcacatcatcaggctgcaaattttctgaaattgtatgctcttatttccttttaaacttaagtttcaattccaaagtatatatt

SEQ ID NO: 627279 - DNA, 681 bp, Homo sapiens
  misc_feature 432: n = A,T,C or G
gctttcattggttctaccattctggggtctggtgggtctagtggccctcttctcacagctccacttggcagtgacccagtgggagctcaatgtgggtkctccaaccccacatttcctctccacacagccctagcagaggctatacattagagttctgcctctgcagcaaacttctgcctggacttcaggcatttccatatatcctctgaaatctaggcagagcttcccaaacttcaattcttgatattggtgcacctgcaggctcaacaccatgtggaaactgccaaggtttggggcttgcaccctgcaaagccatggcttggtctatatcttggtcacttttagccatggctgggacatagggcaccaagtcctgagactgcacaaagcagcaaggcccataggccaagcccacaaaaccatttttccctncgagacctccaggcctgtgatgggaggggctgctctgaagacctctgacatgacctggagatattttccacattgtcttggcaattaacatttgacttctccttacttatgcaaatttttgcagccggcttgaatttctcctcagaaaatgagattttcttttctatcacatcatcaggctgcaaattttctgaaattgtatgctcttatttccttttaaacttaagtttcaattccaaagtatatatt

SEQ ID NO: 627280 - DNA, 585 bp, Homo sapiens
  misc_feature 581, 582, 583, 584, 585: n = A,T,C or G
aattcctatgatttaagttattaaaatttaaatgatgtgtaaataattggactgatgatcagacaaaaccaaggcttgctgaacaaacatatatgctggagtatggaaatagaggtgaattaatacagaaagagcacataacaaattgattatattcatcctagtcagttgatttacagaggatttttggataatgtatttcaagtcaaagaatcgtataagggaatytaaaccagagctgcagggtgtaagtggatggagccctaagaaaagtgtgtgtgtgtgtgtgcgctaaaacacatgcagtaaaccgcagctgtaaaggactatgtggctttagatatatgcattttcaactcatgatagagtatgacaagttttgctctatcacgattgtatatctatttttatggtaattttgtgtctttttcttggatttttttttttttttttttttttttacaaagctaaggatgcttggctttaggatagaacaaaagtatctctcacccaacactgtcatttttcagatgatgattgcaaatttaagcattactactctatgtaaattgtaaaaaaannnnn

SEQ ID NO: 627281 - DNA, 590 bp, Homo sapiens
tactccctttgatatagttgtcacactatgttggcaccacaagtgctttggtggcagttacaagcgataggcagaagcaggtccataggacacagatggatattcctggaagagcagtgaaagtttccctgcacttggtgttaaagttacagctatttggtgaaaaaactgaactgtctgacaaagcatcaggggtaaccaagtagacgtgaatgccctgaatagaagaaatcatcaggcctaatcaggacaactttgaggacttgtaaacgagtaggagaagctgcaatgttcaatggaaaaggagtggacctagaaagaaaaacaacaatctaaagcaatggtaaaaccataatgaccccaatggagatrgttaggcttggtcaagcaagtgcatacactgtggaacagcatacactgtggaacagcatacacaggtatcaactcatgaaacagaaaatggctccagcagagaaacagcagccccaacagaaggagcatatgtagaaatcagatcactcccgaaagttctgaaagcttggtaggcaaagggatgggtggtagggtgggcaatggaaacagttcctaca

SEQ ID NO: 627282 - DNA, 590 bp, Homo sapiens
tactccctttgatatagttgtcacactatgttggcaccacaagtgctttggtggcagttacaagcgataggcagaagcaggtccataggacacagatggatattcctggaagagcagtgaaagtttccctgcacttggtgttaaagttacagctatttggtgaaaaaactgaactgtctgacaaagcatcaggggtaaccaagtagacgtgaatgccctgaatagaagaaatcatcaggcctaatcaggacaactttgaggacttgtaaacgagtaggagaagctgcaatgttcaatggaaaaggagtggacctagaaagaaaaacaacaatctaaagcaatggtaaaaccataatgaccccaatggagatagttaggcttggtcaagcaagtgcatacactgtggaacagcatacactgtggaacagcatacacaggtatcaactyatgaaacagaaaatggctccagcagagaaacagcagccccaacagaaggagcatatgtagaaatcagatcactcccgaaagttctgaaagcttggtaggcaaagggatgggtggtagggtgggcaatggaaacagttcctaca

SEQ ID NO: 627283 - DNA, 666 bp, Homo sapiens
tcacagtgcttataaaacaataacacaatgcagaaaacaaactcactagtaacaagacaatgactggaagagtacctcacatctcaatattagcattgaatatgaatggtctctatgatccacttaaaagatacagatggataaatggataaaaatatcacaaactagatatcttctttcttcaggagatacayctaatgtaagtattcttatagactcaagattaaggggtagaaaaagatatttcatacaaatagaaagtagtaactattcttacattagataaaacagactttcaagaaacaacagttttttaaaaagacaaagtcatataatgataaaaggatgaagtgaacaagaaaatataacaatcctatatatatatccacccaactctggagctctcagattcataaagcacttactactaaacctaagaatacagatagcaacacagtaatagtgaggtaatttaacactccactgacaaactagacggatcattgaggcagaaagtcaacaaggaaatactgaatttaaattgcactctagaagaaatagacctaatatttacagaacattctacctaagaactgtagaagatacattcttctcaccagcagataaaacagtatctaagatagaccatatgagagcccacaaaat

SEQ ID NO: 627284 - DNA, 640 bp, Homo sapiens
tagaccagccttataataaatgttaaaaggaactctaaatcttgaaactaaaggtcaatacacaccagaatagaaatgcctgaaagcacaaaaattcacagtgcttataaaacaataacacaatgcagaaaacaaactcactagtaacaagacaatgactggaagagtacctcacatctcaatattagcattgaatatgaatggtctctatgatccacttaaaagatacagatggataaatggataaaaatatcacaaactagatatcttctttcttcaggagatacacctaatgtaagtattcttatagactcaagattaaggggtagaaaaagatatttcatacaaatagaaagtagtaactattcttacattagataaaacagactttcaagaaacaacagttttttaaaaagacaaagtcatataatgataaaaggatgaagtgaacaagaaaatataacaatcctatatatatatccacccaactctggagctcycagattcataaagcacttactactaaacctaagaatacagatagcaacacagtaatagtgaggtaatttaacactccactgacaaactagacggatcattgaggcagaaagtcaacaaggaaatactgaatttaaattgc

SEQ ID NO: 627285 - DNA, 619 bp, Homo sapiens
cattcctttggtttctaagatcagtattttatttatttgatagaatcattcattttaatataatcactttttaataaacagtttaggtgaacagtgcatgcgtgttcacattccagtttcaataaattatgtgtatttgctctcctacccacatttttacacagcttctcagaaatctcttagctcagtcagtcataattccctycttaatgaataatagaattgcttttctcccacagatcattatagaagatgagtagtctacgatgctggaaatttttatatattctatatgcttgaaatgagtatcactagttgtctagcacaggattgttcaatagagcattctgctattatggccatgttctatatatgagctgtccagttcaatagccattggtgacatatggctattgagcatttgaaatgtggctagtgcaatagagggactgaaatttaatttaatttagtaagtttaaatttaaatacccatgtgtgaccactgagtaccaatatgaacagtgtagctctagagagttatctgcctagaaaattttctggagaatatcttgtagttgtaggaacatgttagcaagctgtcattcttcaagcataatag

SEQ ID NO: 627286 - DNA, 527 bp, Homo sapiens
ctataattctaaatattatagttattcctcttttcttaatttatctgctcaagacaatatctcttgaatctctaaaaagaaagatgacatttgaactcacttgtattattccctgtaatatgtgatcacctatttctaaattaaaaacactttcaaatccagaagcatttaattgttcctcattgcttactgaattatgtagcgaaacgtgattttgaaattcaatgtccattagcactcaggtcattcatttactagaattcaccactactctacatagaaagtttcttctgccagtggttattttgttgcctgatcaatgtttccaccactttgatttttctcataatattcccttttttcattaatctccacctgttgagttcccacacrttctttcatgtctagctcagacattatttcctttgacaaacctagtatctcctaaccataaatcaactccctgacttcttgaacctcatagactttcttccaccttattcattttatttacttattaatttaat

SEQ ID NO: 627287 - DNA, 636 bp, Homo sapiens
atgcaaattgaacttctctcccagttctatatgccacaggtgaagagatattttactaaaacctggaaacatacctgtaaataattattagacccttatctttggaagtgggtaatgtatttccctaactacaagaatccctcaaatgacttattagtttcaaacaacaggcaattytttaacctcataattttgtgggtcaggaatttgggtagggataaccctagtgattctcctactttacctgataattactgcagtcgcttggtggcatttagatgttggctagcctggtctggagggtccaagatttaatcacatatgtagtactttggcaagaacaattggaagattggcctcagctgggcctggtccctctctacagagactcagagtctcctcccatggtctttctagcaggtagactcaatattcctagaagtgagttatttttagttcagggctttcatagtagtagtctaagagacagcatgcaggagctgtgttggaaacttctttcagtaattcaaatacctgaaatttcctaagactagggataattcagtttgctctttctttttggaatgtttcccgttgcccctttcacttataaatatccttaagggctcaccttag

SEQ ID NO: 627288 - DNA, 425 bp, Homo sapiens
atgcattcaagatacttgctaggcttcacagtcttgtccttttcatcatactactcctttcacgtcaatgggcaccagatttagtgcatctgctcctagaagagaaagttgtaggagtgtagaaccaaaaatggaagacaaatatttgggtctgaggtagaaattctgaagaaatgttactggagtcaataagggctggggaggttgagttaaggaaagcctggtagggaaacagcagagattaaatgacagtacagaaagccaagaattactgcctctattctactagcacctrtaactcagtggttttcaattctaactgtatatcataaagccttgtctgctctttaaataaaaaaaaaaaaatgccttgcccctaccccaacataattaaatcagaatttatggggatgttgcctgggtaa

SEQ ID NO: 627289 - DNA, 580 bp, Homo sapiens
agaattcatcttctattccctgacataacctgtcttcccaggatggtatattagcttctgaacccccttgggaagcatgtcatcactctgcggttcttcccctgtacatgttaatacaatktgtatgccttttctgcaattaacctaccttttccaagttgacttttcagcaaacacatagaaggcaaaggagaattttcccttggccccctacaacatactacatagtttaaatatttgaactcttattttatttatttctaatgcacttactagttatatgaacatgtttataataaaaagcaagttgatagtgcctaaaagtaagacaaaatactagaaatatgtgatttcttcttcaaatctaactactctcactcataatcacaaacatacatgcaaatgtgcacaaatatggtcaatcctatacaagatggcttttaaaagtttagggaatgtgtgcattatgaaaaaactatgaatggatttcaattttttgcaccaaaataaactcatacaaacttgttataacatgtctgtaaaggatccagcttgaggcactaagaataagacaatttga

SEQ ID NO: 627290 - DNA, 500 bp, Homo sapiens
attcttctttctaaatggctatatagtatttcattttctatgtatcctacattttagctgataaatatttaggttgattccatatcttggatactgcaaaaagttctgcaataaasatgggagtgcagatatctctttgaaatactggttttatttcctttggatatatacccagaggtgggatatgatatgtatcacatgttagttctatttctaattttttgaggaacttccatattgttttcaatagtacctgcacaaatgtacattcctacgagcactgtgtgttaccttatccctacatccttctcatctgcacttgctatcttttgtctttctgataatagccattctaactggaatgaggtgatatcccactgtcgttttgatttgcattttcctgatgttagtgacactgagcatgttttcatatacctgttgaccatttgcatgtatttgtatgtcttcttttgaaaaaaatatctattaaggtcttttca

SEQ ID NO: 627291 - DNA, 538 bp, Homo sapiens
tgggttttagatcatatcattattgcatacattaaatcactgtcccctatattgaaggtgattatcagtcacacatgcctcaaaactgaaatatcaagacatcaaaaatggaaacaatcattcactcacatccccaggrgaaataattatctatatgaagttgacatttataacctgtatattttgaaaggttgaaattgtaatgcaaataaccatttttcatgattcaagtaagctaaagaaaaaaaattaatggtttctgactgtgatattattttaccagataaaattgtgtaaagaaaatgtttacctaatatggataatatatttcatcaatatgtggacaattactgacattcaggttcaatttattcaggtgcctttctttaatggcactagaaaggctattttaacaaatggatttagataataagatttaaacctgcactgagaatagatattcaacttactaagcagttgtttaagatggatgaatatgtcaaagcataggtaatccaaattctaagcaaaacactgt

SEQ ID NO: 627292 - DNA, 539 bp, Homo sapiens
ttaaaactgggcctatatgtgtcacttttttgaaaacaaaaaaaagcggggggtggagaaaacattcagatataaggtcggaaagcaaaatgggaaaataattctgtttcataattgccacactatttggattatcattgtttctagatttatatgtgaaagttaaaacattcaacagtaggctgggactggtggctcatacctgtgattccgtcactttgggaggcctaggcgggaggattgcttgagcccaggaatttgagaccagcatgggcaacatagtcagacctcatctctacagaaaattaaaaatgaaattagctgcatgtgtggcacaagcctgtagacccactacttgggaggctgaggtgggaggatgtattgagcccggaagtttgaggctgcagagagctatgatcatgtcactgcaatccatcctgagcratagagcaagaccctgtctcgaaaaacaaacacacaaacaaaaaaaccaaaaagatattcaacaataaaggtaaaatttcaacactggaataatg

SEQ ID NO: 627293 - DNA, 577 bp, Homo sapiens
gtattcaaaagcaatactgattctccagagaaatctcattaatcagtgtcatcataaaaaataagtgagaattgtgtgggttgatttctactccatctcctttcaattaccagtttggcaagtgtgaaaaactgatgggttttagaaaatgaatccagattataataacttaatcaagtagagactctaatgttgactgctcttttagaggttattgctcttttagagtaaagcagtatcttcagaatgtagtacayatgtgactataaaagattttccaattttatttccattcctttctgaaaaaattataacgatattttgcagaagattaacccatcctaaatttgatattgtctgtgtcatgatgtagagactaataatttaattacttcatttcaaatgagaatagtcacttgctgcaacacagattttccaatataaaactgtctttttaaaaattcagcttatattggtatacagtattatcacatgatgtttcatattttgaaaatttatagtttttacattttagtcttttgtgtgtggtttattttttgatcatatgtactatata

SEQ ID NO: 627294 - DNA, 608 bp, Homo sapiens
aatataaacatattcaaatgcatagttagataacaagtgcaaatttargactgaaaagtatttaagtttaaagcattacttttctatgaaaatagcttgatatatttgtgtttattataatacattatatcattcacaaaattgtcttattaagagcatactcattgagatgtaattcacatgccataaaagtcattattttcagtttactcttcagttgtttttagtatcttcatagagttgtacagtcattaccacttcctaattttagaatgtcttcctagccccatatagaaattctataccttcagtaatcacttccttgcccccatcccttacaaccactttcagttattatggatttgcctattagttgcatttatgtaaatttcatttagtatttggtttttgctataactgactactttcaattattatagttttcaaaatttgtgttgtaattgatttttgtacattcatcttgtacactgcaaaatttttaactcatttattacttgtaataatatattttaatagattttataatattttctctatccaaaacatgtcatctacaaatagggactgatttacttctttatttttca

SEQ ID NO: 627295 - DNA, 633 bp, Homo sapiens
tttataatattttctctatccaaaacatgtcatctacaaatagggactgatttacttctttatttttcatctgcatgcctttatctctttttcttccctaactgtccttactgccagtacaatgtttattagaaatggtggaagccaaccttcttgccttgtttctagttttatggggaaagctttatgtctttcaccatggggaaagctttatgtctttcatcattaagtacattagttaatagatttttcaaacatgctctttcttgggttgaaaaatttctcttccatttttagcttgttattgttcttatgattaaaaaaataagatgtgctttgtcaagtgttggtctattgtgacaatcgtgtgttatttaattatatatatgcattatgtgacatcaattaattttcattggttgaaccaaccttgcattcaaaagataaatcccarttaatcataatatatatttttatatttttactacttaagttcgttgatattgtgttgaggattttttgtctccatattcattaaggatttcaatctgtagtttttcttcctgtgatatcttagtttaggtttgtaccagggtaacgtgtcctcataaggtgagaagtgttccctccatt

SEQ ID NO: 627296 - DNA, 494 bp, Homo sapiens
aagggattttgaattttatcaaaagtcatttctgcatctattgagrtgatcattgggttttgtttttagctctgtttatgtgatgaatcacatttgtttatttgcatatgttgtaacaatcttgcaccccagggataaagcctgcttgatcatgttgcattcactttttgatgtgctgctggatttgatttgctagtgttgaggatttttgcgtctatatttatcagtgatattggcctgaagttttctttttgcattgccctcttcctcaattattttgtcatagtttcaatggattggtgccaactcttctttatatgtctggtagaattcacctgtgaatcagtctgatacagggctttaaattttatcaagtgatttttctgcatctattgagataatcctaggattatggtccttcattctgtggatttgatatatcacatttactgatttgtgcatccctccatccttgcacccctggtataaatctc

SEQ ID NO: 627297 - DNA, 636 bp, Homo sapiens
ttcaaatttaactgagcatccagtatttttatttgctaaatctggcagccttatatttgaggaacaatgatatatacawcttttatgccatttccatcaaggaaacagagcaccttttctccctttttaaaattcaggtgcctggaaaatgatcagtatagctgcattttgcaaaatgcatctgtggacatcacactaaaacgatgcagcaacaagacagaaggagtcaaagtattatattacattttggaacagagcttgctgacaaaccttaaaaaggctattacaggttaaatttaggctactacattggagtaaataaatttcaggtaagtaaaataaattactttttaagtcactgtcaaagtttggtctctattatgtattgcagttatatcctattacaagaatgtactgtaggaacagtcatccagatcataagtaattagttctacatcattttttccctttctcactctttctccttcatctgataatttgaggtaaattatactgtttgtctcaagtgctaattgcctaattatgattaatttcttgccttctatgttcatttattggccttaataaactgaaagtaatttaaactatgtcttgccctgaagacccgctatcaca

SEQ ID NO: 627298 - DNA, 589 bp, Homo sapiens
ttatgtacacccctccacttcaaatcgtcttctaattcttttaatttcttggttgattacttatcgtcattttccaccattcctatatttttaaactaggggcccaattgtgctatgattgttcacacacatgtattgtggattctattaatatctatgagatatcagagtttattacctttaggatcaaagttacacactacatacaaagttgtctttctaaggatacatgcaaaaaataaagagtaattaatatataatttacatgattgaatcaagccatgtctatwtaatgctatgtatattgtaaaagtttagcagatatttggataaagagaaatattagcagaactgtggattttagctttttaggggcttgacataattttttaaataaacatctgtgatatttgtgctgggatgcaattgagagtttgactttttcagttttattatgattttataattttttaggtgagtgtagattagagctcagtacaggggggccaacattggaggcaagacattcctgaatattctatccaatattgtcttattctgatcaggcttctataaaaaaataacataa

SEQ ID NO: 627299 - DNA, 446 bp, Homo sapiens
gaattcataaaataaatgaatcctggagatggttcttgaataagatggtcaggcccacaggtagcaaggggayaaagagattacccagtttccaagtctatatggtctgagtccaaatccttgctcttccagctgtactaccttcactaaatcaaccttttgaattttggtttctttgtatatgaagtagaaatattaatgactgtgtcaagaaattgctgctagaatttactgaaattgcatatgcaaacggaccgataaatagtattgtcacttgtcttccttctctaaagtgttatcagaaagttgtgtggacacatatgtcattgaacactgaagctcatgccaaagggatggacttctatctccttggatttcttttatcctggagaaataaaaagtagctcaattttaaaatgttggcttctgcttcatccaagttgagt

SEQ ID NO: 627300 - DNA, 546 bp, Homo sapiens
agctcaattttaaaatgttggcttctgcttcatccaagttgagtgaggttaacagccactgtgctcagaattcttttcctggaagaaattatttgattgttttctttttaaagtgatgcaatctctctctctctctctctctctctctctctctctgtttctrttttctctctctctccctctcttttactctgctcatctttctctttttaaattttatttcaatagtttttgaggaacagctggttttggttacatggataagttgcttagttgtgatttccgagattttggtgtacccatcaactgaagcatgtacacagtacccaatgtgtagtcttttatccctcatccccctcccaccctactcttgggtccccaaagtccactatctcattcttatgcctttgcatcctcattgtttagctcccacttacaagtgagacatatgatatttggttttctattcctgacttacttcacttataataatagtatccaactccatctaggttgctgcaaatgccattatttcattccttttcc

SEQ ID NO: 627301 - DNA, 546 bp, Homo sapiens
agctcaattttaaaatgttggcttctgcttcatccaagttgagtgaggttaacagccactgtgctcagaattcttttcctggaagaaattatttgattgttttctttttaaagtgatgcaatctctctctctctctctctctctctctctctctctgtttctgttttctctctctctccctctcttttactctgctcatctttctctttttaaattttatttcaatagtttttgaggaacagctggttttggttacatggataagttgcttagttgtgatttccgagattttggtgtacccatcaactgaagcatgtacacagtacccaatgtgtagtcttttatccctcatccccctcccaccctactcttgggtccccaaagtccactatctcattcttatgcctttgcatcctcattgtttagctcccacttacragtgagacatatgatatttggttttctattcctgacttacttcacttataataatagtatccaactccatctaggttgctgcaaatgccattatttcattccttttcc

SEQ ID NO: 627302 - DNA, 614 bp, Homo sapiens
aaacattatttcaaccaggcacggaggcatgtgtctgtagtcccagctactcagggggctaagaaaggaggattgctagagcccaggaattcaaggccagcttggggaacatagtgatatttcatctctaaaagaaagagagagagaggaggaaaggcaggcaggcgagggaggaagagaaggcaagaagaaagaaagagaagggaagaaaagaaaggaaggaaggagaaagagggaggraggaaggaaggaaggaaggaaggaaggaaggaaggaatccattatctcatttggatctcctcatttaagagaattcattatctcatttggttctcctcatcaagctgttagctaaggcatcagggcaagtattgtgatattcatttatcagtcttcatgggatgaaaactaggaaatagtacccagctctaattcttaatctatatcctttcctctgtggtcgatttgttttgtttttatgaatagctcacacatgtattactgccattagaaagaaactttctacaatttatctatagaagctatctagtgcttactaaatgccaagaattgctgtaagccctttacatttattaagttattaaattgtcaaa

SEQ ID NO: 627303 - DNA, 626 bp, Homo sapiens
gtgtggagaaaacaagagctgtaaaattagagcgtttgcaagacaggttgaggataggtagtttttgacacaaaggcaattcgagctcatttggaactatgtttgggactctgaattggcaacaaagaaacttatgtttcttttaataacttaataaatatactatattatcacatataaagaggcagtatataacacagcgattaaaagcatatactctgaagccaggctacttgctttcagatgtcagtttcaacaattcaacttttgggctttggacagattacttcactgctttgttcctcyatttccttatctgtaaaacaggaataattacataacccatagggctgttgagaagagtagttctaacacttagaaagcattatataattatatgtacattatatattattgttattatagtactctataaaatctgtaagggatcacatgaaaaatagactgtaaacatattgattctatatagtaaaatatcagaattaataacttttgaaaggaatatcaatataacactttaagaactgatataaaattttcaattttgtttaggaacaggatgtatatctcagaaatatggaatgaatgaacatatagcaaatgaa

SEQ ID NO: 627304 - DNA, 618 bp, Homo sapiens
ctgtgcactccatgaatcagcccattgcctgaggcaacagagagcttctgccagtaaacaaggatcaattaatatacagagccacactggctgcagctggctcttacccataagcaccatcaattggcttgtaggttgaactggacagcccaatataaaagcctgctgacaaaagtgcgtrgggctgtagaagcaaagccaaaagaccccacccaggattctctaccgtcactttccctaggcaggggggatagggaaagggaaataaaaaaccccagtaatattatagggaaacaaataaaaagaaaaacaatccacttgcatgaaaataattacaaaaattataggtgccagcaccttcagatgagaaggaaccagtgcaagaattctggcaccatgaaaaatctgaatgtggtgacaccaccaaacgatcatactagctcttcagcaatggtccctaaccagactggaaactcagaaatgacagataaagaattcgaaacatggattgaaaagaagctcaatgagattcaagagaaagttgaaaattaacgcaaagaaacttctaaagcaatccaggaaaagaaggaagagagaagcattttaaaaataaataaa

SEQ ID NO: 627305 - DNA, 618 bp, Homo sapiens
ctgtgcactccatgaatcagcccattgcctgaggcaacagagagcttctgccagtaaacaaggatcaattaatatacagagccacactggctgcagctggctcttacccataagcaccatcaattggcttgtaggttgaactggacagcccaatataaaagcctgctgacaaaagtgcgtggggctrtagaagcaaagccaaaagaccccacccaggattctctaccgtcactttccctaggcaggggggatagggaaagggaaataaaaaaccccagtaatattatagggaaacaaataaaaagaaaaacaatccacttgcatgaaaataattacaaaaattataggtgccagcaccttcagatgagaaggaaccagtgcaagaattctggcaccatgaaaaatctgaatgtggtgacaccaccaaacgatcatactagctcttcagcaatggtccctaaccagactggaaactcagaaatgacagataaagaattcgaaacatggattgaaaagaagctcaatgagattcaagagaaagttgaaaattaacgcaaagaaacttctaaagcaatccaggaaaagaaggaagagagaagcattttaaaaataaataaa

SEQ ID NO: 627306 - DNA, 618 bp, Homo sapiens
ctgtgcactccatgaatcagcccattgcctgaggcaacagagagcttctgccagtaaacaaggatcaattaatatacagagccacactggctgcagctggctcttacccataagcaccatcaattggcttgtaggttgaactggacagcccaatataaaagcctgctgacaaaagtgcgtggggctgtagaagcaaagccaaaagaccccacccaggattctctaccgtcactttccctaggcaggggggatagggaaagggaaataaaaaaccccagtaatattatagggaaacaaataaaaagaaaaacaatccacttgcatgaaaataattacaaaaattatargtgccagcaccttcagatgagaaggaaccagtgcaagaattctggcaccatgaaaaatctgaatgtggtgacaccaccaaacgatcatactagctcttcagcaatggtccctaaccagactggaaactcagaaatgacagataaagaattcgaaacatggattgaaaagaagctcaatgagattcaagagaaagttgaaaattaacgcaaagaaacttctaaagcaatccaggaaaagaaggaagagagaagcattttaaaaataaataaa

SEQ ID NO: 627307 - DNA, 443 bp, Homo sapiens
aaggaacatgtttcaaagtagtaagagttatctatgacagtcccacagccaacatcatactgaatgggcaatatctgaaataattcaycttgagaactggaacaagacaaggatgttcactctcaccactactattcaatacagtattggaagtcctagccaaagtaatcagggcaagaggaagaaataaaaagcatccagataggaaaagaagaagttaaagtgtctcttattcactagcaatttgattctatacctagaaaaccctaaagactccaccaaaagactcctggaactgacaaataacttcagtaaagtttcagaatacaaaattagcagcatttctatacaccaataatgttcaagctgagatgcaaatcaggaacattatccaatttataatggctgcaaaaagaaaaaaacaacctagaaatacatctaat

SEQ ID NO: 627308 - DNA, 443 bp, Homo sapiens
aaggaacatgtttcaaagtagtaagagttatctatgacagtcccacagccaacatcatactgaatgggcaatatctgaaataattcatcttgagaactggaacaagacaaggatgttcactctcaccactactattcaatacagtattggaagtcctagccaaagtaatcagggcaagaggaagaaataaaaagcatccagataggaaaagaagaagttaaagtgtctcttattcactagcaatttgattctatacctagaaaaccctaaagactccaccaaaagactcctggaactgacaaataacttcagtaaagtttcagaatacaaaattagcagcatttctatacaccaataatgttcaagctgagatgcaaatcaggaacattatccaatttayaatggctgcaaaaagaaaaaaacaacctagaaatacatctaat

SEQ ID NO: 627309 - DNA, 441 bp, Homo sapiens
tatatgaaaaaatgtacatcactaatcttcagagaaatgcaaattaaaactacaacgtggtatcatctcatcccagttaaagtggcttttataaaaaagacagggaccagttgattctgctgcggatgtggagaaaggggaaggaaccctcctacactgttgatgggaatgtaaattagtacagccgctctaggaaacagtatggaggtcccttaaaaatttaaaaatagaactactatataattcagcaattccattattgggtagatagccaaaagaaaggaaatcaacatattgaagagatatctgcactatcatgtttactgcagcactattcaaagtagccaaaatatagaataaacctaaaagcctrtcaatgaatgaatgaagaaaattatatatatatatgtatatatacatatatatgatattagatataaa

SEQ ID NO: 627310 - DNA, 590 bp, Homo sapiens
acatctcttaagattctttccttcttcttaactttagataacctgatgataatgtgcctggaccacaatctttttgtgatgaattttccaagtgttctttgtacttcttgtatttggrtatctagctctctagcaaggccaggaaatttttcctcagttattccttcaaatatgttttccaagcttttaggattctcttcctcctcgggaacactgattattcttaggtttggtcgtttaacataatcccagactccttgtaggctttgttcatattttcttcttccttttccttgtctttgttggattgggttaatttgaagaccttatcttcaagctctgaatcctcttctacttgttcaattctattgctgagacgttccagcacatttcacatttctgcaagtgtgtccaacgtttcctgaggttttgacagttttttctttatgctatcttatttccttgaatatttctcccttcacttcttgcatcatttttttggatttcctttaattaggcttcacctttctttggtgcctctctgattagcttaattactaaccttctgaattatttttcaggtaaatcag

SEQ ID NO: 627311 - DNA, 475 bp, Homo sapiens
ttatttttcaggtaaatcagggatttcttcttggtttggatccattgctggtgagctagtgtgatttttggggggtgttaaagagccttgttttgtcatattaccagagttggttttctggttccttctcatttgggtaggctctgtccgagggaaagtctagggctgaaggatgttgttcagattcttttgtcctgcagggtgttcccttgatgtagtactctcccccttttcctgtggatgtggcttcctgtgagccaagctgcagtgattgttgtctctcttctgggtctagccatccagcaagtcyacctggctctgggctggtactgggggttgtctgcacagagtcctgtgatgtgaaccacctgtgggtctcacagccatggataccaacacctgttccggtggaggtggtgggggtgaaatggactctgtgagggttcttagctttggtggtttaacgttctatttt

SEQ ID NO: 627312 - DNA, 540 bp, Homo sapiens
gttgaattaatttatactcccaccaacagtgtctaagcattcctttttctccacaaccttaccggtatctgttattttttgactttttaataatagctattccaactggtatgaatggtatctcaytgtggttttgacttgtacagaaatatattggtgatagtggggttggtgtggttgctttgatgtgctgatgtgtgcactgtggaataaagcaaatgagcattatgtttgtgtcattgacaactggtattaatagcatggaaaaaaacagatatccactaagatcaatgagtttgaccttagagtcctgaaataaactgaattggaatatcagtgtaaggtcatttatcttttttaataaaaaaattatttttagtattatccactgaaacggcctagagatattgatcaacccaattgtagtgagtaaccgtggtggttagattgtggtcctttaactattccactaaaagaacagtgttcttgaaaaaaaaaaagacgcttattagagatctaaggtagaaaatttactagatg

SEQ ID NO: 627313 - DNA, 504 bp, Homo sapiens
aatcagcacattgtcttccacaatggttgaattaatttatactcccaccaacagtgtctaagcattcctttttctccacaaccttaccggtatctgttattttttgactttttaataatagctattccaactggtatgaatggtatctcattgtggttttgacttgtacagaaatatattggtgatagtggggttggtgtggttgctttgatgtgctgatgtgtgcactgtggaataaagcaaatgagcattatgtttgtgtcattgacaactggtattaatagcatggaaaaaaacagatatccmctaagatcaatgagtttgaccttagagtcctgaaataaactgaattggaatatcagtgtaaggtcatttatcttttttaataaaaaaattatttttagtattatccactgaaacggcctagagatattgatcaacccaattgtagtgagtaaccgtggtggttagattgtggtcctttaactattccactaaaagaac

SEQ ID NO: 627314 - DNA, 571 bp, Homo sapiens
tgaagcgggaggatcccttgagccctgtttgtcaggactgcagtgagccaagatgaagctactgcattccagcstgggtgacagaatgagaacctgtcttaaaaaaaagagaaacgtttataatgaattcaagcatctccacatatattagaattgacagaagtctcaataccttatgaaaaagatatatatatatatatatatatatatatccatatgcctccatttaagaattttatgtttgttaaaatttagtagaacctttagatttttcccttttttctcctacattaaccatgcagtattgaagaaaaccatgagaataaaaaaataacaaataaagaaaaaaagaatttttaaggctaaatattttgatctttatacattttcatttttcttcctgtgtggtatatatttcctttaccatgttaaaatatcatggaattaggcacttcatcagtatattcctctagcatttcttgaacaattctgctttcacttaatgattgttaaaaattttctcaggttgtaacgtctctaaaaatgtgggatattagaaccagaaacacac

SEQ ID NO: 627315 - DNA, 333 bp, Homo sapiens
tcaaggtgtagccccaaaattctccctacctctgaatctactttctctgatccctgcctcctaggtactaatggttcagactttcatttcctctggcaagttgtatctccaaagggatctaaggaagctctatctgtgtccttaggcacctaggctataacccgggagtcttatacctggtgtccctcccgatttaggtatacagctctcgacatgggcagttatgtgggacccattccccaccacccttgccagggccccaagtttmtaatggctaagagagaaagagacagagagatggagagagagagagggagagagagacagagaaag

SEQ ID NO: 627316 - DNA, 542 bp, Homo sapiens
gactcaaaggttccctacaccctctcagaaacgaatttgcataagaactgttgtttatgggaatgcatcttatggggcagctgggttgttatgaaatactcaggaacccagcccaactctaggactcactcctgagggcaaaggcaatgttgggtatgctggtaaaggaccactagaatccagcagcccagacccctttctttgtggtcaagagagacgggaaaacaggtgcagggctgctacattggtgagcgtaactaatcctataagcagaggtccatgggtggttatgcaccctggaaagtaactcacccctgagagcaaaggcaatgttgggtatgctggtaaaggaccactagaatccagcagcctggacccctttctttgtggtcaagagaggcaggaaaacagctgcaggactgctacatcrgtgatcgtaactaatccgataagcagaggtccatgggtggttatgcaccctggaaaagaataagcattaggcccttagaggacgctctaggactactgctcatcagaaaatg

SEQ ID NO: 627317 - DNA, 542 bp, Homo sapiens
gactcaaaggttccctacaccctctcagaaacgaatttgcataagaactgttgtttatgggaatgcatcttatggggcagctgggttgttatgaaatactcaggaacccagcccaactctaggactcactcctgagggcaaaggcaatgttgggtatgctggtaaaggaccactagaatccagcagcccagacccctttctttgtggtcaagagagacgggaaaacaggtgcagggctgctacattggtgagcgtaactaatcctataagcagaggtccatgggtggttatgcaccctggaaagtaactcacccctgagagcaaaggcaatgttgggtatgctggtaaaggaccactagaatccagcagcctggacccctttctttgtggtcaagagaggcaggaaaacagctgcaggactgctacatcagtgatygtaactaatccgataagcagaggtccatgggtggttatgcaccctggaaaagaataagcattaggcccttagaggacgctctaggactactgctcatcagaaaatg

SEQ ID NO: 627318 - DNA, 613 bp, Homo sapiens
ggaattagacaaaggcagtaactgtttatacctctagatgaaaaatgggcaatagacatcaatatggaaatcttcaataccaaaattacactttaaataacttaattaggaagaagtgtgtgaattatggtgttttaatattattcataatacttaatctaatgacttaagtatatatgaatatagttttggttaattatactatgatatttagggtataatgaggactaagttaagccactaatgacaaaattccacacrgcaacaaaataactagaaacaataattaaacaacatcaaatttatatctcatgtagatctctagatctgcatgatcatcattgagatgatactctatggtatcaaagatccatactccatttatcctatcgaatctctgtgcaaaatcttcccttctcaatgttgtctcctagtccaagacaaatttcccaactccagataaaatatctgcacttaaccatcaagaataagaaagaaaagatgaaagtattctccctttgctctacttctttttttctatttttttttattttggaacaatcttacatctatagaaaattctaaaggtagtatagagtttccatacaaccca

SEQ ID NO: 627319 - DNA, 613 bp, Homo sapiens
ggaattagacaaaggcagtaactgtttatacctctagatgaaaaatgggcaatagacatcaatatggaaatcttcaataccaaaattacactttaaataacttaattaggaagaagtgtgtgaattatggtgttttaatattattcataatacttaatctaatgacttaagtatatatgaatatagttttggttaattatactatgatatttagggtataatgaggactaagttaagccactaatgacaaaattccacacggcaacaaaataactagaaacaataattaaacaacatcaaatttatatctcatgtagatctctagatctgcatgatcatcattgagatgatactctatggtatcaaagatccatactcmatttatcctatcgaatctctgtgcaaaatcttcccttctcaatgttgtctcctagtccaagacaaatttcccaactccagataaaatatctgcacttaaccatcaagaataagaaagaaaagatgaaagtattctccctttgctctacttctttttttctatttttttttattttggaacaatcttacatctatagaaaattctaaaggtagtatagagtttccatacaaccca

SEQ ID NO: 627320 - DNA, 613 bp, Homo sapiens
ggaattagacaaaggcagtaactgtttatacctctagatgaaaaatgggcaatagacatcaatatggaaatcttcaataccaaaattacactttaaataacttaattaggaagaagtgtgtgaattatggtgttttaatattattcataatacttaatctaatgacttaagtatatatgaatatagttttggttaattatactatgatatttagggtataatgaggactaagttaagccactaatgacaaaattccacacggcaacaaaataactagaaacaataattaaacaacatcaaatttatatctcatgtagatctctagatctgcatgatcatcattgagatgatactctatggtatcaaagatccatactccatttatcctatcgaatctctgtgcaaaatcttcccttctcaatgttgtctcctagtccaagacaaatttcccaactscagataaaatatctgcacttaaccatcaagaataagaaagaaaagatgaaagtattctccctttgctctacttctttttttctatttttttttattttggaacaatcttacatctatagaaaattctaaaggtagtatagagtttccatacaaccca

SEQ ID NO: 627321 - DNA, 616 bp, Homo sapiens
gtatatatacatataaaacctctgtatatacagtttctatgtatatatacatataaaacctctgtatatacagtttctatgtatatatacatataaaacctctgtatatacagtttctatgtatatattcttttaaacctctgtatatacagtttctatgtatatatacatataaaacctctgtatatacagtttctatgtatatatacatataaaacctctgtatatacagtttctatgtatatatacatataaaacctctgtatatacagtttctatgtatatatacatataaaacctctgtatatacagtttctatgtatatatacatataaaacmtctgtatatacagtttctatgtatatatacatataaaacctctgtatatacagtttctatgtatatatacatataaaacctctgtatatacagtttctatgtatatatacatataaaacctatgtatatacagtttctatgtatatataacatataaaacatatgtatatatattttctatgtatatatatacatataaaacatatgtatatatattatatatattttctatgtatatatacacatataaaacatatgtatatatgttttatatgta

SEQ ID NO: 627322 - DNA, 560 bp, Homo sapiens
aatcagcagccatcagcattgagacaagaccctccagcagcaaaaagattatgagtcactgaaggcctggatgaccgttggcaatttttagcaataaagtattttaaaatgaaggtatgtacattgtgtttcagatataatactattgcacaattaatagactacagtatagtgtaaacataactttcatatgtaccaggaagccaaaatattcatgtgactcactttattgcaatasttgccttattgccgtgatctagagcaaaacccaccgtatctctgaggtaagcctgtatacggatatgtacacgtacatacacatctacataggcaacaagatgctgaaaaaggcaagtgaaactgattttgacttctagcctccagaactgcaagacaaaaaaggttttgctgttttaagccaccaagttcatgtgtattaatttgttacagcagccatgggaaactactgaagagttgaatcttgtggaagtggtgtggttctgggttaggaaatgccattcaggtttggaattgagcatagaagttcagctgaatttcat

SEQ ID NO: 627323 - DNA, 560 bp, Homo sapiens
aatcagcagccatcagcattgagacaagaccctccagcagcaaaaagattatgagtcactgaaggcctggatgaccgttggcaatttttagcaataaagtattttaaaatgaaggtatgtacattgtgtttcagatataatactattgcacaattaatagactacagtatagtgtaaacataactttcatatgtaccaggaagccaaaatattcatgtgactcactttattgcaatagttgccttattgccgtgatctagagcaaaacccaccgtatctctgaggtaagcctgtatacggatatgtacacgtacatacacatctacataggcaacaagatgctgaaaaaggcaagtgaaactgattttgayttctagcctccagaactgcaagacaaaaaaggttttgctgttttaagccaccaagttcatgtgtattaatttgttacagcagccatgggaaactactgaagagttgaatcttgtggaagtggtgtggttctgggttaggaaatgccattcaggtttggaattgagcatagaagttcagctgaatttcat

SEQ ID NO: 627324 - DNA, 370 bp, Homo sapiens
aagttcatgttcataaatgtacaatttcatcctcagaagcactaggtaaacacagaaaactacagcccttgcagctggcccttacatcaaaggaatacacaaagcccaccctgtgcacctcaaatgtctcccggttaactaaagtctttgggtgtattatgatccactgccctcaytccccttcacatctactgttaacaacatttttgtttttctgattttggaaaatcctctttcaacactttacaatgactcacaagctacaacccttccagacacccacttctgcaagcaaacttcggattttgttcaagtaaagtgcaatagttactgcagtatttgtgtatttcttaaccacttaatgtgtgct

SEQ ID NO: 627325 - DNA, 453 bp, Homo sapiens
agcagcctggaaactgtgagaagaaacggccctggaatgcctccaaagcatcttctcaggcctgggtgctgacaggacagtgccattcttgatgctagctcacagcaagccatgcagaatcctggaatttagcagcagtggcagctgttggcataagagtytcagtctggatattggagtactgggtttcaagcagaggaggggccccacagccagaactgagagatgagtggagtgtgggctccagccatgggcactggaattgggcacccccttttcgtgggacgagagcagagggagatttgcctgagaggcatggttttggctcagatgatgagtattatagctttggatggccttgaggactgaaagcagactgcatgtgactaaatgttccaactggctccattggtagggaaaggagagtgagcccgattgggtctggagagtgag

SEQ ID NO: 627326 - DNA, 535 bp, Homo sapiens
tgtaagtttcctctatttgtaagacttgtaagtttcctctattatatggttacacggggagccatgtaagacaaaaatcagatattactcagactgctttcaattctctgccatggtgggttacccaaatggctgctgagtctcctggacttcaggctgaagttgcttacgtgggcccaggaaggctctggtgactatttcaaaggtgggatgagtaaggtctgaaccaacctgcatcttgaggggaagtaatggatcctgtatgacatttccactcctcatctgaggccctaaggatcatatccctttctgttttccaaatagaaacattaaacagtaaggcagcatcatttcacatttaggagagacttctcataggaattttataaacgtgttattttyctttgttaaaatatgaataatgcatctggaagaaagaaacttttttcttggtataactttcttaatagctgaaatgaagtaattttacctattttcctaagacaaaaggaaagattgtgagctttaggggtcc

SEQ ID NO: 627327 - DNA, 562 bp, Homo sapiens
tgcacaaaatcttctataggcggacattaggaccattcatgtaaaaactaaagcagaagcctagagaaggtcatttctacaacaggttcacatgatgaatcagcctaaattctmaaagctcaaggcaaccaatgtccagctcaaatacaatgttaaactcctttaaagacaacaaattgagttacataaattgatctcttttcccaatagacattatgacacattatgacataaataaggggacacactgtattattgtgtagagtaacaaaactgctcatggaattaatttaacaccatggggaaagggagcaaaccaccttttcttttcttttttttttttttttttttttttactataagacaaaccaagatgtcaaataaacttattagagcaaagacagaattctcatttaagccagtcatctctacagtgagaagctaattctgtctaaagcatgcttgttttgttttcaagaagaggtcatcattaaggtatgcacatgtaaagtggtatttctcatttgtggtcttggagggaatttattgtgggaacaaacca

SEQ ID NO: 627328 - DNA, 562 bp, Homo sapiens
tgcacaaaatcttctataggcggacattaggaccattcatgtaaaaactaaagcagaagcctagagaaggtcatttctacaacaggttcacatgatgaatcagcctaaattctcaaagctcaaggcaaccaatgtccagctcaaatacaatgttaaastcctttaaagacaacaaattgagttacataaattgatctcttttcccaatagacattatgacacattatgacataaataaggggacacactgtattattgtgtagagtaacaaaactgctcatggaattaatttaacaccatggggaaagggagcaaaccaccttttcttttcttttttttttttttttttttttttactataagacaaaccaagatgtcaaataaacttattagagcaaagacagaattctcatttaagccagtcatctctacagtgagaagctaattctgtctaaagcatgcttgttttgttttcaagaagaggtcatcattaaggtatgcacatgtaaagtggtatttctcatttgtggtcttggagggaatttattgtgggaacaaacca

SEQ ID NO: 627329 - DNA, 633 bp, Homo sapiens
gtttcagtaaatgtccttattcaagctacgcagggtgacatcacttagtatctttttgtaggtattatattatttcatctaaacatcaaggaaaaaaatcattgttcagtaaaacatttaggaattttattagttcatttattttactaagctatatttaacaaatagaaaagtattaaaggtacatacttatatatctcaagtgtctttgaacccatgatattaaatttttgcaataatagtaagtattcctaaatgttttgccctgattttctaaaaaaaaaaaaattatcaggaaggcagaaaatttccaatttttacattttttctgattttatttctgttttcctgttaaagaaattatgtttaaatatgcaaaataactttattatcaaattacacattcagatggaagcaacattaactataaattatttttctcaattttctcattttgttttctaactggtttttatttatttatttagagacagggtcttgctatgttgccaggctggagtgcagtgctattcacaggtatgaccgtgatgcactacagctttgamctcctgggctcaagtgatcttccttcctcagcctccagatcagctggactacaggcatgcaccacca

SEQ ID NO: 627330 - DNA, 558 bp, Homo sapiens
ttggtaatactctaattcttggtttaagcaaatttttaatattcattgcactgtacaaataaataccattaagaaaagcgccatttatttgctaatggtgatggtgcatcataaactgttgatgattagtctaatgttttacctttaagttccaattaaaatattaatactaggaaaaaataaaggttttagaaatggattagtattcagtttttagtattactggattaatgacttcatgtcaattattaacrttacttacttttttgagcttctgtttctttacttcacaaatgatgatagtggctgtcttgtaatttttttttgagagaggttagtcattattcctgttaccaaatatttctcgttttctttgcagacacatgacaggattatacttctgtgtttttgtttttcaagtgatatatgaccataatatttgtgattaaaagtgaactcgtggaggtcacctctgaatgataaatataagatccagtgtatcatttatgatgtttttcttccctcttttgagtgtgtcattattagctctgtcaacct

SEQ ID NO: 627331 - DNA, 631 bp, Homo sapiens
ttacttgggctttttttcagtctccgtattccattatggttttagaccaaatggaaatttgagtcaagacttcagctttaatctgctaaactggaattctctttagtttacaatttcatttgtacaggtaagtatatacttttctttcattgtttctttttaatattcccattagtgggaattcaggctatctgtctcttacctatccttgttgacctattaattatgcacatttcctcctaaaactactgttgctatttttttcttggaacttcttgttcaagtcctttgaggtagtattcaggtctgactttagagtctatggaatrtcttagcgtttgagaattttagatgagtgattaatagatctgtgtgttcaccttttgatccagtcttggggcaggtgcaggtgcttatgttttatgatcttcttcagaatggaagaaggaggatgtcagtgtccccttattcttgaaacacatttaatttcctttttaaagttataaatattgttaattaaaattttagcaggggtaattttaatatgaatttttattttgaaataaatttaaatttgctgaaatgttgccaaggtaatacagagtatccccatatgtttctcacacagttt

SEQ ID NO: 627332 - DNA, 532 bp, Homo sapiens
tttatgatcttcttcagaatggaagaaggaggatgtcagtgtccccttattcttgaaacacatttaatttcctttttaaagttataaatattgttaattaaaattttagcaggggtaattttaatatgaatttttattttgaaataaatttaaatttgctgaaatgttgccaaggtaatacagagtatccccatatgtttctcacacagtttcccttgatgtttaatttttaacatttatcatgccaatcgaagatttattttattttatgttttatgctttcaactgttrttttagattcagggggcacatgtgcatggtatattgtgtgacactgagttttggggtatgattgatcccatcacttagatagtgagcatagtacctagcaggtattttttcagaccttgacccactcctactcttccctctgtagtagttcccagtgctagtgttcccatatttatgtccatgtgtacccaataattaactcccacttataagtgagaacatgtagtatttggtttttctc

SEQ ID NO: 627333 - DNA, 540 bp, Homo sapiens
ttatagcagtgtgaaaacagactaatacacttggcttttgtgcatagtgctatgatggaacacacaaagtaatgtgtcccttttttgtaggatgatttattttccttagtgtgtatccctagtcaygtaaatgctgggtctaacggtagttctgagttctttgggaaatctccaaactgctttccacagaggctgaactaatttacattcaaacctagagtgtataaccattcccttttctccacagcctcagcaactgtgttaggctgttcttgtattactataaataaatacctgacattgggtaatttttttaaaaaagagattgaattggctaattgttctgcaggctgtacaggaagcacagcaccagcatctactcagcttctagggaggcctcaggtgaaaggtaaagctggagcaaggctctcacgtggcagagtggaagcaagagagaggtggggaagtgccacacattttaaatgataaatgatcagatctcatgagaactcactcactgtcatgaggacagcaccaagc

SEQ ID NO: 627334 - DNA, 620 bp, Homo sapiens
taattctccttctagaaatctttcatctcctttgttggatgcattccyacttaattttttttgtggctattgtaaatgggtttttgatcttaatttggctcccaacttgaacattattggtgtatagaaatgctactgatttttgtatgtggattttggatcctgaaactttactgcagttgctaatcaattctaggggccttttcaaagagtctttacagttttctaggtacagaattatatcagcaccaaagagagttaatttgactgccttttttcctatttagatgccttgtatttttttcttttgcctgattgctctgtctaggacttccagtactatgttgaataggaatggtgaaagtgggcattattgtcttgctccagttcccaaggggtatgcttccagattttgtccattcagtatgattttgctctaggtttgtcacacatggttcctatcattttgaggtatgtttaatgcctagtttgttgtaggtttttatcataaagagatgtcgaattttatgaaaagatttatctgagtctgttgaaataatgatatggttattcagttttgttttgtgtatgaggtgaatcaaatttattgatttgcgtat

SEQ ID NO: 627335 - DNA, 615 bp, Homo sapiens
attatgaaattcttgtagagtgtttttcagctctatcctgtcatttatgttttttgtttgtttgtttgtttgtttttctgtactggctattttgtctgttaccttctgtatcttaatattgtgattcttagcttccttagatgtggtttcaacattctcccaaaactcaatgatttttattcctatccataatctgaatgctatttctgtcatttcasctacctctgcctcattaggaattcttgctggagggctagtgtgctcatttggaggaaagaaggcactctggctttttgagttgtcagagttcctgcactggttctttctcatctttgtgggctggtgttccttcaatctttgaagttgctgtcctttggattttttttcttttattctattttatgaccttgagggtttgattatggtataagctgtgttcagtcacctggctttgttagtggaagacttcaggtggccaaggctcagctcagcactctgcattgtgtgctctaactctgggagactggtatcatacaccagctattacctgtggatcaagtttaggaacctgctgcactggaggggtcaatgtgatctcagactgctggtcacaac

SEQ ID NO: 627336 - DNA, 615 bp, Homo sapiens
attatgaaattcttgtagagtgtttttcagctctatcctgtcatttatgttttttgtttgtttgtttgtttgtttttctgtactggctattttgtctgttaccttctgtatcttaatattgtgattcttagcttccttagatgtggtttcaacattctcccaaaactcaatgatttttattcctatccataatctgaatgctatttctgtcatttcagctacctctgcctcattaggaattcttgctggagggctagtrtgctcatttggaggaaagaaggcactctggctttttgagttgtcagagttcctgcactggttctttctcatctttgtgggctggtgttccttcaatctttgaagttgctgtcctttggattttttttcttttattctattttatgaccttgagggtttgattatggtataagctgtgttcagtcacctggctttgttagtggaagacttcaggtggccaaggctcagctcagcactctgcattgtgtgctctaactctgggagactggtatcatacaccagctattacctgtggatcaagtttaggaacctgctgcactggaggggtcaatgtgatctcagactgctggtcacaac

SEQ ID NO: 627337 - DNA, 574 bp, Homo sapiens
gacacgagagatagtgtacaggaaatagccactggattaatggtttttcccactgtagtgggaaaaatatatatataatataattatatataatatatatataattatataatatatattatatataatatatagaaaatatatattatataatatatattatatataatatatattatataktatatatataattatataatatatattatatatattatatataattatatatattatatattatatatattatatatatatatacacacaggttacaatgatgtttgacagcaagggtttggaataatgagaagaaatatttaaagtggtttgtagaataggttaagaggttaagaggattaggacaaatgacataaaacaagccagaatgccctatcaccagaactcatggaaaacaaaatttaaatcttgtcaccaattattgtatttatcaaagtcaaggtcctttccagcgctcagcttccctagaactacagtgtttcttatcagagataggaaaagccagggaagtctgatatctcacggcttccccttacaatagataaacaca

SEQ ID NO: 627338 - DNA, 595 bp, Homo sapiens
tcatttacttgaaataaaataatcctagcattaatccatttttgatgaatattgctttggttaagcaaataattacaacaaaattttgcatttgtgaatgaatcagctttatgtccactgggcttacttaaaatgaactacaagtatataattttaaaygaaaaataattttctccacctacacagtaccttagggaacagaatatacttaagcttgctatttttgtgtcctcctaaaaaagaatatatattcttctccattgaatattaggagattggatatttttgttcttacttctttattaaaatagtaataaatcttcttttatgtttcaggaaagcatggtagagtgttttatacacagcttttcagtaaaggggaaaaaggaggtgttgtatggataatatgtcccttagaatgacaatggaaacatagactgcctctttttctcttacacattgcaattctattgcaaaatacagacaatcctacaggatgtacagaaaacatataaataatagagttttacagtaaaagttagactattatgattgtcatatactactaataacaatttctgcctaactttctcag

SEQ ID NO: 627339 - DNA, 595 bp, Homo sapiens
tcatttacttgaaataaaataatcctagcattaatccatttttgatgaatattgctttggttaagcaaataattacaacaaaattttgcatttgtgaatgaatcagctttatgtccactgggcttacttaaaatgaactacaagtatataattttaaatgaaaaataattttctccacctacacagtaccttagggaacagaatatacttaagcttgctatttttgtgtcctcctaaaaaagaatatatattcttctccattgaatattaggagattggatatttttrttcttacttctttattaaaatagtaataaatcttcttttatgtttcaggaaagcatggtagagtgttttatacacagcttttcagtaaaggggaaaaaggaggtgttgtatggataatatgtcccttagaatgacaatggaaacatagactgcctctttttctcttacacattgcaattctattgcaaaatacagacaatcctacaggatgtacagaaaacatataaataatagagttttacagtaaaagttagactattatgattgtcatatactactaataacaatttctgcctaactttctcag

SEQ ID NO: 627340 - DNA, 595 bp, Homo sapiens
tcatttacttgaaataaaataatcctagcattaatccatttttgatgaatattgctttggttaagcaaataattacaacaaaattttgcatttgtgaatgaatcagctttatgtccactgggcttacttaaaatgaactacaagtatataattttaaatgaaaaataattttctccacctacacagtaccttagggaacagaatatacttaagcttgctatttttgtgtcctcctaaaaaagaatatatattcttctccattgaatattaggagattggatatttttgttcttacttctttattaaaatagtaataaatcttcttttatgtttcaggaaagcatggtagagtgttttatacacagcttttcagtaaaggggaaaaaggaggtgttgtatggataatatgtcccttagaatgacaatggaaacatagactgcctctttttctcttacacattgcaattctattgcaaaatacagayaatcctacaggatgtacagaaaacatataaataatagagttttacagtaaaagttagactattatgattgtcatatactactaataacaatttctgcctaactttctcag

SEQ ID NO: 627341 - DNA, 595 bp, Homo sapiens
tcatttacttgaaataaaataatcctagcattaatccatttttgatgaatattgctttggttaagcaaataattacaacaaaattttgcatttgtgaatgaatcagctttatgtccactgggcttacttaaaatgaactacaagtatataattttaaatgaaaaataattttctccacctacacagtaccttagggaacagaatatacttaagcttgctatttttgtgtcctcctaaaaaagaatatatattcttctccattgaatattaggagattggatatttttgttcttacttctttattaaaatagtaataaatcttcttttatgtttcaggaaagcatggtagagtgttttatacacagcttttcagtaaaggggaaaaaggaggtgttgtatggataatatgtcccttagaatgacaatggaaacatagactgcctctttttctcttacacattgcaattctattgcaaaatacagacaatcctacaggatgtayagaaaacatataaataatagagttttacagtaaaagttagactattatgattgtcatatactactaataacaatttctgcctaactttctcag

SEQ ID NO: 627342 - DNA, 621 bp, Homo sapiens
cacatcttatttaatttagagtacctttggtgggaccaaatccctctgcttaacatctctgcattccaccattcctcactcccagtatttactgaaaacatgaacaatctgttacaagattacgcacaaaaagaaaactgagggagaarggatgtgtttctcatcagtatcactagatgtaataattatattaaattcttccttcagcctttgagacttatctcaatgtcattatgaaaccatacctgtttctcttgccatttcctctcttatcccaatcaatgaattatcaacccttcttccttaaattacttactttttttaagtctctattaacagatgttatcccagtctgccatgtgagagaattgatgacttctttaaaatctctttgaagttaggtttttgaggaggtagagtctatattagtatcctcactagtttctccaggaggggtcttcaatttcattgtcttttatttaacattttttttaagttagattaaacctataaaataaaatgtaagatgttttcaggttcttaactattaatattgaagatcagtgtttgactttcctttctctatgcaaaagggaacattttgttaaaaatagagctaat

SEQ ID NO: 627343 - DNA, 655 bp, Homo sapiens
aaggtaactgtgatgttcttggcatagaatggatgcacatatatgtatttcattgattaatattgcttttaaaaaactatgagtactagagattgcaaaattctaatccatttattattttcttggacttatttcttcaatctatgcacatccgttggattaactcttgaatcttctaattccatttcttgcccaattctacaatttccacacatttctgtttagttccagaaacacagaattaaaaaatctactgagtatacttctatacaaaacattgtatctggtaaagaagaattatgcccaacatactctagccttatggctgccaatagaaataacccccttctattttctactgtataaactcaatttgtatcgctttaccacttatttaatgcrtgtttattctcaattcataatatgtattatctcgcctgaggtatagttattattttaggtaatagctacctttcagcgtactttatcccttaactttagaaagtatgatgaacatttagacaacattgtgtgaatgggtaaatacctatccaacattcaataaaaaataaattaaaatccaagcccaaatcagaaatagcaaaaacaattaccatttactgagtacttagcatatcttatacatatcatatat

SEQ ID NO: 627344 - DNA, 655 bp, Homo sapiens
aaggtaactgtgatgttcttggcatagaatggatgcacatatatgtatttcattgattaatattgcttttaaaaaactatgagtactagagattgcaaaattctaatccatttattattttcttggacttatttcttcaatctatgcacatccgttggattaactcttgaatcttctaattccatttcttgcccaattctacaatttccacacatttctgtttagttccagaaacacagaattaaaaaatctactgagtatacttctatacaaaacattgtatctggtaaagaagaattatgcccaacatactctagccttatggctgccaatagaaataacccccttctattttctactgtataaactcaatttgtatcgctttaccacttatttaatgcgtgtttattctcaattcataatatgtattatctcgcctgaggtatagttattattttaggtaatagctacctttcagcrtactttatcccttaactttagaaagtatgatgaacatttagacaacattgtgtgaatgggtaaatacctatccaacattcaataaaaaataaattaaaatccaagcccaaatcagaaatagcaaaaacaattaccatttactgagtacttagcatatcttatacatatcatatat

SEQ ID NO: 627345 - DNA, 470 bp, Homo sapiens
agaagggatggggcacactcaagccagcaatagtggcatggcatggcatggtacatgtgtacacatgcactgtcagagaaggaaaggctaggtctgtctgcaaacacatgtacaggcaaagagatgtatggggatcgctggcagcgagtgcctgccrgcaaagcagtatggaggaggctgtagtgtggggaggacatgggcagtcttatatgtatacacagggtttgctcttctggagcactctcccagtcagctgcagtccaccagtgcaggagcaatgaggcaggccccctgaggtgctgggggggtacactgctagcaggtacaggcaggctggggcccaaagagaagacagcacaccaaagggtgctcagggggcctggctcatctcatgggcaagactgctctacagagtctacgttcacccctttccttagggctaatgtctactataggagcaaatcaagcct

SEQ ID NO: 627346 - DNA, 599 bp, Homo sapiens
ttgtttactaattctcttgctaatgattttttatccactttgtctttatatagcattagttttattaagaaacagttatctttattaagaaaataataaactattcaatggaaaactatataattttaaatttggaagtggtctgggagttcgttgtctcctgccattatagcactaatttataaaatactcatgaaaactcatccaaggttgaggagctaacaaatttggattrttgttttctcgtgggtgccggatagttcacaataatcaatgaaaccatttgccactttgattttttgtgtgtgtttttgttgttgttgttgttctggtgcatgattagaataaagcttctgccaatcttttccccttttaataccagttaatctgctgaaatgttaaaattattctgaatttgcttaattgtcttcagattgttcaaaaaatcattatgtacacagagacccttcaccacatttgtcagagaccctactctacatttctttcacctccctagcctcaattaccttgtgcatatgtgtatgtgtgtgagtgtgtgtgtgtgtgtgtgtatgtgtgtgtgagagagagacaaaaga

SEQ ID NO: 627347 - DNA, 574 bp, Homo sapiens
tgttctgtcactgtgcaaaagggaccagactctttgaattctgttctccttaacatgtgtgattcctattggctagtgggccattatctcagcttaaagagtcagctgttgatctaattatccgaacaaaacaattctccctagatatgaataaacttaagcttatagtgggaatatttattttaaaaaggatttttayagcacatgctaacagaattctaaagtaatcagaggtgacgatattgagaatatgtgcttctgtgtccttcatttctgttttaattattctaatccaattcacttaaattatcagggaggttttttttaaaaaaataaaaacatcaatattactgatacatatctttgcttctctgttaaattttgcaaggggactccatagtgtttaaagacacataacttggcaagaaaatgggagttagcatagataattataaatactcaacagttattaaaatcttttcaattgtaagaaaaaaatgctaaactgtgtttatttccttttgagttttgtggactatattgtgttactcatgtctttcatttgtggtattta

SEQ ID NO: 627348 - DNA, 494 bp, Homo sapiens
gttttatttagtttccttctctctttctgatagcaagaaggacacaaactagagaagcatctttgggcagtatgtgaagcctgctcaaaggagttgtaatcattctcatatatctcaaaactgaagataattcttgtcctctrtgaagggtttctagtagctgctttgagagttcttagtttcctttctttgtattctcatccatggcagacattctttggcagcaattctcacctctcaggaaatagaatcatcactactgtggccagctactacagacaaactaaggtacattgagaaaaaatgcccaaacaaatgggttcttcccatatctcctccacttcacctcctcattcaccaactagctacaacaacaaagcccagttcccagattctctatgaaagaagttagactacaaatcaagcattctaagttttctagctcctacctgaggtctggcttctaactcactgtctatgagagctattggtgt

SEQ ID NO: 627349 - DNA, 494 bp, Homo sapiens
gttttatttagtttccttctctctttctgatagcaagaaggacacaaactagagaagcatctttgggcagtatgtgaagcctgctcaaaggagttgtaatcattctcatatatctcaaaactgaagataattcttgtcctctatgaagggtttctagtagctgctttgagagttcytagtttcctttctttgtattctcatccatggcagacattctttggcagcaattctcacctctcaggaaatagaatcatcactactgtggccagctactacagacaaactaaggtacattgagaaaaaatgcccaaacaaatgggttcttcccatatctcctccacttcacctcctcattcaccaactagctacaacaacaaagcccagttcccagattctctatgaaagaagttagactacaaatcaagcattctaagttttctagctcctacctgaggtctggcttctaactcactgtctatgagagctattggtgt

SEQ ID NO: 627350 - DNA, 633 bp, Homo sapiens
gtggatatttccacaaattctcccacttgctcactctaatgataaaagcaagcctctagcttcagtctggaaggaatttatctacatatctatccccttaacttttccagctgctacctgaggaactagctttcaactgacgtgtctatgagaactaatggagatcagcatccattaggcccatggaggctacagagatcaaagcaacagtttgaaaaagtctgtggtttgaatgagcttgcaaacatttgccatagttcttttccccagctcagttcagcatgagcagattatacacccagcttttccctgaggagagaagaaattggaaaatccagttagtgccccaacatttatggttactactaaaaaggatcagtrtctcacctgtttcagggcaatgatgagagctggcatactctggacacccagagaccactgaaagcagcaaaagaaaaacaacttgttatgtgttagggaaccctcctatgatcattggtggattttcagcagaaactttggaggccagaagggagttggatgatacatttaaaatgcggaaacaaacaaacaaatacacaactgccaatcaaaacagtatacccagaaaattatcctttaaaacttaagaca

SEQ ID NO: 627351 - DNA, 592 bp, Homo sapiens
acacatcctttcctagagtaaccaaagagagagagaagactgaaataaataaaactgtatatgaaagaggaaacattacaacagatgtctcagaaataaaaagagcccttaagggactgttatgaataaatatacaccaacaaattagataaatgcgaagtaatasataaattcctagaaagatacatcctaccaagattgaagaagaaatagaatagtccagcactgcatggctttgtgggagaattccagcaaacattcaaagaattaataatatttcttaaactatttgaaaatctagatgatggaacacttacaaactcatttcatgtagccagcatcgacctgataaccaaagacatccacaagaaaagtaaactacaggccagtaaccttgatgaatgtagactcagaaatgctcaataaaatacaagcaaactgaatgcaacaacacattgaaaaaattgtacacaatgaccaactaggacttatccctggggtgcaaggatggttgaacatgcataagtcattcaatgtgatacactacataaacagaatgaaacacaaaaaccatatgatcatctcaataagt

SEQ ID NO: 627352 - DNA, 485 bp, Homo sapiens
ataaaactgtatatgaaagaggaaacattacaacagatgtctcagaaataaaaagagcccttaagggactgttatgaataaatatacaccaacaaattagataaatgcgaagtaatacataaattcctagaaagatacatcctaccaagattgaagaagaaatagaatagtccagcactgcatggctttgtgggagaattccagcaaacattcaaagaattaataatatttcttaaactatttgaaaatctagaygatggaacacttacaaactcatttcatgtagccagcatcgacctgataaccaaagacatccacaagaaaagtaaactacaggccagtaaccttgatgaatgtagactcagaaatgctcaataaaatacaagcaaactgaatgcaacaacacattgaaaaaattgtacacaatgaccaactaggacttatccctggggtgcaaggatggttgaacatgcataagtcattca

SEQ ID NO: 627353 - DNA, 579 bp, Homo sapiens
atcaatcatattcctttggctatatacccagtaatgggattgctgggtcaaatggcagttctgtttttggttctttgaggagttaccacactgcttcttacaatggacgaactaaattatactcccaccaacagtgtaaaagtgagccctcttctccacaaccaggccaacatatgctactttctgactttttaataaaaagctttctgactggtgtgagatgttttctattgtggtttttatttgcgtgtctctaatgatcagtgatgttgagcttttttaaaatacttttttttggctgcaagtatttttttgtttttgtgtttgaaaagtgtctgttcatatacttttcaccctttttagtggggctgtttgtttttttcctgtaaatttgtttaaattccttatagatgctagataatcgacctttgtcagctacataatctgcaaataatttctcccattctatwggttgtctggtaactttgttgatagtttcctttgctgtgcagaagctctttcatttatttattttttgactatgtttccaatatgacctttattgagcaagtactgcta

SEQ ID NO: 627354 - DNA, 593 bp, Homo sapiens
ttttaaaactaatgtgatgagattgggtctatccagataatttgggacagtttttccatatggaggttcttaactttaaacacatctacaaagtcctttttaccaggtaaggtaacatattccaaggctcytggaattaggtaatggacatataacagggcattattttctgcataccacactaggcactggggttctaggggcttcgggcatttggctagtggctaggtcctacagatgaaatagagacaaatccaatatgtgggtatatatgcataagtaaaaatacattcccctctgctaatggtattatttttaatttactttttactccattgaatgtttaccaactacatgtacatgtaaatactattatttctgggtttttagaccccttcccaaatgaggtaacagaaagatattttatttttgtgtctcggtttttttttgtttgcttgtttctagtttgtttgttagcttgtgtcatacagggaagtcacatgtaaatgtatggatttagagggtgcaaaatgctttcacacagtttaactcatcagattcttacaacaatccctttaggtaggcaaagcact

SEQ ID NO: 627355 - DNA, 578 bp, Homo sapiens
aataccagcttgattgaaataattacctaattttatttcttgaggaatagtgttccagggagagggaacagaaatattaaggtctcagaatatttgttgtgtttgataaagaccaaaaagataagcacaactagagtacaataaatgaagggtagattgctaggagatgagatagagagaaatggaaggtgggatcttttgaaacagtggaaatttcctttagactmttcaaaaatatgttgagtaatgattactaacatcaaaattattttttataaaatcatgtcagactttttcatctccttaaaaaaaagcaaaaatatgtactgagtatctgtgtttgggaaataacagagaacaagacagacacaaattctattactttctcaaacttttggaattcatttgaaaatatacccatgtttttaatatcaccatttttttccactagctagcagccattctcaactcttttacaaattatggcacatcagtccaggtgtggtggcttatgcctataataccagcacttaagaaggatgaggtgggagaatcgcttgagcccaagagttcaagac

SEQ ID NO: 627356 - DNA, 542 bp, Homo sapiens
tgagcattttctttatcaatcaagggtttgagactcatatttataaaaatgatggacaatgccacattaatcagaagaaagactgatttgtatgcccaagattaggggccctcaaactttgaaaggcacaaaaacttcctgcaggatttttttaaagaactacatgccagaatttacaccagaaatttaaaaagtacttcaaaaaggctaaggagtaggctaatcaacattttaaaacactacatagataattttattttgcattaaaacttaaccattgtgataaagtattaaactttccaaatgtatataaatcatccaaggcaatgtatgaatcaatgttatacaatttaatcytaatttactttcgattcatttaacttaattcgacatggtcttaagaaggactcatcagggataaggggaactgccagatgcctcttggaagaggaatatttatttatttatttatttatttatttatttatttatttattcatttatttaggcttaaacaggaactggcctcaaggccagaaacc

SEQ ID NO: 627357 - DNA, 542 bp, Homo sapiens
tgagcattttctttatcaatcaagggtttgagactcatatttataaaaatgatggacaatgccacattaatcagaagaaagactgatttgtatgcccaagattaggggccctcaaactttgaaaggcacaaaaacttcctgcaggatttttttaaagaactacatgccagaatttacaccagaaatttaaaaagtacttcaaaaaggctaaggagtaggctaatcaacattttaaaacactacatagataattttattttgcattaaaacttaaccattgtgataaagtattaaactttccaaatgtatataaatcatccaaggcaatgtatgaatcaatgttatacaatttaatcctaatttactttcgattcatttaacttaattcgacatggtcttaagaaggactcatcagggataaggggaactgccagatgcctcttggaagaggaatatttatttatttatttatttatttatttatttatttatttattyatttatttaggcttaaacaggaactggcctcaaggccagaaacc

SEQ ID NO: 627358 - DNA, 610 bp, Homo sapiens
tgatttatagcttttaactttagatcttatctaaaaaccctgagttgttagaacccaatgtaatctctgacttcaacgtatactgaggtcacaccacctacgagaaatcttgcggcaagatttttgtgtatcttaaagtcttgagtgagaaactaaaagaatcttgatgtataggacagactgtttcatagaataactcattccctttttcaagcttccttatttcactgttgccagcatgttgttcattctcagggagtagaaataatttccagycagatataacatccaagacttttaagttggtttgaaaaatcccccaaagccaaccttggagtagaacagttactgtatttcctctcttatgaactccattaagaatttactttggcacaattatcttatcccaacaccaacttccttaatacctgcttactgaaatggaacactttaaaataaattaacgtagtaatgacttttgtgtactaatgattttaacattttggaaaaagaaatcacttattttacaaacatccaagacatgttgattctagggaacttctctgctgcaaaactttcccatgaaaattgataaaggaacatttctatg

SEQ ID NO: 627359 - DNA, 610 bp, Homo sapiens
tgatttatagcttttaactttagatcttatctaaaaaccctgagttgttagaacccaatgtaatctctgacttcaacgtatactgaggtcacaccacctacgagaaatcttgcggcaagatttttgtgtatcttaaagtcttgagtgagaaactaaaagaatcttgatgtataggacagactgtttcatagaataactcattccctttttcaagcttccttatttcactgttgccagcatgttgttcattctcagggagtagaaataatttccagtcagatataacatccaagacttttaagttggtttgaaaaatcccccaaagccaaccttggagtagaacagttactgtatttcctctcttatgaactccattaagaatttactttggcacaattatcttatcccaayaccaacttccttaatacctgcttactgaaatggaacactttaaaataaattaacgtagtaatgacttttgtgtactaatgattttaacattttggaaaaagaaatcacttattttacaaacatccaagacatgttgattctagggaacttctctgctgcaaaactttcccatgaaaattgataaaggaacatttctatg

SEQ ID NO: 627360 - DNA, 610 bp, Homo sapiens
tgatttatagcttttaactttagatcttatctaaaaaccctgagttgttagaacccaatgtaatctctgacttcaacgtatactgaggtcacaccacctacgagaaatcttgcggcaagatttttgtgtatcttaaagtcttgagtgagaaactaaaagaatcttgatgtataggacagactgtttcatagaataactcattccctttttcaagcttccttatttcactgttgccagcatgttgttcattctcagggagtagaaataatttccagtcagatataacatccaagacttttaagttggtttgaaaaatcccccaaagccaaccttggagtagaacagttactgtatttcctctcttatgaactccattaagaatttactttggcacaattatcttatcccaacaccaacttccttaatacctgcttactgaaatggaacactttaaaataaattaaygtagtaatgacttttgtgtactaatgattttaacattttggaaaaagaaatcacttattttacaaacatccaagacatgttgattctagggaacttctctgctgcaaaactttcccatgaaaattgataaaggaacatttctatg

SEQ ID NO: 627361 - DNA, 576 bp, Homo sapiens
tcacttattcattcaatgaatagttattgataataggaactaacattaatttagctctttttatgtgccagaccctatgctaaatatattatttgaatgatttcatttaatcctcaccaccagatagagatactattattgcccatatttgactgatgaggacacttgagctcatagagatcacagcctcaaaaaaggatctcaggctgggtgyggtggctcatgtctgtaatcccagtgctttgggaggctgaagctggaggatcgcttgaggccaggagtttgagaccagcgggtgcaacatactaagaccccatctctacgaaaatttaaaaaaaaattagccaggtatggtggcacatgcctttagtctcagctactcaggaggctgaggtgggagggtggcttgaacccaggagttcgaggctgcagtgaactatgatgttgccactgcattcctgggtgacagagcaagatactgtctaataataataataataataataataataataataataataatagatcttaaacctgagtttgtctgtcatctgaatcctgggctctcatcca

SEQ ID NO: 627362 - DNA, 576 bp, Homo sapiens
tcacttattcattcaatgaatagttattgataataggaactaacattaatttagctctttttatgtgccagaccctatgctaaatatattatttgaatgatttcatttaatcctcaccaccagatagagatactattattgcccatatttgactgatgaggacacttgagctcatagagatcacagcctcaaaaaaggatctcaggctgggtgtggtggctcatgtctgtaatcccagtgctttgggaggctgaagctggaggatcgcttgaggccaggagtttgagaccagcgggtgcaacatactaagaccccatctctacgaaaattwaaaaaaaaattagccaggtatggtggcacatgcctttagtctcagctactcaggaggctgaggtgggagggtggcttgaacccaggagttcgaggctgcagtgaactatgatgttgccactgcattcctgggtgacagagcaagatactgtctaataataataataataataataataataataataataataatagatcttaaacctgagtttgtctgtcatctgaatcctgggctctcatcca

SEQ ID NO: 627363 - DNA, 559 bp, Homo sapiens
cattacgccgggctcgcccgggatgcctggctcccggcgtccgctgcctccgctggggacgtcccgggtctgccgccctctgccctcgggggtctcccttccagcaacagccgtgcgccctgtggagagactatggcctctgagakgaggagcgggctcctcgatgccgggagggagactggggcagccccagaggcctgggaggcgcatctgccaagcagatggtaactccgagggggcaaggtgcatgaggagcgctcattatcctcgccggagccaacagcacctgccctccgctggagaccgtctttgcttagtagagccggcctgaccacagggaggggcaaccaccccaaggtcatgccagctgctggaggcagggctaggaaacacatccaggtggcccaggtgagtctcacctggctcatcctgctgccctgcaaggggtcccatcaacagtgaaaggagctctcccctcctatctagaactctggcgggtgggagctggaggcagaaggggaaggttttttcctggtataacatctggtggaggggggag

SEQ ID NO: 627364 - DNA, 624 bp, Homo sapiens
cttttttttctaggcatgtaataaatacatacaaataaaatgcctcgacggaccaaaaaacaagggaaatgggattatgaatgagctttattttccttcttatatttttctgtgtttttataagtgytctataatgattatatgttttttaaatcagaagaaggccagatgaggtggctcatgcctctaatcccggtactttgaaagactgaggcaggaggatcaatcgaactcaggagttcaagaccagccagcatagcaaaaccctgtttctacaaaaaataaaaataaaaaaaattagctgggcatggtggcacgttgctgtagtctcagctacttgggaggctgaggtgggagacttgcttgagcccaggagacttgtttgagcccaggctgcagtgagctatgatggtgccactgcactccaggctgggtgacagtgagaccatctctaaaaatgaaaaaagaaaagaaaaaaaaaagattgtgaaaaagaaaagttcagagacactgaaaatcctgaaaatctaactgtgattatactattttaattgtgtaaagatgctacttgattatttctaacttgggtcaataaaagtcagtctctcccaattagtactcttt

SEQ ID NO: 627365 - DNA, 528 bp, Homo sapiens
gcgcttccattcctcagcccttgggtggtcgatgggactgggcgccgtggagcagggggtggtgctcgtcggggaggctcgggccacacaggagcccatggagtgggtgggaggctcaggcatggagggctgcaggtcccgagccctgccccacaggaacgcagctaaggctcggtgagaaatcaagcacagcgccggtgggccggcactgctgggggactcagtacaccctccgcagccactggcccaggtgctaagtcccccattgccccccaccaagcccacgctcatccagaactccagctggcccgcaagcgccgcatgcagccccggttcccgctcgtgcctctccctccacacctccctgcaagctgagggagtgggctccagccttggccagcccagaaaggggctcccacagtgcagtgggggggctgaagggcttctcaaatgccaccaaagtgggarcccaggcaggggaggtgccgagagcaagcgagggctctgaggactgccagcatgctgtca

SEQ ID NO: 627366 - DNA, 589 bp, Homo sapiens
gtttaaaatttgcttttctcaaactgctattgtttaatgaacwttaggatttgcacttcatattctttgtttattttcctaccgtgttgtttgtcttatgaattcgaatgagctatttgagtattttggatgttaatcttttatctggcatatgtatgttttatttcccaacatatcatttgtctttcagtttgcttatggtatttttcatagaaatgtttaaaaaattatataaccaatatgtttaggctttgctttatagtttctgggtgttctatctcagttaaaaggttgccaaacctactgcattacatatatgtttgcctaagtgttcttgcagtcattattttattaaacttattcttgtaccatgtctgaaatttacttttaaaagtggggtatggtggatagtgaaactcaatggtagtcaattgtgccagatactttttgattaaataaactaaccctttcctactcaattgaattaccatctttgtcatatatcaaagtctcatatacactggtctctatttctatacttttttgttccactgaactatttgtctattcatatgccaatattatatta

SEQ ID NO: 627367 - DNA, 551 bp, Homo sapiens
tgcagtgcctagtgcaaagtaggtttgtgataaggatttgttgaacatatgaatgaaaagatagatgaagaggccaagataatggtccttttcccaactctgttccgttttgtcatcgtggccccaaagcagtttatcttatgtatagaatatcataaaatctcctctggaaagagttgcaatttacttctgacccactcctctaactacaaggcccaaaatgggtccagagaatgaggcaggggatggacactgtgccacttctcttccagcagagacatactttctctcaatgtatcctggtctacagagatgtagctctgcttccaaagagggtacctttaacattatcaccctgaaaggaggaaattgaattcccatcttcacttcagaagaaagtctttgtttaacawctgcataaagggttcatttgggtgttttctcccagaacaaaggaaaggtctcctttaaaggaacattgacaactccactacttgctagaaagaaactgcttgccacttggaaataacattttgttgttgttgcttttc

SEQ ID NO: 627368 - DNA, 505 bp, Homo sapiens
agggcttcaacatatgaattttaaggaggacatataacactagtcaggcagatgkttcagcggttttatggagtctgctttattttgaggaaactgttgtttaatgtcagactttcaaatgagatacataaaatcaagtgatgcaaatcatgtgaaataaagaggataataaatctcataggcattggtgtggtgagaagaaaaagaaactctttttatttaaaacaagaaccaactgcagacacttttacatcaagaaaagggtcatctatggtgtcaggattgttacagatataggaaaaagaaaaaaaaaaaaagaaaagaggcatcattcttgtccagggagatacctctttgtttaaggaaatgtctagatggcatgtttgagtttgaatggtgaatccaacatccctcaccccaactctgggcattgtttgaaaggggaaaataaaacacaggagaaagaattaaatttctcattataaaaatggttggcttgaaaaac

SEQ ID NO: 627369 - DNA, 594 bp, Homo sapiens
tgatatactgatttcctttcctttggataaatatccattaatggaattgttggataatacagtagttctactttcagttttactgcaggatctccatactgcttttcataatggccatacgaatttacattcctaccaagaagatataagaattccctcttctccacatcctcactagcatttttttggtctttttgataatagtcattaaaactgggataaggtaagatatcattgttgttttgatttgcatttccctgatgattagtgatgttgaacatttttttcatatatttgttggccatttgtatttctccttttgagaaatgtctattcagatcctttggtgggctttaagtgtttctgggcttttaaaacttcatatacattgtgtcaatatatacatatcattctgcaacttgctttttcccacctacttcaggttctattcaccacacattttcctaactttctccctcttcctttccctccmaaactttctattggattaacaaagctttccatattcctttaatttcttctgttggtttagaagctatataatgtatttttatccttttaaggatttattta

SEQ ID NO: 627370 - DNA, 554 bp, Homo sapiens
cttgcaaattcttttttttttttttttgagacggagttttgcttttgttgcccaggctggagtgcaatggctcaatctcagctcaatgcaacctctgcctcccgggttcaagcaattctcctgcctcagcctcccaagtagctgggattacaggcatgtgccaccacacctggctatktttttgtatttttagtagagatggggtttcaccatgttggtcaggctggtctggaactcctgacctcaagtgatccacctgccttggcctcccaaagtgctgggattacaggcatgagccaccacgcccagctgcaaattctattttacaacccattattttaacctgataacaacctaccactgtttgcataaacaaacaaacaagcaaaaagaaaactagtaaaaactctatgccttaacttcatcaccccagtttttaacgttttgttgtttccatttatatcttattgtactttctatgtcttgaaaagttgtcgtagttattatttttgattggttcatcatttagtctttctacttgagtagtttacaca

SEQ ID NO: 627371 - DNA, 441 bp, Homo sapiens
ttatttttgtagagacagagtctcactatgttgcccagggtggtttagagctgctggcctcaagtgatcctcctgccttggcctcccaaagtgctgggattacaggcgtgagacattgttcttagcatcaccccttcattctagatcttgattacagtagccacggaccattgatggtaacattcaaatgagaagtcagttatatataggaacaaataagtaaaatttatttccttaaatgagtaaataaaactggagtcgattggccaaaaatcattataaatattgtaacattagttgtttttcagctctggaggtataactaattaatattccctttcaagggctacccytgcaaaagctgtgtgagtaatcagagagtttattttttagaccctgtaatacaattctaaaatgaaagcctaacgaagggcaatttgc

SEQ ID NO: 627372 - DNA, 544 bp, Homo sapiens
gaacaaataagtaaaatttatttccttaaatgagtaaataaaactggagtcgattggccaaaaatcattataaatattgtaacattagttgtttttcagctctggaggtataactaattaatattccctttcaagggctacccctgcaaaagctgtgtgagtaatcagagagtttattttttagaccctgtaatacaattctaaaatgaaagcctaacgaagggcaatttgcaaaataaggcttggacaatctaggagagagtcatcctctrttcttggtggtgccctagtaaatagccccaaatgttagtgctcaaagtaaaggagacacttcagatatttatgttacagtggaaaagaacccctatttaaaaactgaagccatccaacgagtgatctgcagtgatatcaatttcatttactggtcatgtaatgttctgaacttgttccaaatatggccatctgtcctccaatgccggctgaaggttccccatttagatttcatggtctgtttgacgagggattaagcctgaagagatcaggc

SEQ ID NO: 627373 - DNA, 469 bp, Homo sapiens
agtgctgaggaagaggtttggctagagatacaaacttggaagtaatcagcacaaaatatacctgaattccggggaggatatatagagtgagagaaaaaggggactgaggaaaggactctggcgaactccacacttatggactggatggaggctgacagaaaagaagccagcaaaagaattaggagaagtagctaataatggtatcatggtaactgaactgccaaagagtttcagtgagaayagagcaggcaacaggatcaaatgctgcagagaaaccaacatagatataaacagaaatgtatctattcgatacaaccatagggaggtcagtgattgcctcagcaaaggtatttcagtagaacaatgagatctgttcatattgttctgaggtagagctggtaagtctggattactcatttaagatattttactgagaaagaaagagaaaaggaagtagctagaagcctgc

SEQ ID NO: 627374 - DNA, 519 bp, Homo sapiens
ttttggcctctgtattctggccaagtctactatttggttttgattttgggctaggtctttggaaagctgaatagccaatgcccacatcaacatcatttcggtttccctgaacttgtgcatgatcagagaacaacatttggaattattatatcaaaatatcgaaatattcagtttcaaatgtaagcattctagatgataattggactgaaaattggctctgttctctagatgtcaaaattctcaatcactcggagcctaaatacacatctattattgcaggagtaaaatgctgcactaataaataatgattgaggaagctgttaaatttatgtacaagcacmatgactacgcacgtcaagtagttaaattaacagggaatcctagctactcagaggctgagacaggagaatcacttgacgccaggagttcaaatctaacctgggcaacagagcaagatcctatctcttaaaaatgaacaataggcaaataggttgagagttagtataaatattttaaaag

SEQ ID NO: 627375 - DNA, 604 bp, Homo sapiens
taggtggagttaaaaatctggctacaaaagcaagtgaaggtagtaaagaaaaaatgagtttttcacacttagatgaggcataaatacagttccttagttcaacacagatatagatatataagaccattcagtcagtcatgatcaaagtcacctgctactctgagatctacctcaccccagcaggctgtttcaccagtaatttgtctcttagttcagcctcataatcatctcctgtgaacactagttctaaaaggcactgcctaaaatactgggctctgtttccacccaactctggcccaacaacttacaatacaattgaggatataaattttggagagaacatagtttgttggtatccaaattctgtcctttgattacttttagagtagaccatgtttcaatgcactatraagtttgctaacactaattatgcttttcaattttttatttatttttattttttgagacagggtctcactctgctgccccaactggagtgcagtggcgcgatcacagctcactgcagcctcaacctcctgagctgaagccatcctccacctcagcctcccaagtagatgggaccacagatgcattccaccactcc

SEQ ID NO: 627376 - DNA, 556 bp, Homo sapiens
aatacaacctctatggaaaatagtatggagatttctcaaagaactaaaaatagaactaccatttgatcragcaattccactactcggtatctacccaaaggaaaagagatcatatcaaaagatacctgcacgtgtatgtttatcacagcactattcacaatagccaactaagtgtctctcgatggatgattggataaagaaaatgtggtttcaatgagataccatcttacaccagtcagaatagctattatcaaaaagtcaaaaaacaaaagatgctggtgtggccacagagaaaagggacaccgttggtgggaatgtaaattagttcagccactgtggcaggcagtgcggagatttctctaaaaacttagaaatatcattcaacccagcaatcccattactgggtatatacccaaaggaaaacagatcattataccaaaaagacacatgtacttgtatgttcatcgtcatgcaattcacaatagcaaagacatggtatcaacttacatgcccatcaatggcggactggataaagaaaatgtggtacacatgccgc

SEQ ID NO: 627377 - DNA, 587 bp, Homo sapiens
ttcttttctagtgaggtcagtaggatattgattctttggtgtgatctgaaacttctttattgcctattacagggtcaatttttgtacagtagatgttccatatgtgcttaaaagtaaatgcrtattttaaaatttttgtgtccaagattatacaaatattaatcagaaaaactcttctatataattactggattcaaaagttttagctttgaagccttctttatattttgataataaacatcatttcacttttgttgatcatgaaatatgtaattcatttgggttgctgtttttcttttaaggcatggatgagattttatgtattagaaatcttaaattgttaagtatacatactggatagtctttcaagtatctacacttttgtattatttgttataatgacacatttagatagggagaacatgacatatgaaaatgccatcctagcattttttcctggactgtctaatattcccatagcaaattttgaatcttcccagctttgctaaagtctcttgttcccttttcacattacaagaatattaaacagagctagaacttgaagtgaaaatttagtaaaatagaaa

SEQ ID NO: 627378 - DNA, 587 bp, Homo sapiens
ttcttttctagtgaggtcagtaggatattgattctttggtgtgatctgaaacttctttattgcctattacagggtcaatttttgtacagtagatgttccatatgtgcttaaaagtaaatgcatattttaaaatttttgtgtccaagattatacaaatattaatcagaaaaactcttctatataattactggattcaaaagttttagctttgaagccttctttatattttgataataaacatcatttcacttttgttgatcatgaaatatgtaattcatttgggttgctgtttttcttttaaggcatggatgagattttatgtattagaaatcttaaattgttaagtatacatactggatagtctttcaagtatctacacttttgtattatttgttataatgacacatttagatagggagaacatgacatatgaaaatgccatcctagcattttttcctggactgtctaatattcccrtagcaaattttgaatcttcccagctttgctaaagtctcttgttcccttttcacattacaagaatattaaacagagctagaacttgaagtgaaaatttagtaaaatagaaa

SEQ ID NO: 627379 - DNA, 548 bp, Homo sapiens
caaattgacacaatatttcaggtcaagaaacacccaataagatggcaagaaatttaaaacaggcagccagggagtgggcaagacacaagagtgcaagtaggtggttagcaacagggagtgggggcccagaagctgggctgggattcaaggtcagggccctagtctgagtaagagtaaagccaagcccctgtttcagagcaactgaggcagcaggcaaattaaccagataggaatgtaggaacaaggattaaggtaggcaaccaataattggatctggggtaaagacagtgttataggagggttaataacctggttgaccccatgcagtcatctgagttatggaaaacaggctccttaatttctgtttaatgaataaayaagattcattccagagcttggggcagactgagtgtataggaatagatttgggggcaatcagattgccctagctgtggggattgttttggtcttttattccttaataaaatacaaataaaactctgtttccatgattgtcatccccccactagagatttgattagattcag

SEQ ID NO: 627380 - DNA, 548 bp, Homo sapiens
caaattgacacaatatttcaggtcaagaaacacccaataagatggcaagaaatttaaaacaggcagccagggagtgggcaagacacaagagtgcaagtaggtggttagcaacagggagtgggggcccagaagctgggctgggattcaaggtcagggccctagtctgagtaagagtaaagccaagcccctgtttcagagcaactgaggcagcaggcaaattaaccagataggaatgtaggaacaaggattaaggtaggcaaccaataattggatctggggtaaagacagtgttataggagggttaataacctggttgaccccatgcagtcatctgagttatggaaaacaggctccttaatttctgtttaatgaataaacaagattcattccagagcttggggcagactgagtgtataggaataratttgggggcaatcagattgccctagctgtggggattgttttggtcttttattccttaataaaatacaaataaaactctgtttccatgattgtcatccccccactagagatttgattagattcag

SEQ ID NO: 627381 - DNA, 375 bp, Homo sapiens
cttgtttttccctctaatagtagatgctggagatatatcagtatatagaaattttcctcattattttatttttaacagctgtgtagtgccaggtgtggatgtaccatagtttattaaactagtccttttaaatgtaagtttatttattatttgtataaatttaagtggtacgagtgtagttttgttacatggatacattgcatagtggtgaagtctgggcttttagtgtaaccatcactcaaatagtgtacattataaccatcaagcaatttytcatcccccacccgcctcccacccttcgaagtctccaatgcctattattccacactctatgtccttgtgtacccattgtttagcttccacttataagtgaga

SEQ ID NO: 627382 - DNA, 333 bp, Homo sapiens
gaagaggaaagaaagcatccataggaacagctgtttctactgctaaattttagttgtaattcagtccctctgtgaggtcacaaagcctttcaaatctagaaggacaattgtaagttgcagtgagaggctgatgtatgtgctgaatgactttgcattcaagatggatagaaaatgggatatacacacttaaaaaaaaactkgcactttctttgaaatacagtagtcccaatgagaaatagaggcttttgggcgtaggaggcagaacttggcatatattttatcttcactcattttcctgtcctaacaggccttgcctttgctctttgggttaat

SEQ ID NO: 627383 - DNA, 333 bp, Homo sapiens
gaagaggaaagaaagcatccataggaacagctgtttctactgctaaattttagttgtaattcagtccctctgtgaggtcacaaagcctttcaaatctagaaggacaattgtaagttgcagtgagaggctgatgtatgtgctgaatgactttgcattcaagatggatagaaaatgggatatacacacttaaaaaaaaacttgcactttctttgaaatacagtartcccaatgagaaatagaggcttttgggcgtaggaggcagaacttggcatatattttatcttcactcattttcctgtcctaacaggccttgcctttgctctttgggttaat

SEQ ID NO: 627384 - DNA, 590 bp, Homo sapiens
ctcagtgactgtatgacatttctgagtcatagttaaattaaggcaacacgatttaaatccatgtttatctcgcttcagggtacatatatgtatatacatgggattatagatcagtggatagatagaaagattatagatatatagagacatgagagaaagtaagagagagaaagagagaagtaaacaacgttgttggtgaacctgttagaacagccactaagaatgggaaaacacaacatattttggtatgtattattctgaaactgaataataayactgttagataaaccagttaccatgaattctctatgtcttgaaaagcagttaatctgtctgctttaggcatgcaattgatttcaacaataaaggtattggcattttccaaattatgaagtcttttacttaaagatacactaagaagaaaagcaacaagacaggctacctgtggaaaatataaaaaatgcaaatgttgattctcttcatctaggcactcagtcaatcaataacaatatctaattgttatctattgtgtgtccaatattttccaaattctgccttgtgtatgctataaaaaataaataacaactctc

SEQ ID NO: 627385 - DNA, 537 bp, Homo sapiens
cccaattaatttatcaatgtacagatacttgagaattatttgagaaatccaattaaaggtatgtctcaggtttatttattttttataactcaattacattttattttattttattttttagacagtgtctcgctgtgtcacccaggctggagtgcagtggctctgtctaggctcactgcaacctctgcctccgggttcaagcgatcctacctcctgagtagctgagattacaggcgcccaccaccatgcctggctaattttttgtattcttagtagagacaggtttcacgatgttggccaggctggtctcaaactcctggcctcatgtaatctgcctgcctcagcctcccaaagtactgagattacaggtgcaagccaccgtgcccagcctgtctcagttttaaataatgamatttctgatattcacatcctgtcaaagcaataagaatcaataatttatcataataaaatatcattaaaggatttgaatagttatatagtcaataacaattaaataatgcattacttattataaat

SEQ ID NO: 627386 - DNA, 464 bp, Homo sapiens
tgtttactcctcctgaaatttaactttcataaggaacagagctttgtttgttcgatcctgtaatctcagctccccaaatactgtttgctacatagtaggtatttaaacaaatattcattgaatgaataaataactgatcgccttggtgcagaataagacaaaggrggagggatcaaacaaaatggaataagctatttctctcaaattagagtaagagctatattggcattaagcagtagcattttcaaaatgttgtatatttattattttgtgcagttttcactgtctgaagtgttatttctctatcatctttgtcaagcatgtcatgtctcatccattaaggctaaattcaaaggaaaactcttcagtaaattttttctcaacttccataagaagagtcagctgtttcatccatctgtactccaccagcattggctgtctccctcagaatgttttgtgatatg

SEQ ID NO: 627387 - DNA, 576 bp, Homo sapiens
ttcaaatacaaatgagttggatggccaaaaatatttgttaaagcagtaataattatggggataaataaagcagtaataattataacagattttatacatctgttaaaatcccagatgtataaaaaaggaatgagatgccaaggtgagagacctataaatctgcataaaattctaaatgattcagtattcaaaacattgaacttgttgtcaaggagatttatggtaagcatagtaattctcttttcaattctaagctatcatttatactgtccaaaaacactacattataattaagaactattttgccatagataacatatttcctaaacagtactcttgatatttttattaagattactaagcacaaaaatacagtaatatataaagaatctgcatgtgaaaatacttggggaaacaaattaaacctctggtaaactgaagagcaatcatggaggagaatgacctaagtgagtgaattatttataagsagtctgtgttttgagatcaaacctaagccaggttcttcatcatccttgagaaattccttcaggctttctgtttctcagtgccttatcc

SEQ ID NO: 627388 - DNA, 546 bp, Homo sapiens
aggggctacaggcaccgtgccagtctgaaatccagcagggtggtcattaaatcttaaagctgcaaaataatgtccttagactccatgtctctcatccagggcatgctgattcaaggggtgggctcccaaggccttgggcagctctgccactgtggctttactgcatacagcccctacatctgctttmacaggctggcattgagtacctgaggcttttccaggcacatggtgcaagctgtcgatggatctaccattctggggtctggaggacagtggtcctcttctcacagctccactgggcagtgtctcagtggggactctgtgtgggagcttcaaccccacagttcccctccacactacccaagtagaggttctccaggagggctccacccctgaagcagacttctaccttgacatccagatgttttcatacatcctctgaaatctaggtggaggtttccaatcctcaactcctgtcttctgtgcacctgcaagcccaacaccagatggaagccaccaaggcttggggcttactccccctgaagc

SEQ ID NO: 627389 - DNA, 610 bp, Homo sapiens
gggtacaggaattgtgtaaatgctcccattccaaaaggaagaaagcagccaaaccaaaggggctacaggcaccgtgccagtctgaaatccagcagggtggtcattaaatcttaaagctgcaaaataatgtccttagactccatgtctctcatccagggcatgctgattcaaggggtgggctcccaaggccttgggcagctctgccactgtggctttactgcatacagcccctacatctgctttaacaggctggcattgagtacctgaggcttttccaggcacatggtgcaagctgtcgatggatctaccattctggggtctggaggacagtggtcctcttctcacagctccactgggcagtgtctcagtggggactctgtgtgggagcttcaaccccacagttcccctccacactacccwagtagaggttctccaggagggctccacccctgaagcagacttctaccttgacatccagatgttttcatacatcctctgaaatctaggtggaggtttccaatcctcaactcctgtcttctgtgcacctgcaagcccaacaccagatggaagccaccaaggcttggggcttactccccctgaagcaatggcc

SEQ ID NO: 627390 - DNA, 472 bp, Homo sapiens
ggttctccaggagggctccacccctgaagcagacttctaccttgacatccagatgttttcatacatcctctgaaatctaggtggaggtttccaatcctcaactcctgtcttctgtgcacctgcaagcccaacaccagatggaagccaccaaggcttggggcttactccccctgaagcaatggcctgagctgtaccttggctccttttagccacagctggagctggagtgtctgggatgcaaggtgccttgttccaaggctacagacagcaacagggccctgggycaggtccacaaaaccatttttccctcctacacctctgggcctgtaatgggagctgcagtgaaggtccctgaaatgccctggaaacattttccccattgtcttggctattatcattcagctcctctttccttatgcaaatttctgaagtaggcttgaatttctacccagaaaatgggtttttcttttct

SEQ ID NO: 627391 - DNA, 538 bp, Homo sapiens
agttcacccactatcacaagaacaccaagggaaattccacccccatgattcattcacctcccaccagatccctcctccaattcaatatgagatttgggcagggacacaaatctaaaccatatcacactgacatgagaaggtttgtgagactgcaatgaatagaaacaaagatgccttgattaataggtaatgtctgccatgacccagggagaagggaatggcaacacccaagcattgtagagtgatcaactatgagcacctatagttatgttaacatctgaatatttcctatataatgagccaacttaaaaatgcagctttagcaatcagtagtttattagaaataacaatgagaccttaatatagaatcaggttgaagcaatccatgataattacaaatagtctatttattgtcattgatcacatcataattattgataatggtttttaagracattttttagtttattaaaagtactttattatcgccacatgtaaggaggaaatctctaagtagaaattggaaaagagggcaacc

SEQ ID NO: 627392 - DNA, 611 bp, Homo sapiens
gagagagatcttgtgttgttccttttagtgtttttcccacaataccttcctgcagtcttctgatcacaatagcrctggaatatttgttaaacataaattagtagcaaaaggataataactaccaattcctaggtgtctattgtgtccaagtttgcaaatatagtaacaactttgcatgatatgtactttcatctcccattgtacattcaaagaaactcttgttctgagattcaaagctgaaaaatactaagtactgaagttttattcaaacccagctgtctcactctaaacatctttctccaaccaaaatgtctcttctaaaaatcagttactctataaaatacagtatatattattttatacataaaatcataaagataaatatatattttatatatcaatataaacatagtcactgagtttgagtacctacattagtaaatctacattcattcataattatctgtgggttgaagcaattctgtcactcatttaccttcagtttccttctatggaaatgggaccactttaaggaataattctgtgtgtcttcccaatcaatggaaatggttctggagctgattttttttcctaatattgtcaattaacta

SEQ ID NO: 627393 - DNA, 611 bp, Homo sapiens
gagagagatcttgtgttgttccttttagtgtttttcccacaataccttcctgcagtcttctgatcacaatagcactggaatatttgttaaacataaattagtagcaaaaggataataactaccaattcctaggtgtctattgtgtccaagtttgcaaatatagtaacaactttgcatgatatgtactttcatctcccattgtacattcaaagaaactcttgttctgagattcaaagckgaaaaatactaagtactgaagttttattcaaacccagctgtctcactctaaacatctttctccaaccaaaatgtctcttctaaaaatcagttactctataaaatacagtatatattattttatacataaaatcataaagataaatatatattttatatatcaatataaacatagtcactgagtttgagtacctacattagtaaatctacattcattcataattatctgtgggttgaagcaattctgtcactcatttaccttcagtttccttctatggaaatgggaccactttaaggaataattctgtgtgtcttcccaatcaatggaaatggttctggagctgattttttttcctaatattgtcaattaacta

SEQ ID NO: 627394 - DNA, 566 bp, Homo sapiens
attgattgtgtctctcatccaattccacacttaccagttgaagaatattgtcaccttttggccaaaactactttccgtcacagaaagctaatccagattacaaattgtttcttccacaggaatatattcagctttatcacacctcttcccaaataatctaacctttaaaatgttataccgagaaaaaattctaaaactcaaaaagctaagatacacggatctcccaagaactcacaggctctaacaaatgcataatcccaattgacaaaaaatatcctctccaaaatatggcaagataaagaagtgtacacatttgcccagtgggccatttgaaggaatattctcccggccttttgggggactgagtgtctaaatggcaaactgattcccaaaacaactggctatctgaccacaaggcatatgcattaaaacacacttctatgcgaaagtgcaagggacctaaatgtttagaaacttaaaaatcaaaacatataagtttaaaataaacataaaatccaataaatgcacagtcataayatattaccaaattttttataccagaatct

SEQ ID NO: 627395 - DNA, 487 bp, Homo sapiens
acacttctatgcgaaagtgcaagggacctaaatgtttagaaacttaaaaatcaaaacatataagtttaaaataaacataaaatccaataaatgcacagtcataacatattaccaaattttttataccagaatctacctagtcygcctaggaaaaatgatgttatttcaaaacagagagaagcaataatgatggatatatcttggtaacacagataatggattttatattcataagatacaagacttggcatttaaaagtccaaaggaaaaagagattatgacctacttttttcattattgataatgatgctcatttctgaaaatctttcaaatgatatattgttatagctacaggaatatagcaaaatacctacttaagcattctagagatgattacttggagttagtcaattttggcatgaatcattctccctcatttacattctcgatttctcaaaaacagctcatactgctgataacaccatcc

SEQ ID NO: 627396 - DNA, 403 bp, Homo sapiens
tgtttccctctgtcttaggagatatttcctacctgctcacatcagcagactacctagcctattgctagtacaccagattctcaagtatagctcactactgattaattgctcagtatgtcaccataacaggggcagactcaaggctcacagccatttggaaaaagaagtggaaccattgctcttcaaacctgtagtttcataattagatcatttccacctggtagcagtgggagagcattgtattttatacttgtttttcatttgtttggttttggttggggggggttgttttgttcgtttttcttgttctgtcacccaggctgaagtgcagtggcatgatctyggctcactgcaaactccacctccagagttcaagcaattctcccgcctcagcctcccaagt

SEQ ID NO: 627397 - DNA, 603 bp, Homo sapiens
gattacacaccataacacataaggatttattactttttattttattgtggtaaggataattaatatgtgctttatgataaagtcatatcctatgaaactaagtaatatctaagtggtctaaaagaatggatttaagatgcaccacatttgctcaatgaaactgatttaattaaaccatgttataaagatctttaagtagtttacattatgatacatattatataaattttacacaaaatcataagctctcgatacattagtgaactaaggactgcttttattacctgccattggccagggattatactaaccatcatacacacattacttcatttaatcttcataaaggcctaatgaaatacaagtagagtttttctaatttttctaatttttctactttttctaagataggttgaatggtttgcccaaaaacagtgtatggtaaaagatgcagttagaaaccaaatgctgtgctttttgcatcatatcacctggcatcctaaagtctctatgtcgttttsataaatgagcatgtgaaagacactgttttatgggtgaactcacacctggctgagcaggctgacaggtaaagacaacagccag

SEQ ID NO: 627398 - DNA, 562 bp, Homo sapiens
ctagcaaatggctccaatctgctggcacagtcttacttcctagctttcccaccttgcatccttaggctgaaaccccagtgaactatgtgtattttcactcgtgctcagagtcaaatcccaactcagctgkttattttctgtgtaaacttgaacaaattacttgtcctgtctgacctttattccttttcctataaaatgaaaataatataatagtatataactcagggggttttatatgcttaaatgagtaaatacatttataattaatatccaacacattatataagtgctgaatatattagagctattattgttattatttgttaacaggatttcctaattattgctcccttggccaaaaaaacctttcctgcccacttttctcctagaaaactcctattcatttgtcacaaccccacacaaatgtcatctcttctcgaaacttcccttaacacattgactcactctctagtggtagttatttcttctgtgccctcatgacaagttgaacaacatgcttcagtagcattattcccacaccattggttaattattattgcat

SEQ ID NO: 627399 - DNA, 473 bp, Homo sapiens
ttttgagatagagatgctgtagttcatgacattggctttgtgtagatcactggaagtcattgcagaaacaaagaacctctataacactaccagaatttaagggtgcactctgattgtggaaaccaaaggcaaagcagttactggtttatgaagactcaaagggaagagagtgggaggggggtaaaaggtgaaatagtatctattgggcactgtcttcactatttgggttgatggrttcactggaagcccaaatctcagcgttactcaatatatccatgtaacaaacctgcacatgtacccactaagtctaaaataaaatttttaaaatataaagttgtcatacaacagactacaagacaatacaaagaattcggtgtttgcagaatttaactgaaaaaagatgtactataaaaaatacaaaatccaagaagtattagtccatataatggtttcacaaggtcttagtaccaaaa

SEQ ID NO: 627400 - DNA, 492 bp, Homo sapiens
attttctagtctgggcacggtggctcatgcctgtaatcccagcactttgggaggtcaagggggcggatcacaaggtcaggagatcaagaccatcctgcccaacatggtgaaaccctgtctttgctaaaaatacaaaaatgagccaggcatttcaatgcacacctgtagtcccagctactcaggaggcagaggcagatgaattgcttgaacctgggaggcagaggctgcagcaaaccaagatcacaccactgcactccagcctgggtgacagagcaagactccatctcaaaaaaaaaaaaaaaaaaagaataacaataataataattttctaaataatatttgctagaacattccatcaatttgcatgggacatttaaatagctctatgtgaactatcgacttgttctaaaaattrctttttaaataaattaagcttcagttccttaattgattatttgtaggtgaaaagaagcaccaatatcttttgttatt

SEQ ID NO: 627401 - DNA, 558 bp, Homo sapiens
aagcagggactggggttagggtgggtacagatgcagacacgcttttaagtggasagaagctaagtgaagggttattcacaattttctttttagaaaatactgttctgatattagggagctgaagacatcatgactttcaagactataaggcataaatagttttgagcatgttttgcttgtgattccctttaacagtaaaacaagatcctgatctatttaaacaaggtcactcaattaaaatagtgactcatttgtggtaagccctgtcaaaatatttaagttgtgtgctcttaaattagttactatcaatattatgagtctctggtttgtagatagatacctggaaacagaaaacattagcttcagtctggttttgtgactattgtcttaagcaagtatgataactcagcaggcctcagtttcctcaccagtaaaattagaggattataaaataaagggaatatcttctcttccagctctagaattctgtaatctatggctttgctaggtttctaaaagcaaggaatcaaaatttggggaaatcctattataagattt

SEQ ID NO: 627402 - DNA, 592 bp, Homo sapiens
cgccaggagaaaagagcccccagttgagaactttagtcgtgattctttctaaatctattatggtttggaccaaagtatgagaggaactccaggtttatagctatgtggtctgagtttcccttaaatctgtatggtttttttctttaacaaatggtgttgggagagctgggtaccaacaaaacatactgcaaaagatactggatactgcaaaagaaagcagttggactctaatcttacacgatatgcaaaaatcaactcaaaatggatcaaaaacctaaacacaagacccaaactataaaacttctataaggaaacataggggaaaaggttcatgacactagatttgataatgattttttggctatgacaccagaaagcataggcaaaaaagtgaaagtagataaattaggctacataaaaatgtaaaaattctgtgcatcagagaacacaagagtatrgtgaaaagccagtccacagaagggagacaatatttgcaaatcatatatctgacaatgggctaatacctagaatatataaagaattcctacaactcaacaacaacacagcaagccaattttaaaatgtacaaagg

SEQ ID NO: 627403 - DNA, 565 bp, Homo sapiens
atgaaaagagttctggaggctggttgcacaagaatgtgaattacgtaacactactgaactgtacacctagaaatagcgaagatggtaaattttgggttgtgtttcaccacacttaaatttaaaaaaactgtatcagtaaagaacaattagtgaaatgaagatagttcttccagatttgaaaatgtagaatccaaagcatcatcttagaagtatctgggccttaaatataggttatccttggataacgggatccattgacacttctgaatgaaaaactgcctgtccactggctaccattatgattcacctttggttctgcctttttttcaaatgatggcaaaatcagttatcatttcactcactcttaattaaatcytaaggtaaaaaaacattcactgagtaccaattatgaatcaagaatggtgttggggagagttacacaaagtgtgcaattcaattctgggaagataataatagatctttgaaaatctgacactgaacacattcagtcatagcacagtttcacagttaagaccatggattcttgagccagaccacctaggtt

SEQ ID NO: 627404 - DNA, 565 bp, Homo sapiens
atgaaaagagttctggaggctggttgcacaagaatgtgaattacgtaacactactgaactgtacacctagaaatagcgaagatggtaaattttgggttgtgtttcaccacacttaaatttaaaaaaactgtatcagtaaagaacaattagtgaaatgaagatagttcttccagatttgaaaatgtagaatccaaagcatcatcttagaagtatctgggccttaaatataggttatccttggataacgggatccattgacacttctgaatgaaaaactgcctgtccactggctaccattatgattcacctttggttctgcctttttttcaaatgatggcaaaatcagttatcatttcactcactcttaattaaatcctaaggtaaaaaaacattcactgagtaccaattatgaatcaagaatggtgttggggagagttmcacaaagtgtgcaattcaattctgggaagataataatagatctttgaaaatctgacactgaacacattcagtcatagcacagtttcacagttaagaccatggattcttgagccagaccacctaggtt

SEQ ID NO: 627405 - DNA, 628 bp, Homo sapiens
gaagatagttcttccagatttgaaaatgtagaatccaaagcatcatcttagaagtatctgggccttaaatataggttatccttggataacgggatccattgacacttctgaatgaaaaactgcctgtccactggctaccattatgattcacctttggttctgcctttttttcaaatgatggcaaaatcagttatcatttcactcactcttaattaaatcctaaggtaaaaaaacattcactgagtaccaattatgaatcaagaatggtgttggggagagttacacaaagtgtgcaattcaattctgggaagataataatagatctttgaaaatctgacactgaacacattcagtcatagcacagtttcacagttaagaccatggattcttgagccagaccacctaggttttaattctggctcttccacttgctagctgtggtctttttgccttatgcctcagtttctacatccttggrtggggatactaatagtaccgtattcataaagttactgtgaggattaaatgagttactatttgtgaagtttagttagagcattgcctgacatatagtgttacttaagtacatactcactaaacaaatccacatgcactgcacacctaacta

SEQ ID NO: 627406 - DNA, 570 bp, Homo sapiens
ttagcctacaggaaattaacagtgcagcaatgctgccctcttgtgttggaaaataaaacaaaagaaaatattttatttctgcatctgggaagcacagaacacactcaaatttaaatgattaaataccttctgtaatacttttctgatatgcagttacgaacatttgtttcaaaagaagttttaaatataactatataagtcataactacagatacaaaactgcagattactgcagatatacaactgcagataaaacaggttaaaaagataaggtaacactatggtattttgcgtgtgtgtatgtgtgtgtgtgcgcgcgcgcgcgcgtgtgtgtgtgtgtgtgtatcacattataccaacatactaaaaaacttagtcaaaatggacacattattagaaaaaacataacattaaaacagtattaagaataaagagtaggctttaaataggttaaaaacgaatcacagttttaaaaaaycttcccatgaagaaaatatcagacccagatattgtataggtgaatcctaccacattatttataaattttaaactcttccccaaaagataaaa

SEQ ID NO: 627407 - DNA, 593 bp, Homo sapiens
aggggggtgttggtgtttcttttcttttcatttgattctcatttgtgttctcaatatgctttactttgagtttgttcgtatttggatgaagataaaattttccttggcttcagtgtgtggcaagcagtgcccatttattttaatagatactgtaccaactaaatcccaatatgtgtcaggaaattcagaaaactgaacccagaaatgatgctagacacagatagaaaggaggacttcaaaaattcctacatgttactttggtgattggtgtgaaggagtactttatagtatcttctaaaagtacagttactttcagaaaaatgagaaaaatttaaaaagattaaaaaacacagtatcattagaatttggtctcttgcctctaaattttctaaattaccaaaaataaaataaaagaaatttattggctatagataatatagcacaaattggataattttaaatcwcagacatgtaaaatcagtacagatttcacaccaaaacactatttgtagcaatagtagccatgagaattaagtatctgacctgggaggccccaaaatatcaatctcaggtgtgtccgttagaaggtaaaa

SEQ ID NO: 627408 - DNA, 417 bp, Homo sapiens
tgcatcaccatttttcaagtagttgtggagcacagactattcactcagcagtatgctcagagttttagggaataaaaaacagaatgactctcatcataaactgccttaaatcaactcaggagacaatgacttacttccagacccttcagaastattgaagtcctgacgagaggtgacactttttttactggatcaaaaacaaacaaaaagaatgcataaatttccaaactcaaactaaaaaaataggaaagccaaatcttattcttggccacttctacattacttttgtatcatcccttctcttgtccctttctctcatccccttttcagaaataacgtgtattagtataaagaaattttcactggcacatggaaaggaaaaaggttaagcctttctcacgctagatcacacaattc

SEQ ID NO: 627409 - DNA, 465 bp, Homo sapiens
taaagaaattttcactggcacatggaaaggaaaaaggttaagcctttctcaygctagatcacacaattctgaatgtgacaacgtatctgaaaggagatgttctcataatccctcactgcaaccattatatgcaagaacaaaggtaaggagagagaaaagtaaagttaactcagtagggaataacatttttgatgtggagacttgaagagttgacagcagaccaggaagagagatgctatttgcgtgacggtcccttgttaaacatagtgaatgggcatttgggattgagtataattccactaaaaaggaggaaagataaacacaaccttcttatccaagactatagaagatttccagacggtttaaagaaatgtatttcttacctaggacacagaaaaacttcatgctgatcattatagttcctaatagctctgtaatattgtggtgaatgtggctggtgtttgc

SEQ ID NO: 627410 - DNA, 585 bp, Homo sapiens
aaagttaactcagtagggaataacatttttgatgtggagacttgaagagttgacagcagaccaggaagagagatgctatttgcrtgacggtcccttgttaaacatagtgaatgggcatttgggattgagtataattccactaaaaaggaggaaagataaacacaaccttcttatccaagactatagaagatttccagacggtttaaagaaatgtatttcttacctaggacacagaaaaacttcatgctgatcattatagttcctaatagctctgtaatattgtggtgaatgtggctggtgtttgcccacattcccttttctggttgtaccatctcccatttgctgtgacttttggagataacaacaaacagctcacccctattccagagaatcgccctgaaccagatggaagccactttgcctgggtggatacaccactttccctcccttctccagggttgactcagccaatgacctcctggcatgggatacacaaggccagcctctttttctctatgtacgactagttctgttgtgtaatttgtgctccagtgtcctgtaggatcagactgaagctagtccctc

SEQ ID NO: 627411 - DNA, 535 bp, Homo sapiens
ggaggacttcaaaaattcctacatgttactttggtgattggtgtgaaggagtactttatagtatcttctaaaagtacagttactttcagaaaaatgagaaaaatttaaaaagattaaaaaacacagtatcattagaatttggtctcttgcctctaaattttctaaattaccaaaaataaaataaaagaaatttattggctatagataatatagcacaaattggataattttaaatcacagacatgtaaaatcagtacagatttcacaccaaaacactatttgtagcaatagtagccatgagaattaagtatctgacctgggaggccccaaaatatcaatctcaggtgtgtcygttagaaggtaaaaaatctggaaatagaatcctgagatgatatttctacctataatacttaaggtaaagaaaaggaggtacataagaaacgtttctagattttaacacaagagacaaataaattctttttgacatgaaagacaaataaattttgagttgcaaatgagtgaacatgccaaggta

SEQ ID NO: 627412 - DNA, 585 bp, Homo sapiens
aaagttaactcagtagggaataacatttttgatgtggagacttgaagagttgacagcagaccaggaagagagatgctatttgcgtgacggtcccttgttaaacatagtgaatgggcatttgggattgagtataattccactaaaaaggaggaaagataaacacaaccttcttatccaagactatagaagatttccagacggtttaaagaaatgtatttcttacctaggacacagaaaaacttcatgctgatcattatagttcctaatagctctgtaatattgtggtgaatgtggctggtgtttgcccacattcccttttctggttgtaccatctcccatttgctgtgacttttggagataacaacaaacagctcacccctattccagagaatcgccctgaaccagatggaagccactttgcctgggtggatacaccactttccctcccttctccagggttgactcagccaatgacctcctggcatgggatacacaaggccagcctctttttctctatgtacractagttctgttgtgtaatttgtgctccagtgtcctgtaggatcagactgaagctagtccctc

SEQ ID NO: 627413 - DNA, 522 bp, Homo sapiens
taatctcattcacaatagtcatgcaaaaatgtaacatacctaggaatacacctaaccaaggaggtgaaatatctttagaaggaaaactctaaaacattgctgaaagaaatcacagatgacacaaacaaatggagaaacattccatgctcatagatttgagaaaccactatcattaaaatgcccataatgcccaaagcaatctataaattcagtgctattcctgtcaaactaacatcatttttcacagaattagaataaaactattctaaaattcgtgtgaaattaaaaaaagagcccagatagtgaaagcaatcccaaacaagaacaaagctggaggtatcatagctcctgacttcaaactatactataargctatagtaactaaaacaacatggtacccaaacaaaaacagacacatataccaatggaacagaatagagaaaccagaaataaagccacacatctacaaccatctaatcttcaacaaagtcaacaaaaataagcaatggtaaaggactccct

SEQ ID NO: 627414 - DNA, 602 bp, Homo sapiens
ttcattcattgaataaatacttatcaagcaccaactatgtgagagggactctgctaggcagattcagcaggtggatggtcaccaaactggcaaagggactgtatagcagggggcccccaacccccaggctgcagaccagtagtggtctgtggcctgttaggaattgggccacgcagccgcaggtgagctgtggctgagccagcgagcattaccgcctgaactctgcctcctgtcagatcagaggtggcattaggttttcataggagtgcaaaccctcttgttaactgtgcatgcgagggatctaggttgcacrctttttatgagaatctaactaatgcctgatgatctgatgtggaacagtttcatcctgaaaccacctccctcccaccaccccgtctgtggaaaaattgtcttccacaaaactggtccctggtgtcaaaaaggttggggaccactgccctatagggaatacagataatctgggtcagtgacagggagtcactaatacaggatcagtccagacagaggaatgggaaatctagtctgattcttggaagatattgtatcctcaggaatttgtgacagttgtataatcagacaat

SEQ ID NO: 627415 - DNA, 603 bp, Homo sapiens
ttatcaagcaccaactatgtgagagggactctgctaggcagattcagcaggtggatggtcaccaaactggcaaagggactgtatagcagggggcccccaacccccaggctgcagaccagtagtggtctgtggcctgttaggaattgggccacgcagccgcaggtgagctgtggctgagccagcgagcattaccgcctgaactctgcctcctgtcagatcagaggtggcattaggttttcataggagtgcaaaccctcttgttaactgtgcatgcgagggatctaggttgcacactttttatgagaatctaactaatgcctgatgatctgatgtggaacagtttcatcctgaaaccacctccctcccaccaccccgtctgtggaaaaattgtcttccacaaaactggtccctggtgycaaaaaggttggggaccactgccctatagggaatacagataatctgggtcagtgacagggagtcactaatacaggatcagtccagacagaggaatgggaaatctagtctgattcttggaagatattgtatcctcaggaatttgtgacagttgtataatcagacaattttggaagtgtaggcatgtaa

SEQ ID NO: 627416 - DNA, 640 bp, Homo sapiens
actcacaggtttttccccaaatttrtgtgtgcagatatagtcatatttcaggaaatgtgaagttttaaaaattttcttcctgactgctcaccaaattacttagattttttcctgaaatcattctcaggaaagtggtcacatttacgagtgataaaattacatgtgcaatttattgaataattgttaataattaatgacaaataatgaactgcagtcaggagacagattctggcctcaaataatttacagttcttaaaattatgagtagatacttctcggtagggtccatgtttcagttgacactgggctcactctgagaacaggaagtaatcagattacagtgatggtttaacgctatcttacttagaacttagatcaaagagttacagcagctttataatcctcagcactcaatgaatagattgccaaagtaaatctcagtttgtttaatgtctagtgaagcagaggaaaaagcagctattaagcatcacaatttttaaaggaggacagaatgacagtgttaatggatgtggaattttctctgtcctcagtcagcatgcttcattgaatacttatggaatgaaaagtacttggtgcaaactactgtacactaagcgttgtggtgggatataaaaaaggt

SEQ ID NO: 627417 - DNA, 640 bp, Homo sapiens
actcacaggtttttccccaaatttgtgtgtgcagatatagtcatatttcaggaaatgtgaagttttaaaaattttcttcctgactgctcaccaaattacttagattttttcctgaaatsattctcaggaaagtggtcacatttacgagtgataaaattacatgtgcaatttattgaataattgttaataattaatgacaaataatgaactgcagtcaggagacagattctggcctcaaataatttacagttcttaaaattatgagtagatacttctcggtagggtccatgtttcagttgacactgggctcactctgagaacaggaagtaatcagattacagtgatggtttaacgctatcttacttagaacttagatcaaagagttacagcagctttataatcctcagcactcaatgaatagattgccaaagtaaatctcagtttgtttaatgtctagtgaagcagaggaaaaagcagctattaagcatcacaatttttaaaggaggacagaatgacagtgttaatggatgtggaattttctctgtcctcagtcagcatgcttcattgaatacttatggaatgaaaagtacttggtgcaaactactgtacactaagcgttgtggtgggatataaaaaaggt

SEQ ID NO: 627418 - DNA, 640 bp, Homo sapiens
actcacaggtttttccccaaatttgtgtgtgcagatatagtcatatttcaggaaatgtgaagttttaaaaattttcttcctgactgctcaccaaattacttagattttttcctgaaatcattctcaggaaagtggtcacatttacgagtgataaaattacatgtgcaatttattgaataattgttaataattaatgacaaataatgaactgcagtcaggagacagattctggcctcaaawaatttacagttcttaaaattatgagtagatacttctcggtagggtccatgtttcagttgacactgggctcactctgagaacaggaagtaatcagattacagtgatggtttaacgctatcttacttagaacttagatcaaagagttacagcagctttataatcctcagcactcaatgaatagattgccaaagtaaatctcagtttgtttaatgtctagtgaagcagaggaaaaagcagctattaagcatcacaatttttaaaggaggacagaatgacagtgttaatggatgtggaattttctctgtcctcagtcagcatgcttcattgaatacttatggaatgaaaagtacttggtgcaaactactgtacactaagcgttgtggtgggatataaaaaaggt

SEQ ID NO: 627419 - DNA, 496 bp, Homo sapiens
agaatgtgcatccctttcacaacttcctaaggtcaaaaaggggtcagttgaaccattgtaagttggggaccatctgcagacatgctcaggtgctactttgccaggcagggtctgctactgtaacataagacacctcccagccatggctgattggacagaggtggaactctgacccacaggtagcagaatccactgttttactagggacataggatgtgtgtggcttgactcaagcagctgaggtgactgaatcagattctgactttcaaaacattgaagcaaggatgcagaaactgttgctagtccatgaagggccctgggatagggagattatccaaatttgggtggctcaagaggtcattgggccatgggaaagctgattaggaagctatctacagaaagagaaaaatggaacaagtacagagagaagcaaagawggaatattatgaaacctcggagagaaatggagagcagcagatcctcagtttctgttgca

SEQ ID NO: 627420 - DNA, 543 bp, Homo sapiens
atttaacaaagagtttgaaatartttttaaaaatcagacagaaatcttggaactaagaattatatttgctgacctaaaaaattcattggattctctcaaaaacagacaggatgaaacagaggtaacaactagtgaactatttgaaataacatagtcagaggaaaaaaaaatgaaaaggaaagaaggttgcgtacaagatatagaaagttacctcaaaaggccaaacctaagaattattgatgttcaagagggagttgagcaagagcaagtggtagaaagcttattcgatgaaataattgcagaaaacatttcaaaactagagaaagatataaatatctaggtacagaaatatcagagaccaccaaacagattcaaccagaataagactacctgaaggcatataatcaccacactctcagatgtcaaagaccaaaagagagcatcctacaagcataaagagaaaataagtgattaacaaataaaggagctcctattcatctggcaacagacttctcaatggaaaccatgttggctatggatgga

SEQ ID NO: 627421 - DNA, 543 bp, Homo sapiens
atttaacaaagagtttgaaatagtttttaaaaatcagacagaaatcttggaactaagaattatatttgctgacctaaaaaattcattggattctctcaaaaacagacaggatgaaacagaggtaacaactagtgaactatttgaaataacatagtcagaggaaaaaaaaatgaaaaggaaagaaggttgcgtacaagatatagaaagttacctcaaaaggccaaacctaagaattattgatgttcaagagggagttgagcaagagcaagtggtagaaagcttattcgatgaaataattgcagaaaacmtttcaaaactagagaaagatataaatatctaggtacagaaatatcagagaccaccaaacagattcaaccagaataagactacctgaaggcatataatcaccacactctcagatgtcaaagaccaaaagagagcatcctacaagcataaagagaaaataagtgattaacaaataaaggagctcctattcatctggcaacagacttctcaatggaaaccatgttggctatggatgga

SEQ ID NO: 627422 - DNA, 543 bp, Homo sapiens
atttaacaaagagtttgaaatagtttttaaaaatcagacagaaatcttggaactaagaattatatttgctgacctaaaaaattcattggattctctcaaaaacagacaggatgaaacagaggtaacaactagtgaactatttgaaataacatagtcagaggaaaaaaaaatgaaaaggaaagaaggttgcgtacaagatatagaaagttacctcaaaaggccaaacctaagaattattgatgttcaagagggagttgagcaagagcaagtggtagaaagcttattcgatgaaataattgcagaaaacatttcaaaactagagaaagatataaatatytaggtacagaaatatcagagaccaccaaacagattcaaccagaataagactacctgaaggcatataatcaccacactctcagatgtcaaagaccaaaagagagcatcctacaagcataaagagaaaataagtgattaacaaataaaggagctcctattcatctggcaacagacttctcaatggaaaccatgttggctatggatgga

SEQ ID NO: 627423 - DNA, 493 bp, Homo sapiens
caataatttcatatgaagccaaactaagtttcagaagtgaaggagaaacaaggtcctttttagacaagcaaatgtttagggaattggttaccaccagacctgccttagaagagttcctgaaggaagcactaaatatagaaaggaaacaccattataagccactagaaaaacacacttaagtacaaagacacatgatattttaaagcaaccacacaaacaagtctgcataataaccagctaacaacaagacaggatcaaatctgcacatatgtatattaaccttgagtgtaaatgggctaactgcccaaactaaaaggcacagrgtggcaagctggataaagaagcaacacccaatgttatgctgtcttaaagggatccatttcacacacaatgacacccacaggctcaaaataaagggatggagaaaaatcttccaaggatatggaaaacagaaaaaatcagaggttgctattctaatttcagataaaaaaga

SEQ ID NO: 627424 - DNA, 558 bp, Homo sapiens
gacctgccttagaagagttcctgaaggaagcactaaatatagaaaggaaacaccattataagccactagaaaaacacacttaagtacaaagacacatgatattttaaagcaaccacacaaacaagtctgcataataaccagctaacaacaagacaggatcaaatctgcacatatgtatattaaccttgagtgtaaatgggctaactgcccaaactaaaaggcacagagtggcaagctggataaagaagcaacacccaatgttatgctgtcttaaagggatccatttcacacacaatgacacccacaggctcaaaataaagggatggagaaaaatcttccaaggatatggaaaacagaaaaaatcagaggttgctattctaatttcagataaaaaagactttgaatcaatgaagattaaaaaagacraagaaggtgattatatattggtaaagggttcaattaaataagacctcactattctaaatatatacacactgaacataggagcacccaaatacataaagcaagttcttagagacacataaagagacttagatt

SEQ ID NO: 627425 - DNA, 576 bp, Homo sapiens
acctcaaccaaaaacaaaaaaaaaaaataccaggaccagaaaaattcacagctgaattctaccagatgtataaacagctcataccagtcatgcagaaaccattgtaaaaaaattggggacaaggaactccttctcaattcattctatgaggccagcgttactcaggtaccaaaacctggcagaaataccacacacaagaaaacctcaggccgataacattgatgaaaatagatgcaaaaagtcttcaacagaacactagcaaacttaatctagcaacacatcagaaaggtaatccattatggtcaagtaagcttatccctgagatgcaaggttgtttcaacatacatgaatcaataaatgtgattatacatattagcaaaattaaaaacaaaaaccacatgaatgtctcaatagatgcagaaaagacttctaataaaatttgacatctttttatggtaaaaacccttaaaaaatacttaytgaaaaacgtaccttaaaacgataagagtcatctatgacaacttcacagccaacatcatactgactgggaaaacactagaatcattacccttgcaa

SEQ ID NO: 627426 - DNA, 554 bp, Homo sapiens
agactacaacaagtagaagaatgaattcagagctggaagaccaggatttggattaacccaatcagacaaaaataaagaagaaaacatcaaaaatgaacagtctacaagaaatctgagattatatagagcagtgaaatataagaataattgatgttcctgagggagaggagaaagcaaaaaatatggaaaacctatttgagggaataattgaagaaagcctccctggccttgttaggaatttgatatccaaatactagaagctcaaagaactcctgggaaattcatttcaaaaagatcttcaccaaggcatatagtcatcaggttatctaaagtcatcattaaggaaataattataaggtcagtgagacaaaagcataagggaatccataaacgaaaacctatcagactaacagtagacttttcagcagagaacttacaagccagaagggatgtgggtcytatctttaacctccttaaacagaataactgtcagcaaagaaatttgtacctagcaaaactaagtttcataaatgaaggagaaataaagccatttt

SEQ ID NO: 627427 - DNA, 256 bp, Homo sapiens
ctcacataccttgcagggtcctacattttacagctggacataaaacaattcttagcaaattaaaagaaactgaaatcataccaactacattcctggaccrcagttcaataaatacggaagtcaatactaaggagagttctcaaaaccacacaattttatggaaatttaaaaacctgctcctgaatgacttttgggtagacaattaaatagaggtagaaatcaagaaattctttgaaactaatgaaaacaatgatac

SEQ ID NO: 627428 - DNA, 256 bp, Homo sapiens
ctcacataccttgcagggtcctacattttacagctggacataaaacaattcttagcaaattaaaagaaactgaaatcataccaactacattcctggaccacagttcaataaatacggaagtcaatactaaggagagttctcaaaaccacacaattttatggaaatttaaaaacctgctcctgaatgacttttgggtagacaattaaatagaggyagaaatcaagaaattctttgaaactaatgaaaacaatgatac

SEQ ID NO: 627429 - DNA, 601 bp, Homo sapiens
ctggtgaggagtggggcatcaggggcatgcggggaagatacactggcctgttttccatagggtggctggggcatgctggcgtgtgaataaagcactcacgatctttattccttccccagtccacagacagcaagggcagtatcactgcagtggcagtcgcagatggactttcagtcgcctctaggagctccaccccacagaaacacagacagcagccagtggaaatgttcagctgagtgtgaggtgcctgcactgtgggcccaagccaggagccctgcctggtgaagagtagcaggtgggagctcacagggaagagagactgaaattctttccatatatcccctgctgtgtgctggaggcatcagggaagtgaccaggtccctttgttccttctgcagcccaagggcaataagggyggtattgctgcagctgcaatggcagaggggctgtgggttgcctctgggatttcctccccagagaagcacacagccaacactgactaaaatgttcaggcagggccagggtggctgtgctctgcccagtgaagagtagcagcagcagggaccactgtagaaaacagtgtggccacttttccataagg

SEQ ID NO: 627430 - DNA, 601 bp, Homo sapiens
ctggtgaggagtggggcatcaggggcatgcggggaagatacactggcctgttttccatagggtggctggggcatgctggcgtgtgaataaagcactcacgatctttattccttccccagtccacagacagcaagggcagtatcactgcagtggcagtcgcagatggactttcagtcgcctctaggagctccaccccacagaaacacagacagcagccagtggaaatgttcagctgagtgtgaggtgcctgcactgtgggcccaagccaggagccctgcctggtgaagagtagcaggtgggagctcacagggaagagagactgaaattctttccatatatcccctgctgtgtgctggaggcatcagggaagtgaccaggtccctttgttccttctgcagcccaagggcaataagggtggtattgctgcagctgcaatggcagaggggckgtgggttgcctctgggatttcctccccagagaagcacacagccaacactgactaaaatgttcaggcagggccagggtggctgtgctctgcccagtgaagagtagcagcagcagggaccactgtagaaaacagtgtggccacttttccataagg

SEQ ID NO: 627431 - DNA, 612 bp, Homo sapiens
ggactatgttcttgcaatagcatccaatttggtttcactcatctgtaatcagcttggcacatgtaaaaatgtgtttgtaactatttcagagtgtctagcagaacaggtgaggcagtatagatcaatgagaattttgaccctgactagaatgtatcacgttcaaagtgcttttgtacattcaaggtcagtaaattaccttgatttactgtccaagccctgttgtctgcawtcttattttctaccttaatactgtttccaattcagagtctataaaagcatctctttcttggattccagtgttatttgttttacctgcatacacttattcctactatagcgttatgtatataaagagtgtctattgtaactggagctattgggattaatattcttattttagaatataatagttttgcccgtttgatataatgcattttaatctggccagtaaaattcaaccttctctaaactgcatgtagtttaaaatttttaaactccttatcaggtaaaaacaattcatactaatgttcactaagcattgtcgtatttttccctagaatgtttgcatcctttgaaatgtctactaatggtacaggaaagtgtctaagtgtc

SEQ ID NO: 627432 - DNA, 612 bp, Homo sapiens
ggactatgttcttgcaatagcatccaatttggtttcactcatctgtaatcagcttggcacatgtaaaaatgtgtttgtaactatttcagagtgtctagcagaacaggtgaggcagtatagatcaatgagaattttgaccctgactagaatgtatcacgttcaaagtgcttttgtacattcaaggtcagtaaattaccttgatttactgtccaagccctgttgtctgcaatcttattttctaccttaatactgtttccaattcagagtctataaaagcatctctttcttggmttccagtgttatttgttttacctgcatacacttattcctactatagcgttatgtatataaagagtgtctattgtaactggagctattgggattaatattcttattttagaatataatagttttgcccgtttgatataatgcattttaatctggccagtaaaattcaaccttctctaaactgcatgtagtttaaaatttttaaactccttatcaggtaaaaacaattcatactaatgttcactaagcattgtcgtatttttccctagaatgtttgcatcctttgaaatgtctactaatggtacaggaaagtgtctaagtgtc

SEQ ID NO: 627433 - DNA, 612 bp, Homo sapiens
ggactatgttcttgcaatagcatccaatttggtttcactcatctgtaatcagcttggcacatgtaaaaatgtgtttgtaactatttcagagtgtctagcagaacaggtgaggcagtatagatcaatgagaattttgaccctgactagaatgtatcacgttcaaagtgcttttgtacattcaaggtcagtaaattaccttgatttactgtccaagccctgttgtctgcaatcttattttctaccttaatactgtttccaattcagagtctataaaagcatctctttcttggattccagtgttatttgttttacctgcatacacttattcctactatagcrttatgtatataaagagtgtctattgtaactggagctattgggattaatattcttattttagaatataatagttttgcccgtttgatataatgcattttaatctggccagtaaaattcaaccttctctaaactgcatgtagtttaaaatttttaaactccttatcaggtaaaaacaattcatactaatgttcactaagcattgtcgtatttttccctagaatgtttgcatcctttgaaatgtctactaatggtacaggaaagtgtctaagtgtc

SEQ ID NO: 627434 - DNA, 550 bp, Homo sapiens
tctggaattcccaacatcctttcttgtgatagcacttttckttttgtaatgccattgaatttcatttattggaaacactcctaagagacccagggattattacacaaatgtcatttcattagcaggtcagctctctctaggcttcctgaaagccagaaaagaagactttaggcttattactttgggagcgatttaaccaaaattgtgtatcttctgctagacatgagtggtgagtcatagaggcgatttaattctaaatcttactaaagtaaaactgcatacttttatatttagagataaatgtggaggaaaaggagagagaatacattgggaaaagaaagaacagaactaagatttgcctctttgttcagtgaggacaaaattcaaactatctcctttgcaaataactttatgcattacattttatttagaaataggataatagaaactacaagtattaacttgagttgtttaatgcatatacaaatatatgaattagtgttttttttttaaattttggcaaagagcataggcattctcttctagttat

SEQ ID NO: 627435 - DNA, 550 bp, Homo sapiens
tctggaattcccaacatcctttcttgtgatagcacttttcgttttgtaatgccattgaatttcatttattggaaacactcctaagagacccagggattattacacaaatgtcatttcattagcaggtcagctctctctaggcttcctgaaagccagaaaagaagactttaggcttattactttgggagcgatttaaccaaaattgtgtatcttctgctagacatgagtggtgagtcatagaggcgatwtaattctaaatcttactaaagtaaaactgcatacttttatatttagagataaatgtggaggaaaaggagagagaatacattgggaaaagaaagaacagaactaagatttgcctctttgttcagtgaggacaaaattcaaactatctcctttgcaaataactttatgcattacattttatttagaaataggataatagaaactacaagtattaacttgagttgtttaatgcatatacaaatatatgaattagtgttttttttttaaattttggcaaagagcataggcattctcttctagttat

SEQ ID NO: 627436 - DNA, 477 bp, Homo sapiens
ctgttggtgtgccctgctgttataatgattgctctggaattcttgttttcagagtttaagctaagagtgattttctagtcagctcctttctagttaaacrtgtgatgtttagtcctccgtgtgtatctgctaccctaaggaggaaactcctagtttgtattctgttattctttctggcttatgatttttgtttgtgtcccaaatatagaaaaggcagttaaaggggtgagggttggggttaaatttcagtatgagagttctcaataatagtctattaataaagcatttgattagttttcccctaaaatgcacttgttggtaagttatagatattctatatccctgaaatacagtacttatttgacaaatactgcttttaaataaacaaataataaatatatcagagtgtttcccatttggccgatggaataagtcatttttattttttaaagtttctttgacttttagcagtagttt

SEQ ID NO: 627437 - DNA, 471 bp, Homo sapiens
ttcaaaacaaattcctgttggtgtgccctgctgttataatgattgctctggaattcttgttttcagagtttaagctaagagtgattttctagtcagctcctttctagttaaacgtgtgatgtttagtcctccgtgtgtatctgctaccctaaggaggaaactcctagtttgtattctgttattctttctggcttatgatttttgtttgtgtcccaaatatagaaaaggcagttaaaggggtgagggttggggttaaatttcagtatgagagttctcaataatagyctattaataaagcatttgattagttttcccctaaaatgcacttgttggtaagttatagatattctatatccctgaaatacagtacttatttgacaaatactgcttttaaataaacaaataataaatatatcagagtgtttcccatttggccgatggaataagtcatttttattttttaaagtttct

SEQ ID NO: 627438 - DNA, 477 bp, Homo sapiens
ctgttggtgtgccctgctgttataatgattgctctggaattcttgttttcagagtttaagctaagagtgattttctagtcagctcctttctagttaaacgtgtgatgtttagtcctccgtgtgtatctgctaccctaaggaggaaactcctagtttgtattctgttattctttctggcttatgatttttgtttgtgtcccaaatatagaaaaggcagttaaaggggtgagggttggggttaaatttcagtatgagagttctcaataatagtctattaataaagcatttgattagttttcccctaaaatgcacttgtyggtaagttatagatattctatatccctgaaatacagtacttatttgacaaatactgcttttaaataaacaaataataaatatatcagagtgtttcccatttggccgatggaataagtcatttttattttttaaagtttctttgacttttagcagtagttt

SEQ ID NO: 627439 - DNA, 477 bp, Homo sapiens
ctgttggtgtgccctgctgttataatgattgctctggaattcttgttttcagagtttaagctaagagtgattttctagtcagctcctttctagttaaacgtgtgatgtttagtcctccgtgtgtatctgctaccctaaggaggaaactcctagtttgtattctgttattctttctggcttatgatttttgtttgtgtcccaaatatagaaaaggcagttaaaggggtgagggttggggttaaatttcagtatgagagttctcaataatagtctattaataaagcatttgattagttttcccctaaaatgcacttgttkgtaagttatagatattctatatccctgaaatacagtacttatttgacaaatactgcttttaaataaacaaataataaatatatcagagtgtttcccatttggccgatggaataagtcatttttattttttaaagtttctttgacttttagcagtagttt

SEQ ID NO: 627440 - DNA, 591 bp, Homo sapiens
aacagaacacaggcataccataaacatgatttagttgcatacaacaaaagcaaaacttaaacaattaataaacagaaggaaggtattggtatgtacccaaattgcaaacatttattttttccacttatcaagtatttgtgtatacctttcctttccaggcctattcagagactaaaatagacatgttcattgactgcggatgtcatgagatgtacaaggtcagacataatcagatacaggcatgtttgtatctttttataatgtaatgcccaaccttgttttttactaaccctgttcttagactctccctttcctttaatcacctagccttgtttccacctgaattgactctcccttagctaagaragccagacagactccatcttggctttttcactggcagccccttcctcaacgacttaacttgtgcaagctgactcccagcacatccaagaatgcaattaactgataagatactgtggcgagcaatatccgcagttcccaggaattcgtccgattgataatgcccaaagcccagcgtctatcaccttgtaatagtcttaaagcccctgcacctggaactgtttactt

SEQ ID NO: 627441 - DNA, 591 bp, Homo sapiens
aacagaacacaggcataccataaacatgatttagttgcatacaacaaaagcaaaacttaaacaattaataaacagaaggaaggtattggtatgtacccaaattgcaaacatttattttttccacttatcaagtatttgtgtatacctttcctttccaggcctattcagagactaaaatagacatgttcattgactgcggatgtcatgagatgtacaaggtcagacataatcagatacaggcatgtttgtatctttttataatgtaatgcccaaccttgttttttactaaccctgttcttagactctccctttcctttaatcacctagccttgtttccacctgaattgactctcccttagctaagaaagccagacagactccatcttggctttttcactggcagccccttcctcaasgacttaacttgtgcaagctgactcccagcacatccaagaatgcaattaactgataagatactgtggcgagcaatatccgcagttcccaggaattcgtccgattgataatgcccaaagcccagcgtctatcaccttgtaatagtcttaaagcccctgcacctggaactgtttactt

SEQ ID NO: 627442 - DNA, 487 bp, Homo sapiens
gatatagtcaatgattattaaaattgtgtaaaaatatttcatgccaatatgtgatgtgaaattcatatctaggcttagatatttatatgtaggttttatatacacattaacatatgctgcaacttttagaaattgtgcaatccatgaaaaacgttttctttgcctgaactattctgtgcattgaaagatttataactttcatcattcactacccacatgctaaatgtcaactgttccagccaattattctgaatattgacaatgactctagaaattgccaaggtgcccccagaagacaaaacagtcctcctgaaagcactgagctaaaataaatttctccaatttacaaaagcactcatcacctttcacctaaccatgtactagtaygtcaagcattttgtcatcataattaataaattcaaataaatggtaatatatatgtgtacattggtactcagtactaagataaatggctatcacattgaaa

SEQ ID NO: 627443 - DNA, 646 bp, Homo sapiens
aagttgtacagcaaaataaactttagatcttgaccaaattttgaaaggtcagggattcactgaggaggtgctcacaggcctcagcaagttgtcccattggtttgagccataaagttagctgatgcgggtaccaagcacccacaggagatttgtcacaggccaggggcatcttcactcagaatccccctgtggttaccaaaatgtgaacccccaaaatctgagacaggtctcagttaatttagcaagtttattttgccaaggtcaaggatgcacgcctgtgacgcagcttcaggaagtcctgacgacacrtgccaaggtgttcgggaacagcttagttttatacattttagggagacacaagacatcaatcaatatatgtaagaattacattggttcagtctggaaaggcgggacaacttaaaacaaaggctggaagactggaagcggggagggggcttccaggtcacaggtaggtgagagataatgaacggttgcattcttttgagtttctgattagcttttccaaaggaggcaatcagatatgcatctatctcagtgagcataggaataactttgaatagaatgggagacagatttgctctgagcagttcccagcatgaaagggcctaggatattttcctttcac

SEQ ID NO: 627444 - DNA, 485 bp, Homo sapiens
gttcccagcatgaaagggcctaggatattttcctttcacaatctgtatgtgactcattacaagctgtaatttgcagtcagggttacaggactatgaaagtcaggctgccatctgcaccctttgtgtatggagttttttttccatgtggtgagaaaaaactattgccacctctgggataacaattctataccactcggatccaagggaaaaataaatcactttatagctcactttggaaaaaactctcaggaaaaatctttgatggtcacgtctgaaggcatatgcaaacaatattaagatttttwaaaaaatttgttatgtctctttctctacttttaagttttagtcaaaattttaaaaattgaaagtattttactagaaatatttatcaagaaaaatgtagatgcaaaatgatcaagtttgtgatttctggaactatctaagcattgcagttatgagaaaaagaatcacaaaggaaaatgcag

SEQ ID NO: 627445 - DNA, 598 bp, Homo sapiens
ctctgtctctgtctaatctctgaagacatccaccaagcagctcaaatgtccgtggcaggcgtgaggtctccagtctccaaatcctttcacttaccccttcctcagacaccatttggggccaggaagcagccccagcattcagttacccaacgcggagtttccagcttccttcctctttagcctcagtgcctgcatcttctctacatccacattcgacatcttctttacaaagatctgttcaaattatgttgatttagtcaaaatctcagcctttctccatgggagaagcacttcccagctgcattgagttggccatcttaagacccagttgatgtataatttttaaatatttaatrgaaactttaaaatatttgtaaaattaatcttacattatcgtactgctcattctgaattgtcagcttccatgagtttaatcattaacttaactgtctgaactatgtatttttcaaatgaaaacaaatgacataattatttggaataatttttataaaggtggacaacacgatgtttctgtagtattattaaactactaatatttgggcagcacttagcaagttaggtaactgacttgataatt

SEQ ID NO: 627446 - DNA, 598 bp, Homo sapiens
ctctgtctctgtctaatctctgaagacatccaccaagcagctcaaatgtccgtggcaggcgtgaggtctccagtctccaaatcctttcacttaccccttcctcagacaccatttggggccaggaagcagccccagcattcagttacccaacgcggagtttccagcttccttcctctttagcctcagtgcctgcatcttctctacatccacattcgacatcttctttacaaagatctgttcaaattatgttgatttagtcaaaatctcagcctttctccatgggagaagcacttcccagctgcattgagttggccatcttaagacccagttgatgtataatttttaaatatttaatagaaactttaaaatatttgtaaaattaatcttacattatcgtactgctcattctgaattgtcagcttccatgagtttaatcattaacttaactgtctgaactatgtatttttcaaatgaaaacaaatgacataattatttggaataatttttataaaggtggacaacacratgtttctgtagtattattaaactactaatatttgggcagcacttagcaagttaggtaactgacttgataatt

SEQ ID NO: 627447 - DNA, 596 bp, Homo sapiens
agttggcataaggaaacataatcacaactctcattacttttctttttcaatactatttactagctgctgccttactccaaataaataccaaagttgctgaaatataataatataaaagttataaaaataattcgtgtttattattgttcaaaattgcaatatcttttgcataagacacagaatatagtcaytataaaatgcaagacactttaagcaaatagaaattgaatgacagttattatagtgaaagcaagttaaaatcattttgtttctaaattaattccgaaagtgtttgtaagtttgtctgccaaattgcaggtcaaaaaatttcaatagaattgcctgttcatcaacactcttttggaaagcttctaatgtatcaactatctcttgagtacaaaacagtgtgacaatataaaacattttacacctaaaatgtatcagttaattacatattaagaattcctatcaggtactaatctttttttaaattaggaaatatagtagattatcatcaatcttttgaagaagagaagcactgctgattattgtataaattaatggaactgcagattgttttatatatatgtatatat

SEQ ID NO: 627448 - DNA, 424 bp, Homo sapiens
cccgccgagaccctggggacccatcgccaccacttctcccaaggcaacagcttccaaaactggaggctcggtttatgtacttaattcaatgtgtctctgtcttgattaacatttattatgaaagtatcatgttctttatagtccttcaagcagtactgaagtaatgatggtaataaaagtccattctcaattaatagttactatcgcccccaatgaatcaggttctgtrctccttgtggggtttttggggaatgctaactggaaaaatatctaaggtttggccacccggttggcaagatctttgggaggcacagaagacctcctgagttcccttaagccatgctgtttttcagtctttctccctcagcctcggtagagggtaaatgggatttttcttccaacaaccacctgggatgcgagtctt

SEQ ID NO: 627449 - DNA, 579 bp, Homo sapiens
cctcagcaaccagtgctccctccagcctccgcgcaattcagctgcagctgctgcacagacccacagaagccaccctccctcggaaccagcgcccgatgagaaggtgggacctgcgctcctccacaccaagccaggygctggggtaagcgtaggaggcgacacgcagaatgggagggtggcaccgcccacgcctccgtcccaggaccagccccttcctgagagcacaggggctggggtcgctaggagcagtgagtatgcattgggacccccaggggcaattggtagtcagctcttcatactccttcaaaggaaaagcagtccagggttgtatgaagtcatgtacttttcaatccaacaagttgtatggtgtccagtgcctcctgcgtgttgaggggccagttatataagagtgcacgaagtagacccaattctgagactgaagttaccaaaggaggggagtgtaagttaaatgcatcccatagtgggtacaggaaattcaactgaattcaaccaaaaccgattgaatggctgctgtgttctgggaactgtgacagatggtggggttatgagactgaactg

SEQ ID NO: 627450 - DNA, 579 bp, Homo sapiens
cctcagcaaccagtgctccctccagcctccgcgcaattcagctgcagctgctgcacagacccacagaagccaccctccctcggaaccagcgcccgatgagaaggtgggacctgcgctcctccacaccaagccaggtgctggggtaagcgtaggaggcgacacgcagaatgggagggtggcaccgcscacgcctccgtcccaggaccagccccttcctgagagcacaggggctggggtcgctaggagcagtgagtatgcattgggacccccaggggcaattggtagtcagctcttcatactccttcaaaggaaaagcagtccagggttgtatgaagtcatgtacttttcaatccaacaagttgtatggtgtccagtgcctcctgcgtgttgaggggccagttatataagagtgcacgaagtagacccaattctgagactgaagttaccaaaggaggggagtgtaagttaaatgcatcccatagtgggtacaggaaattcaactgaattcaaccaaaaccgattgaatggctgctgtgttctgggaactgtgacagatggtggggttatgagactgaactg

SEQ ID NO: 627451 - DNA, 579 bp, Homo sapiens
cctcagcaaccagtgctccctccagcctccgcgcaattcagctgcagctgctgcacagacccacagaagccaccctccctcggaaccagcgcccgatgagaaggtgggacctgcgctcctccacaccaagccaggtgctggggtaagcgtaggaggcgacacgcagaatgggagggtggcaccgcccacgcctccgtcccaggaccagccccttcctgagagcacaggggctggggtcgctaggagcagtgrgtatgcattgggacccccaggggcaattggtagtcagctcttcatactccttcaaaggaaaagcagtccagggttgtatgaagtcatgtacttttcaatccaacaagttgtatggtgtccagtgcctcctgcgtgttgaggggccagttatataagagtgcacgaagtagacccaattctgagactgaagttaccaaaggaggggagtgtaagttaaatgcatcccatagtgggtacaggaaattcaactgaattcaaccaaaaccgattgaatggctgctgtgttctgggaactgtgacagatggtggggttatgagactgaactg

SEQ ID NO: 627452 - DNA, 420 bp, Homo sapiens
ccaatctagcaaacatacaaatttgtacttctttgctccayagctactaagcaatagctgttgaaatcattaaggtacaaattgaggacaggtggcacacagtggctcctgcctgtaatcccagcactttgagaggcccaggctggcagattgcttgagctcaggagttcgagaccagcctgggcaacatggcgaaaccccatctttacaaaaaatacaaaaaattagctgggcatggaggtgtgcacctgtggtcccaactactcggggggctgaggtaggaggattgctcgagcctaagaggtggaggctgcagtgagccatgatagcaccatagcactccagccagggtgacagcacaagaccctgtctcaaaaaaaccccaaaccaaaaccaaaacaaaacaaaacctgaggatat

SEQ ID NO: 627453 - DNA, 420 bp, Homo sapiens
ccaatctagcaaacatacaaatttgtacttctttgctccatagctactaagcaatagctgttgaaatcattaaggtacaaattgaggacaggtggcacacagtggctcctgcctgtaawcccagcactttgagaggcccaggctggcagattgcttgagctcaggagttcgagaccagcctgggcaacatggcgaaaccccatctttacaaaaaatacaaaaaattagctgggcatggaggtgtgcacctgtggtcccaactactcggggggctgaggtaggaggattgctcgagcctaagaggtggaggctgcagtgagccatgatagcaccatagcactccagccagggtgacagcacaagaccctgtctcaaaaaaaccccaaaccaaaaccaaaacaaaacaaaacctgaggatat

SEQ ID NO: 627454 - DNA, 425 bp, Homo sapiens
attcccaatctagcaaacatacaaatttgtacttctttgctccatagctactaagcaatagctgttgaaatcattaaggtacaaattgaggacaggtggcacacagtggctcctgcctgtaatcccagcactttgagaggcccaggctggcagattgcttgagctcaggagttcgagaccagcctgggcaacatggcgaaaccccatctttacaaaaaatacaaaaaattagctgggcatggaggtgtgcacctgtggtcccarctactcggggggctgaggtaggaggattgctcgagcctaagaggtggaggctgcagtgagccatgatagcaccatagcactccagccagggtgacagcacaagaccctgtctcaaaaaaaccccaaaccaaaaccaaaacaaaacaaaacctgaggatatt

SEQ ID NO: 627455 - DNA, 420 bp, Homo sapiens
ccaatctagcaaacatacaaatttgtacttctttgctccatagctactaagcaatagctgttgaaatcattaaggtacaaattgaggacaggtggcacacagtggctcctgcctgtaatcccagcactttgagaggcccaggctggcagattgcttgagctcaggagttcgagaccagcctgggcaacatggcgaaaccccatctttacaaaaaatacaaaaaattagctgggcatggaggtgtgcacctgtggtcccaactactcgggrggctgaggtaggaggattgctcgagcctaagaggtggaggctgcagtgagccatgatagcaccatagcactccagccagggtgacagcacaagaccctgtctcaaaaaaaccccaaaccaaaaccaaaacaaaacaaaacctgaggatat

SEQ ID NO: 627456 - DNA, 611 bp, Homo sapiens
cactgtacttataaattattgaagcttaaactttagaatagtggaggataagttaaacgtagcaaaaagatttctcctttattacttctttttttaaaaaatatttttttttttggcacaagctctcgctctgctgcccaggctgtagtgcagtggtgcaatctyggctcactgcagccttgtcctcctgggctcaatcatcctcctacctcagctcccgagtagctggggctacaggcgtgcggccaccacacccggataatttttttggtattttttgtagagatgaggtcttgccatgttgcccagactggtcttgaactcctgtgctcaagcagttctcctgtcttggcctcccaaagtgctgggattacaggagtgaggcactgcacgtgccctattgcttctttaaataagggacaagagatataaagagaaaacaggaagtaccttctccctctgtaacttatgaggtaagcagctaattgatcatatggtaaagaagaaccaaataaaattagtgtctcaaaatatcaggagcactgcttctgtgaaatcagttaaagtacatgtccatattagtcatccattgatacacatgcttattttcc

SEQ ID NO: 627457 - DNA, 613 bp, Homo sapiens
gggagtagtatccagaatatacaaggaactcaaacatctcaacagcaaaaaaccaatgcagttaaaatacgggcaaatgatctgagcagacatttctcaaaagaagtcatacaaatgtccaacaaatatatgaaaaygtgctcaatatcactaatcatcagcgaaatggaaatcaaaaccactatgaggtattagctcaccccagttaggatggctattatcagaaagacaaaaaataacacatgctggtgaggatgcagaaaaaaagggaacttttctacacagttggtgggaatttaaactagtacaatctctctggagaacagtatggaggttcctcaaaaaactacaaatagaagtaccatatgatccagcaatctcactacggggcatttatccaacagaatggaaatcattatatcacagagtcatctgcagccccgggtttattgcagctctgttcacaataaccaagacatggaatcaacctagttgtctgaccacacatgaatggataaagaaaatgtggcatatacataccatggaatactattcagctataaaaaataatgaaatcctattatttgcagcaacatggatgaagctagagtac

SEQ ID NO: 627458 - DNA, 575 bp, Homo sapiens
acatactagaaacattatatgttagttgagtctgtttttttttttcccaaagtactttctcaaacacaccaaccttagccctctaagaratacatcacattaaaaataaaacgtctgcccactgctggtttctcaacttgcatccaccttctgtcccctttaatgaactggaccacgaggtgagtcagaaaggataaagggagtggtaagaatttgaggagagaagagagtgaggctaaaacaggaaatcaggaaaagcgattaggtcgccccatccctcacctggggccgctctcttgttgcccagcgtggtttcttcttgagggttctgcatggttcctcaatcccagggaattccgcaggacgttccacccaagaccactgggctcccacctctactcttttgccagttaatgaataggaaggaatttcactgcctggaaagaggaatgatgctttctggtccttatttcacacctaaaatagaaaggtcaattgatttattcctaaatatctttgaacactaaaatagaagttttaaagcatatatactacctggttgctctagccttaca

SEQ ID NO: 627459 - DNA, 678 bp, Homo sapiens
atgaatgaattacttcattcagtacacacagagagacattggcataatatgaaaaaaattaacttataaatgtataaaagtgaatagtatctaatgtaattggatattaacatataataaagaagaaatttttattcattctgtattaataaactgaaacttgtgtagtttgcatttaatcaggtctgtagccaattattcactgttttcttgcatatctcttttgcttgctgttttgcaaaacttttttatatatgaaggaaatagattttcattagtcacatgtattgtgaatgtatttttagtttgtctttcacattttaatgttatatgtttggttttttttttctatttgcaaaaatataattgagtcaaatgtatcacttttttttctttaatggcttatgggttttatgactaatttggaaaggctctcccctcctcaaaattattattgtttaatrctcataatttttcttccagcaagtttttgattggttatgttaaagcttgtatccatttgaatctattttattttactttactttttactttttaattttaatgtgcacataggaggtatatatatttatggggatgtgactctattctaaatgtaaataataaagaggagatctacattttttccacttattcatatacttttccccataaagt

SEQ ID NO: 627460 - DNA, 488 bp, Homo sapiens
ggaggtactgggtgccatgggtatcctgatttttaacaaaaagggtgggcatatggawgttcactttacccaattacttcaaattgcacacacatgacttgtgtactattctgtgtgtttgtaattgttacatatttataagtaagctcttgagatctatgttattatgccaatgaaagttttgaggaactgacaaattataccattccaataaaagatagcccagtctgtaactgcgaacagacaaggtccttactagggataaataccttctgtctaagcagtaaatagaataagactaattaaagaagactttaaattctcgggacttttaattttgaaaggtgagataattgatttaggacttaaactctttgagttttaatatactgagactttgattgcaaagaaattaaatctatggaccataatgtctcattgggaatttgataatggaagagagcttaaatttaaatttggattatttc

SEQ ID NO: 627461 - DNA, 597 bp, Homo sapiens
atcaatattactttgtttacttgaggttattttatttttaatrctctcagatgaataaaacatattcatgaatacgataccagaactggtttaattgaggaagcatcatctattaaatcactgtgtctctgaaactggactgaacagtaatggctaccataagtgggctcagtcacatttcttttggggatatagtaatagcacttaaagaaatttggcttagctgcttagtcttcatctgtttagccggatattttaactggatattccatcatcaattctcaaatcaaaataagccagacatagctgtttgtgaaattcatctttcttttcattctcaggtatcagatagtcatcttggataaaattttagattgatctataacagaattcttctcagtaaaaatgagcttatgttctcaaagccatggtgcctagcacttaataagaacttaattaaggaaagaaattgataagagccagaccctttgtattatgatacatatgtttatcaactgtaagatttatagtttcttttgatatttgataataatgcttattatatcacagatgattaaaacacatatctaaaaatct

SEQ ID NO: 627462 - DNA, 597 bp, Homo sapiens
atcaatattactttgtttacttgaggttattttatttttaatgctctcagatgaataaaacatattcatgaatacgataccagaactggtttaattgaggaagcatcatctattaaatcactgtgtctctgaaactggactgaacagtaatggctaccataagtgggctcaktcacatttcttttggggatatagtaatagcacttaaagaaatttggcttagctgcttagtcttcatctgtttagccggatattttaactggatattccatcatcaattctcaaatcaaaataagccagacatagctgtttgtgaaattcatctttcttttcattctcaggtatcagatagtcatcttggataaaattttagattgatctataacagaattcttctcagtaaaaatgagcttatgttctcaaagccatggtgcctagcacttaataagaacttaattaaggaaagaaattgataagagccagaccctttgtattatgatacatatgtttatcaactgtaagatttatagtttcttttgatatttgataataatgcttattatatcacagatgattaaaacacatatctaaaaatct

SEQ ID NO: 627463 - DNA, 560 bp, Homo sapiens
  misc_feature 534: n = A,T,C or G
gaaaactactgcttatccctgattttgatagtggaatatatgatctaagcctttgyacttaacataaccagttcccaaatgtactgaaatataatctgatatcattgattgtgcactataccagtagaattttaaaaaggtcataaaataaatgaaaagttttatttatttagagatagacaaaacaatttcatgtttgcatttactactgtcattatgtgatttatccttcttaactcctccattccaagggtttgctttttaattttgatgaggggcaatttataaatttttcttatatcagtcctgctttgggatttgtacctaaaatctttgccttacctgaagtaacaaacattttctactatgtttttttcttagaagttttattgtttaaatttagtcctacattgcacactgtgttactgtatatgtattatacacacacacacacagacacacacacacacacagtggccataatgggtcaagcaagggtcattctctctctctttctgtctctttctctctcanaaattgcatatggatatccaattgtt

SEQ ID NO: 627464 - DNA, 605 bp, Homo sapiens
gattttgtattggtatttgacaaaatatgaggctagactagccacttgttttcatagataaagtttaatagggatccactggataagtctatttgtttacctgttttgtatggttgctctgagctccaacaacagttgaattgtagcagaaatttatggccatcaaagcctaaaataattactatctggatcattaggaaaactactgcttatccctgattttgatagtggaatatatgatctaagcctttgtacttaacataaccagttcccaaatgtactgaaatataatctgatatcattgattgtgcactataccagtagaattttaaaaaggtcataaaataaatgaaaagttttatttatttagagatagacaaaacaatttcatgtttgcatttactactgtcattatgtgatttatccttcttaactcctccattccaagggtttgctttttaattttgatgaggggcaayttataaatttttcttatatcagtcctgctttgggatttgtacctaaaatctttgccttacctgaagtaacaaacattttctactatgtttttttcttagaagttttattgtttaaatttagtccta

SEQ ID NO: 627465 - DNA, 622 bp, Homo sapiens
atacagtattatttcctgctatggtttggatgtggtttttctctgctaaaactcatgttgagatttgatgccccttgtagcggtgttgggaggtggggcctggtgggaagtgtctgggtcatggggtagatccctcatgaatagattaatgtcctctcagaagggtaagttctcactcttgtaggaatgcactagttaaaaatagtctggcttctttggtttctttctcttgttttcttgctagccatatgatctccttgcacactcccactccccttccactttctattatgagtggaagcagcatgagaccctcaccagatgcagctgcccagacttggactttttgaccatcagaattgtgagccaaataaacatcttttctttataatacctagactcaaatattctgttwtagcaacttaaaatgaacaattacatttccataattatagagaaaaacaactgagctcctaaggaagaaatacactgaggcgcaagtatttttactagcctcaactcactgctagcttatacataaacttacaggaatgtgcccctggattttctctattggctacttcattaccaatacaaaatcagtcccctagtgaatgacatt

SEQ ID NO: 627466 - DNA, 593 bp, Homo sapiens
ctgctgtgctggcagcaagaatttcaagccagtgaatcttagtttgctgggctccatgggggtggtacccatggagccagaccacttggctccctgggttcagcacccctttccagggraataaacagttctgtctcactggcattccaggtgccactggggtatgtggggggaaaaaaaaacaaactcctgcagctagttcagtgtcttcctaaatggccacccagttttgtgcttgcaactgagggccctggttggataggcaccgcagggaatctcctggtctgtgggttgcgaagacggtgggacaaatgcagtatctgggccagagtccccagttcctcaggctcagtccttatggcttcccttgggtaggggagaaaattccctgaccttttgcagttcctgggtgaggcaactcccgaccctgcttcggctcaccctccgcgggctgcacccactgtccaaccagtcccattgagatgaaccaggtacctcagttggaaatgcagaaatcacccaccttctgcatgtatctcgctgggagctgcagactggagaggctcctattcggccatcttaatcaggattga

SEQ ID NO: 627467 - DNA, 593 bp, Homo sapiens
ctgctgtgctggcagcaagaatttcaagccagtgaatcttagtttgctgggctccatgggggtggtacccatggagccagaccacttggctccctgggttcagcacccctttccagggaaataaacagttctgtctcactggcattccaggtgccactggggtatgtggggggaaaaaaaaacaaactcctgcagctagttcagtgtcttcctaaatggccacccagttttgtgcttgcaactgagggccctggttggataggcaccgcagggaatctcctggtctgtgggttgcgaagayggtgggacaaatgcagtatctgggccagagtccccagttcctcaggctcagtccttatggcttcccttgggtaggggagaaaattccctgaccttttgcagttcctgggtgaggcaactcccgaccctgcttcggctcaccctccgcgggctgcacccactgtccaaccagtcccattgagatgaaccaggtacctcagttggaaatgcagaaatcacccaccttctgcatgtatctcgctgggagctgcagactggagaggctcctattcggccatcttaatcaggattga

SEQ ID NO: 627468 - DNA, 582 bp, Homo sapiens
caggggttgggggtggggatgggaggccgctagtataaamcctgagtccaaaggcccaagaaccaggagctcttatgtccaagggcaggagaagatggatcttccagctcaagaagcaaaagaaagaatgagccctacctctgccatttgtgctatttaatcttggatgatgtccacccaccttggtgagggcaggtctttcagatacagtctaataactcaaatgctaatttcctccagaaattccctcacaaacaaacccagaaataatgttttacaggctacctggacatcccttagcacagtcaagttggcacataaaattaaccaccaagatattctagaagtctgatttgcttatttaaaagaaaaataaatacatacatatcctgagggggcctgactggtcgttctgtaagtttagctgcctggcacgtatgcttaaacagatggacacatttcatgtggatgttggcctccaatacccttggaaacaaccaaaagtacttgtaagaaaatggaaatttaaatctacttaatcgttgttaaatgtactacaataattgccaggattgtttccca

SEQ ID NO: 627469 - DNA, 550 bp, Homo sapiens
ctgaaccccattatttagggattttcatggtttcatcacattggaataatcaattgatttaatctctagctcctttcctctccccaaaggttgaaggggaaagtttcaggcttctaatcaaggcttgaggtttctggcatccaacccccccatcctgaagctatctaggggctggcaagagccaccagattagaataaaatctcctcctatcactccaacaacacaggaaactacaaaggttttagctctgtgacaggaaccagtgacaagagccaatatayatttcttcctgaaaaaaaatgcacttataaaaatgtttaaagatagtttctaactgttgcagaactttctccagggttcagctaaaactgggtttctgtcacagaccaggaaagattaggcttgtggacatagaaaggtgagtggaattaattgggcaaaaaggaaaggaaaaataactctcggcaaagccagagagagtcctgctagcaggtctcccacctcacaaattgaatcccaggtcaccacatgggaactgaagaggtcagg

SEQ ID NO: 627470 - DNA, 614 bp, Homo sapiens
tttaatctctagctcctttcctctccccaaaggttgaaggggaaagtttcaggcttctaatcaaggcttgaggtttctggcatccaacccccccatcctgaagctatctaggggctggcaagagccaccagattagaataaaatctcctcctatcactccaacaacacaggaaactacaaaggttttagctctgtgacaggaaccagtgacaagagccaatatacatttcttcctgaaaaaaaatgcacttataaaaatgtttaaagatagtttcyaactgttgcagaactttctccagggttcagctaaaactgggtttctgtcacagaccaggaaagattaggcttgtggacatagaaaggtgagtggaattaattgggcaaaaaggaaaggaaaaataactctcggcaaagccagagagagtcctgctagcaggtctcccacctcacaaattgaatcccaggtcaccacatgggaactgaagaggtcaggctcccccccaattcaaactgcgtgaactgtcagaggctccacctcgtcctcccagtttgtaggtgggcattattccgagagaatcagtcgggaaatgtgggcttcttccgggactagcagt

SEQ ID NO: 627471 - DNA, 612 bp, Homo sapiens
atatatatgccacttcagcagatgcaaaatagtttaataattttaagcaatcagctattcctatgacatctttacaacaaattttatgtaagtagagaaactatctattgactgctaaaaatcaaatagccaaacattttatgaatgcttcacatttgccagaaactgttctaaaagctctagatgtattaacccatttaattttcacagaaattctatagattaaatatttcctatctccctatattttttttagacgaacaagcaaagaccccacaaggctaattttcagagctagtaaatgagagaagagaayacaaggaaaatgaagaaagacaaaatattagcatctctgacatttacagaatagatgggagagaagaacctggaggaaagctgtaaagggtacatcagagaggtaagatgaaaatcaagggcatatgatactaagaaggagtttctggaatgggaaaggggtccaaggtttagaattccactgccatagaggaacatctggagactctcaatgactctgacaaggtcagttttactgatatgaaagtgatggggggaagccaaaagtctgatagcaatagattgaattagtgaata

SEQ ID NO: 627472 - DNA, 590 bp, Homo sapiens
tctgaattctgcccaccttggccccagagcactgataatccatagacaagatcttaaaaaacaaatattaaaaagaacaatctcaatgaatcatcatggattcataactttctgttgctcaaatctgcctgcagaagactatgaagtcagaatgagtttaggcaaaattcagtaattttctmatagaaggaaatactgtttcaaccactgacatctgaaagactaaggaactcatatagttctactcaacttgatacaaactgaaaaaagtcaaccatgtttattgtctttttccacatgtactcagacccactcacctcttgcctccatggctcctatatcccaaagcttgagaaacatctttacaactattccaacccaaacttctgattcccttcaccacattggataaataagctctctggctaccttcataagttcttaaacattaccatttctagacactattattactagacttcctaaaacaaccaaggtgactattctaatgattctcctaccacaagcaaacaaatgtgaactgtactgtacaagcaaatctcatagcaacatgttcagtatttggcagg

SEQ ID NO: 627473 - DNA, 524 bp, Homo sapiens
ctagacttcctaaaacaaccaaggtgactattctaatgattctcctaccacaagcaaacaaatgtgaactgtactgtacaagcaaatctcatagcaacatgttcagtatttggcaggcattcaaaaagtgccataccttattgtaaataatgtgtgctggtaataatgtggcagacactgagtatttgtttgttcttcttcctgggaacactagtactttacatttcaattatatgtggtcaattggctaagcaacgacaratatcaaaagactttttcagatttaaactttaaaaatttgctctggctgaaatgtggagagtgaataaatggtagggaaaatctatatttgggaagagaatattataattttaggcacgctgatttgtattgcaagtttaagaaactggtgactatttttaggaggcaattagatactggagagtgagcctcaaatataggatttgaggctgggcatggtggctcaggcctgtaatcccagcactttgggaggccaaggctgc

SEQ ID NO: 627474 - DNA, 622 bp, Homo sapiens
ttgtttattttgatataaattacagaaattgaataaatgaggaaaataatctcagagtatgtgtaaaaggagtgataatggatagagttaaagatagaagagtataaaattgtgacattaaatatatcatttataactttttgtttttcatatttaatttattgtttctcattttcaaaattcctgttgaaaacaggaattttctgagttctcaagcactgcatggtatttcctttagggcaacatcactgctgtgtacttgttaaataatacctaataccacatgtatgttagaagaagatttgttcttttgaattaagaattcttaatgaatgcttatttaaggtagagccacagaaaggagaatgcctgcctcacctgttgcaggtgggtacaatctactttttgcctcagattcttcccagcgtgcttgtaaattcagayagttctttggaacttattctatttccttctccctgcagaaaggcttagaaatatgccagccacatacaggctattacttaatgaaaagaggttttctcctggaattaattagatgttgggcccagcaaagaaaatgtatgtagcaggagcagttctactttctttaaaaaggagggat

SEQ ID NO: 627475 - DNA, 514 bp, Homo sapiens
tgttaaaattattaatatgtgttttagtgtaataaataattactttatacaccttggtttgatatagagttattgctacaatattttttgttcagtatttacatatttattgagtgccctccaactttgaagaatgatttcagaaacgctaaggaagagacttgagatgaagttcccacaattgagtaggaccctagacctcacaaactctctgttccttagatatttgagctacttgttttctcagagcagacactcaaaaacttaattttaaaattatgtctaatatacagaaaatctaggataatacaaaaaacttctttatactcttttttaaaaatttactaatcattaacattttgccagttttttttwaaattatactttaagctctgggatacatgtgcagaacgtgcaggtttcttacacaggtatacacgtgccatgatggtttgctgcacccatcaacccatcatctacattaggtacttctcctaatgcaatccctccccta

SEQ ID NO: 627476 - DNA, 514 bp, Homo sapiens
tgttaaaattattaatatgtgttttagtgtaataaataattactttatacaccttggtttgatatagagttattgctacaatattttttgttcagtatttacatatttattgagtgccctccaactttgaagaatgatttcagaaacgctaaggaagagacttgagatgaagttcccacaattgagtaggaccctagacctcacaaactctctgttccttagatatttgagctacttgttttctcagagcagacactcaaaaacttaattttaaaattatgtctaatatacagaaaatctaggataatacaaaaaacttctttatactcttttttaaaaatttactaatcattaacattttgccagttttttttaaaattatactttaagytctgggatacatgtgcagaacgtgcaggtttcttacacaggtatacacgtgccatgatggtttgctgcacccatcaacccatcatctacattaggtacttctcctaatgcaatccctccccta

SEQ ID NO: 627477 - DNA, 514 bp, Homo sapiens
tgttaaaattattaatatgtgttttagtgtaataaataattactttatacaccttggtttgatatagagttattgctacaatattttttgttcagtatttacatatttattgagtgccctccaactttgaagaatgatttcagaaacgctaaggaagagacttgagatgaagttcccacaattgagtaggaccctagacctcacaaactctctgttccttagatatttgagctacttgttttctcagagcagacactcaaaaacttaattttaaaattatgtctaatatacagaaaatctaggataatacaaaaaacttctttatactcttttttaaaaatttactaatcattaacattttgccagttttttttaaaattatactttaagctctgggatacatgtgcagaacgtgcaggtttcttacacaggtatacacgtgccatgatggtttgctgcacccatcaacccatcrtctacattaggtacttctcctaatgcaatccctccccta

SEQ ID NO: 627478 - DNA, 531 bp, Homo sapiens
aaaaccttatatacttgaataagttgttgtaaaggtttttgtgtatttgtgtgtttttgttttgggggtttttttttggtagagatgggttttgtcatgttgtccaggctggtctcraactcctggactcaagtgatctgcccaccttggcctccaaaagtgctgggattacagatgtgagccactgcaccctgccttaaaatctttagggagcagatttactcaagtctccagtttcagtagtcatgtaaaggtctgcaaagcctcaagatctactggaacaattgtctaatggttgaagagcagaaactctgttatgtttgaaggaacacataaaattcctgcaggaaatataattctgacaaggaatacaaaatgatatattgcaacttaaataaaagtttctaaaaaatctttacagtcatgacaggcaaaaaaaaaaagacttttttgtgctttctatctaatgaaatgagagctgagataggtgaaaatagtgttataaaaatgtaatgtaaataaccattattg

SEQ ID NO: 627479 - DNA, 551 bp, Homo sapiens
aatttatttcaaaatattctaaaatgtttcctgagacttttcatttgaaccatgtgccatttagaagtgtgctgtttgatttctaaatatattttatattattgatttctaatttagtttcattgttgtctaagaacatgctttatgtgattactattattttaaatgttttgagttgtgttttataacccagaatgtggtttatttttctgagttcttcatttgagcttgagaaaaaaatgtgtatggtgttgtggttggttggcatattgtatagttaacaaatagatgaagttggttggtgtgttgttcaggtcatctgtatcctcactgaattttttcttgtctgatctataaattrctaaccaagaaacagtgaagtcttcaactataatagtgaatttgcctactttcctcttagtctgccaattttgtcctcattttgtttttctagttaagtgtatccatgtatgatattgttatttcttactgggaaattgacttctttataactgtgtctctctttattcctgagcagttccctgattctg

SEQ ID NO: 627480 - DNA, 582 bp, Homo sapiens
ccctaacttttgttgctataagtgcagcagatgtacagatggatacctgggatgatttgatagactcagagtttaggaagaacaggcagctgctctgagccacactcacagcaggagagkagttaaggggagacaacaatgactgcacggggtcttctttcttggcaaaaaacctgttatctggcatgaaagaagcaatttcaatatgctggttgatgattctacaatggggacatgtacttagttacagaggtgggctttatccaatagattcccagagtccttgatactggtttttcgatggacacacatttgttcaagaagttttggacctctcaggattgcactggaaatcttcaattatctcccttgaaatcagagtggcaatgtgaagatcagttaagtaggaaacgcttttgtacaaaaagcaaataacaatttaatcattcttaattttctgtgtatggtactgactttgacataatgaaaatcaaggtaagttttaccattgttctcatttttaattgtagctgctctttggcattatttttctaaacactgtaaacaacattaggaaaattg

SEQ ID NO: 627481 - DNA, 558 bp, Homo sapiens
gagaaatagaaattatgaaattaaatatctaaaatacaaattttatttgatgatgaatagaaattataaagaaaagaaccagtgagctttcagataggtcaacagaagacaacaaatcagatgaatgaacaaagagaatcaattattgaaaagctataaacagagtcttggtacttatgggaaattttcaaaattattaaagtttgagtcattagagttctaggaagataggagaaaaagtctggggtagaaatatacatttgtggaaataatgatggtaatcttcccaaatgtggtaaaagacataaatttagatacaagtatgtcaagaagtaaacatcaaataagatgaactacaaataaaccttgcccagactcatcacagtcaaacttctgaaaaccaaatgttttatatatatgtatattaataatatataacatataataatatattatatgttatatatatgctagaaaataatagactgyaaatacgggaataataatttgttaactgtggatttctcatcagaaatcaaagaccaggagacaggtgaa

SEQ ID NO: 627482 - DNA, 574 bp, Homo sapiens
ttctaaaaaatctttacagtcatgacaggcaaaaaaaaaaagacttttttgtgctttctatctaatgaaatgagagctgagataggtgaaaatagtgttataaaaatgtaatgtaaataaccattattgccccaggccttaaactttttgaaatagtatctcatttgtaaaattgtttatgctgacatatrgtttatgatttctaaaatctactattatatgtaaatatttattaaggattcttttgtggtatcactacccaagtagacttacagagatataaaataaaggttgaattggtgctctctataaaaaataaaacatagcaatttacagagcaaactcagaatcacataaaagtattccatgttattgttcttccaaattttctcttgaaaggaatcacgttatatgtgtacatatatgtgtacatatgttatatgtaatcagatgttatttgtgcctatttttgcactatgaatttatatcatcttgtcaaataggcagaggtttaggaatctgaactaagtaaaaaaagacatttgcagtctctggttgctgcaacttttcatga

SEQ ID NO: 627483 - DNA, 551 bp, Homo sapiens
aatttatttcaaaatattctaaaatgtttcctgagacttttcatttgaaccatgtgccatttagaagtgtgctgtttgatttctaaatatattttatattattgatttctaatttagtttcattgttgtctaagaacatgctttatgtgattactattattttaaatgttttgagttgtgttttataacccagaatgtggtttatttttctgagttcttcatttgagcttgagaaaaaaatgtgtatggtgttgtggttggttggcatattgtatagttaacaaatagatgaagttggttggtgtgttgttcaggtcatctgtatcctcactgaattttttcttgtctgatctataaattactaaccaagaaacagtgaagtcttcaactataatagtgaatttgcctactttcctctyagtctgccaattttgtcctcattttgtttttctagttaagtgtatccatgtatgatattgttatttcttactgggaaattgacttctttataactgtgtctctctttattcctgagcagttccctgattctg

SEQ ID NO: 627484 - DNA, 545 bp, Homo sapiens
atgcatcagcatatggctcagtttctactatctgakgactttatgcataatgctctgataaactgattcttttcaactgcccatttttcttgcccctctgatcctggtatggataaagcatatgggaaatcacagtgattaatttaccaaagttctcactctgtcggccaacagcaaattacatttggacaatacaagtctcagaattcaatgtacatctctaattttcctaccaaaatattgtggcctattgttgcatgacaatggcagtttctgagtgggatttgagataacagtagcagtgtgtttgcctcaaggaaagtaccaatcgttggctgcctaagtgcttgcttactttttacgttgtgcttccaaatcagggaatagaagaaggggatttgaaaaatatcctctaaccaatttgtctttattacattattcaatccagttctataggccttgcacttggagaaaatttgtcccagattataacagattgactgccaatcctattctgcattcaaacaatttattggatgtttttg

SEQ ID NO: 627485 - DNA, 545 bp, Homo sapiens
atgcatcagcatatggctcagtttctactatctgaggactttatgcataatgctctgataaactgattcttttcaactgcccatttttcttgcccctctgatcctggtatggataaagcatatgggaaatcacagtgattaatttaccaaagttctcactctgtcggccaacagcaaattacatttggacaatacaagtctcagaattcaatgtacatctctaattttcctaccaaaatattgtggcctattgttgcatgacaatggcagtttctgagtgggatttgagayaacagtagcagtgtgtttgcctcaaggaaagtaccaatcgttggctgcctaagtgcttgcttactttttacgttgtgcttccaaatcagggaatagaagaaggggatttgaaaaatatcctctaaccaatttgtctttattacattattcaatccagttctataggccttgcacttggagaaaatttgtcccagattataacagattgactgccaatcctattctgcattcaaacaatttattggatgtttttg

SEQ ID NO: 627486 - DNA, 545 bp, Homo sapiens
atgcatcagcatatggctcagtttctactatctgaggactttatgcataatgctctgataaactgattcttttcaactgcccatttttcttgcccctctgatcctggtatggataaagcatatgggaaatcacagtgattaatttaccaaagttctcactctgtcggccaacagcaaattacatttggacaatacaagtctcagaattcaatgtacatctctaattttcctaccaaaatattgtggcctattgttgcatgacaatggcagtttctgagtgggatttgagataacagtagcagtgtgtttgcctcaaggaaagtaccaatcgttggctgcctaagtgcttgcttactttttacgttgtgcttccaaatcagggaatagaagaaggggatttgaaaaatatcctctaaccaatttgtctttattacattattcaatmcagttctataggccttgcacttggagaaaatttgtcccagattataacagattgactgccaatcctattctgcattcaaacaatttattggatgtttttg

SEQ ID NO: 627487 - DNA, 641 bp, Homo sapiens
tgcttccaaatcagggaatagaagaaggggatttgaaaaatatcctctaaccaatttgtctttattacattattcaatccagttctataggccttgcacttggagaaaatttgtcccagattataacagattgactgccaatcctattctgcattcaaacaatttattggatgtttttgactttccatgagtatttactagaaaattggaaaccagtagcttcttgccagactctatttcatatcaaagtatcttcttacctgtttttgtaaataaagttttattggaacacttccaaaaaaaaaaaaaacaaagtattttcttagagacacttgcttccagtcctctctctacaagattaatttcaaaaataatgttacaatgtacacttctataaaggtctattattaatatacttgatgtttatctgactcattgcgactggcagaaaaatccttagaattgaggccatatttatgcctatgtattatataacatatagttaaatgatgataacaggcaaaagaataagcaacactcagattattgttcccaaatrcacttactgactattagtttatatattttccaaattactcctatttcaggaaaacacattgaaagatggaatttaagaattc

SEQ ID NO: 627488 - DNA, 558 bp, Homo sapiens
ggattatttgcttgaacttgtaataggctaaggtgcatgcttacacagagcctggacttgatgctgcattaagagtcagccagcatttggcatagcaggtgtaacaagccaaaaatttattctcaaaaagaattggcctcaacctgggcatagcacctcagaataagtactaaagagttgtggtgggttttttcttttaatatgtaaaatttacagtggggtatttcatttgaatatacatctcattgaatatctgtataggaattgttttatttcaactgagaaacagtttaacttgtttgaatttttttaactgaaattatatttcctttcttttattagtatagaaatttgatmagcaaattgtgtgctcctatagttaatacacaaactattatagtttacagtttaatggatttacctcacttttggtatttacctcttgtctttttgctcaatatttgttttactgggattcaccacagatatagttatttaattgtaaccttaataaaactacacattaaaaccttatgcaaccagttggggcgtaaaaac

SEQ ID NO: 627489 - DNA, 529 bp, Homo sapiens
ccatcttccattatatttcaactatttctctgtcacttttggttaaaagtggttaaaagtgacacagaaaatcatgcagatttttttaaaagatgttactgatgactgtattcaaaatcatttttggtgttaaagtaatcacatgtgattcaaagcttgtcatttgctaagaaatgaaataattgaaaatgtaaataataaaaaaattacaatgggttccttttacatttgtttatatatttatgggtctaatcccgaagcacttttaaaaatacccctatttttgaattcagaagcaaaggacgtaatttttaacttattcttaaagatcacactgtccccttattaaagtgtaaggcaaagacctacaaaaattaaacaaaacattcagtactcctcaaacatttgtaccaactgttattttaaaattaattaaatacataagtgcatcctggtgtaaaaagaacttacatgtcatcatcatkaaatcaaatccacacaccatgtatttataattttatattttgaa

SEQ ID NO: 627490 - DNA, 530 bp, Homo sapiens
atgattttgtgccttgtaaaactttagagactcggccgggtgcggtggctcacacctgtaatcccagcactttgggaggccaaggtgggtggatcatgaggtcaggagttccagaccagcctgaccaacatggtggaaccccatctctattaaaaatacaaaaattagccgggcatgatggcacgtacctgtaatcccagctactcaggaggctgaggcaggagaatcacttgaacctgggaggcagaggttgtagtgagccgagatcgtgccactgcactccagcctgggtcacagagcgagactctgtctcaaaaaaacaaacaaacaaacaaacaaacaaamttttagagactcagtgcatgattatcattcccaaaggactaatttctgtcattacaaaattttataaatattttttagttttaattattatggatatataatagttgtacatatttatggggtacctgtgatattttgatacaagcatacaatgtgtaatgatctaatcagagcaattggaatat

SEQ ID NO: 627491 - DNA, 603 bp, Homo sapiens
tgctggctgtccactggggatccctttcagcttctagaagctgtttttactttttgccacttagtgtctattatcttcaaagccagcaacagagaacttcccttgcatgggtttcctttcacacttcaaatctttctgactttccctgtatctaacctctaggcctagattcaaaaggtcatatggctcgcycatataatctttctattgcatagtgaactgagttgggactttaattacatctgcaaaatccttttacagtagtacctacgttagtgttttgttggatcactggaagaaggtatgtgtatactagaagttagaatatcagaatattagagaccaccattcaattctgcctatcacttagtcattactgcaaacacatgctcaaactatcaaaaaatgcaggagaatctgatacaattatattgctgcatagtgactttaggtagtattttcagagtgcagcaccaaaaatcaacatcataactttgtggaacatatttttgactgatttattacacaaaaatagtaatttattatttttattaaatgttcagttcttcattcattcatgaaatagatatttattgcatccta

SEQ ID NO: 627492 - DNA, 578 bp, Homo sapiens
actatgagcaactggctcccttttagccatgctaacctctctagcaagtggttgttccacagtacccttcagttactcacctgaaaatcctctttccttctcaaacacatttccaggattttccaaatttgtatgctctgcttctcatttaattataatttgtacctttagatcattcctttgctgccatatctgatcataaggtgttgacagtagccctgctacttctcaaacactttrctgcttagaaatttctcccaccagatagcctacatgatccctcttaagttcagcatttcacaaatttctatgacatggacacaatgcagctaagttctttcctatggcttagtaagggtgacatttgctccagttcccaagttcctcattttcatctgtaacttcatcagcacaggctttactatttgtttctatctgcatttttctcacaacttgaccagtgtctaagaagttcaaaacttttcctcatccatttttcttcttctgagccctccaaactcgttctacttctgtcattacccaattccaaagttgcttcctaattttctggtattttt

SEQ ID NO: 627493 - DNA, 578 bp, Homo sapiens
actatgagcaactggctcccttttagccatgctaacctctctagcaagtggttgttccacagtacccttcagttactcacctgaaaatcctctttccttctcaaacacatttccaggattttccaaatttgtatgctctgcttctcatttaattataatttgtacctttagatcattcctttgctgccatatctgatcataaggtgttgacagtagccctgctacttctcaaacactttgctgcttagaaatttctyccaccagatagcctacatgatccctcttaagttcagcatttcacaaatttctatgacatggacacaatgcagctaagttctttcctatggcttagtaagggtgacatttgctccagttcccaagttcctcattttcatctgtaacttcatcagcacaggctttactatttgtttctatctgcatttttctcacaacttgaccagtgtctaagaagttcaaaacttttcctcatccatttttcttcttctgagccctccaaactcgttctacttctgtcattacccaattccaaagttgcttcctaattttctggtattttt

SEQ ID NO: 627494 - DNA, 632 bp, Homo sapiens
tgtagtagtattcagatatttattgagtgctcactatgtggcatccctggctaagtgcttcctcataattagctcatttgattcagagcgtgtgaaggatgcgcatatttactaggctccataaagcacatgacgctcatttcaattcatctttaccacaattgtatttggtagctattaataactctgctttaaataagagagctgaggaccagagttactcagtcattttgaattcaggtggaggttatttgactctagatggtgcaatcttaaatattatgtgatatttcttgagtacaaagacaaatttgcctggctttagatttcttacctcagaaaaaaaaagccaaggataaattgattgacaatggactttaagctagaaagggggccaagtgttaccggatcagaaataaaacgggaaagtaaaaattgttatctcattcatattcaaaaatttgataaaatcaggcttggaaaatgtgatttattaggtgtcaaataatgaagttatacctgtggagartattagaagtggaacattgtaatggatatgtccaaaggattggtcctctcaaagagctctggtgaaatcagatgactataagaggttgtactaaatgggtttt

SEQ ID NO: 627495 - DNA, 530 bp, Homo sapiens
gtgaaagattccaaagttttaaaattctcatgagaggatcaagaaaataatttcaatccctgcaaatatcagtacagtaatgaagttgagcaaatatcgtaaggtccagagtgtcatatttagacattttaaatggactgcctttctcttccatcttcagaaagagaaagatcagacaagccatgtagctatacttagatcatttatgcttacaagagagtaaaaagtctttgctaaaattacacagcctcaattaattcttcatggagaagagacttttgatggaggaacaagacattactcagatctgagaaatgtaacttttctaacagattttatcaggttttttgagaaatgtgtgtccagtagtagatgaacaataactttcatattcttaaaayactagaattcatccagtttaaatatttccaaataatagatatttaatgagcagtagttaacaaagaaccagaagtacaaacattaataatgcaaaatattacccttaaaggggtgatgaataatccatg

SEQ ID NO: 627496 - DNA, 435 bp, Homo sapiens
ggagactgaggtgggatgattgcttgaggccaggaattagagaccggactggacaacataacaagaccctttctctactcatattaaaaaaaaaaaacctcagtaaatgagaaatgaatacagagcatctgtaaaaatctatatctaatatacttaattctatagaacttactgctttctctgaaatattttaaacatgggaaggaaatacactgtcagaatttctatttgaatttatactgaggaccaagtcagaatattaaaaggcaaaaaagaaacaaataaaagaactaaaggaaaggaagactgtagtaaaaaatatatatataactgcctctattcmcggacagaattgtttatataggatcctaatatgtaaaatcctaaagaaactgcaaaataactaaaactacaagtgaatactgaaagtttatg

SEQ ID NO: 627497 - DNA, 481 bp, Homo sapiens
tttgtaatgattgattttatatatatatacacatctatatatatatatagagagagagagagagataaaaataaatatacatattgtatcttctgacagcctgtaaacaattatatcccagtgacaaaggagaaatagtgctcagatttttatttctaatcatcatcctctactctaaggaaacagggactcttggaatgaaagcttgattccagtgctcaggtagtaaaagcacaaggtaaattggaaacatcttgtccaggatgttaggaaataaagaaagaatgaagcayagaaaccacactgagatggctcccactggctaaacctgggacaatttgagcatgaaaataactaattatcataatggatagacaaatacgttacagtagaatgcccagtaataaaaatatatatatatatgtaattaaggtatcatcaataggtgctaaaacaagtaggtggcaggtgaatgaagaat

SEQ ID NO: 627498 - DNA, 567 bp, Homo sapiens
aaatgaaacaatcaacaaagtgaagagacaaccaacagaagggaaagaactatwtttcaaactgcccatctgacaaaggattaacaacaagaataaataaggagctcaaacaactctatattaaaaaaatctaataatctgatcaataaatgagcaaaatatttgaatagacattcctcaaaagatgatctaaaagtggtaaacaagcatatgaaatgctcaacataattgatcatcagagaaatgcaaatcaaaactacaatgagatataatctcaccccagttaaaatggtttttatccaaaagacaggcaataacaaatgctgatgaggatatggagaaaaggaaattctcacgcactgttggttggaatgtaaattagtatgaccactattgagaacagtttcaagatttctcaaaaaactgaaaatagagctatcatattacccagcaatctctctgctgagtatatactcagaagaaaggaaatcagtatattgaggaattatctgcaatccctgtgtcttgcagcagtattcacaataactaagatttttgaaataactt

SEQ ID NO: 627499 - DNA, 384 bp, Homo sapiens
ccatatcaaacaattcagagatcctcactctgcacattcagtacatgacaagggaaagtgatgttatcacaaacagagactgcttatattcatttattatgcaaaatgaccgagatgatcagtttcttattgaaaatggtaaaaraagaaaaggttcagaatgtcataaaagtgaaaaaaaaagtattttcatgaattcattgaccttttcattaatatcataacagagtataatcactaagcttttaaatgagcaaggtagctcaataccgaaggacggcttgagaagtctcaagggcttatgttgccagaacaagaccctgacactaaaagtaaaagggtaaatgagaatcatgtttagtgatgacctttaggtcccacagc

SEQ ID NO: 627500 - DNA, 586 bp, Homo sapiens
aagacacaatattgattcatagtgcctgtattttcaagtgctrttgtagggttaattactttaacaataaaaagaagagaacacagtataaataatacatttgtactcatgtaatataaaatatactaatacagctatctgacaacatgctaatattatagtatatactatctatgtattatacctatatgcatatattgttacaataatacatatactatttaatatagtaacatacaatagtatagataatatagtatagattacaatataatagattacaacaatctataatagaatataatatagctgctatattgtacaatataatataatggataatacaatacaatatatcaatattacaataatatctatatgccatgagttgaattgtgtgtccccaaatttctatatttaagacctaaaccctagtacctcaaaatgtgaccttatatggcaatagggtcattgcgatgtaattacttaagatgaggtcttactggagtatgcttcctaatctagtatgactggtacaactataaaaaagggatatctggatctggatatgcacacaaggataatc

SEQ ID NO: 627501 - DNA, 586 bp, Homo sapiens
aagacacaatattgattcatagtgcctgtattttcaagtgctattgtagggttaattactttaacaataaaaagaagagaacacagtataaataatacatttktactcatgtaatataaaatatactaatacagctatctgacaacatgctaatattatagtatatactatctatgtattatacctatatgcatatattgttacaataatacatatactatttaatatagtaacatacaatagtatagataatatagtatagattacaatataatagattacaacaatctataatagaatataatatagctgctatattgtacaatataatataatggataatacaatacaatatatcaatattacaataatatctatatgccatgagttgaattgtgtgtccccaaatttctatatttaagacctaaaccctagtacctcaaaatgtgaccttatatggcaatagggtcattgcgatgtaattacttaagatgaggtcttactggagtatgcttcctaatctagtatgactggtacaactataaaaaagggatatctggatctggatatgcacacaaggataatc

SEQ ID NO: 627502 - DNA, 435 bp, Homo sapiens
tccaataaggaagaaattttggaataataaaaagagaataaaataaaccaggtgtgtacaataaatgtatttcctacaatgggcatttaaatacatttttgtgtatttgaatgatatggtttggctgtgtccccrcccaaatttcatcttgaattataactcccacaagtatcatgtgttgtgggaggaagctggtgggaggtgattgaatcatggaggtgggtctttcccatgctgttctcgtgatagtgagtgggtctcatgagatttcatggttttaaaaacaagagtttcccacgcaagctcttctctttttgttgtaagacgtgacttgctcctccttgccttccaccatgactgagagggctctccagccacgtggaactgtgagtccattaaacctctttttcttcccagtcttgggtatgtcattat

SEQ ID NO: 627503 - DNA, 435 bp, Homo sapiens
tccaataaggaagaaattttggaataataaaaagagaataaaataaaccaggtgtgtacaataaatgtatttcctacaatgggcatttaaatacatttttgtgtatttgaatgatatggtttggctgtgtccccgcccaaatttcatcttgaattataactcccacaagtaycatgtgttgtgggaggaagctggtgggaggtgattgaatcatggaggtgggtctttcccatgctgttctcgtgatagtgagtgggtctcatgagatttcatggttttaaaaacaagagtttcccacgcaagctcttctctttttgttgtaagacgtgacttgctcctccttgccttccaccatgactgagagggctctccagccacgtggaactgtgagtccattaaacctctttttcttcccagtcttgggtatgtcattat

SEQ ID NO: 627504 - DNA, 607 bp, Homo sapiens
atacatatagtgtgtgtgtatgcttgtgcatatgtatagatttttgtgacttcccttaattatagcagttggattaattgaatgttcctgttactaattatcatatatggtatctaatttatttacattagagttaaagataatttttggagaagctactgtccaaacttttaataagtttttagctaatgattactaaccaagttcagtactttcgttatcttggtgaaaaaatgttttaaaatgtagcctgaatcatagcaaagtggtcaggagcaaggtctccagagtcaaattatgtgagttatctccaaaatggtaatawtaatagtgtctctttcacacaattattgtgaggactaaatgaaatcatagttcttaaagattatccatcatctgatggcctgaagaaaatgtaaactaatatcatgacatgaggaagaaatttgagtcattaattataatttatctcagtatgaaagcagaagttgattctaccagcttgtacttcttcatctcattttccaacaaagcagaggagaccatatatattcaatcaagtcttgttatatggaactacaatccaccccgccccctaccacctctc

SEQ ID NO: 627505 - DNA, 397 bp, Homo sapiens
gtgtgactgtaagaagcaagttaggagaatagagaatgaattgaggttggaaacacaggcggatgttttacaaacatgacaaggcatttgactttaccctaatgggctttgaaaactctttgaaaggttttaattctttcattaaaagtatttaatatttactgtgtttcagacactgtgcttaagttacatgaaaggttaaaaatgctggtgagggaagagagtaaaatattttaatagagcattcaggaaggagatttggggtaggagtaagccatatggatattggggaagggtaacggaggagggataatgagcagcaggaaagaccagtgtaaaagttttcaaatgggaggttatatgatgygttcttgaacaagcagagaagcctgaattt

SEQ ID NO: 627506 - DNA, 620 bp, Homo sapiens
gcgtttacaggaaatttggctcagctatctacagttttcagagaagcaaggtcacataagaatgggtttataggaaaggtattcaagacttaaggaggaaagagaagatgtgaaattgacattcaggagaaaaggagagtgacacataaggaatgacagcataactgcgaacagccttaggagtcggcttcatgtttatcatcatgactataaaatgataccagtcaacacaagtgtatgtttttctacattcacattcagctgtattggtacaagcatggagtaggaggagagccggatttagttggttaccaattttgtaaagagggtataaaaaattagagtgtatatgaaagtttttattctaatgattgattatgaamttaatccaggtaatcagaaaagagagaaactgagggaatgaaggaaactgaaaaaaagttcaatacagttaaaaagacttttgaaatattcaaatggaatgaactagaaagatatagtgtagtcatgagagaacaagatccatcaaattcagattaagaagggtctgatatcataggtgatgacaagctccagaatatgcttctgggagtgcctgagacagggtaaaacgtaagata

SEQ ID NO: 627507 - DNA, 620 bp, Homo sapiens
gcgtttacaggaaatttggctcagctatctacagttttcagagaagcaaggtcacataagaatgggtttataggaaaggtattcaagacttaaggaggaaagagaagatgtgaaattgacattcaggagaaaaggagagtgacacataaggaatgacagcataactgcgaacagccttaggagtcggcttcatgtttatcatcatgactataaaatgataccagtcaacacaagtgtatgtttttctacattcacattcagctgtattggtacaagcatggagtaggaggagagccggatttagttggttaccaattttgtaaagagggtataaaaaattagagtgtatatgaaagtttttattctaatgattgattatgaaattaatccaggtaatcagaaaagagagaaactgagggaatgaaggaaactgaaaaaaagttcaatacagttaaaaagacttttgaaatattcaaatggaatgaactagaaagatatagtgtagtcatgagagaacaagatccatcaaattcagwttaagaagggtctgatatcataggtgatgacaagctccagaatatgcttctgggagtgcctgagacagggtaaaacgtaagata

SEQ ID NO: 627508 - DNA, 601 bp, Homo sapiens
atgcaacattttattctttgtacctttattgtcagaaatcatctttaagagttcctctaatgtgaagtgttcttttctggtatcatgtcctctgggatatcktaatccttttcatcacatcacttacttcattcatgtccatgagctcacctgcaccaagttcctctggctgcacatctagagcctgtcaaacagtggagtatcaactcttctaccattagctatcttttctataattccagttacattagattttaatttcacttttactgctaccacttttattttctttgctgtgttttactattttttggcaatttcctctttccgttacctaatttgaaaaaacatatcacaggggtttatcaataggagacaaggaagcaacacaattacatgctttgctgtctgcatctgaactgaatagcaagtgtgtaaggactgctcactgacacactttgtaaaaagttgcatggttagacattgatcatgaggcatatttgttatgtatgcagcaatttgtagactaaaaaactagcagcagaatctgtactttatgccattagtcaaagttaatatgccataatagctaaaattcatg

SEQ ID NO: 627509 - DNA, 601 bp, Homo sapiens
atgcaacattttattctttgtacctttattgtcagaaatcatctttaagagttcctctaatgtgaagtgttcttttctggtatcatgtcctctgggatatcttaatccttttcatcacatcacttwcttcattcatgtccatgagctcacctgcaccaagttcctctggctgcacatctagagcctgtcaaacagtggagtatcaactcttctaccattagctatcttttctataattccagttacattagattttaatttcacttttactgctaccacttttattttctttgctgtgttttactattttttggcaatttcctctttccgttacctaatttgaaaaaacatatcacaggggtttatcaataggagacaaggaagcaacacaattacatgctttgctgtctgcatctgaactgaatagcaagtgtgtaaggactgctcactgacacactttgtaaaaagttgcatggttagacattgatcatgaggcatatttgttatgtatgcagcaatttgtagactaaaaaactagcagcagaatctgtactttatgccattagtcaaagttaatatgccataatagctaaaattcatg

SEQ ID NO: 627510 - DNA, 335 bp, Homo sapiens
tattctagctatcaacccacactaagttaacataatggaatttctgtacattcattcaaggatcaccagttattgatccttgatatttccaccaaggctatgctctcctgtgaggcactgcctagagaaaccaaagkttatctacaaagatatatgaagactggaaacactttgaaaacagagaagtctatgaacatatattgtaattttatattgtttcacaattcaaaaaagcaatgaaggcctataaagccatattgtattagtctgttttcacactactgataaagatgtacctgagactgggcaattttaaacagagaggtttaattgga

SEQ ID NO: 627511 - DNA, 502 bp, Homo sapiens
tagcttagattggtatgctatatgtttccatggcaccctgttccactgctttcctaacaatcatcacatctgaaatttgttgtttattgttcttcttctccaagggatttttatggttcctgtggaagagaccagctcaatctcctttatcaacttattctcagggccgagcactgttttggacccaaaaagtgctaaattaagttgaatgagtaataaattatgatttataatattttgtcaatggggtgattaaattgcccactctaaaattaaattcttgatttaatacatttctttgtcctcttaatcaaaatgggctctcatattttagaccagttgattgaataaatgaggygtcactgtgtattcattcattgcagctgtccaggtcatccaacagagccctttcaccccctatttgtgtctccagccttcagaatagagtatgtccagaacaacttaatcaagtttaagcacagaaaaatgtggacttaatttg

SEQ ID NO: 627512 - DNA, 527 bp, Homo sapiens
tctacacatgagtagattacaaagaacaacttgtaaatgagaaatacttagtttagagtagtattttctgaaacatgatataactatctataacaggacttgaatgtatgaacataatatcaaaagatagtcatgaatatatgtatgagaaatattttcataatagtctaatgccagcatcaataattatatttttttcattctataaatctgactttattaatattttctcttcagttagtatgttctcttcagttaggaaatagatttrcagaccaaaaattgatttagaactaaatgacatattcatagagtaagttttgtaaactcaaggcttaatgtgaagaaggagaaatgttatcggtgtggtgggcagaataacagctcctcaaagatgtccacattacccatcaatacgttaacttacagggcagaaatgattaagaatctttgatggggagatcatcctgggtaacgcaggtgagctcagtttagtcacaagtatccttataagaggaaggcagtga

SEQ ID NO: 627513 - DNA, 527 bp, Homo sapiens
tctacacatgagtagattacaaagaacaacttgtaaatgagaaatacttagtttagagtagtattttctgaaacatgatataactatctataacaggacttgaatgtatgaacataatatcaaaagatagtcatgaatatatgtatgagaaatattttcataatagtctaatgccagcatcaataattatatttttttcattctataaatctgactttattaatattttctcttcagttagtatgttctcttcagttaggaaatagatttgcagaccaaaaattgatttagaactaaatgacataytcatagagtaagttttgtaaactcaaggcttaatgtgaagaaggagaaatgttatcggtgtggtgggcagaataacagctcctcaaagatgtccacattacccatcaatacgttaacttacagggcagaaatgattaagaatctttgatggggagatcatcctgggtaacgcaggtgagctcagtttagtcacaagtatccttataagaggaaggcagtga

SEQ ID NO: 627514 - DNA, 581 bp, Homo sapiens
aacttagtatccagttttcttttattccaaccaagatatgctgagaaatcagccctatttcctaaattcctgtttctgttgaaatttcatattttttctgcttcctgcccaactgcctagaaatctaatcacaccagtaacctaagcaagcacccaaattgttcaagccatcacttactcaatctgaactcaattggttcactaaggtattcatattttattctttttttgagatggagtctcactgtgtctcccaggctggagtgcagtagcgtgatctcagctcactgcaacctctgcctcctgggttcaastgcttctcctgcctcagcctcctgagtagctgagattacaggcacccaccatcaaacctggctaatatttgtatttttagtagagatgtagttttaccatgttggccaggctggaggcaaacttctgacctcaagtgacccacccacctcagtctcccaaagtgctaggattacaggtgtgagccactacacccagccaaattttattcttttattacatgaattctagtctctaaactccagaaaatatagacacaaacataataa

SEQ ID NO: 627515 - DNA, 593 bp, Homo sapiens
gtatttcctacaacttctctgttgttgactcttaaatgatctatttgaagggagattgtctaccaggtgtatccagtcagccatcttgaagctcctctctagtccttcattggcttctttttaaatgtgtgtttgagcatatattacctgttgttataaactacagatgtaaatattttgacatgaagttttagtttattgaatactttgataaagactttcagtagtacccactcttatgaatatatattgctcctcaaatattttttgtcatatacttatgattattagatagtaattacaaggtagcatttaaggggtattcagtaagttccaatagttccatgtttttatttatctcagtaaattattttcatattcaggtcatggtataytgcaaataatgtgtggcatatcagccatatactttccaaaatagtgcggaagtaaattttagatattatttattcaaagggctgtgctaggaatattaatataagaattggagtttaagtgcttactgtttatttttaaaagctgggttagtattgaatacacatattctcagatttcttcagcaatgtatttatggc

SEQ ID NO: 627516 - DNA, 583 bp, Homo sapiens
cttgaagctcctctctagtccttcattggcttctttttaaatgtgtgtttgagcatatattacctgttgttataaactacagatgtaaatattttgacatgaagttttagtttattgaatactttgataaagactttcagtagtacccactcttatgaatatatattgctcctcaaatattttttgtcatatacttatgattattagatagtaattacaaggtagcatttaaggggtattcagtaagttccaatagttccatgtttttatttatctcagtaaattattttcatattcaggtcatggtatactgcaaataatgtgtggcatatcagccatatactttccaaaatagtgyggaagtaaattttagatattatttattcaaagggctgtgctaggaatattaatataagaattggagtttaagtgcttactgtttatttttaaaagctgggttagtattgaatacacatattctcagatttcttcagcaatgtatttatggccagactgtcactattgtgtcattttgtgggagtgagcaaaaattcaacaaggcaagcactgtgcaatttagagc

SEQ ID NO: 627517 - DNA, 593 bp, Homo sapiens
gtatttcctacaacttctctgttgttgactcttaaatgatctatttgaagggagattgtctaccaggtgtatccagtcagccatcttgaagctcctctctagtccttcattggcttctttttaaatgtgtgtttgagcatatattacctgttgttataaactacagatgtaaatattttgacatgaagttttagtttattgaatactttgataaagactttcagtagtacccactcttatgaatatatattgctcctcaaatattttttgtcatatacttatgattattagatagtaattacaaggtagcatttaaggggtattcagtaagttccaatagttccatgtttttatttatctcagtaaattattttcatattcaggtcatggtatactgcaaataatgtgtggcatatcagccatatactttccaaaatagtgcggaagtaaattttagatattatttattcaaagggctrtgctaggaatattaatataagaattggagtttaagtgcttactgtttatttttaaaagctgggttagtattgaatacacatattctcagatttcttcagcaatgtatttatggc

SEQ ID NO: 627518 - DNA, 443 bp, Homo sapiens
gtgctttgtgtattggaaagttttaaattactgtttcattttaatagatttagggatgtgcaagttatctacatataattttataaatttttgtagtttgtgtctttcaaagagtttgtccattttatccaagttatctaatttatgggcatagagttgtttatggtattattttcttaacattttaatatccatggactcagtagtgataaccccrctatgtgatttctgtctttttgttgttgttagattggatagagctttatattttcattgatttttttcaaataactaacatttagtttctttgattttcccattgttttcaattttgtttatttgattttattatttattttcttctgtttgctttaggcttacattgtttttcttagtttcctaaagtggggtttatattattggttttagttctttcttgttct

SEQ ID NO: 627519 - DNA, 652 bp, Homo sapiens
taattttctaccctttcactaagaggcttcaagattctgcctccctagcctgctcttatgcattctgctgctattccttgaggttctacctttgacccaatcttctagtttgacttctaatagctgagtgatctcatcgataaccagcattcattcattcttatataaagatgtttttcagatacatattttctactcagatatctatcctaagtttcaaaactgcatatttcactgtcgggcatgaacctacattgcaagttgttaatcaagctcattatatcaacagtcttaatccctcctctttgaatcaagctgacactcttttgttccttaagttgtgatatacaaatttctgtcttaccaatctttcttctatctgccttgcctcaattcctacaatagaccaaagatatttataattacttaaatacattagactatttcatatctcctttctctggttgcagtcatcgttctacctgggatccatttattcttatgacacttcctaagytcactctagctggatgaagtgccccttatctgtgcccccttcagaccatgcacagtcttttttctttctgttttagcgttcatcaaatgttattgattttttattttagcacacatctctaacagccagcatgag

SEQ ID NO: 627520 - DNA, 584 bp, Homo sapiens
ctctagatgcacagtcaaatgcactattttcaaggcrcactgaatacacgtagcttttcttttccctggaggcatagaaggtacacagtttcttcatcatctgtttaactccaaaccttttctgaaaattgaaactttctactttgcatatgtgtctttatttccctccttctgtttattgatatgattgattttacattccggttacgttactttacaggaaaatatagacagataaaaattgcgactcccttgtgtttgaagatcggttcatcacagaaggaataatggcttctgttttgtgtgaaaactcatgtaaaggcatcttgtgcgagtttaatatcagtaagggtggatgagtcattttgttatatttgtgtatgagataaacactattaggatttaagattagtggaaattgtgaaagtacagcaaataagcaaggatttcttttttcttatttttttcaaatattttatgttttgaacagagttactgaaaagagacaaatccaaatgcctgtaaaagtgagaattttccacatgttctcccaagatatggtgacaaaaaataaacatccatta

SEQ ID NO: 627521 - DNA, 584 bp, Homo sapiens
ctctagatgcacagtcaaatgcactattttcaaggcacactgaatacacgtagcttttcttttscctggaggcatagaaggtacacagtttcttcatcatctgtttaactccaaaccttttctgaaaattgaaactttctactttgcatatgtgtctttatttccctccttctgtttattgatatgattgattttacattccggttacgttactttacaggaaaatatagacagataaaaattgcgactcccttgtgtttgaagatcggttcatcacagaaggaataatggcttctgttttgtgtgaaaactcatgtaaaggcatcttgtgcgagtttaatatcagtaagggtggatgagtcattttgttatatttgtgtatgagataaacactattaggatttaagattagtggaaattgtgaaagtacagcaaataagcaaggatttcttttttcttatttttttcaaatattttatgttttgaacagagttactgaaaagagacaaatccaaatgcctgtaaaagtgagaattttccacatgttctcccaagatatggtgacaaaaaataaacatccatta

SEQ ID NO: 627522 - DNA, 510 bp, Homo sapiens
tgatgtctcatgactctctaaaatgtataaaacyaagctgtgccccgacgaccctgggcacaggtctcaggacttcctgaggctgtatcatgggcacgtgtcctcaaccttggcaaaacaaactttctaaattaactgagacctgtctaagatatttgggttcacacaactaagattatacctaaatttcaaaaataaacaatgagttataagacatttgaagacagctaatagcaaaaaagaaaaagcctaaggtgagtaaacagaacatttactcaaagaaatacatattttaaaattatagttactgatcttagagatattcttaaatatattcaaaaatcaagaattgaacaggagtaatatgagtaaattaaaattatgattgctaaaattaaaacttaaaatcaattaagaatatgatgattgggccgggcgcggtggctcacgcctgtaatcccatctctttgggaggccgaggcgggcggatcacgatgtcaagagatcgag

SEQ ID NO: 627523 - DNA, 420 bp, Homo sapiens
aattttatgatgactacaaatcaaatattttctataaataaggtgaaaaagtaatctaaaactctaactaaaataaaagctgttcaaaaagccttattccatctatgccaaaaaatgtagtgcaacttttaagcaatcaagacacatayacttactgatataattttgtttttttctttatgagttcaattatataatttgaacttgaagtaaaaagtagtaacttaagcatgatattgtgaatcttgtatattgctttttagtttgttcaatcaacatacagaaaaaaaaagactgaattgtaattgaagcatgtgaatactataaacttgaataatgcaaaagaacagtatattcaacataaatcaggagacactaggagacatgaatcatgtatagagtttcaataaatactttcta

SEQ ID NO: 627524 - DNA, 350 bp, Homo sapiens
aatggagcctattttgtgaattatcagaaagccaaattgttttgtcatatagtggggtaagttctagatgagcttagtccracagaaatgcaatttgaaccacatatgtaatttcagtttttctagtactcacactgaaaaaggtaaaaaaaacatattttttattatatataacaaagtcttaacaaataacattatcacaacatatcaattttaaaatgtttatgaagtattttacatattgttggtactaagtcttctaaatttgctgtgtgttttggacttaccagcacatctcaatttgtgctagtgttcaatagccaaatgtggctggtggctaacatactaga

SEQ ID NO: 627525 - DNA, 458 bp, Homo sapiens
ggcttttttccagtttcattgctttccatatttccattcaatttaaagaaattttggctttttaaaaatatattaaatccatacaagataaagtatcggcaaaaataaaaatattcttatccaatcccagcttgtaattttcctagactactaattgctctttttagtgttccagtttctccttagtcatttgggamtaaaatatggcaaatatatttccttttgtctctttattgtccgtaaatcaatttttgaacttcttaaatctgtggaacccaaccatttcgcttattttcataaatgccaccaacattcaggctttattacctcttacattataactggtttacttccccaaactctagcctccacttcgtttcagttcttaaatctttcacattgtaacttgaaggctagggaatgtgcatcttgtctagtttataactataggttgccct

SEQ ID NO: 627526 - DNA, 551 bp, Homo sapiens
aatttatttcaaaatattctaaaatgtttcctgagacttttcatttgaaccatgtgccatttagaagwgtgctgtttgatttctaaatatattttatattattgatttctaatttagtttcattgttgtctaagaacatgctttatgtgattactattattttaaatgttttgagttgtgttttataacccagaatgtggtttatttttctgagttcttcatttgagcttgagaaaaaaatgtgtatggtgttgtggttggttggcatattgtatagttaacaaatagatgaagttggttggtgtgttgttcaggtcatctgtatcctcactgaattttttcttgtctgatctataaattactaaccaagaaacagtgaagtcttcaactataatagtgaatttgcctactttcctcttagtctgccaattttgtcctcattttgtttttctagttaagtgtatccatgtatgatattgttatttcttactgggaaattgacttctttataactgtgtctctctttattcctgagcagttccctgattctg

SEQ ID NO: 627527 - DNA, 241 bp, Homo sapiens
aaagcttgctatgtgaaaatccctgcataaccattgaaatctgtaacaccctaaatccygccaccctactcccagtatcagagagcctggttgagcataactgtgtagaggtgttggactcagtttactctagcagacctgacattcgggaccagccatgggaatcagcagactgggagttatatgtggacgggagcagcttcatcaacccacaaggagaaagatgtgcaggatatgctgt

SEQ ID NO: 627528 - DNA, 573 bp, Homo sapiens
cggaagagatatggtttggaaacaaagtttagatgtttagattatattaagattatgaacttaaaacgttttcaaagaaaatgcaaaacactctataaattgctattctttaaaatatattttttatggttttcattctttggtcatatcgtgagtgtcatgaatatgactaacacgagttgtgatctctaaaactgtaatgaaaatggttcttcttcaaatgtcttacttgaatttacaaccaaatctttatttgattgatgttctattttggatcattyatatttataattttcatcttaagcatgtcacgaaacttatcatcaaggattttctttttttcaaaaaacaaatgaaacatattcttacctgtttctaacatacctgtaaaatgatgggccagatatggtgcaaaaacatctaaacctgggttaatatattgctagcatataaatattatttcttgtaaaagatttttgatgcattattgaggagacatctaatctctattttgtattcctgctatacataaaacaaattaaattttgaaaccaattatgggtttatgttata

SEQ ID NO: 627529 - DNA, 575 bp, Homo sapiens
cattcatatttataattttcatcttaagcatgtcacgaaacttatcatcaaggattttctttttttcaaaaaacaaatgaaacatattcttacctgtttctaacatacctgtaaaatgatgggccagatatggtgcaaaaacatctaaacctgggttaatatattgctagcatataaatattatttcttgtaaaagatttttgatgcattattgaggagacatctaatctctattttgtattcctgctatacataaaacaaattaaattttgaaaccaattatgggtttatgttataagtcttacagtccagtttgttgccttacatcataaagatatctttggtttttccccttaatcactaattaagygaagatagttatagttaatatctaatagacgtgttattgaaatgcattgtgtttaacatgggagtagttgtattactcatgaaaactttttttatgtttaacattttccagtaaattgcaatgaattgacttatttatgaagaaaaaaattatatcagagataaatcattttcaaaaattggctgttttggctttctatcaattt

SEQ ID NO: 627530 - DNA, 559 bp, Homo sapiens
cattgtgtttaacatgggagtagttgtattactcatgaaaactttttttatgtttaacattttccagtaaattgcaatgaattgacttmtttatgaagaaaaaaattatatcagagataaatcattttcaaaaattggctgttttggctttctatcaattttctcaattgagcttcatcttttccccaggaaaagaaaatgattttaagcatttcccaagctgataagcatcatcactgaagtatgttaaaggcctgatttctgttggttaatcctattgttaccttataactaaacttagtaaacattttcatgtatgagatgtcaaaaatttcagaaccagcaggtagcagcaaaataaaaaaacaaggctgaacaacttgatgggctacaaggctgagattagtgtggaaaacaaaaacagagagttctgatcttgagtataaaaatagtactaatttgaacatgcatgacagcatttctgtgcataaaatcctagaatgtcttgtgtgatgatgtatgagaagtaaattcttgaaattgtaaataaatgcatttt

SEQ ID NO: 627531 - DNA, 559 bp, Homo sapiens
cattgtgtttaacatgggagtagttgtattactcatgaaaactttttttatgtttaacattttccagtaaattgcaatgaattgacttatttatgaagaaaaaaattatatcagagataaatcattttcaaaaattggctgttttggctttctatcaattttctcaattgagcttcatcttttccccaggaaaagaaaatgattttaagcatttcccaagctgataagcatcatcactgaagtatgttaaaggcctgatttctgttggttaatcctattgttaccttataactaaacttagtaaacattttcatgtatgagatgtcaaaaatttcagaaccagcaggtagcagcaaaataaaaaaacaaggctgaacaacttgatgggctacaaggctgagattagtgtggaaaacaaaaacagagagttctgatcttgagtayaaaaatagtactaatttgaacatgcatgacagcatttctgtgcataaaatcctagaatgtcttgtgtgatgatgtatgagaagtaaattcttgaaattgtaaataaatgcatttt

SEQ ID NO: 627532 - DNA, 564 bp, Homo sapiens
aattcactgctgtatctccgtaactagaccagtactttgcacgatgtaataaacatccaatgattgaatgaaatataataacatatacatttaccatctgacttaatattatccttgctcagatcattccctatcctgtcaacttcttttatttttcttcataacacttatcactttacagcatttatcattgaccataattatcacattcacttgttggttttctttttttttttttttttaattttgtaacttccctcaactgaaatgtaaaatccatgagaacaagggccttgtccgttttgttcaccattaaayattcagttcttaaacctaaatgagtgcttggcacaaagttagagttcaatagataactggtggttaaatgaatgcattgtgatgaaaaacttgcagcaagaaaagatggatattctgattcagtctctcaaatagatttgtccctgtaattaaggttctggtaagggagtaggcatttggatactgtaaaaagaacagttcaaatttatggagaacataattatagaagacactgttgtaaatgtt

SEQ ID NO: 627533 - DNA, 568 bp, Homo sapiens
taacagctaaattgatttgatttggaactcatcatttggttcagaaaagaaagagaatggagtgcctattgtctaaatctttgctctcttactcactctttcacccaatgcaatcagttaagggttaaatacaccacctggaattaaggtggccagtcaaattcacaggatattggatttccagggtacttaaccatgactactcatgttataaaacaaacaaaaacataacaaggacatactacttgartagttatcaggcaaatgaagatattagtcacattagagagcaacatcatatcctcaaaacctgcacggtgttcagttatcaatatatcaaaatacaattatgattggggagtaatctttcatgagttcacagtttaccattagatacccattttgctaataggaaaaacaaaagccaaaaaagaaactcaccaaagtgttctctggaattgagggttgtgattactcactttctgatcttccacaaacaccccaatctgtcttgctatggctcttttgcttcagccaccaaaattgagctcagtctaaaatgcagtat

SEQ ID NO: 627534 - DNA, 590 bp, Homo sapiens
ctgtcttgctatggctcttttgcttcagccaccaaaattgagctcagtctaaaatgcagtatcaaccaatttatttgactttctgtaaatatctatagacttaacttcctcctcttctttttctttctccacctgaatcagtttaatctacaaaaaatagtagtaaaattcttaagaggattctcaaatgttcatgaaacctgaagctgtattctacagtgcagttttctgcagtattccataataacatccaycatattgttgcatattaacagatctttttccatcatttctgctgggtcgtcaaaaaagtaataaacatttccttgaagttatctgcactgccaaagacttattctaaagcaacaaaacaagtcaccaaaagtacagtcgtcctctctcatcaatggctttgctttccatggtttcagttagctactgtcagcagaagtaaaaaaatattaaatagaaaactccagaaataaataatgtataaattttaaattgtgctttttttctgagtagggtaatgaaatccctggctgtttcattctgtcctgcacaggatatgaattatttctttgtccaga

SEQ ID NO: 627535 - DNA, 590 bp, Homo sapiens
ctgtcttgctatggctcttttgcttcagccaccaaaattgagctcagtctaaaatgcagtatcaaccaatttatttgactttctgtaaatatctatagacttaacttcctcctcttctttttctttctccacctgaatcagtttaatctacaaaaaatagtagtaaaattcttaagaggattctcaaatgttcatgaaacctgaagctgtattctacagtgcagttttctgcagtattccataataacatccaccatattgttgcatattaacagatctttttccatcatttctgctgggtcgtcaaaaaagtaataaacatttycttgaagttatctgcactgccaaagacttattctaaagcaacaaaacaagtcaccaaaagtacagtcgtcctctctcatcaatggctttgctttccatggtttcagttagctactgtcagcagaagtaaaaaaatattaaatagaaaactccagaaataaataatgtataaattttaaattgtgctttttttctgagtagggtaatgaaatccctggctgtttcattctgtcctgcacaggatatgaattatttctttgtccaga

SEQ ID NO: 627536 - DNA, 483 bp, Homo sapiens
gtagcagtttagtataacaaacttggatttcagattaagaattaattagaattagattctaactcatattttctagctgtgtgaaattggacaagacatttaacttctatgagccttagctttcacatttgtaaaatttggggaaacaagattattattaaacttatgtaagattgtatgcaaaagacatttagcaaactggttgtcacacagtagatattcaataaatataatttaccttcccattttgaaattctgtttggagtattttgttatatattaaaatacttgagattgttgtttagtgacttcctatatactcactttctccctcccaacttgattgtaatctcaaggttaaaaaacatttatttygtttttctctacattgaatctaatattgtattacacacacaatagacacttaagaaatgcttattaatgttatgcattccagaactcatctggtacatatattcaaaa

SEQ ID NO: 627537 - DNA, 547 bp, Homo sapiens
atcaaatacatctattataaactcgacacataatttttttccatagcacatggaagtgttgcaacttataaattgccatttatgtttatgcaattattttattagtaccttccttctttcactttaactataagcgtataacagcagggacctgagcacatggcatagttcctggctcatagttggtgcataataataatttggtggaaaaatcaataaatttcagttttacctaactagattatgttatatctaaagacaaatgctttaagaaaactcaatatacatatatttaaaagtttcacttgtgaaattaagagctagctaagaatggaagtttmtttacttgttgggggcagaattaatcagattcccatgtttaatttatacttcaaggtaagtttcttatcctgtgacttactattctggtctgtgctatatgagaagcatcaaatcagtatttgattttgtaaatccaagaaccgagtaattccagaaatatagcccttatattattcaggggtcttcagagagacataaccaatag

SEQ ID NO: 627538 - DNA, 572 bp, Homo sapiens
ttttccttcttatgaccgtgcaaggattgttcacttctgagccaaatagtgtactaagcagtatttcttttcttagacaacatttttgttataatttctgaatttttctgaatttttatcagaaagtctttccatgtaataagatagctctgtaagatgccattcracatattttttcatacagtttgatatgcaaaaaaaaatgtcagttctatttttcttcatggatacattcctcctagagacaccagccttactgatctacttgttattgggtgccctctagtactgctgcacacttgacatcataggacttcctttcaccctcatcttgggaactatttatcttctgtgctacattccctgttaacataatatcaggtcttattctttttgtgttattttattctacttgttgacacacataatccaatagcttcctgataaggaatacatggagaataaatattttttgaataattgtgtatttaaaaatgtctattctgcaatcatcctttttttttagttgttcttgagtttttattattttctacagtttgaactaaatcatg

SEQ ID NO: 627539 - DNA, 556 bp, Homo sapiens
catatattcaataaaggcttcctctttcttgttaaggagctacttttgaatgaycatgtaatagcatgcacattagacaagaaatatgagtagtcttcatagcttacattcttccattagttttccaacctcaggacaagttgcagatgaacagaacattattggtttggaaaaatatattgatgtagtcaagtaaagacagaatgtgtgtatttacaaaggataatattagcatataaaatattttttccttctaattttgaacttagcactttctaggacaaacatcttccaattatctcattttatgcttcatccattaaacaattctgtcaaaagagctctctgttcctccaaggcaattgattgacattgaccagtttttcctctctttcagttcaaagtaatgtaataagattaacaacacaattatttgcagtgggttgagtctgttatttaattaaaataaaagttatccaagaggagcaacttgtttgcacaaacacagcagactagaacttattcttgaattacaatttatggataagcaatttta

SEQ ID NO: 627540 - DNA, 526 bp, Homo sapiens
ttaagctttgaattgaagcttacacgccacagttacagtgtaataataccctgtgcttttctgtgtgcttgctataaccattgagttttgtacattcatatgatttcttcttgctcataacatccttttcttttagattgaagagctccctttaacgtttcttacaggacagggctgctgttggtgaatttcctcagatttgatttgtctgggagggtccttattgttccttcatgcttgaacaatattttcacaagatacactattcaagggcaaaagtttttttccttcagcactttaatatgtcatgccactctctcctggctataaggtttccactgaaaagtctgctgccagacatattggagctccattacataatgtcattcatttcttatctctygccatttttatgattctctttataaccttgatctttgggagtttgattattaaatgtcttcaggtagtctgctttgggttaaatccgcttggtgttctacaacttcttgaacttgaatgatgt

SEQ ID NO: 627541 - DNA, 652 bp, Homo sapiens
gatgagatcatattttcctggatggggttgatgcttgcagatgtccattagtatctgggcattgaagagtttggtattcactgtagttttcatagtctgggcttgtttgtgcctatccttcttaggaagactttccaggtattaaaagggacttgggccctaagcccaaaagcactgtggtttttgcagcctcatagtggttccaccttggtggtcttggataagatccagaagaaatatttgaattagcaggaagagaatcttgttcttttcccttgcattctcccaatcaaatggagtctctgtctctgtgctgagctacctggaactgggggtgtggtaatgcaagcacgcctgtgaccaccaccagtgggactctgctgggtcagacctcaagcaagcacagcactgggccttgttcaaggccctcccgttcagtatgttgaggttccctaggccccaggtgggtctcgagatgctctctgggagccayggattggagtaacaatttacctaatgtgctcaatttacctaatgtgctattctactgtggctgtggttgcactcaaatcataatacaaagttcttctcactctttcctcccctttcaacaggcagaggagcctcttgctgtggctaccatcaccactgg

SEQ ID NO: 627542 - DNA, 571 bp, Homo sapiens
aaaaaaaaaaatggaagaaagctacaggccaatacctctgatggatactgatggaaaattttcaataaaatactgttgatagcaaacagaaatcaataatacatttaaaagattattcatcattaccaagtrggatttatccaagggatgcaaggatggttcaacatatgcaaatcaatcaatgtgacacatcgtatcaacagaatgaagaagagaaaccatatgatcatctcaattgatgctgaaacagcatttgataaagttcaatattgcttcacaataaaaaaccctcacaaaattgggtatagaaggaacataccatagcatagtaaaagacatatatgccagactcacagctagtatcatactgaaggagaaaaaacagaaatccctcccctttagatctggaacacaacaagggtgccctcttacacaactgttattcaacataatactgtaagttttacctagagaaatcagaaaatagaaagaaataatgggccttcaaattaaaaaggaataaattaaattattattattattttggagatggagtcttgctctgtcgccc

SEQ ID NO: 627543 - DNA, 571 bp, Homo sapiens
aaaaaaaaaaatggaagaaagctacaggccaatacctctgatggatactgatggaaaattttcaataaaatactgttgatagcaaacagaaatcaataatacatttaaaagattattcatcattaccaagtgggatttatccaagggatgcaaggatggttcaacatatgcaaatcaatcaatgtgacacatcgtatcaacagaatgaagaagagaaaccatatgatcatctcaattgatgctgaaacagcatttgataaagttcaatattgcttcacrataaaaaaccctcacaaaattgggtatagaaggaacataccatagcatagtaaaagacatatatgccagactcacagctagtatcatactgaaggagaaaaaacagaaatccctcccctttagatctggaacacaacaagggtgccctcttacacaactgttattcaacataatactgtaagttttacctagagaaatcagaaaatagaaagaaataatgggccttcaaattaaaaaggaataaattaaattattattattattttggagatggagtcttgctctgtcgccc

SEQ ID NO: 627544 - DNA, 633 bp, Homo sapiens
agctagtatcatactgaaggagaaaaaacagaaatccctcccctttagatctggaacacaacaagggtgccctcttacacaactgttattcaacataatactgtaagttttacctagagaaatcagaaaatagaaagaaataatgggccttcaaattaaaaaggaataaattaaattattattattattttggagatggagtcttgctctgtcgcccaggctggagaccagtggtgtgatcttggcttactgcaacctttgcctcccggattcaagtgattttcctgcctcagcctcccgagcagctaggattacaggagtgcaccatcacgcctggctaatttttgtatttttagtagagatggggtttcaccatgttggtcaggctggtcttgaactcctgacctcgtgatctgcccgccttggcgtcccaaagtgctgggattacaggcgtgagccactgtgcccagccattaaaatattcttgtttgtagatgatatgatcttatatttgggaaaacctatagactcyaccaaaaaactattagaaccgataaattcagtaaagcttcaggatacaaaatcaacatttgaaaatcagcaacatttctatatgccaactgtgaacaatct

SEQ ID NO: 627545 - DNA, 587 bp, Homo sapiens
tctaaggattttgactctagtccctgactcctgaatggcacttctggacccacacgagatatagggagccttgctgacctgaagggatggacacatgtctggctggctttgccacctgctgattgtagaaccccaaggccttgagtaaacataggcagtagtcagggaatagttacagcaggccttgggcaagacccagtgcagtgctggcttcaagtctgactcagcacagtcatagtggtggtggttacaggggtgcttttgtcactccatctctagctttaggcagctaagaacacagagagatactctgtatgtttaggagaaagtaagggaagagaacaagagtctctgcctggtaatccagagaattctccctgatcttgtccaaaataatcaagatgttccctctacaagtctacataaatcacagcattactaggcttgtgggtgggggtggagaggagttgaaagcagaactagcttaaatcacaacatctaagtcttttcaaatgtctggaaacccttacccaaaaaaagayggctataaatgtctataaagacagcaaagactatattaaacacct

SEQ ID NO: 627546 - DNA, 604 bp, Homo sapiens
cataattttaactatctcctgcagtcacatattttttagaaagacatacataaacatatgccaatcctgtaacagcatcaaatgttattcmtcaatattagtcctagagatttttttaattcatattaaaagcttgaaacaccttaatgtaatctcaaaatagctactaatactggaaataatttatgaaagaagatgcaagtagggaaataaaatcaagcatatacaacaaacattttactatttgttaacttgtgaaaataaatgctgtgctattgattcgggaaattcagtatatgatcacaatcagcaatccccaatctttttgacaccagggactggtttaatgcaagacaaactgtggcatgggggtgaatagttttgggatgattcaagcatattacatttacggtgcacttcatttctattattattacattgcaatatatgttgaaataattatataactcaccataatgtagaatcaagtgggagccctgaggttgttttcctgaacctagatggtcccatctgggggtgatgggaggcagtgacagatcatcaggcattagattttcataaggagtgcacaacctagatccct

SEQ ID NO: 627547 - DNA, 604 bp, Homo sapiens
cataattttaactatctcctgcagtcacatattttttagaaagacatacataaacatatgccaatcctgtaacagcatcaaatgttattcctcaatattagtcctagagatttttttaattcatattaaaagcttgaaacaccttaatgtaatctcaaaatagctactaatactggaaataatttatgaaagaagatgcaagtagggaaataaaatcaagcatatacaacaaacattttactatttgttaacttgtgaaaataaatgctgtgctattgattcgggaaattcagtatatgatcacaatcagcaatccccartctttttgacaccagggactggtttaatgcaagacaaactgtggcatgggggtgaatagttttgggatgattcaagcatattacatttacggtgcacttcatttctattattattacattgcaatatatgttgaaataattatataactcaccataatgtagaatcaagtgggagccctgaggttgttttcctgaacctagatggtcccatctgggggtgatgggaggcagtgacagatcatcaggcattagattttcataaggagtgcacaacctagatccct

SEQ ID NO: 627548 - DNA, 574 bp, Homo sapiens
gtagttcttattaaaataaaatctcaaacattgttgtaacagagactaaagaatactaaaatcacattgacaacatcaacaattaacgaatcttacctctacagtttacttggatgtgcagtagaaatagtcaaaactttgcagtcaggaagaaagaaacaaaagtggaaagaggcaaaatgcaacayttattgaatatctactatgtgctagactattgcaaatacattatcttatttgatccttgcatttccttgcaagtttggtgttattatccctatttgagagctgaggaaacttgccataataaaacagagactaggatttgaacttgccataataaaacagagactaggatttgaacccaggtgtgtctgatcccatttactatgctgcttaagtgcttttggaaaaactgacttaatttattgaaacaggagatagtaataaaaatatcatgccaaacttgcatcaggattttttgaggaatgaattcaggcattagaattttttaaagtgccaaaagtgattccagggtgtagccagaattgagaatgactaaaaagggaaatga

SEQ ID NO: 627549 - DNA, 561 bp, Homo sapiens
caaatacattatcttatttgatccttgcatttccttgcaagtttggtgttattatccctatttgagagctgaggaaacttgccataataaaacagagactaggatttgaacttgccataataaaacagagactaggatttgaacccaggtgtgtctgatcccatttactatgctgcttaagtgcttttggaaaaactgacttaatttattgaaacaggagatagtaataaaaatatcatgccaaacttgcatcaggattttttgaggaatgaattcaggcattagaattttttaaagtgccaaaagtgattccagggtgtagccagaattgagaatgactaaaaagggaaatgagattctccaagtggaaatatattggtctgggagaccttactttagttctctattagtttttcctgtgacatctgcaagccatccagccactctggttttcttatctcttttgtatgtaaatttcaawatttaccccatttacatatacctgaggtttaccacacctgagttcaaactgggaaacagttatttattattcattcaact

SEQ ID NO: 627550 - DNA, 561 bp, Homo sapiens
cctgcaaacaattcatgactgctattatatacatcagattaactgggttataagtgttatttgattacaacagtaagtagcatatatgcatggtcagatttcttagtttcttattccggcactaaagttgtttgtcaacaagttaaaaaataaaggaaataatgatattaaatagtatcaacataactgaaggacagcacatttttttaggagccaagactggaatatgttgtttcttgcagtgaatagagtgagttccatatttgattggtgatattctttctttagtccttgcaaaatctttaaaaaaggaaaaagatcacataaaaagtatactattttctttttctcaggggtggctttctggaaccagctttatgactttgtttcaagctgttttacatcttatgcagagattcttttccttataagtgcartaattacagaaatagctctcgggatcttgttatgttaattgcattattgatttgtaataaaaaagaaatagaaatgcaattattatctgaagtgaaataataaagtaccagtatctactgccat

SEQ ID NO: 627551 - DNA, 580 bp, Homo sapiens
tttggcaatgaggtcactctcaggatgcaaaactaaaaaaggcattttacattttaccaaaataattggtataatctttaccaacgtaagggcataagaaatgtgaaggaatactaktaatcaaaaatatctcggcttttgtcttccattaaagaacttctaaagcaacacaattatctcagaagatccattttagtttaatgcaaaaaataatattggttaagatagaatagtataaaagaaattgaaggaaataacatgtgagctaacaagatactaaaccattaaaaaaattaactgtactgtatcttcataggtgtttccagacaataatgccttataatttccttgtgtttacaaacaaatacatcaatcatttgccagtgcagcatgcagctatctctaggataaaatttgggagaactgaagctgcataaagtaactctatacaataattagtcagaggcaataaaagaataccataggcaattagagcacactaattttcaattgtcgcacacaaccaaattcatcatcattttgtttcgtctctaaaaatattgccattgaaatacttaca

SEQ ID NO: 627552 - DNA, 580 bp, Homo sapiens
tttggcaatgaggtcactctcaggatgcaaaactaaaaaaggcattttacattttaccaaaataattggtataatctttaccaacgtaagggcataagaaatgtgaaggaatactattaatcaaaaatatctcggcttttgtcttccattaaagaacttctaaagcaacacaattatctcagaagatccattttagtttaatgcaaaaaataatattggttaagatagaatagtataaaagaaattgaaggaaataacatstgagctaacaagatactaaaccattaaaaaaattaactgtactgtatcttcataggtgtttccagacaataatgccttataatttccttgtgtttacaaacaaatacatcaatcatttgccagtgcagcatgcagctatctctaggataaaatttgggagaactgaagctgcataaagtaactctatacaataattagtcagaggcaataaaagaataccataggcaattagagcacactaattttcaattgtcgcacacaaccaaattcatcatcattttgtttcgtctctaaaaatattgccattgaaatacttaca

SEQ ID NO: 627553 - DNA, 602 bp, Homo sapiens
tgtatatatttatgagttacatgagatattttgatacaggcatgcaatatgtaaaaatcacaatagagtaaatggagtatccaccaccccaagcacttattatttgtgttacaaacaatcgaattatactcttggtgatgattaatgttgaatgtcaacttgattggattgaaggatgcaaagtattgttcctggctgtgtctgtgagggtgttgccaaagaagattaacatttgagtcagtgaactgggaaaggcagacccaccctcagtctgggtgggcacaatgtaatcagctgaaaagactagactggcttagtctcctggcctacatctttctcccatgctggatggtttctgccctcaaacattggactccaagttcttcagcactgtgackcttggaccttcgaccacagactgaaggcagcaactgtcagcttccctgcttttgaggttttgggactcagactggcttccttgctcctcggcttgcagacggtctattgcgggacctcacctcatgattgtgtgagttaatactccttaataaactcccctttatatatacatctatgctattagttctgtccctctagaaaac

SEQ ID NO: 627554 - DNA, 549 bp, Homo sapiens
attaaccatttccacttcctccgaagcccccccactactcttctcagcctctggtaaccacttttccactcttttttttctataacttcgattattttaatttttagctcccacaaataagtgaaaacatacaaagttagtctttctgtgcctgattcatttcacttaatatgatgaagtacaattctatatatgttrttagaaatgacaggatctcattctttttatggctgaatggtacttcattgtgtaaatgtatcacattttccttatacacttatctattgatagacacctagtttgcttacaaatcttagctgttgtaaatagtgataaacatgggaatgcagatatctttttgagatactgatttcccttcttttgagtgtatacctaggagttgggttgctagatcaatgtcagctctatttttcattttttgaggaacctataaacagttctctatagtgtctgtactaatttacattcccaccaacagtgtgcaaggattcccttttctctacatccccgccagcatttgttattgcc

SEQ ID NO: 627555 - DNA, 599 bp, Homo sapiens
gttcatactgacatgttctgataatcacaaatgcatcaaatgaatccctaatgctttgacattaagagcatcaacttgatagtgacagaattagaaaacataagaatgtaatttacaataaaaataatgtgtttttttttatactagtgaaaaggactctgaattcatttaatcactctatttgggtactgacatttttcagcyatcattaatctaatatttaatattaatacatattttttgttcaaacctacatgttgcaatagcatgaggaaagatttggatgatctgatggaaagagacttgattggcatataaaatagcagaattgtatttccagctatactactaactgtgtgaacttgggcaagtcacagcacctatgtacctcatcttctttatttctagacactgattaaatcctcttccaaccctaatgttaaatacgcaccttgaaactctgcctagtgttaaaaacaacaacaacaacaacaacaacaacaggctgatatgtcttggcaaagagataaaattaaatgggaaattctgtataatctgtatggaccagtcactcatttgggcttcattacatgcatcat

SEQ ID NO: 627556 - DNA, 492 bp, Homo sapiens
atgtactccagaatatgttgctcaggtctttctgccctggccctctcatcctcccctttccttatgcttctactggtctgagtgccaaagatctatattttacaggacacagatatctttacaagtgacggctactaatgcccacatcagcttcayggaagggacatatttaacttcatgtttggtgtaagctctgttatctattacagcttgccagtatggtcagaattcagatatagattcttgaagctagaattcttcataactgctgccaacatattgcctattggctgctctccaaactgtccactttcttacacttttgtttctgccactagttctgttacttccactgaaactcatatcaaaacatgtgtgtccagggatgacatttatatcttctgtgattgcatgtagttgaggaagctcatatgtgtacactggagtctagattctgagatggagttaggtccctacaatcagttgaaaagg

SEQ ID NO: 627557 - DNA, 610 bp, Homo sapiens
catgttctcacttataagtgggagttgaacattgagaacacatggacccagaaaggggaacagcacacaccagggcctgttgggaggtgcggggtgaagggaaggaacttggaggataggtcaataggtgcagcaaaccaccatggcacacgtatgcctatgtaacaaacatgcacgttctgcacatgtatcccctttttctattttttagaagaaataaagaaaaacaagaaaataggaatctaaataaaaaataatgtaatataaaacatgctatacagaagcttgagcttgtaatctgtttattcattttacctaaagctccaatttccagcatttttctctaataaagtccatgcacctgatcaactattaagaaagtatttctctacagaagttatggggaaagtgctattaaaattattctttaatattttatacatgtttttatgtttgcyttttatatacttccacacatttcatagtagggttttaaaactgaatttaatatttttgttattagtaatggtactttttctccattatggcttctaattgcttattgttggcatgcattaattataataatttttataaatttatcagttct

SEQ ID NO: 627558 - DNA, 599 bp, Homo sapiens
gttcatactgacatgttctgataatcacaaatgcatcaaatgaatccctaatgctttgacattaagagcatcaacttgatagtgacagaattagaaaacataagaatgtaatttacaataaaaataatgtgtttttttttatactagtgaaaaggactctgaattcatttaatcactctatttgggtactgacatttttcagccatcattaatctaatatttaatattaatacatattttttgttcaaacctacatgttgcaatagcrtgaggaaagatttggatgatctgatggaaagagacttgattggcatataaaatagcagaattgtatttccagctatactactaactgtgtgaacttgggcaagtcacagcacctatgtacctcatcttctttatttctagacactgattaaatcctcttccaaccctaatgttaaatacgcaccttgaaactctgcctagtgttaaaaacaacaacaacaacaacaacaacaacaggctgatatgtcttggcaaagagataaaattaaatgggaaattctgtataatctgtatggaccagtcactcatttgggcttcattacatgcatcat

SEQ ID NO: 627559 - DNA, 592 bp, Homo sapiens
ggaatagcattgaatgtataaattactttgggcaatatggttatttttgcaatatcagtttttcctatccatgaacatggaatgtttttccatttgtttgtgtcctctctgatttctttgagcagtggtttatagctctccttgaagaagtccttcatgtcctttgttagctgtattcctaggtatctaattatttttgtagcaatcttgaatgggagttcattcttgacttggctctctgcttgtctgttgttggtctataggaatgccagmgatttttgcacattgattttgtatcctgagacttttctcaagttgcttattagcttaaaaagcttttgggctgaggcaatgggattttctaaatataggatcatgtcatttgcaaacaaagataattttacatccaattttcttatttgaataccctttatttctttctcttgactgttggccctggccagaatttccaatactatgtttaataggagtgatgggagagggcatctttgtctcttgccagttttcaaggggaatgcttcccacttttgcccattcagtatattggctgtgggtttgtcatagatgaccc

SEQ ID NO: 627560 - DNA, 592 bp, Homo sapiens
ggaatagcattgaatgtataaattactttgggcaatatggttatttttgcaatatcagtttttcctatccatgaacatggaatgtttttccatttgtttgtgtcctctctgatttctttgagcagtggtttatagctctccttgaagaagtccttcatgtcctttgttagctgtattcctaggtatctaattatttttgtagcaatcttgaatgggagttcattcttgacttggctctctgcttgtctgttgttggtctataggaatgccagcgatttttgcacattgattttgtatcctgagacttttctcaagttgcttattagcttaaaaagcttttgggctgaggcaatgggattttctaaatataggatcatgtcatttgcaaacaaagataattttacatccaattttcttatttgaataccctttatttctttctcttgactgwtggccctggccagaatttccaatactatgtttaataggagtgatgggagagggcatctttgtctcttgccagttttcaaggggaatgcttcccacttttgcccattcagtatattggctgtgggtttgtcatagatgaccc

SEQ ID NO: 627561 - DNA, 442 bp, Homo sapiens
aaatcagtacatagaagagatatctgcactcctatgtttgttgtagcacttttcacaatagctaagatgcggaagcaacctaaatgtccatcaacaggtgaatagataaagaaaatgtggtacatgtacacaatggaatactattcagccataaaaatcaatgagatgcagtcatttgcaacaacattaatggaactggagatcattatgttaaccaaaataagccaggtacagaaagacaaacatcacatgttctcacttacttgtggaatctaagtatcataacaattgaattcatggagatggagagaagaaggatggttatcacagcctgggaagcatagtgggctgctgagggtatttgcagatggttaagggatgcaaaaaaaaaaaaaaaawggaacaaatgaacaatgactaattcttgatagcacaataaggt

SEQ ID NO: 627562 - DNA, 599 bp, Homo sapiens
gttcatactgacatgttctgataatcacaaatgcatcaaatgaatccctaatgctttgacattaagagcatcaacttgatagtgacagaattagaaaacataagaatgtaatttacaataaaaataatgtgtttttttttatactagtgaaaaggactctgaattcatttaatcactctatttgggtactgacatttttcagccatcattaatctaatatttaatattaatacatattttttgttcaaacctacatgttgcaatagcatgaggaaagatttggatgatctgatggaaagagacttgattggcatataaaatagcagaattgtatttccagctatactactaactgtgtgaacttgggcaagtcacagcacctatgtacctcatcttctttatttctagacactgwttaaatcctcttccaaccctaatgttaaatacgcaccttgaaactctgcctagtgttaaaaacaacaacaacaacaacaacaacaacaggctgatatgtcttggcaaagagataaaattaaatgggaaattctgtataatctgtatggaccagtcactcatttgggcttcattacatgcatcat

SEQ ID NO: 627563 - DNA, 586 bp, Homo sapiens
gacatccacatacaaaaaatattagttctagacacagatattacacctttacgtaattaactgaagtgcccacaaaaaataaaaatgggccacgagacctaaaygcaaaacacaaagctgtaaaactcctagaagataacaggtgaaaatctcagtaaccttgggcttgtcaatgatgttttagatatagcacaaaaaatgtgttccatgaaataaataaatagataaatagttggactttattaaaattaaaacctgcacttcaaaaggaattaaggtaatgaaaagacaatccacagactgtgagaaaacttttgcaaaatatgtatctgataaagaattggtatagaaaagacctcttataactcaacaataagtaaacacaaaaaagccgactaaaagaggggcaaaagatctgaaaagacattttactaaagaagataaacagatgaccaatgaccttatgaaaagatgctcatgtgccattagggaattgcaaattgaaacagtgagatagcactatacaactattagaacagctaaaatccaaaatactgacaccaccaaatgctagtaaagatgaaga

SEQ ID NO: 627564 - DNA, 585 bp, Homo sapiens
tccaactttcatgcttcttggtatttactcagaggaattaaaacttacatccccacaagaacctgatcatgaatgtttataacagatttattcataattgtaaaaacttgtaagcagtcatgatgctcttcaatccatgaatggataaataaactgtgatatatccatacaatggaatattattcagtaaggtaaagaaatgaggcatcaggccaggaaatggcatattgaaactttaaatgcatacttacatgtaaatttagtcaatctgaaaaggctacatcctgtatgatttcacctatattacattctggaaaaggcaaaactatggagacagtaaaaaaaaaattccataattgatagggattccragtaagggagagaggaatgcataggtggatcactgggatttttagggctgcgaaactaatggcaaataggtatcatacatttctcaaactgcatggaatgtacaacagaaagagtcaatcctaatgtaaactatggacttacttaataaaaatgtataaatacatgctcatcaaccataacaaatgtaccatactaatcaaggtgttaataata

SEQ ID NO: 627565 - DNA, 447 bp, Homo sapiens
attttatgtgttcttgccatgcacacacatggacacacatacaacaaaaaagggggggggcacaagaaaactttaggatrtgttaaatatgtctatcagtttaaatatgatgatggtatcacggtgctgcctatgttcaaactcctgaaattgcacacattaaatatgtgcagttctttgtgtatcaattatacttcagtgaagctgcttaaaaaataaaataaaatgtgtaactgtgactgagctcgtgggaagacaagagacagatttgagaccagaaactatgagatagtgttaatgctgagaggtaagcaggtgttttcccttaaaattaagctttaaattttaatgagctcttccaagaggaaagcagacaaacactgagatgtgtaaaagatggaagaagttttaaattgaagactctctttaaaaggccaaaatatccct

SEQ ID NO: 627566 - DNA, 556 bp, Homo sapiens
cctgataaccctaaagttagtactcatgccctgagctgctactcttttttttttttttttttttttttttttttttttaracaatcttgctctgttgcccaggctggagtgcaggggcacgatctcagctcactgcaacctccgcctcccaggttcaagtgattctcctgcctcagcctcttgagtagctgggactacaggcacgtgccaccacgcccggctaattttttgtatttttagtagagacgggttttcaccgtgttagccaggatagtcttcatctcctgacctcgtgatctgcccgcatcggcctcccaaagtgctgagattacaggcgtgagccactgcctctggcccctgagctgctactcttagcacactgcctatggggtagccctgctctgcaggagcagtcccagagctgtaccaccaccagagcggtaacactgctgcttcaataaagctgttttcttctaccctactaccaatttgcccttcaattacttcctgggcaaaactaagaaccctcatgggttaagccccacttttgagctca

SEQ ID NO: 627567 - DNA, 556 bp, Homo sapiens
cctgataaccctaaagttagtactcatgccctgagctgctactcttttttttttttttttttttttttttttttttttagacaatcttgctctgttgcccaggctggagtgcaggggcacgatctcagctcactgcaacctccgcctcccaggttcaagtgattctcctgcctcagcctcttgagtagctgggactacaggcacgtgccaccacgcccggctaattttttgtatttttagtagagacgggttttcaccgtgttagccaggatagtcttcatctcctgacctcgtgatctgcccgcatcggcctcccaaagtgctgarattacaggcgtgagccactgcctctggcccctgagctgctactcttagcacactgcctatggggtagccctgctctgcaggagcagtcccagagctgtaccaccaccagagcggtaacactgctgcttcaataaagctgttttcttctaccctactaccaatttgcccttcaattacttcctgggcaaaactaagaaccctcatgggttaagccccacttttgagctca

SEQ ID NO: 627568 - DNA, 556 bp, Homo sapiens
cctgataaccctaaagttagtactcatgccctgagctgctactcttttttttttttttttttttttttttttttttttagacaatcttgctctgttgcccaggctggagtgcaggggcacgatctcagctcactgcaacctccgcctcccaggttcaagtgattctcctgcctcagcctcttgagtagctgggactacaggcacgtgccaccacgcccggctaattttttgtatttttagtagagacgggttttcaccgtgttagccaggatagtcttcatctcctgacctcgtgatctgcccgcatcggcctcccaaagtgctgagattacaggcgtgagccactgcctctggcccctgagctgctactcttagcacactgcctatggggtagccctgctctgcaggagcagtcccagagctgtaccaccaccagagcggtaacactgctgcttcaataaagctgttttcttctaccctactaccaatttgcccttcaattacttcctgggcaaaactaaraaccctcatgggttaagccccacttttgagctca

SEQ ID NO: 627569 - DNA, 584 bp, Homo sapiens
tgtttgaaaagcctcttatagtcactaagttgtcaacacaccagttactcaagctagaaacctggtagttaccctcaactcttccttctctcacaccacrcatgtaatcaaattcggctaaatagttttgaaatttcccacctgtctatgtcaactctgtcaggctcactctttccttatctggactttttcagttaagattcttaggattgaaagcaacagaatatgttttgtgctaagttgagcacttcataaaaaatatagactgttaacagccaactctcctaaagggaagggacaggacagctccaggaactctagagatttctgttttttctctttggaattacagtatttaaagatgtgtagctgttgtaacaaacaaaagcataatcatatctccagcaacatacaagtttatttctcactcataggaaatccagaatgagtattccccaatatttaatttgtgtgaagtggtgaaatgggaaagaacatggagggttgtacatgggcaattacgggcaagcctggaagtgccacacataatgtccattcatatttcactaattgtagatcagtca

SEQ ID NO: 627570 - DNA, 594 bp, Homo sapiens
tcactgtttgaaaagcctcttatagtcactaagttgtcaacacaccagttactcaagctagaaacctggtagttaccctcaactcttccttctctcacaccacacatgtaatcaaattcggctaaatagttttgaaatttcccacctgtctatgtcaactctgtcaggctcactctttccttatctggactttttcagttaagattcttaggattgaaagcaacagaatatgttttgtgctaagttgagcacttcataaaaaatatagactgttaacagccaactctcytaaagggaagggacaggacagctccaggaactctagagatttctgttttttctctttggaattacagtatttaaagatgtgtagctgttgtaacaaacaaaagcataatcatatctccagcaacatacaagtttatttctcactcataggaaatccagaatgagtattccccaatatttaatttgtgtgaagtggtgaaatgggaaagaacatggagggttgtacatgggcaattacgggcaagcctggaagtgccacacataatgtccattcatatttcactaattgtagatcagtcacatgac

SEQ ID NO: 627571 - DNA, 594 bp, Homo sapiens
tcactgtttgaaaagcctcttatagtcactaagttgtcaacacaccagttactcaagctagaaacctggtagttaccctcaactcttccttctctcacaccacacatgtaatcaaattcggctaaatagttttgaaatttcccacctgtctatgtcaactctgtcaggctcactctttccttatctggactttttcagttaagattcttaggattgaaagcaacagaatatgttttgtgctaagttgagcacttcataaaaaatatagactgttaacagccaactctcctaaagggaagggacaggacagctccaggaactctagagatttctgttttttctctttggaattacagtatttaaagatgtgtagctgttgtaacaaacaaaagcataatmatatctccagcaacatacaagtttatttctcactcataggaaatccagaatgagtattccccaatatttaatttgtgtgaagtggtgaaatgggaaagaacatggagggttgtacatgggcaattacgggcaagcctggaagtgccacacataatgtccattcatatttcactaattgtagatcagtcacatgac

SEQ ID NO: 627572 - DNA, 594 bp, Homo sapiens
tcactgtttgaaaagcctcttatagtcactaagttgtcaacacaccagttactcaagctagaaacctggtagttaccctcaactcttccttctctcacaccacacatgtaatcaaattcggctaaatagttttgaaatttcccacctgtctatgtcaactctgtcaggctcactctttccttatctggactttttcagttaagattcttaggattgaaagcaacagaatatgttttgtgctaagttgagcacttcataaaaaatatagactgttaacagccaactctcctaaagggaagggacaggacagctccaggaactctagagatttctgttttttctctttggaattacagtatttaaagatgtgtagctgttgtaacaaacaaaagcataatcwtatctccagcaacatacaagtttatttctcactcataggaaatccagaatgagtattccccaatatttaatttgtgtgaagtggtgaaatgggaaagaacatggagggttgtacatgggcaattacgggcaagcctggaagtgccacacataatgtccattcatatttcactaattgtagatcagtcacatgac

SEQ ID NO: 627573 - DNA, 571 bp, Homo sapiens
aaaattcttatcggagacacctaactttattctcttgttttgttttgttaacttgtacattatcttctaaggctctagttgtagtggatcttgaaagtatgtgttcctttgagacttttgctgtttttgcagtctttttcctagttaatagtttaggcagtactgaatgttgttttaagactgaacaatgaaaaatgttctgcttcaaggtgaagggttctttctaatattatacaattcactcagaaaccaatattgcttcctatatrttgtttccagaaatcctatatgctagtaaacatctccagagttcttttctaggtgcaatgaccaagcctgatatagttctcggtttcctagtttctactgattttttcttctaaatttaatggtggccgtattaaagccatttgagatagtaggtgggaaagcctgtaaatcttatttttttgctgcatgattgtcacttgcctggattgagaagtcttggggctttttgagtcttgtcttttataatctgaagtccaggtgaagttaatttttccaaccctgcaagactcatgctctagat

SEQ ID NO: 627574 - DNA, 522 bp, Homo sapiens
tcccactctcagactgtgaataacttcattggaagagcttaatttactcatattaatatctgtcataatgaagcaatgtatttcatagtttacgtacttattattttttgtacaaatgaatcacatggaccaaagractagccattatattgctgaatagaccatcatgaggatttttatctgtacttatctattctgtgattgttttttcaaatgtaaattgaagtgttctgcatttctaatgatttatgcttgttctttactcctttcacatttggacaacttccacatagaagtctcccttttttcctttcttttttcattcatttaaaggcctgtattgctttctcttgccaaattctgcaaagaacttgcaaagatgagtaaaacatcatcgatgtcttcagtgagctctcgtaaaagttacgaatacagcattattaccaaattatatatcttaacatcttatgtgctataatactgatttctgcaaagtgctaccaaaataaagattttatcttt

SEQ ID NO: 627575 - DNA, 529 bp, Homo sapiens
tgaaaaatcagtgagatttaatagaaatgaaattacggagcagggggttgcaggccaaggaacagcttgcagaaaggacatgaagttatgcaaatgaaaggcttgtttgyttcagaattaaaaattcatctagggtatgtaaaatacttttttctttttttgttaagagtggtaagagataagatggagaagttgacataaacttagttttaatccttgttggttgagaaaaaatatttgtgactgaaatttatttcctgctgaagaactttaaagactagttctgatccattactttctctcattttttaatttttagtgaaaaggtgcttgtggtttatcaaattcctataggcattcctttcataatctttgatttcatttcttttcatataaagcttataagaaattcttggaggctcattctaagattaacatctaaggtactgacacacagtattgcattttcaaggcaacatttgtaaatccagctttcctgctttttaatgcccaagtgaattttctatca

SEQ ID NO: 627576 - DNA, 597 bp, Homo sapiens
aggacaataagtttgtaagaaggtaatatcaaaactgtactcaatttgctctacatcagtagtctccattagacttcaggcattccctacacaaattgcattttctttgatgcaatatgtattcttactggcttgacatttgaagaatttgagatttttagtattaatctgcttcgcattcgtttttcataaaatagtagccccaggataatccatttctaagatcctacccctctaatggcctgtggttccattggctggtgggatgtgcctatgtatgctttctgatgacctgatgagagtgggtgaaccctcatctctcttggaagtttctggacagttttgtgtgcttgaaaaagtttcaatgatgcaacaaaattaatttccttagtaaaaacacctatgattatagtattgaacaaacaaaaactggtctccattcacactcattttctgttttgtaggaaaaattccaaccgcttaaattgtaagwtgagctcatagcaaactcagtacttttcatgactcttcacttgtggtcttacttgttcttatgaacagttgcacacacatataccaatgacacacatacacaca

SEQ ID NO: 627577 - DNA, 588 bp, Homo sapiens
gtttttttttttcatggattgatagctattttcttcttagtgctgaatactatttccccttttgggtgtaccacagtttagttatccattcatctattggaggacatcctggttactttccagttttggcaattatgaatagaagtgctgtaagcatgtgtgtgaaggtttttttttttttgggggacacacattttcaaccaatttgaggaaagtgaaaagagcgcagttgctggaatgtgtgataagactgtatttaattttgtaagaaacagccaaactgtcttccaaastggctgagtcatcttgcattcccaccagcagtgaaggagagttcctgctgccatatccttttgcagcatttggtgttgtcagtacatgctcttttaaaatataatactagttaatcaaatataatcttgatttcagaagttatcaagacactctgactagttaggttgctgtctcattctctctgaagctgcaaattttgtccaggaatacaatactcagaggaaaactgctatacttccttgcagaaatccattctttacaatatccattgaggagagtttactatataatgat

SEQ ID NO: 627578 - DNA, 559 bp, Homo sapiens
gtcaagtccagcaccctaaaaggtttctttatgctctttcccatttaatatttaccaccagtggcaactgccatgttgacttctgttgccatggactagctttgctggttacagaacttcatctgaattctaatatagatactctatcatgtctggctttttttttttctgctcagtatattgtgtgtgagattcatcgattttttttttcacgtaactgtagccagtgcattcttacatagtatcccaaaagcaaaagacctgattcaacatttacatttttttttaccaaaaacaatggaaagataatatatgctaatactctcaatttatgataattgaattttgaaattaagaaaacatgttttaraaaagtatttttaaaatgatgcatttacttgtgttttattttctgttgttttatgactttcttttttaattgtaataaagcatttcctactttgtttactttctctcccatggctaaattcatgattttcaatttaccaaaaaaaataaaggaattgtttcctcatataagttctatttaaaaacatat

SEQ ID NO: 627579 - DNA, 540 bp, Homo sapiens
tatgaatagaagtgctgtaagcatgtgtgtgaaggtttttttttttttgggggacacacattttcaaccaatttgaggaaagtgaaaagagcgcagttgctggaatgtgtgataagactgtatttaattttgtaagaaacagccaaactgtcttccaaagtggctgagtcatcttgcattcccaccagcagtgaaggagagttcctgctgccatatccttttgcagcatttggtgttgtcagtacatgctcttttaaaatataatactagttaatcaaatataatcttgatttcagaagttatcaagacactctgactagttaggttgctgtctcattctctctgaagctgcaaattttgtccaggaatacaatactcagaggaaarctgctatacttccttgcagaaatccattctttacaatatccattgaggagagtttactatataatgatgtcattgttacagtgagctacatacatcatctatgatagtcattcaccaatgtaatattcattgaaataagtatcaaatgagcac

SEQ ID NO: 627580 - DNA, 542 bp, Homo sapiens
aaatgctatttttcatagcagtgttattattatttgtagtaacaagatattgaaaattataaatgttgaatagaaattttttaaatgtcgtgactaatccatatgatgaggtsgtatggttgttttgaaacttatgcttcccttagacaagattcaggcaaaatttaaattctcctttctgggaatctgccctcggaacctgttccacagagcagtagttaatgctgccattaacagtaggcttcagtgtaattaatggtacctataaaataaagaaaaatggtcttttaaaatattggagggaggtggggaaaaattggaaacattaatataaagtttaaaaggtttctttaccatatgactttgcagagtccttgataaataaaagtgcatggtaaatatataaaagaaaaatagtctgaagtgttctcaaaacatatttagtcgtaaacactttttagtttgaagggaatctcatgggaatagattctcatttggggaaaaaactgctttaaagtggacccagccaggccagcacattc

SEQ ID NO: 627581 - DNA, 600 bp, Homo sapiens
tcttccctgacttgctttatttttattttttatttttattttttttaatttttttttttgagatggagtctcgttctttcrccaaggctggagtgcaatgacaaggtcttgactcactgcaacctccgcctcctgggttcaggcaattctcctgcctcagcctcctgaagtagctaggattacaggcatgcactagcacacccgcctaattttggaatttttagtagagactgggtttcgccattgttggccaggctggtctaaaactcctgacctcaggagatcacccgcctcagcctccctaagtgctgggattacaggcatgagccaccgcacctggccctgacttgctttttatgttagtatgccaccttgaatttctattcccttatagcatttcctttaaaaaacaacctaattgttaatacttgacattatattacacatttgttaatttttcttctctcacgaaaatataaattaaccaaccacaacctgatgatcatgagtattacctaaccaccaacttgatgatcatgagtatgaaatctttttaacatttttgaatattttttacttttttctattttttttccacag

SEQ ID NO: 627582 - DNA, 600 bp, Homo sapiens
tcttccctgacttgctttatttttattttttatttttattttttttaatttttttttttgagatggagtctcgttctttcaccaaggctggagtgcaatgacaaggtcttgactcactgcaacctccgcctcctgggttcaggcaattctcctgcctcagcctcctgaagtagctaggattacaggcatgcactagcacacccgcctaattttggaatttttagtagagactgggtttcgccattgttggccaggctggtctaaaactcctgacctcaggagatcacccgcctcagcctccctaagtgctgggattacaggcatgagccaccgcacctggccctgacttgctttttatgttagtatgccaccttgaatttctattcccttatagcatttcctttaaaaaacaacctaattgttaatacttgacattatattacacatttgttaatttttcttctctcaygaaaatataaattaaccaaccacaacctgatgatcatgagtattacctaaccaccaacttgatgatcatgagtatgaaatctttttaacatttttgaatattttttacttttttctattttttttccacag

SEQ ID NO: 627583 - DNA, 526 bp, Homo sapiens
ctgggtttcgccattgttggccaggctggtctaaaactcctgacctcaggagatcacccgcctcagcctccctaagtgctgggattacaggcatgagccaccgcacctggccctgacttgctttttatgttagtatgccaccttgaatttctattcccttatagcatttcctttaaaaaacaacctaattgttaatacttgacattatattacacatttgttaatttttcttctctcacgaaaatataaattaaccaaccacaacctgatgatcatgagtattacctaaccrccaacttgatgatcatgagtatgaaatctttttaacatttttgaatattttttacttttttctattttttttccacagcccctggagggaaaatgagtatgaaatctttatctccagcactgtctttctctaagcctcagactcatactaaccactgaaagagaattccaactggatttacctcttgaaggtcaaactcaatatatcatacaccaaactaattgcctccctgac

SEQ ID NO: 627584 - DNA, 436 bp, Homo sapiens
gcatggctatgaagagtctgagactataactggtgttgtgagagtactagctctattatttcaccctgtaatgggtttttctttttcccttgaaaagcattaaactataaaatttcttacagatagattccttgtcttattcaaccttgtactagtcacagtgcccatgtagtgctttgaatgacactaggtaacctaaaattacttattaaattaataaatgaataaaattayctgccatttccccctgtctggagcccattccattgatattttcttcattattcaaagttaaaacttgtttttgagagttttgtgctggctagctaaatgtgttactacagccaggactttgatctttgatcaatgaatttcccccactttaaggggagactctccaataggcaggttttaatcattagtaataagcaacccc

SEQ ID NO: 627585 - DNA, 580 bp, Homo sapiens
ggtgttgcattgcttgtgaaaaaaaatagaatattggaaccactgctagaatccagtgatactatagaaaattttattcttgataagggttgggagattttcaacaagacagtgaagtggtgtcaaagtaaaagtgatttaaagcatgggaggagcagagaacagatctttgtgatccagtgtagttggaggtggggacaggggtgtagggactggaatgtatgggagggagtgggtagctgggaacaggtagaaggtagacatgcaatgatggtgcctggaaatgcagaaagatgacgtacaagtttccaataagatcttatcctagagttttttgtttttttgttaaaactagacttgacttcctcccctcccaaagtatggctacttacccttaaatggaattcccatagtaattttgggtaggggtggctcatttttaaactcacagtrtgggaattaagactacctacccaggatatgtgccttctgcatatatagccagtaacaaatcaaaatatatgttttggaagtgcctgtttctggcttctggttggagactttacttcccagcctgtca

SEQ ID NO: 627586 - DNA, 642 bp, Homo sapiens
gatttaaagcatgggaggagcagagaacagatctttgtgatccagtgtagttggaggtggggacaggggtgtagggactggaatgtatgggagggagtgggtagctgggaacaggtagaaggtagacatgcaatgatggtgcctggaaatgcagaaagatgacgtacaagtttccaataagatcttatcctagagttttttgtttttttgttaaaactagacttgacttcctcccctcccaaagtatggctacttacccttaaatggaattcccatagtaattttgggtaggggtggctcatttttaaactcacagtatgggaattaagactacctacccaggatatgtgccttctgcatatatagccagtaacaaatcaaaatatatgttttggaagtgcctgtttctggcttctggttggagactttrcttcccagcctgtcagaccagtaagctgcaaaaacaaatagatgaataaataaataaataagagagagaaacaaacaaaaaaagagttttatttttattcaaacttcaacaatatccataatttggtaaatttcttattctcactttgtgatttacattaataaaaaagatgttctttattctataaaaacaacacatcaaaatttggcctt

SEQ ID NO: 627587 - DNA, 514 bp, Homo sapiens
agcctctgccaaaagtccagcttgcaatatcagagaccaatatttagcccttggtatgacacactttacccaaggaatggagcttaccagaaagttgactacgatggacctctcctacccctgaagaagcagtgatttatccttaatggaatccacagatagtttgggtgtgagtatttatttcccactgcaaggccattgctaatatcactagctgcagatttttgaagattttgtctgctggtacaggatactgtgtaacctgtccttagaccaagagaatcaaatgataacaaatgaggtgtagttgcagtagaggatgtgtgactacacgctccatttgttttatatcattattctcacaaaccaaaacctgtcaatctgatacactggtaaagtcatgtttaaaacrtgcaactgaggtccctggtcggaaaccataccctgtgaggatgatattcacttcaggacgtggtattcactgaaaatcaatgactattatgttgttctgtat

SEQ ID NO: 627588 - DNA, 627 bp, Homo sapiens
gaggctctgaaaagccctgacatattcctgggaatctaaagggctacatatatctgcagggctgtgtgtaatcacagaaaggagctaaatgggccctaatctgttacctctgaatgttcttaaagccctgcatatgcagaaagtgaagtcaaaggcagagtttaaagttacctgagcatttgatgatctgtctcaactttctgatttggatgccttcagtgagagaaagaaataaaggacatccacattggaaattacacacacacacaaaagatctctgcttgtagatggtgtagttttgcatatagaaaattataaggaatccatcaaatttattataatgaataaacaagtttggcaatgttacaggatccaagatcaatgtaaaatattaattatatttacatatactatcaaaaaattgtamataaaatcaagaatgcaattttatttacaacatcaaaaaactaaaatccttgggaataaatttaataaaagtagttgaagactgttaaactgaaagttacaaaacaattgttaagaacaattaaagatcgaattaaatggaaaggcatcccatgctttctatcgaaaggattaatatcgttaagatggcagtattcctta

SEQ ID NO: 627589 - DNA, 452 bp, Homo sapiens
agaactcatgctatctaatttcaaaacttcttatagagccagaataatcgagacagcctgktattagtgaaagaataatgatccatatggtaacagattagagttgtagacttcactatgaagtcatatttagcttaacatagatacagatgattatatatagaaatatttacagataggtatatatatatatacaggttaatatatgcacatatatttccttgttttgtcagatgagaggacctaaatgaaagaacaacccagtagaaatgagcacaccttatattcagatcatagcttggtttctaataacattctctagaaaaagaaaccaaggttccttggagaaatggctgattcttgggccagttgaaaatacataagagcagcctgtcgcatcttgtagtgacagaataaaacatgctcaaacacatgcacacacacacacacac

SEQ ID NO: 627590 - DNA, 539 bp, Homo sapiens
cagaagaattccatgtagtttaaatagtatttcacccccaaggaggtggtacatgactcataactcctctagtttgagtttttcatactgacttcctttcaaataatataatacagaaagggggaaaaagagtaacttcacagtagataaatctgacaaacactacttcagccaggtggtcaaggttaacactaataatgataagttatgttgatactatctttgatatgatgtgatgaaaatggcatttaatytctgtggtcttcctccataaaccttataaccgcagtcaaatcatgagaaaaatataagacaaatctcaattgagggacattctacaaaatgccttaccagttctcctcaaaactttcaaagtcatcaaaaacaaacaaagtttgagaaattgccacagctaagaagaatctaaacagaaatgacagataaatgtaacatggtatcctggatagaatccttgacaggaaatgcacattaggtaaaaaccaagcaaatctcgataaagtacaaacgagttaataatg

SEQ ID NO: 627591 - DNA, 539 bp, Homo sapiens
cagaagaattccatgtagtttaaatagtatttcacccccaaggaggtggtacatgactcataactcctctagtttgagtttttcatactgacttcctttcaaataatataatacagaaagggggaaaaagagtaacttcacagtagataaatctgacaaacactacttcagccaggtggtcaaggttaacactaataatgataagttatgttgatactatctttgatatgatgtgatgaaaatggcatttaatctctgtggtcttcctccataaaccttataaccscagtcaaatcatgagaaaaatataagacaaatctcaattgagggacattctacaaaatgccttaccagttctcctcaaaactttcaaagtcatcaaaaacaaacaaagtttgagaaattgccacagctaagaagaatctaaacagaaatgacagataaatgtaacatggtatcctggatagaatccttgacaggaaatgcacattaggtaaaaaccaagcaaatctcgataaagtacaaacgagttaataatg

SEQ ID NO: 627592 - DNA, 539 bp, Homo sapiens
cagaagaattccatgtagtttaaatagtatttcacccccaaggaggtggtacatgactcataactcctctagtttgagtttttcatactgacttcctttcaaataatataatacagaaagggggaaaaagagtaacttcacagtagataaatctgacaaacactacttcagccaggtggtcaaggttaacactaataatgataagttatgttgatactatctttgatatgatgtgatgaaaatggcatttaatctctgtggtcttcctccataaaccttataaccgcagtcaaatcatgagaaaaatataagacaaatctcaattgagggacattctacaaaatgccttaccagttctcctcaaaactttcaaagtcatcaaaaacaaasaaagtttgagaaattgccacagctaagaagaatctaaacagaaatgacagataaatgtaacatggtatcctggatagaatccttgacaggaaatgcacattaggtaaaaaccaagcaaatctcgataaagtacaaacgagttaataatg

SEQ ID NO: 627593 - DNA, 497 bp, Homo sapiens
atcaatgactattatgttgttctgtatctgctttaggctagaatacatggatctgggaaccaacagatggaattagaagtggtgttgctttccatcaccccagttttctctagggcatttgtaatttctgttaccacagttatagtctccgtgagtctaaagatcttggttctcagaatggtagtgctttccactagaggatacagtagagtcctattacagtttaagctagttctttcatatggttattttggtcttctcatgtcaaggggccggcaatcaagtgaaggagtcaccatttcagtgggtggtcagctcagatcagcaggaggaggcagggctgctgctgtacaatggggatggggtggaaagtgcttgagctcaggtgacctactaaaacatctcttggtgctctgttgtccagttttaaygttaaacggaaaggtacagtatccattatctgagaaggacataataactactgggactcagacccc

SEQ ID NO: 627594 - DNA, 616 bp, Homo sapiens
taaatataatctgtgtcaaaaaaacctgatttctataaaatattataaatgagtgatgatctatcaagtttttttcatttctatacatggagacattaaaaagtacttatatcagtatataaaaatattttccatcatattattttgtataatgctattttttgtttttattttccataaggtgatacaaaatcacaaagattatatttgtactttaatagcatttttttaaaaaatcatcctcggatgatgctaatttggggcatactcaaagactctaaatagtaaaaaaaaaaaaattatctaaaaaaggtataaaagggctatgaaraccctcaaaaagacagaattctatcttatgcccaagggctatagaaaaggcataattagtttcaggatttcgtaagtttgcctttcttagtcaataaaaattatgactgcatttgagttttctgacattttaactatgtaagaaattacaaaaacgttcttgaaactctgcagtacaattaagaaggtttcagagggaactagggacaactacaaagagaagcagcagaaaagcctagaaggtatttttataatttcatctcttaactagagtgtttactggtga

SEQ ID NO: 627595 - DNA, 616 bp, Homo sapiens
taaatataatctgtgtcaaaaaaacctgatttctataaaatattataaatgagtgatgatctatcaagtttttttcatttctatacatggagacattaaaaagtacttatatcagtatataaaaatattttccatcatattattttgtataatgctattttttgtttttattttccataaggtgatacaaaatcacaaagattatatttgtactttaatagcatttttttaaaaaatcatcctcggatgatgctaatttggggcatactcaaagactctaaatagtaaaaaaaaaaaaattatctaaaaaaggtataaaagggctatgaagaccctcaaaaagacagaattctatcttakgcccaagggctatagaaaaggcataattagtttcaggatttcgtaagtttgcctttcttagtcaataaaaattatgactgcatttgagttttctgacattttaactatgtaagaaattacaaaaacgttcttgaaactctgcagtacaattaagaaggtttcagagggaactagggacaactacaaagagaagcagcagaaaagcctagaaggtatttttataatttcatctcttaactagagtgtttactggtga

SEQ ID NO: 627596 - DNA, 581 bp, Homo sapiens
ccaaaccagaaagagggtcctcaccaggcccaaaaccagctggcaccgtgatcattaacatttagtcttcagaactgtgagaaaatgaatttctattgtttaagccaccaagtcggtggcattttgttatggtggcccaagctgacaaatacaccatgtcacactatttccagggcacttaatctatgacacgcactraaatattccagaggcaggcacctctatctgtcctgagctctaaggaggatgttgggtcgtagagtttcagaaatagttctggactgaagagttctggcaataattttaaaggaagagacttttaaaggtatattcgagactctatttaaagaggaaagaatgacctataaattgaaaaaaaaaaaacaaaacgctttcctcagcaaattttttaatctcaactattttaaagctaacacagtaagattttaacagaacgattttggcaacacagaacatgtggattacaattacttatttaagtgcaacaagatgctagagacaggtaaatatacactttattattgaatctatctttatcaagttccttgatgtgtatttag

SEQ ID NO: 627597 - DNA, 601 bp, Homo sapiens
aaaccgtctgtgagatttaatcatatagtctctagaatcaatttgatgaaattatcctmtcatcatcattactgtggttggatgaacaactactttcaggattagaggaagggtgggaataaacaaaaatctaagaataattgcttttttagaaaccccaaaagaacaggtgccatttaattggactgtactaggcatgtcaaggtgcagattcagagctgacatagtgtcaagaattatagaaacagttttctttggccaatgatactaggttccctgtttaaaaaatttttcttcctttgaagtggcacccatggtaaaacaatatcctgatctaattgtttacctatggctaaatgaaattttgccagaattttagaataatttctccccttgaaaatcaatcacttcctactaaagttaatgtctaacccaatagattagaacattgtctataagccaagagaaattagtttttcattatatgtggacaaattaatctcattgaaattaattgcaaatagactgtattaatgagagctgtgatttttaactgctctaaaaaaagcaaaattttaatactgattccgctgcttatgaa

SEQ ID NO: 627598 - DNA, 601 bp, Homo sapiens
aaaccgtctgtgagatttaatcatatagtctctagaatcaatttgatgaaattatcctatcatcatcattactgtggttggatgaacaactactttcaggattagaggaagggtgggaataaacaaaaatctaagaataattgcttttttagaaaccccaaaagaacaggtgccatttaattggactgtactaggcatgtcaaggtgcagattcagagctgacatagtgtcaagaattatagaaacagttttctttggccaatgatactaggttccctgtttaaaaaatttttcttcctttgaagtggcacccatggtaaaacaatatcctgatctaattgtttacctatggctaaatgaaattttgccagaattttagaataatttctccccttgaaaatcaatcacttcctactaaagttaatgtctaacccaatagattagaacattgtctataagccaagagaaattagtttttcattatatgtggacaaatyaatctcattgaaattaattgcaaatagactgtattaatgagagctgtgatttttaactgctctaaaaaaagcaaaattttaatactgattccgctgcttatgaa

SEQ ID NO: 627599 - DNA, 579 bp, Homo sapiens
atgatttgggaacattatcttatttaatcatcccaaacactccatgtaacaataaaagaaaatgagggtaagtgaggttaaaccaattgcctatagtgttattgttatcaggtggcaaagctgaaattgtatcatcatttcatttgacagccaaggctatgattttaactactactctctattacctctctcactgtaattcatcattttcagtcgcttcctgaggacacctatttatgtctcaaatgtgcctcaaacttgtctcatctctttattatcctcctacttcagatttttacttctcatttctaaacagwccaatttaagactaattttccttcaactcatatgtaaattaaaaggaaaattccttgcttttcaggaaggcaacacttttttatcttcatttttattctcttaagatactgcttagtttaaagggtacatatgcatgtttgttatttaggtaaactgcgagttgtggaggtttggctacagaatattttgtcattcacataataagcatagtacccaacaggtagttttttgatctcagtctcctttcaccctcccacctca

SEQ ID NO: 627600 - DNA, 450 bp, Homo sapiens
atcaacctcccatgtttctgagtctctgatgtctgttattccactctctatgtccatatgtacacattatttagctccaatttataggtaagaatacctggtatttgactttctgtttctaagttatctgactaaagataatggccttcagttccattcatgttgctgcagamgacatgatttcatatttttatggctgagtagtattccatggggtgtgtgtgtgtgcatgtgtgtgtctttgtgtctattacgtttcctttttttaatcattcattgatgaacacttaggttgattccatgtatttgctatctttaatactgctgcaataaatatatgagtgcagatatcttttggatataatgatttcttttcccttgggtatatattcattagtgggattgctggattgaatggtagttctgtttttagttctttgagaaatttcc

SEQ ID NO: 627601 - DNA, 450 bp, Homo sapiens
atcaacctcccatgtttctgagtctctgatgtctgttattccactctctatgtccatatgtacacattatttagctccaatttataggtaagaatacctggtatttgactttctgtttctaagttatctgactaaagataatggccttcagttccattcatgttgctgcagaagacatgatttcatatttttatggctgagtagtattccatggggtgtgtgtgtgtgcatgtgtgtgtctttgtgtctattacgtttcctttttttaatcattcattgatgaacacttaggttgattccatgtatttkctatctttaatactgctgcaataaatatatgagtgcagatatcttttggatataatgatttcttttcccttgggtatatattcattagtgggattgctggattgaatggtagttctgtttttagttctttgagaaatttcc

SEQ ID NO: 627602 - DNA, 462 bp, Homo sapiens
ttgtgagccttagaagattgaaaatgtgccttggagttgaatgctttgtgtgacaagatgtagagtttatgatgcagaaagggcacaagccacagttgaataaaagctgtatcatactgtattgaaaatgcagtaataggacattcattcgtgcaactaagatgtagatgcctctattccaggcgtggggctaggtattaacaagtaccagttagcatctggtcaacagtacatacaatgccacatctaccatttgagcacagataatttcwtataaagaattgtaaaacaggtattaatgaacagacagaaaaacaatggagcacttagacctcatgcagggagcaataggaagcagttagtactcctagggttgaggaacaaagagctgaagttgaaattactgaagcccggaagtttggaggtgggacgctggaattgatttgacctctgaggaggggt

SEQ ID NO: 627603 - DNA, 556 bp, Homo sapiens
tatcattctcattttacaattgagagaacagagacccagagkttaaaatacacagttgcgagaccagagccatgattgaaacccaggaaatttggctctagcatttatgtgcttacccatacgtaatattgtttttcagatacctattttttaggctctatgccaatttttctcatttattatttatttcctgacaaataagacaatatgatcaaacaatataggtaatattagcatccccactttgcagatggagaaatggatgaacagagaggtgaagttatattcccgagcttacaggattagtaaatgaggaacaccaagatggatccctgtgtctaacaaatattgaatcagaatttctagtggtgggtctttgggaattggcattttattaagcattctgagcaatttttgcagacactaacatttgagaatcactgccataggggccaagatttttcaaatttagcattggtgctaattcgtatactttatgttaggatagcactacttatatgtgtagagcacttttaatcaattgattaattcaaaa

SEQ ID NO: 627604 - DNA, 556 bp, Homo sapiens
tatcattctcattttacaattgagagaacagagacccagaggttaaaatacacagttgcgagaccagagccatgattgaaacccaggaaatttggctctagcatttatgtgcttacccatacgtaatattgtttttcagatacctattttttaggctctatgccaatttttctcatttattatttatttcctgacaaataagacaatatgatcaaacaatataggtaatattagcatccccactttgcagatggagaaatggatgaacagagaggtgaagttatattcccgagcttacaggattagtaaatgaggaacaccaagatggatccctgtgtctaacaaatattgaatcagaatttctagtggygggtctttgggaattggcattttattaagcattctgagcaatttttgcagacactaacatttgagaatcactgccataggggccaagatttttcaaatttagcattggtgctaattcgtatactttatgttaggatagcactacttatatgtgtagagcacttttaatcaattgattaattcaaaa

SEQ ID NO: 627605 - DNA, 556 bp, Homo sapiens
tatcattctcattttacaattgagagaacagagacccagaggttaaaatacacagttgcgagaccagagccatgattgaaacccaggaaatttggctctagcatttatgtgcttacccatacgtaatattgtttttcagatacctattttttaggctctatgccaatttttctcatttattatttatttcctgacaaataagacaatatgatcaaacaatataggtaatattagcatccccactttgcagatggagaaatggatgaacagagaggtgaagttatattcccgagcttacaggattagtaaatgaggaacaccaagatggatccctgtgtctaacaaatattgaatcagaatttctagtggtgggtctttgggaattggcattttattaagcattctgarcaatttttgcagacactaacatttgagaatcactgccataggggccaagatttttcaaatttagcattggtgctaattcgtatactttatgttaggatagcactacttatatgtgtagagcacttttaatcaattgattaattcaaaa

SEQ ID NO: 627606 - DNA, 556 bp, Homo sapiens
tatcattctcattttacaattgagagaacagagacccagaggttaaaatacacagttgcgagaccagagccatgattgaaacccaggaaatttggctctagcatttatgtgcttacccatacgtaatattgtttttcagatacctattttttaggctctatgccaatttttctcatttattatttatttcctgacaaataagacaatatgatcaaacaatataggtaatattagcatccccactttgcagatggagaaatggatgaacagagaggtgaagttatattcccgagcttacaggattagtaaatgaggaacaccaagatggatccctgtgtctaacaaatattgaatcagaatttctagtggtgggtctttgggaattggcattttattaagcattctgagcaatttttgcagacactaacatttgagaatcactgccataggggccaagatttttcaaatttagmattggtgctaattcgtatactttatgttaggatagcactacttatatgtgtagagcacttttaatcaattgattaattcaaaa

SEQ ID NO: 627607 - DNA, 541 bp, Homo sapiens
gtctttgggaattggcattttattaagcattctgagcaatttttgcagacactaacatttgagaatcactgccataggggccaagatttttcaaatttagcattggtgctaattcgtatactttatgttaggatagcactacttatatgtgtagagcacttttaatcaattgattaattcaaaaacttttgaatgaacatctgccatctgtcaagtgcttagctaaactcctgagctagaaagttgaattagaaatggttcttgctctcaaggttattagaaaatagtaggaaaagaagacagaatgatacgtartatagtatagtatagaaaatattataatagagatttgattaaaatgccaggtgataagatagaaggaaatatctaattcttccaggatgagtccaggaacatgcacgagaagatcactatttaactggatcttaaatttgtaagaaattagcaagtgaataaagggctttctagggagagtggaaagcaagtgcaaaacgatgggaatatgaaagaatgtagcatg

SEQ ID NO: 627608 - DNA, 425 bp, Homo sapiens
ggataactagtaaagaaccacaccccagaggttgtaatctcgagtattaaaaggccttaaaaaagaacaatggggaaaagtactgctctggtacttgctaagaatgacaattttcaatttattctgtattcttccttttagagaaagatacaatgtatgtaggagcagattagagmttgcttaacacaattgcaccagacaaatgtctgcaacacactacaaacatcacatcagcttgttcttttatcatggaaatgtaacagttattcttctcaaactggagaataagtttgctaggattggattctaaatatgtttctgttccagaaataaggacctctgtaaaatgatactagcaaaagtttcccacactctcgttctaggcttgtgctgtttataccttgttaatatgtttcttagcagtt

SEQ ID NO: 627609 - DNA, 461 bp, Homo sapiens
tctgtatggtacaaagaccaacacaaattagttacattgtaagtagtagtatggagttagactaaagatttattacttttttcagagccagctttaggggcaaacaatctgtgcagtcatgcaaggttagaatggccccatccttggttatactttttctgatgtggtttggctgtgtccccacctaaatctcatcttgaattccaacatcttgtagaagggacccggtgggaggttactgaatcatggggcaggtctttcctgtgctgttcttgtgatagtgaataaggctcatgagatctgatggttgtataattaggagtttccctgaacaagctctctctttttgcctgctgccatccgcgtaagatgtgacttgctcctccttgccttccaccatgattgtgaggccattttaacaatatcrattctttctatccatgaccataggatgtatttcc

SEQ ID NO: 627610 - DNA, 605 bp, Homo sapiens
aggtgagtttggtccaggtttcggttctgctctaacaagatagcacttatttcaatgcctcaccattgctgtgttctcctcctccagcacccagagaggctctctgtaccacaccccaatgtagcgggtaggagaggggttgcattggtgattcaggactgttttgtctatctcttcagtgcctccttcrtcaatatgaagttaaaaccaggtgctatgagtgctcacctgatttttcttaggaagatgttttctctgtgtggatagttgttaatttggtgtcctttggtggggacaattggtggaggcttctgttccttcatcttgctccacctctttcactgtgctttatttttaaagcacatctctttttaaaatttccagctcacttttcatcactgtgagctctgtcacctcacagtcaaaatggttcccaaaaatacaggttgcgtctatttgcaatttgatacctcatcagtgtagtcacacaacgtccatcttgtgatcagctgcttcaacaatctgttgtcctaggtgcctattcttgaaagcaaaagaaaggaatggaatcaaaacagcaaaattggaacagggatatatatata

SEQ ID NO: 627611 - DNA, 426 bp, Homo sapiens
taatatgttcaataaggcaagaaaacattttttaaaaagtctacattggagaaaaagtatagttgtcttcatttgcaaatgatataattatctccatagaaaattgtatggcatgtgaaaaaaactatgggaatgaataaatgagtttagtacggttgcaggatataagatcaattatacaaaatcaattgtattttagaatattagcacgaacattcaggaattgccatttaaaaaatactgtttgcagtactatcaaaaactgtgtgtcgagcattgtggtgtgtacctgtagccccagctacttgggaggctgaggcaggaggaccacctgaacccaggtttgagattagcttgggcaacatagatggatccccttctcaaaaaacaaaacaaaaacaamcagacaaaaaaagaattggaaat

SEQ ID NO: 627612 - DNA, 586 bp, Homo sapiens
atagttatgacgttttatgtatagcctaggtattagatgtattttartataaccaatataacattattttgaccatatctagtgtaggaaatttatctttgagtttagatttgatttttgccaacaattgcaaattattcagagctaacttttgtaaggttgggcatctgtctgaggaatgttttatgtcaaaaggtgatataactataacgagagcacatttcttgtgtgatatataaacttaccctaacagtaatttcaaaaaagaacaattctaacatgttttgtgcagtatcagactaaatttgaatctgcgttcagagcctcatgaagagagtagtttgaaagacagcattctttgtgtactaataagctgatatgtgtacaaaaactttagaatctttaagaagtaattataataattattaattttatccaactaatatataatgactgactactccaaaggatcatactagtaaccataaggaggcaagcaatactaattagtaatagtatcaatcttggatgaaaacaatatatttgaagaatagtttttagtggttgaatattaagaggtatatat

SEQ ID NO: 627613 - DNA, 593 bp, Homo sapiens
acaatcttggagggacttgattacaaaggtgaggacttcttgtctattttattaggtatatatggaagacaatgtgagccttattgtgcaaagaaaggatgtgttaacagctgagttttatttaagaatattaggctgggtgcggaggctcatgcctataatcctagcattttgggaggccgaggcggatggattgcctgacctcaggagttygagaccagcctgggcaacacggtgaaaccctgtctctatgaaaaatacaaaacattagcctggcatggcagcatgcacctgtaatcccagctactcaggaggctgagacaggagaatcacttgaacctgggaggcggaggttgcagtgagatgagatcgcaccattgcactgcagcctggggggcaagagtgagactctgtctcaaaaaaaaaaaaaaaaaaaaaagcttaatatggcagttgggtatagactggatgaaagcatgggagcaataaatcaagaagaaatattagacagctgagctatgatgacagctttgaggatagggctaaagggataataaatccagagagagaaaatagagagaaacagaaggagc

SEQ ID NO: 627614 - DNA, 437 bp, Homo sapiens
attatatagcagagaaataagattttgattgaccacctgaaaaacaaataaagatattgcaaacatttcaaaattttttwaaaaaaataaacctctgattgaattgtttggttagggtgtaggagatttgatgatcatgacgagagagaaaaggattttggtggaaagcttccatgttgaagtggaaagagtcagctacagtgagtgtttatgctttactcatatatgtaatgaggattcagaataatgcctggaatatggctgtgacttaacacatgttgcttgaatgaatgcctgttagattaagagggtgttcacaggactgcatattgcattcttctgaccctgaatatccctgttattaccacagtcttaacaatttgggcactctctttttggactttctggcttacaatctcttctgattctattttgct

SEQ ID NO: 627615 - DNA, 598 bp, Homo sapiens
ttgctatgttattcttccaaaaagctctatactcctagtctagtagattttctattgccttctatacattgccatctttttaacttattccacttgaaacagtgcctcatacagttttctccttttatctaatcacttcaaagaasagcttaactgcattgtcttattaaaaccttcctagtcatctcaacttgccttagaaacatttctctgaagtctaagctccttactgcctttagtactctttgtggtcacttttatacacatatgtgttctaccttcaaaaaacttaactacttatggaacacaattctcaaagcagttgactgctttaggaacttgcaaaagctttttgtatagtagatatacaaaaaaggttcataatgatgatagatactaaaataatggtgccttttattaaaaaaaagttaaaactggtttgttttctttgtgagcattttcagtcagttttagtatgaaattcacttgaattcattgaattacactatgttgacaaccaatcaaaatgtatcagatgagttgactttggaaattctcatactgtaaatgcaccaggttcattgtctggtgcatgcac

SEQ ID NO: 627616 - DNA, 598 bp, Homo sapiens
ttgctatgttattcttccaaaaagctctatactcctagtctagtagattttctattgccttctatacattgccatctttttaacttattccacttgaaacagtgcctcatacagttttctccttttatctaatcacttcaaagaacagcttaactgcattgtcttattaaaaccttcctagtcatctcaacttgccttagaaacatttctctgaagtctaagctccttactgcctttagtactctttgtggtcacttttatacacatatgtgttctaccttcaaaaaacttaactacttatggaacacaattctcaaagcagttgactgctttaggaacttgcaaaagctttttgtatagtagatatacaaaaaaggttcataatgatgatagatactaaaataatggtgccttttattaaaaaaaagttraaactggtttgttttctttgtgagcattttcagtcagttttagtatgaaattcacttgaattcattgaattacactatgttgacaaccaatcaaaatgtatcagatgagttgactttggaaattctcatactgtaaatgcaccaggttcattgtctggtgcatgcac

SEQ ID NO: 627617 - DNA, 624 bp, Homo sapiens
tcattgaattacactatgttgacaaccaatcaaaatgtatcagatgagttgactttggaaattctcatactgtaaatgcaccaggttcattgtctggtgcatgcacgacaatacaccaagatacttgcagcaaagaggtttaatcataaggcagccaaatgaggagatggtaggaaacctcaaatccaccttttcgagtagtttggggatagagattttatggggtttggatgagtagtgggctgaggtgcrgggatcatttattattggaagagtacagggtgaaatcatagagtgaggagatgaagaaactggttcatttcctctgtgagggtatcttgttggtatcagctattccactggaacttaggatctgaaaaacatcttaagcaatccttcaacaaaagccttataacatgagaggttctatctataggaacaatggggatgcaaatgttcagtacctagtgtgtgtgatttttggttaccaagcagcggcaaggaagtgggttaaggtgcaacctaattaatgcttaactataactttatttctgtccagaacccagcatgtaattcttattgactctgtggggacagtttcaatattgaaagctcactacatag

SEQ ID NO: 627618 - DNA, 624 bp, Homo sapiens
tcattgaattacactatgttgacaaccaatcaaaatgtatcagatgagttgactttggaaattctcatactgtaaatgcaccaggttcattgtctggtgcatgcacgacaatacaccaagatacttgcagcaaagaggtttaatcataaggcagccaaatgaggagatggtaggaaacctcaaatccaccttttcgagtagtttggggatagagattttatggggtttggatgagtagtgggctgaggtgcggggatcatttattattggaagagtacagggtgaaatcatagagtgaggagatgaagaaactggttcatttcctctgtgagggtatcttgttggtatcagctattccactggaacttaggatctgaaaaacatcttaagcaatccttcaacaaaagccttataacrtgagaggttctatctataggaacaatggggatgcaaatgttcagtacctagtgtgtgtgatttttggttaccaagcagcggcaaggaagtgggttaaggtgcaacctaattaatgcttaactataactttatttctgtccagaacccagcatgtaattcttattgactctgtggggacagtttcaatattgaaagctcactacatag

SEQ ID NO: 627619 - DNA, 597 bp, Homo sapiens
ctcactacataggttcattcaattgatgaaaactaatttcacattaaaatacttatatttacattttttaggtatattagggcatactccagttttatcttcatttacataaaatgagatgtgcctttactgtaaattgatattttccctaatgtatgccgatagtggcctgactgatagtttaactaagtagacaaagggcaatatttttgatttattggagactaacaactgtcaaaatatgagtaataaactagactggcaatcagaaagcaagcatattatgaaagcatagtgaggttttacttaataccatggaatactttatttcctgctacaagatagttatatcaggacakgttaatatgtatttatctatcttgctcttataccaaaaaatattaaggtggtgactgataaaaacacaacgtgtgtatgaatagaaagtaaatgtaacttgcatggattctggaaccagactacataggctgaaatcccattgcactatggcttatttggaaagttacttaacatctctgtagctcagttcactcatctgaaaaataggggacctgaagagtacctactcataaaatt

SEQ ID NO: 627620 - DNA, 615 bp, Homo sapiens
atttataaatagaaaggaaagaagacttaggttgttcttctgttaatatttaaaaattcacgtagaaactaaaagttaattaaatattaatgatgatatttaagagcaaatttaatagaaaattgccaaaaacataattacacgtcttccccaatattcaaatgtgtttttctttgtcaactcttctagaaggtcagattagtcaggagttctgtcttgagcacttcctcaggrctcataattgtcaaaatgtcccaaaagggatgactctgtctttgctacatgttggcaagacaagccaccttagcttgtgagatttccaacctttctgcaattagaactcctgcttcttctacacttgaaagaggcagacaagtccaagagcagcgaaattcaataaaattatgtgacgagtagttgcaagtttccaatcaatggctctgtttttccccccaaagagaaagaggtgtttttctgacactgatgttaggggttatttatttattacaaattcggggtaacatgtgtagctttgttacacgggtatgttgcatagtgctggggtttggacttctagtgaacccatcactcaaatagtgaagatagtatttgata

SEQ ID NO: 627621 - DNA, 615 bp, Homo sapiens
atttataaatagaaaggaaagaagacttaggttgttcttctgttaatatttaaaaattcacgtagaaactaaaagttaattaaatattaatgatgatatttaagagcaaatttaatagaaaattgccaaaaacataattacacgtcttccccaatattcaaatgtgtttttctttgtcaactcttctagaaggtcagattagtcaggagttctgtcttgagcacttcctcaggactcataattgtcaaaatgtcccaaaagggatgactctgtctttgctacatgttggcaagacaagccaccttagcttgtgagatttccaacctttctgcaattagaactcctgcttcttctacacttgaaagaggcagacaagtccaagagcagcgaaattcaataaaattatgtgacgagtagttgcaagtttccaatcaatggctctgtttttycccccaaagagaaagaggtgtttttctgacactgatgttaggggttatttatttattacaaattcggggtaacatgtgtagctttgttacacgggtatgttgcatagtgctggggtttggacttctagtgaacccatcactcaaatagtgaagatagtatttgata

SEQ ID NO: 627622 - DNA, 615 bp, Homo sapiens
atttataaatagaaaggaaagaagacttaggttgttcttctgttaatatttaaaaattcacgtagaaactaaaagttaattaaatattaatgatgatatttaagagcaaatttaatagaaaattgccaaaaacataattacacgtcttccccaatattcaaatgtgtttttctttgtcaactcttctagaaggtcagattagtcaggagttctgtcttgagcacttcctcaggactcataattgtcaaaatgtcccaaaagggatgactctgtctttgctacatgttggcaagacaagccaccttagcttgtgagatttccaacctttctgcaattagaactcctgcttcttctacacttgaaagaggcagacaagtccaagagcagcgaaattcaataaaattatgtgacgagtagttgcaagtttccaatcaatggctctgtttttccccccaaagagaaagaggtgtttttctgacactgatgttaggggttatttatttattacaaattcggggtwacatgtgtagctttgttacacgggtatgttgcatagtgctggggtttggacttctagtgaacccatcactcaaatagtgaagatagtatttgata

SEQ ID NO: 627623 - DNA, 610 bp, Homo sapiens
tgttagcattaatttgtttcagcttgctttttgtaataataagagtgatgctaaatttcttctgaaacatttggaggtmatttggattttttattgtcctatgcacattcaagtctattttctcatgcctaagtgacagtgctagaagtaggcagcagcatcagatgcagtccctggggtgtcctgagtaaaagtcttcctacctaggatgtattggcttagtctctggttttagtaattccattgatggaccatggctctttcagtgattggtttggcctttcaaaactgatggtaacactattattattcaactatttaatactaccattttaataagggaagcatttcatattctccactttgataactcatctgcaattgtacagtcaccttttgagactacttaagatctacttagaataagaaaaaaaatgtcctttttgtggccagcctcagatacagaggttcaatcctagggctcatgaccatctctcattttcttacaaagcgctgctttgccctgcttcctcttctttgtgtttggtatctgtgatagcttcctggcagagaaatcctggtctgatggttaattttatgtgtcaacttg

SEQ ID NO: 627624 - DNA, 610 bp, Homo sapiens
tgttagcattaatttgtttcagcttgctttttgtaataataagagtgatgctaaatttcttctgaaacatttggaggtaatttggattttttattgtcctatgcacattcaagtctattttctcatgsctaagtgacagtgctagaagtaggcagcagcatcagatgcagtccctggggtgtcctgagtaaaagtcttcctacctaggatgtattggcttagtctctggttttagtaattccattgatggaccatggctctttcagtgattggtttggcctttcaaaactgatggtaacactattattattcaactatttaatactaccattttaataagggaagcatttcatattctccactttgataactcatctgcaattgtacagtcaccttttgagactacttaagatctacttagaataagaaaaaaaatgtcctttttgtggccagcctcagatacagaggttcaatcctagggctcatgaccatctctcattttcttacaaagcgctgctttgccctgcttcctcttctttgtgtttggtatctgtgatagcttcctggcagagaaatcctggtctgatggttaattttatgtgtcaacttg

SEQ ID NO: 627625 - DNA, 613 bp, Homo sapiens
gatagatgttagcattaatttgtttcagcttgctttttgtaataataagagtgatgctaaatttcttctgaaacatttggaggtaatttggattttttattgtcctatgcacattcaagtctattttctcatgcctaagtgacagtgctagaagtaggcagcagcatcagatgcagtccctggggtgtcctgagtaaaagtcttcctacctaggatgtattggcttagtctctggttttagtaattccattgatggaccatggctctttcagtgattggtttggcctttcaaaactgatggtaacactattattattcaactatttaatactaccattttaataagggaagcatttcatattctccactttgataactcatctgcaattgtacagtcaccttttgagactacttaagatctacttagaataagaaaaaaaatgtcctttttgtggccagcctcagatacagaggttcartcctagggctcatgaccatctctcattttcttacaaagcgctgctttgccctgcttcctcttctttgtgtttggtatctgtgatagcttcctggcagagaaatcctggtctgatggttaattttatgtgtcaac

SEQ ID NO: 627626 - DNA, 635 bp, Homo sapiens
ggtaattttgttaggagacatgcctatagtaaattagaagataatgaaaagaggtaracagacaagttcaaagtttgttatcacttactgctcatttgactttgggagaaccactgtgtggatttcctcatgagtaaaatcaagtatgccgtgccctcttttataaggattttgtaagaaattaagttaaaaaagtatgaagcgcaatgtcacaaaacttggcacgcagtaaataataatagatcataatgtagttgcttttattgtttaaaatagcatgcatttctctgcaacagtaaactgaatacaattaatataaatttgctttttttggtgaaacctctaaaattattagacagttttgagctagttgcttccattggtggttcagaggagtgagttggggagagagagtatggctcccctgaaacctccaaaatacacatatcatctaagtagaaacagcagacagagactgttccctgccacaatggagtaactggaaccagacttactattccactatgaacaagtagaaaactacagaatatatgtggcaaccatttttagacatcggacaaccagcaggtcaggactgtgatccctaagagcagggaagcacggagaacttggag

SEQ ID NO: 627627 - DNA, 635 bp, Homo sapiens
ggtaattttgttaggagacatgcctatagtaaattagaagataatgaaaagaggtagacagacaagttcaaagtttgttatcacttactgctcatttgactttgggagaaccactgtgtggatttcctcatgagtaaaatcaagtatgccgtgccctctyttataaggattttgtaagaaattaagttaaaaaagtatgaagcgcaatgtcacaaaacttggcacgcagtaaataataatagatcataatgtagttgcttttattgtttaaaatagcatgcatttctctgcaacagtaaactgaatacaattaatataaatttgctttttttggtgaaacctctaaaattattagacagttttgagctagttgcttccattggtggttcagaggagtgagttggggagagagagtatggctcccctgaaacctccaaaatacacatatcatctaagtagaaacagcagacagagactgttccctgccacaatggagtaactggaaccagacttactattccactatgaacaagtagaaaactacagaatatatgtggcaaccatttttagacatcggacaaccagcaggtcaggactgtgatccctaagagcagggaagcacggagaacttggag

SEQ ID NO: 627628 - DNA, 635 bp, Homo sapiens
ggtaattttgttaggagacatgcctatagtaaattagaagataatgaaaagaggtagacagacaagttcaaagtttgttatcacttactgctcatttgactttgggagaaccactgtgtggatttcctcatgagtaaaatcaagtatgccgtgccctcttttataaggattttgtaagaaattaagttaaaaaagtatgaagcgcaatgtcacaaaacttggcacgcartaaataataatagatcataatgtagttgcttttattgtttaaaatagcatgcatttctctgcaacagtaaactgaatacaattaatataaatttgctttttttggtgaaacctctaaaattattagacagttttgagctagttgcttccattggtggttcagaggagtgagttggggagagagagtatggctcccctgaaacctccaaaatacacatatcatctaagtagaaacagcagacagagactgttccctgccacaatggagtaactggaaccagacttactattccactatgaacaagtagaaaactacagaatatatgtggcaaccatttttagacatcggacaaccagcaggtcaggactgtgatccctaagagcagggaagcacggagaacttggag

SEQ ID NO: 627629 - DNA, 569 bp, Homo sapiens
actgttccctgccacaatggagtaactggaaccagacttactattccactatgaacaagtagaaaactacagaatatatgtggcaaccatttttagacatcggacaaccagcaggtcaggactgtgatccctaagagcagggaagcacggagaacttggaggcactttcccagtggggatgcagggaggaaattctgaacagagtaagcgttgcaggacttttccttagttcagctgaagacagggttcttgtcccatggtcrtgaaagtttaggctcgcagacagtttgaagggtgagtaaagcagggtttttattgggtgaaaggaaaaaaaaaaaggcagggcagggaaaaggactctcctcaaggccagagtccctgcttgtgcacttcttgccttgctgtttgaatcccaggttccacacaagaagaggaggggtcaggctcctcccctggtacaaagggcatgatcttctgtgtctccactccagtacacaggcaggttgcagttttgcctgggagcccctcccatctcgctgtctcacaagaggcctcactgaatcaaagaa

SEQ ID NO: 627630 - DNA, 584 bp, Homo sapiens
tgtctccactccagtacacaggcaggttgcagttttgcctgggagcccctcccatctsgctgtctcacaagaggcctcactgaatcaaagaaacagagatcacccaggcgccctggctcatgcctgtaatcccagcactttgggaggccgaagcgggaggatcaccttaagtcgggagttcgagaccagcctgaccaacatggagaaaccccatctctactaaaaatacaaaattagccgggcatggtggtgcatgcctgtaatcctactcgggaggctgaggcaggagaattgcttgaacccgggaggccgaggttgtggtgagctgagatcgtgccgttgcactccagcctgggcaacaagagcaaaactccgtctaaaaataaataaataaataaataaataaataaataaataaatagaaatagagatcaccattcagggaggcaaagtgggatggaatttgtagaacagtactaaagatgacagaactattcaagaaaatgcaccagaaatttgttttgatctcttaggtctgtttagcattcaataaacaattcctggacatatgacattttaaaagt

SEQ ID NO: 627631 - DNA, 584 bp, Homo sapiens
tgtctccactccagtacacaggcaggttgcagttttgcctgggagcccctcccatctcgctgtctcacaagaggcctcactgaatcaaagaaacagagatcacccaggcgccctggctcatgcctgtaatcccagcactttgggaggccgaagcgggaggatcaccttaagtcgggagttcgagaccagcctgaccaacatggagaaaccccatctctactaaaaatacaaaattagccgggcatggtggtgcatgcctgtaatcctactcgggaggctgaggcaggagaattgcttgaacccgggaggccgaggttgtggtgagctgagatcgtgccgttgcactccagcctgggcaacaagagcaaaactccrtctaaaaataaataaataaataaataaataaataaataaataaatagaaatagagatcaccattcagggaggcaaagtgggatggaatttgtagaacagtactaaagatgacagaactattcaagaaaatgcaccagaaatttgttttgatctcttaggtctgtttagcattcaataaacaattcctggacatatgacattttaaaagt

SEQ ID NO: 627632 - DNA, 635 bp, Homo sapiens
gtgaatgtggataattatgcacataatattgtaatatttctggaaagaaattaaaacatggcacttgattggatatgaatgataaagatggggctatatattttaatagtcgttgatcaataaacatacaatttggaggttgattacttctatgcttattttggtaaygtttgagcttttttggttacttttgcactagcagctcctccagatattggttaatactccttcctctcattagttaaacaaaatacaattcacctttagtatgagctgtttagaatatttattttacctcaaatacttacacaattttaatagcaggaaaatgttacacatgtagaagttggagggaaaattcagactagaaagttctgttttggaaatatttgtacagaaatatctttcttaggacttttccttaagaaaatatttttgatggaatgattttggagaaaatatttgagagttttgaaaaatcacattctttatttaataataacaatttcataagtctgaaattcaacagactggatttagatctcacattcattacctcacagacacaaaggaacccttggtatgccactacttagtttataaataaatagtcttggggcacttttggattaaaa

SEQ ID NO: 627633 - DNA, 635 bp, Homo sapiens
gtgaatgtggataattatgcacataatattgtaatatttctggaaagaaattaaaacatggcacttgattggatatgaatgataaagatggggctatatattttaatagtcgttgatcaataaacatacaatttggaggttgattacttctatgcttattttggtaacgtttgagcttttttggttacttttgcactagyagctcctccagatattggttaatactccttcctctcattagttaaacaaaatacaattcacctttagtatgagctgtttagaatatttattttacctcaaatacttacacaattttaatagcaggaaaatgttacacatgtagaagttggagggaaaattcagactagaaagttctgttttggaaatatttgtacagaaatatctttcttaggacttttccttaagaaaatatttttgatggaatgattttggagaaaatatttgagagttttgaaaaatcacattctttatttaataataacaatttcataagtctgaaattcaacagactggatttagatctcacattcattacctcacagacacaaaggaacccttggtatgccactacttagtttataaataaatagtcttggggcacttttggattaaaa

SEQ ID NO: 627634 - DNA, 635 bp, Homo sapiens
gtgaatgtggataattatgcacataatattgtaatatttctggaaagaaattaaaacatggcacttgattggatatgaatgataaagatggggctatatattttaatagtcgttgatcaataaacatacaatttggaggttgattacttctatgcttattttggtaacgtttgagcttttttggttacttttgcactagcagctcctccagatattggttaatactccttcctctcattagttaaacaaaatacaattcacctttagtatgagctgtttagaatatttattttacctcaaatacttacacaattttaatagyaggaaaatgttacacatgtagaagttggagggaaaattcagactagaaagttctgttttggaaatatttgtacagaaatatctttcttaggacttttccttaagaaaatatttttgatggaatgattttggagaaaatatttgagagttttgaaaaatcacattctttatttaataataacaatttcataagtctgaaattcaacagactggatttagatctcacattcattacctcacagacacaaaggaacccttggtatgccactacttagtttataaataaatagtcttggggcacttttggattaaaa

SEQ ID NO: 627635 - DNA, 590 bp, Homo sapiens
catggctataaatatatttttatcttaaagatagcctatsttgatattcttggaagacactttagttgaaataaatctattttcttagtaggtttatttgctgtgaggcaaatattttggctattttcgacatgcaaatgcgtgatcactaattgttcacaagattctcatagagccttctgaggtcatgttgatacagtgttactgagagctgtattaaccaaattcaccattaaatatgtaatcctatttatatctctgtccctacaagatctttataaggctataatatgatttttaaattattattattattatttttgagatggagtctcgctctgttgcccaggttggagtgcagtggtgagatcttggctctctgcaacctctgcctcttgggttcaagcaattccctgcctcagcctcctgagtagctgggattacaggtacccgccaccagccccggctaatttttgtatttttagtagagacaaggtttcaccatcttggccaggctggccttgaaatcctgaacttgtgatccacctgccttggcctccgaaagtgctgggattaaaggcgtgagccac

SEQ ID NO: 627636 - DNA, 590 bp, Homo sapiens
catggctataaatatatttttatcttaaagatagcctatgttgatattcttggaagacactttagttgaaataaatctattttcttagtaggtttatttgctgtgaggcaaatattttggctattttcgacatgcaaatgcgtgatcactaattgttcacaagattctcatagagccttctgaggtcatgttgatacagtgttactgagagctgtattaaccaaattcaccattaaatatgtaatcctatttatatctctgtccctacaagatctttataaggctataatatgatttttaaattattattattattatttttgagatgkagtctcgctctgttgcccaggttggagtgcagtggtgagatcttggctctctgcaacctctgcctcttgggttcaagcaattccctgcctcagcctcctgagtagctgggattacaggtacccgccaccagccccggctaatttttgtatttttagtagagacaaggtttcaccatcttggccaggctggccttgaaatcctgaacttgtgatccacctgccttggcctccgaaagtgctgggattaaaggcgtgagccac

SEQ ID NO: 627637 - DNA, 590 bp, Homo sapiens
catggctataaatatatttttatcttaaagatagcctatgttgatattcttggaagacactttagttgaaataaatctattttcttagtaggtttatttgctgtgaggcaaatattttggctattttcgacatgcaaatgcgtgatcactaattgttcacaagattctcatagagccttctgaggtcatgttgatacagtgttactgagagctgtattaaccaaattcaccattaaatatgtaatcctatttatatctctgtccctacaagatctttataaggctataatatgatttttaaattattattattattatttttgagatggagtctcgctctgttgcccaggttggagtgcagtggtgagatcttggctctctgcaacctctgcctcttgggttcaagcaattccctgcctcagcctcctgagtagctgggattacaggtrcccgccaccagccccggctaatttttgtatttttagtagagacaaggtttcaccatcttggccaggctggccttgaaatcctgaacttgtgatccacctgccttggcctccgaaagtgctgggattaaaggcgtgagccac

SEQ ID NO: 627638 - DNA, 573 bp, Homo sapiens
ggcttttctgtccttctgacatccctattgttttattttatgaatatttctttgctttcttgcatgacaagaagaaccaggyacatcttgtatttcccacctctatccctggattcagtcatttctccaaagaaccaaggtttttgtaaaagaaaaatgacatgtagaagccaaggtctggtttgcttatgtatttatttctgttctagattttgtttgtttattgactccttactgtagactttgacttcccatgctgggctaggaagcatagatgccttccccaccccacttggacccaacaccctgtgccaggccatgtccccaaatagattttctattcacactgtgtggataacctccatacaaaccgcattaggtttctgcatatcacatcaggctaccattatgtccaaattgtctttatcttctccgaaaaacatgactttaggattaaatatttctggaagaaaagagaaaggaaagacaagagaataaggaagagaagaaaaatactgaattattcaggaaagataggaaaagagaagagaacaaaagaactttaaaaatgtc

SEQ ID NO: 627639 - DNA, 558 bp, Homo sapiens
ggttggtctcgaactcctggcctcaaacaattcttctatctcggcctctcaaagtgctgagattacaggtataagtgactgcaatcagccaaaatgtaaaattaatgatgacttagtgtgtattcacgtgcttacagttaaaaacyggtcattttttcaaatgtttatcatattcatattcataagcaatatgacatgtcttcaaataccaacacatcaaaaaataacaataaaattgtttatgttaagaagtctggtttaagaaaaatattcactattttattattgtgaggacaagaatccatcaaggtgactccctcgttttatcatgagatatacttttttttccccttgagtgaggtatgtgaagtatatagttttagtattggtagcaggacaaatgttagatagcattctatataacctattatctctgttccttaggcaagatttttaccttctttgtgctccggatttctcacctataaaaagtgaatggtaataaagttatatttctcagtgaattgttataaggattaaatttgtgttcggcagtgc

SEQ ID NO: 627640 - DNA, 640 bp, Homo sapiens
taagtatttgcattgtgatattgagcatttataggaaataatttcatctattaaaaaatcctaggttgattcattttttttatttatataccagttctttccttatataatacagtattttttaatgtttattttttaatgacagagtcttgctctgttgcctgggctgaagtgcagaggtgtgatcacagctcaccacagcctcggactcctgrgctcacatgatcctcacactttagcgagggaccactggtgcaagccaccgtgccaggctaatttttgtattttttgtagagacagggtctcactgtgttgcccaggctggtctcaaactcctgggctcaagtggttctcccgccttgacctctcagtgttgggattacaggcatgagctgccacacttggcctcagtactgttttagtggtttaattcaacatttaatatctccttcactgtgtacttttacaggcagaagaaaaaatgaagaaacaaaaaatgcagttgcattgcttttatttttacctgtgtatttatctccactgatgctctttatttctgcatgtggatttgaattactgtttagtgccctttcttttttcagcctgcctgtgaataaaactggtgttatgggctgaattt

SEQ ID NO: 627641 - DNA, 566 bp, Homo sapiens
atgctctttatttctgcatgtggatttgaattactgtttagtgccctttcttttttcagcctgcctgtgaataaaactggtgttatgggctgaattttgtccccccaaactgactcttgaaatcttaaccccaagcatctctgtaactttatttggaaatgaagtctttaaagaggttatatagtttaaataggaccttttgggtgaaccttaacacaatgtgagtggtgtccttatatgaaaggacatttggatacagacatgtgtgcacatagaagagagacaatgtgaagataaatggagaaggggactatctattatataagccaaggcagaggcctcctaagagatttaccctgccaacaccttgatcaaattctagccttcagaactgtgagaaaatgaatttctgttgtttcagtcacagtctgtggtattttgttatgacrgtcttagcaaactaatgcaactggagaggatgatgacagtttggtctccataaaagaaatataggtgaggagtgttgatagcctgctttcaggcaatactgtgaaagaaagagaact

SEQ ID NO: 627642 - DNA, 517 bp, Homo sapiens
caaatcaggtactagagttgtatagttaagtttaggacaggatttatgaaaataagcaaggtaagaggagataagaatttccaaggctatgtccccagagtaattggacttacctaaatgatattgctctcaagtaggatatgtttttgaaatcataataatgtgttagctcttgcaatacataatcttgtcttaggatatatttaaaatgtacctcacaatacacttcgtatatgctgtgttaagcctctttgatcatgccaagtattactawtttcatgttacaagtttaccccactagttctgttacataggaaacaaacatctcactatattgatagatgtacttactagaaacatttttgagaacttaattactgttcctcttatacataattagccaacaattattttcatttttagctataaaagtaatttttatacacagctttggtttattaaggtaccatataatgcatggtctatgattttgacattttaaaattattctttctct

SEQ ID NO: 627643 - DNA, 413 bp, Homo sapiens
gagaatccctacttggtggaagatagaaagctttgaaaatccctaacgtgagggcagaaggcattgagaagaaaataacacagcaagaaagaagcagatctccmcatccacccccacgatgtagtctatgttgggatcagcctgggacctgaatttaaagccagtttgccatgcgtgacagccactactgatgagagggatagcgtagatggtcctcttactgattctcaggatcttctaagcagtaaatctgccccagtatacattgtgctcagttccaccaaatcatcctctttttaaaaatcaaaaatagtactttgtgtctgaagatagtgtcttgcagtatttttctatttagatttttatggaagttgttaagtttctaaacacctgacctctcaggaatgacaatg

SEQ ID NO: 627644 - DNA, 620 bp, Homo sapiens
ttcccttttcttcacatccatgccaacatctactgttttttgactttttaattaaggccattcttgcaggagtaaggtggtatctcattgtggctttaatttacatttccctgatgattagtgatgttaagaattatttcctatgtttgttggccatttgtatatcttcatttgagaaacgtctattaatgtcctttgcccacttttttatgggattatttgtttttgtcttgctgatttgagttccttgtaaattctggataccaggcctttgtcakatgcatagtttgcaagtatattctcccattctatgggttgtatgtttactctgctgattatttcttttgctgcacagaagctttttagtttaattaagtcccatttgttatttttttgttgcatttgcttttagggccttagtcattaattctttgcctaggccaatgtctagaagagttttttaaatattgtcttctagaacttttatagttttgggtctcatatttaagtctttgatccatcttgagttgaattttgtataaagtgagaggtggggatccaatttcattcttctgtatgtgggttgtcagttttcctggcatcatttattaaatagtgtg

SEQ ID NO: 627645 - DNA, 593 bp, Homo sapiens
tacaatattacaatgtaataataatagaaataaagtgcataataaatataatgagcttgaatcatcccaaaaccatcctaccccaactggtttgtggaaaaattgtcttccataaaactggttcttgggtccaaaaaggttggggactgctgggtaaactatttcttataattattcttaaatttatgtttgatttgaccatgtttctttttcgttttttaatttcttttttccctttaaggatgtgactttatagttaatcacagccatattttgttcttggtgctttcacgtgtgaagactctgtaagagttccttggttacggaagagtctttgtaggatggctttctcatgtgctgattgtggaagcaatgtgctcagtgtgtgagcaagttcrctgtcttttatggggttgtgatggtagaggtatcttaaagcttatatcattcccctgtggcatgcatgtttaaaatttattttctttcagtatcttatttactggtttgatggtttaggcttcaggccagtaggggaggtgtccctgggtaggaatcagttttggctaaagcaggtaagtaaaagcaatacccaa

SEQ ID NO: 627646 - DNA, 593 bp, Homo sapiens
tacaatattacaatgtaataataatagaaataaagtgcataataaatataatgagcttgaatcatcccaaaaccatcctaccccaactggtttgtggaaaaattgtcttccataaaactggttcttgggtccaaaaaggttggggactgctgggtaaactatttcttataattattcttaaatttatgtttgatttgaccatgtttctttttcgttttttaatttcttttttccctttaaggatgtgactttatagttaatcacagccatattttgttcttggtgctttcacgtgtgaagactctgtaagagttccttggttacggaagagtctttgtaggatggctttctcatgtgctgattgtggaagcaatgtgctcagtgtgtgagcaagttcgctgtcttttatggggttgtgatggtagaggtatcttaaagcttatatcattcccctgtggcatgcatgtttaaaatttattttctttcagtatcttatttactggtttgatggtttargcttcaggccagtaggggaggtgtccctgggtaggaatcagttttggctaaagcaggtaagtaaaagcaatacccaa

SEQ ID NO: 627647 - DNA, 528 bp, Homo sapiens
gcttcagctaatcagatcagtcaggcacctcttttcatctgtgggaatgttgatgttccaaataaggtggaattgtgactctgtcgctcatgcaagcctgaacctggagggtgctcctcctgtgtggrtgtagtcaccctgatctgttgcagaaagactgtctatagttgcatccatgccatgctcccatggggaggagctctaactgtgcctgcagtggtggacaagaggtccccttctccaagacccttaaggcacaccaaggctgtctgactgttggattagagctgaagactttccctactgtgcccagcattgcaactgtgcctgtgttgaaagaaacgtcccacaagcagacaggtctggtacttaaggcctgctgtccagattttttttaatctacctgggtgttcccttgttgtggtacacacactcccacttctcctaggagttggaatccctgaaagctagactactgtgagtgttgttgcttctctggatctagctgcccagtgaagttgccacact

SEQ ID NO: 627648 - DNA, 528 bp, Homo sapiens
gcttcagctaatcagatcagtcaggcacctcttttcatctgtgggaatgttgatgttccaaataaggtggaattgtgactctgtcgctcatgcaagcctgaacctggagggtgctcctcctgtgtggatgtagtcaccctgatctgttgcagaaagactgtctatagttgcatccatgccatgctcccatggggaggagctctaactgtgcctgcagtggtggacaagaggtccccttctccaagacccttaaggcacaccaaggctgtctgactgttggattagagctgaagactttccctactgtgcccagcattgcaactktgcctgtgttgaaagaaacgtcccacaagcagacaggtctggtacttaaggcctgctgtccagattttttttaatctacctgggtgttcccttgttgtggtacacacactcccacttctcctaggagttggaatccctgaaagctagactactgtgagtgttgttgcttctctggatctagctgcccagtgaagttgccacact

SEQ ID NO: 627649 - DNA, 448 bp, Homo sapiens
acaagtcttagtgaggatttgaagaaaaagaaacccttgtaagccgttggtgggaatataaattagcatgaacatgatcaaaaccagtatggaggttcctcagaaaattataaatagaactaccatatgatccagtaattccactactgggtacatatctagagaaaatgaaatcagtatattgaagagatatctgcactcccacattttttgcagcattatttttactagtcaagatatggaaacaacctacgtgtttattgacagatgaaagaataaagaaaacgtggtgtgcatacacaatggaatactatttatccttaaaaaagaataagcataatgttttcaaagttcacatgttgtagaatgtatcagtaacttattcatttacccrataatattctattgaatgaatgtgccacattttatttagttattatcaattatt

SEQ ID NO: 627650 - DNA, 448 bp, Homo sapiens
acaagtcttagtgaggatttgaagaaaaagaaacccttgtaagccgttggtgggaatataaattagcatgaacatgatcaaaaccagtatggaggttcctcagaaaattataaatagaactaccatatgatccagtaattccactactgggtacatatctagagaaaatgaaatcagtatattgaagagatatctgcactcccacattttttgcagcattatttttactagtcaagatatggaaacaacctacgtgtttattgacagatgaaagaataaagaaaacgtggtgtgcatacacaatggaatactatttatccttaaaaaagaataagcataatgttttcaaagttcacatgttgtagaatgtatcagtaacttattcatttacccaataatattctattgaatgaatgtgccacatttyatttagttattatcaattatt

SEQ ID NO: 627651 - DNA, 549 bp, Homo sapiens
tcagctgtattctaatgtctgagtttatccctgttacctatctttaagaaacttgcagtgaagtatgggaatattgtcacttcaattcaatctgtgctacattacaggtacagagacatgcagcagagcagaacatggagaactcagtcagactgtaccaggaaaatctttgaaaaataaatactggttaaatattaaagactgacttggagttcatcaagggtagaaaaggaaaaggacattatctctgcttctgtgctttttaaaggtgtgaagaaactccaatatctcatttctgaaaactaattaataaatgacatgatgaaaggagataaatcatctattttattaaagcttccctgtataccacrtcatactctttttggaatgagaaatattacacaattgcactggttttcatgggctattgtcagatatatctctattctgatgaagtattaaagaattttccttattttttttccctagatccatacctgtaaaacacatgaagggatcaagtgaaaaaataggaatacagattaacat

SEQ ID NO: 627652 - DNA, 622 bp, Homo sapiens
cctcatgttgcagtcacaccaatgcaccacaatgtagcagtctctcgttgcccaagatatcattcaaagttctttgtctcatggccaaaaaaattaaggagctcagacaccaagggtgaggttacagcaaaagtttaataagtgaaaaaagaaagctccccactgcagagaggaggcccaaaagagggttgctgtttcacagttaaatacgacgcttttataaaaaagcagtgagggctgggcatctcatttgcataaggcacacatttctggtatctccaccctgtcctcctagtgcgcatgcaggcccttagcttgagttagttgctccatatagctttgttcttcttactgtgcatgttttaggggacagaattttccattgtgggcatgtctgggaaagtctcctgagtagcctttcttgtctatgtggctgttggcatatcttaggcaagacctgccccccaaccatgmcccacaccatgcaagtttccctatctgtgcctgcagtttaatttttcaggctgttttttgtttgaaataattttactgaggacccacactaaccacctgcctgacaggtttcttcctcttctcctactcctatggggaagagagagaa

SEQ ID NO: 627653 - DNA, 598 bp, Homo sapiens
tttcatttttttaatagcattgccattgctttaccccttyaagtcatttacaaagtataaagtataagatatctataacagaaaaatgtagatgcaagttttatttagcaaacacatagagaaaaacatccccctcttcacagactgctttaaagcacttaaagtcaatatttttataatattaagtaagccttcctatatatgcagtggtgtttctgtttttgttttttgagacagggtctctctctgttgcccagactggagggcagtggcaggatttcaggtcactgcagcctcaacctaccaggcccaagtgatcctcccccgtcagcctcctgagtagctggtaccacaggcacatgccactgcacctggtaatttttctatttttctattttttgcagagacagggttgcacatgttgaccaagctggtttcaaactcctgagctcaaacaatccgcccactttggcatctcaaagtgctgagattacaggcctgagccactacacccagccgaagtcataaagaaaaaagtgataaagtcataaagaaaaaagtgataagtcactttttgtaagtcataaagaaaaaagtg

SEQ ID NO: 627654 - DNA, 598 bp, Homo sapiens
tttcatttttttaatagcattgccattgctttaccccttcaastcatttacaaagtataaagtataagatatctataacagaaaaatgtagatgcaagttttatttagcaaacacatagagaaaaacatccccctcttcacagactgctttaaagcacttaaagtcaatatttttataatattaagtaagccttcctatatatgcagtggtgtttctgtttttgttttttgagacagggtctctctctgttgcccagactggagggcagtggcaggatttcaggtcactgcagcctcaacctaccaggcccaagtgatcctcccccgtcagcctcctgagtagctggtaccacaggcacatgccactgcacctggtaatttttctatttttctattttttgcagagacagggttgcacatgttgaccaagctggtttcaaactcctgagctcaaacaatccgcccactttggcatctcaaagtgctgagattacaggcctgagccactacacccagccgaagtcataaagaaaaaagtgataaagtcataaagaaaaaagtgataagtcactttttgtaagtcataaagaaaaaagtg

SEQ ID NO: 627655 - DNA, 598 bp, Homo sapiens
tttcatttttttaatagcattgccattgctttaccccttcaagtcatttacaaagtataaagtataagatatctataacagaaaaatgtagatgcaagttttatttagcaaacacatagagaaaaacatccccctcttcacagactgctttaaagcacttaaagtcaatatttttataatattaagtaagccttcctatatatgcagtggtgtttctgtttttgttttttgagacagggtctctctctgttgcccagactggagggcagtggcaggatttcaggtcactgcagcctcaacctaccaggcccaagtgatcctcccccgtcagcctcctgagtagctggtaccacaggcacatgccactgcacctggtaatttttctatttttctattttttgcagagacagggttgcacatgttgaccaagctggtttcaaactcctgagctcaaacaatccgcccactttggcatctcaaagtgctgagattacaggcctgagccactayacccagccgaagtcataaagaaaaaagtgataaagtcataaagaaaaaagtgataagtcactttttgtaagtcataaagaaaaaagtg

SEQ ID NO: 627656 - DNA, 615 bp, Homo sapiens
aagcagtaagaaaataaattaactacaagaaatatccaagtaaggaatatcaaaaattgcatcttaagaaaattcagtagttacctattaagatgtatcactaaagcaaaatgtgaatttgactttttagcttcattttaacaatttattcaccaaaaataaaaagcaaaataaaaaagttaaacattctaccgatcaaaaatgaaaycttaattagcagtacactcattatatgctcatataacttgtgtattactatttcataatggctctgttttcaaaagaaaagtaattttaaaaataagtgctttttaaaaagtcatgagaattgtcaatattcttttcagttataagataatatattttctttaaaataaaataaacttgcagacaaagaaattcatttcagtgagtatcaatgtattcctaagaaataaaaagctggtttttattctaatttccatcctatattgagttattatgataatatataatataaacgaaagaaaagcttttgatatttcaaacctgtagcataaaatgaattttatttgggaaattaagctcaggattaaaggataataagctatttcttggaactttttcatcttagtc

SEQ ID NO: 627657 - DNA, 647 bp, Homo sapiens
tttggttcctgtttacatgggctattwaaatgtctctaggtaaaactgtagttcagatattttgcatgataataaacatagcttgatgagattgcaaatttgtccatgaccttgggcatgataccaaaaccatttttatatttagctttggccaacatacatattagtcaagtcagctttttacagatggacaagcatgactaataatcaccttgacttattatcaaaaatatggttatattagagttgtgattaacatcttgctttttaactagcctgctggagtgtaaatctattgcttccttaacttacagagaccattcaaaaatatatctcttcattcacctttgatcttaagtgatgtgttaatctccatagggaataagcatttcacaaataaaattcctgtgattttcatgatgattactgttgaacatttaagtctaaagggtataaagctgagacagtgctgggaagtgattttcctttttgttcaagtatgtatctaaaattctttgctgaaacgtatatcattttctcaggttaagatcacatacatcccactcagtggaaaataaactcccattactctgagacctctaaacacacaagtacattgagaacaacttcaatgcatgaaacagttg

SEQ ID NO: 627658 - DNA, 602 bp, Homo sapiens
tactagagctgactctagatcttagttttaataaattatatcactattcatcattaaatgtcatcacagtatttcaatataaatgattttctttgttatcctatgtattttatttcatgtctttaaaaagattactcttagaggattccatatgcttcaccaaactgacaaataggtccatgacacccacacacaagattaagagcccctgctctaagcaagtcctggaggaaaaattaggtcagagaaagaggtagtgggagtggcaatggcagggctagtacttagctggtctgtgtccctagggtcatgccacttgttaaaacatcaaaatacttttatactatttagtaaacagccatttccctgagttccctgacagcccttcccagcctttcccccagtatctcctaggatccccacagctcagtaactaaagtgtcaatactgagctcaacagtgtcctcacagaccttgctccagaatcaagtatgccayggggattgctagatatttttgaggttatcctaccaccaccacaactaccaccacaagtgttttccaaaatgaggagtctcgttgcatatacaaagaagaaaatg

SEQ ID NO: 627659 - DNA, 639 bp, Homo sapiens
tcctacagatatttatagtctagaaataaatgtaccaggctgagtcccaggacaaacacctgaacactcagatagctttgggaatattagraggccaagatgaagcttcacaaatattatgaagtatcagccaagtaaattttatgttttgggaaaaatttttccttttatcaaagttggccaagaagataaatgtatatgaccaataaggatataaaaatgatgttcaacaccactaaccttagggtaatgccaatcaaaatcaccatgagatagcactttacaccaattaggatggctattattttattaaaaaatataaaatagtaagtgttggtgacgatgtggataaattggaacccttgtgcattgctggtaggaatataagatggtgcagccactgtggaaaatgatatggtggttcctgagaaaattaaacatgggatcagtatatgattcagaaattttacttctgagtatacaccccaaataactgaaagcaggaacacaaacagatatttgtgtgttaatattcacaacagcattatttacaatagctgaaggttaaaataacccagaagtccttcaagggatgaatgagtaaacaaaatgtggtgtatacatacaattaaatagtat

SEQ ID NO: 627660 - DNA, 576 bp, Homo sapiens
ctgtacttggatacttatatttttctttaggtttgaaaagttttctgctattatttctgtaaatatgctatttcctctttatctttcttttcttcaactcctatgacttgtacattcattcttttgatgctatcccataaatttcacaagttttttgttcttttttccatcatttttctcctttgactatatatatttttaataacctgtctgagcatacagattcttctgttctgcactgatgctctccattgcattttccatttcaytcattgtatttttcagctctaagatttatttgattagaaaaattcaatctctccattatatttctcattctggtcatattgtttttctgtttgttaaattgttgttctggttttttttttttttttttttgcagtgtgctgaccttctttaaaatagagattttgaattatttgttgggcagttcttacatctccatttgtttggagatagtcactagcacctttttttttcacttaataatgccatgattctctgatttttgtttatccctgtggttatacagcaatgtctggacattagaagaaa

SEQ ID NO: 627661 - DNA, 529 bp, Homo sapiens
gttctgcactgatgctctccattgcattttccatttcactcattgtatttttcagctctaagatttatttgattagaaaaattcaatctctccattatatttctcattctggtcatattgtttttctgtttgttaaattgttgttctggttttttttttttttttttttgcagtgtgctgaccttctttaaaatagagattttgaattatttgttgggcagttcttacatctccatttgtttggagatagtcactagcacctttttttttcacttaataatgccatgattctctgatttttgtttatccctgtggttatacagcaatgtctggacattagaagaaatatttacttattttactctttacagactgactttttctgagaaagctcaraactaccctctgtctttaggtggtcttcagtaaaaaagctgaataagcattttaattcattctacaagctctaatttttaggcacagtaactcccaacagtgttgaagaagtaatctttaaaagtcaaagctg

SEQ ID NO: 627662 - DNA, 598 bp, Homo sapiens
cataggtaataagcctcaaaactgagttattctgaaggttgattgtaataagtagtttgtgaacttttgttttttaaaataagagcaaaagataatatttaataattgttttgataagaacttcccaaattctgactttaataaactctgcccttggttaacataattgcgccaactccttcagcagggaatggcagaccagggatagtcaaatatttgctcgcacmatttgagaatgtatacttactaaatggaggtgaagataggtataaatatacacagcagagttacttctaaactcttaagcctggccactactgaggcttccatggatgtgttgttgttctgccagcagcatctcttccttggggaactaccatgctgggtaatgtaattccagtgcccagtccctgcccatccctggtcctcctttaagtatgattgattaagttacattgttgcttagactagattgaatctggtctctgtctcaagcccatgaaggggtcctcaataccttacatattgctaattctgacataagcacagggctcttatttatatatgcataatacagaaaggataataaactctgaaa

SEQ ID NO: 627663 - DNA, 468 bp, Homo sapiens
tgaatttcttgaaagttatgactaagtggtaaggatctcaagacactaagtagaaacattagtaagtgttgatacaagaaggaaaatactaagtcacaagtaaagcttgaaagtaatgaaatatttgttccwcaatacatatttaggaaatattaaatgccaagtaatatagctatgacagtgagcaagacacatatatttcctcttctaaaagtttgcaatggtttagtagaagagagatcaataaagaaagcaatatcaatatagtgtggtgagtgccaggctcaactgacgtattcagagtgtgtggggagcctcccacaggaacatcaaacctagccctagtggtgagggaagagttccccatggaaaaagtgcttacagttaggcctggaagaggaggagctacacaagtgaagaaaagaaggctggtcaaattcctgatgcaaacaaagctagcaaaacctt

SEQ ID NO: 627664 - DNA, 478 bp, Homo sapiens
aagcagtctgactgaatttcttgaaagttatgactaagtggtaaggatctcaagacactaagtagaaacattagtaagtgttgatacaagaaggaaaatactaagtcacaagtaaagcttgaaagtaatgaaatatttgttccacaatacatatttaggaaatattaaatgccaagtaatatagctatgacagtgagcaagacacatatatttcctcttctaaaagtttgcaatggtttagtagaagagagatcaataaagaaagcaatatcaatatagtgtggtgagtgccaggctcaactgacgtattcagagtgtgtggggagcctcccacaggaacatcaaacctagccctagtggtgagggaagagttcyccatggaaaaagtgcttacagttaggcctggaagaggaggagctacacaagtgaagaaaagaaggctggtcaaattcctgatgcaaacaaagctagcaaaacc

SEQ ID NO: 627665 - DNA, 516 bp, Homo sapiens
catatcagtcaaccaagcaaaggaaggcctttcacaaggggagtgttaaaagcagcaaccaaatataatgaaatgtcaaaagggatggagaaagagttaaccaagatggcaagagggcaaaccccagagccaaccctttccaaagaattagccacttttgcaagaagctgctacgttcctatttttaggactgtggcttgttttcaatgaaacaagttcacatcacacactttcctatacatttataaactgtctcagttgcaaaacaatgtttttattgaaggctctatggtgaagtataattaataatattcaaatattgtgctgtttcaaaacttaggcagcggttctcaaacttgagaggtaatcaaaatcccctggagggttcttacaacacagattactgggccccagccccctagtaggtcttggctggggcttaaacacgtacayacttaaattcccaggtggtgttgatgaatgctgcttgtccaggattcacatttaagaaccatt

SEQ ID NO: 627666 - DNA, 630 bp, Homo sapiens
tcattcttctagtaccattatcaaactaatcattaaagaaattatcatttacatgaatatgtggcaatgaacacaagtggtaactgtgctattcagtgttgaataactttttaaaagatggacttgaataactttttgactcttaaggcttatcctggaatgactatgttgacatttgcattgatgctgcaaaagtgatggtggctctcagtacaaatcaaagcagtracaccaaactatactagttgttattttcttattcaccacacactcaccatagaaaaagataaataacatgccagttttactttaaagtatgaaattcttcctgaaatagtaaaagttattaattttattaaatttaattctttaaattaaattttgtatacatgtttttgatattgtgtgtgtgacaaaatattgaagtatgaaagttgtctcaagcaaaatcatttgaatggttgttggagttacaagccgagttagccacttttttcatggaacaccattttttactagaaaatgatttaaaaaaaatatgggttttggcagcctatttttcaaaatgaacaaagttaagtccatcacttaaagggcaataacagacagtggtttttgcctatgataaaa

SEQ ID NO: 627667 - DNA, 545 bp, Homo sapiens
aagtccatcacttaaagggcaataacagacagtggtttttgcctatgataaaattcaaactttcaaccaaaaattaaaacttcagaaaacttttatctgccactgtaagcataaaagctttctaatacttgaagactttttctgctaagatcagtagttaagaaatatgacattaagaaatatgatttttttatgttggaaattttgcataactcagtgagccaatgatttccaaatgaccaaagcataatgttataaaaatcacacattggtaaatgattcattcaaattataaggtggatcaatggattttgatgttataatagagtatgaaaagtttattgctatagtttcagagtccatattgcaactaacctttaaggaactgccacttgttggatgttaatgwaggatgaaatcacaaaaaagaatgtccacattatcttgaaaggctattatcgtaaacctcccttttgctgctacatatatctgtgaggttgtattttcttcatatatttcaacctcaaccacataaattcaacaga

SEQ ID NO: 627668 - DNA, 609 bp, Homo sapiens
atctctgcatcaaattagtgcyaccaacattgacaagtattgtttatttctgtgccagtgacttccttacagaataaaagaataaaagcagaaatctcggacttactaaaaaaatcaatccatattgatgaaggattaaaggtcctcaaccttatagctacctaattattccccttagcaagcttattagacattttctgcatcaagtatacttttctcccttaactggatgatttggcatttatcctggttcagtctattatgcaattgtcttataactggtctttcttctcttagtttcttgtcccacatctgacttcaatctactttacacatcactgccagatttattttcttttagcaatgtttagcccttatcacgcaatggccacaacctattaatagctgtctattatcttgccagattaggagaattcaaatttattttcacataaaaatactttaaataaagcaaaccactcctgagatacaaaatatactgtatttttattacatatgtgataaaagtttaaactccttatactggagaattgtatactgggttagcatatgagttttagaatcaaaagaaatcgggttaagtttagg

SEQ ID NO: 627669 - DNA, 609 bp, Homo sapiens
atctctgcatcaaattagtgccaccaacattgacaagtattgtttatttctgtgccagtgacttccttacagaataaaagaataaaagcagaaatctcggacttactaaaaaaatcaatccatattgatgaaggattaaaggtcctcaaccttawagctacctaattattccccttagcaagcttattagacattttctgcatcaagtatacttttctcccttaactggatgatttggcatttatcctggttcagtctattatgcaattgtcttataactggtctttcttctcttagtttcttgtcccacatctgacttcaatctactttacacatcactgccagatttattttcttttagcaatgtttagcccttatcacgcaatggccacaacctattaatagctgtctattatcttgccagattaggagaattcaaatttattttcacataaaaatactttaaataaagcaaaccactcctgagatacaaaatatactgtatttttattacatatgtgataaaagtttaaactccttatactggagaattgtatactgggttagcatatgagttttagaatcaaaagaaatcgggttaagtttagg

SEQ ID NO: 627670 - DNA, 609 bp, Homo sapiens
atctctgcatcaaattagtgccaccaacattgacaagtattgtttatttctgtgccagtgacttccttacagaataaaagaataaaagcagaaatctcggacttactaaaaaaatcaatccatattgatgaaggattaaaggtcctcaaccttatagctacctaattattccccttagcaagcttattagacattttctgcatcaagtatacttttctcccttaactggatgatttggcatttatcctggttcagtctattatgcaattgtcttataactggtctttcttctcttagtttcttgtcccacatctgacttcaatctactttacacatcactgccagatttattttcttttagcaatgtttagcccttatcacgcaatggccacaacctattaatagctgtctattatcttgccagattaggagaattcaaatttattttcacataaaaatactttaaataaagcaaaccactcytgagatacaaaatatactgtatttttattacatatgtgataaaagtttaaactccttatactggagaattgtatactgggttagcatatgagttttagaatcaaaagaaatcgggttaagtttagg

SEQ ID NO: 627671 - DNA, 562 bp, Homo sapiens
tcatccagtataatgtcttcaaagttcatttatgttgttcttctactcagataattttaaygtgcaggaagattgatagccttaccagtcaattattttcatttggtatatgataacttaaaataatcactaaaacacacaaacctattccaacttattttctgaagtgtagccaagtttttcagcctgcattctggtttattaacctttggattcccatatgtttgtagaaacttcttcaaaactcaaggacaactgcttctggaaattggcccctgacaactttctctctacatctaagtaggcatcccacctgaatagcacttacacttgtattgtaaccatctgttggtatatttgtctcctctctaatatataaattcattgaaagtcctgcttttgtagtaaatagtaacaggacacttagaatcaggggaaaaaaaaggctttgaatcccagcaccttcccttcctagctgtgtaactacaggcaagatacttaaagccgagaagcttccttagttggaaaattaaaacaataaaacttagctcatggtgttgtt

SEQ ID NO: 627672 - DNA, 600 bp, Homo sapiens
aaattaaaacaataaaacttwgctcatggtgttgttgttattattaataaatatgaaatatttggcccaggggctgctgtagggtaagcactcaattaaaggaacacgtcatttagcttctgtaatgctatacttaatatagagcatgccatgtagtgggtacttaaaacattcagattgaaggactatatgcaataaagcccaatgcaatgaagcaacagtggttctgacccagggtcactagacaggattacacagtttgcaaatgtacaaaggcacctgcagggggcctgagtgagggctgaaattcagcccattcactctctgtatgccacccattgtgccctgacagcagcttcatcagcccagaggagggagcacatcttatatttcaaaaaaggtgccaaatttatgattaccctggtctgtgtaaagtatcttctgcttgctatttttcaggaaccacaggaatatttccttgaggctatttacttgagacgaattcagaagagaaacatttattgacagagttttcttataaaaggctgttacagcagccttctaaaaaactcactgaagggctaggtttgaaatcagcac

SEQ ID NO: 627673 - DNA, 604 bp, Homo sapiens
gaggcactaatcacacactttattaaattgcctctgaaatgcttaatagcatctaatgcaatggcttattcaaaagatcacactgcacctgatctttgctctgtaagttttacaattgcatatgcctgcatcaaaaataaaatcwtatacatttttatggaattaaataaattacatctggttgttaagaatgaaaaaggaatgtatgaccttttaaatatttaatggctgcactaatggtgatgtgcctataaggtttatccccaattttcttcccagtcttctgaaacttgggaggtgatcccccactccttgttcttcaacagtgtttctccatggggctctattggcatttgggacagcacacatcttcaatgtgcagggctggcctatgtactgcagaacgtttatcatctctcatttctacccatgaaataccaatagcattcctgatccttgtgacaagcaaacgccctttgggagcaatactgtctcactttataatttcataatttttccagttcagcaagtgagtttgctatttgttctgcatgaaacttcaaaacccctggtgactgagtcttgctcaacctctcatctccca

SEQ ID NO: 627674 - DNA, 611 bp, Homo sapiens
cataatttttccagttcagcaagtgagtttgctatttgttctgcatgaaacttcaaaacccctggtgactgagtcttgctcaacctctcatctcccaaaggctggacacctgttgcccaggacactcctatgatgggaagccatctgtttaaagtgcttctgaaamcttgctgcctacatatgggcagataaatgggtctaggactcttaatccttagtttatgactgtcttgaaaaccacaatattcaaaatactatttctgaaatacattaatgggtattccacatcaagagaagggctccataaataaattttaaaattctgagttataaaaatttgaaaaatcctctttactacatgacttattaaagtctttatttgctaaaagaaatttaaaaacactgagaaagctaattgaagaaggaaaagagtatttttcaaacttactcaaccaggtaactcctttattcgggaatatctattaacgtattgaggaattccatactacatagtttggaaactttggtttaggctgaggtgacaagatttacaatagcctctattcttaacatgaaatagaagttagcatggcctccttgtgaattgctcc

SEQ ID NO: 627675 - DNA, 611 bp, Homo sapiens
cataatttttccagttcagcaagtgagtttgctatttgttctgcatgaaacttcaaaacccctggtgactgagtcttgctcaacctctcatctcccaaaggctggacacctgttgcccaggacactcctatgatgggaagccatctgtttaaagtgcttctgaaaccttgctgcctacatatgggcagataaatgggtctaggactcttaatccttagtttatgactgtcttgaaaaccacaatattcaaaatactatttctgaaatacattaatgggtattccacatcaagagaagggctccataaataaattttaaaattctgagttataaaaatttgaaaaatcctctttactacatgacttattaaagtctttatttgctaaaagaaatttaaaaacactgagaaagctaattgaagaaggaaaagagtatttttcaaacttactcaaccaggtaactcctttattcrggaatatctattaacgtattgaggaattccatactacatagtttggaaactttggtttaggctgaggtgacaagatttacaatagcctctattcttaacatgaaatagaagttagcatggcctccttgtgaattgctcc

SEQ ID NO: 627676 - DNA, 612 bp, Homo sapiens
attagcaataaatgctgctcaatgttttgaggcatttaaaagaggcatttaaaattgtgaaagatgatatatttaaaatgccatcctaaaacctgatgcttttgttttcacttaatgcattatatagtcaagtaaatttcttctcttggataagaactctcatggaaatgaaaatactgtattatggctaggaatagccagagcctaaagtaaaataataggtgtagtataataggaataagctggtctaaagaaggaagccaattataataaaatgagaaaaactcagttctagtttgtattttccaggaatacctaatgggatagaagcactctaattattcatctcagaagaaactgaaatatagctcattaaaagaacaaggcaggactaaatttttcaacctacataactcatggcaacagcttcctctatctccttctgtctttatgtgatatggtccatccagctgctgaaatagactgccttctggaaattaaacmccacatggctcagaccatagcagtaaatctggtgcaacagatggtcctgggtgaattgttacacctctgcataaaaccttgggatttcatcaataagccttaccctaa

SEQ ID NO: 627677 - DNA, 570 bp, Homo sapiens
tgaactgcgcatgtgagggatctargttgtgcactctttaagagagtttaatgcctgatgatctgaggtggaacaatttcatcatgaaaccatcccctacagccccgtttgtggaaaaattgtcttccaggaaagtggtccccggtgaccaaaaggttgggaactactgctataagagacagttattcaaaaaatggctggttattaggcaataactagagtcatgtattgcttaacaagagggatatgttctgagaaatgtgtctttaggtgatttcatcagtgtgcaaacatcacagagtgtaattacacaaacctacatggtatagcctgctacacccctaggctttatggatacagctgatggcttctaagagacaaacctgtacagcatgttactgtactgaatactgtaggcaactgtagcacaatgtatttttgtatctgttagtttggtgcaaaagcagttgcgagtttagctgcaatgaaaagttatgtcaaaaaccacaattactgttgcaacaacctaatcaatgtatctaaagctagaaaaaaaaagtacagtaaaaa

SEQ ID NO: 627678 - DNA, 570 bp, Homo sapiens
tgaactgcgcatgtgagggatctaggttgtgcactctttaagagagtttaatgcctgatgatctgaggtggaacaatttcatcatgaaaccatcccctacagccccgtttgtggaaaaattgtcttccaggaaagtggtccccggtgaccaaaaggttgggaactactgctataagagacagttattcaaaaaatggctggttattaggcaataactagagtcatgtattgcttaacaagagggatatgttctgagaaatgtgtctttargtgatttcatcagtgtgcaaacatcacagagtgtaattacacaaacctacatggtatagcctgctacacccctaggctttatggatacagctgatggcttctaagagacaaacctgtacagcatgttactgtactgaatactgtaggcaactgtagcacaatgtatttttgtatctgttagtttggtgcaaaagcagttgcgagtttagctgcaatgaaaagttatgtcaaaaaccacaattactgttgcaacaacctaatcaatgtatctaaagctagaaaaaaaaagtacagtaaaaa

SEQ ID NO: 627679 - DNA, 570 bp, Homo sapiens
tgaactgcgcatgtgagggatctaggttgtgcactctttaagagagtttaatgcctgatgatctgaggtggaacaatttcatcatgaaaccatcccctacagccccgtttgtggaaaaattgtcttccaggaaagtggtccccggtgaccaaaaggttgggaactactgctataagagacagttattcaaaaaatggctggttattaggcaataactagagtcatgtattgcttaacaagagggatatgttctgagaaatgtgtctttaggtgatttcatcagtgtgcaaacatcacagagtgtaattacacaaacctacatggtatagcctgctacacccctargctttatggatacagctgatggcttctaagagacaaacctgtacagcatgttactgtactgaatactgtaggcaactgtagcacaatgtatttttgtatctgttagtttggtgcaaaagcagttgcgagtttagctgcaatgaaaagttatgtcaaaaaccacaattactgttgcaacaacctaatcaatgtatctaaagctagaaaaaaaaagtacagtaaaaa

SEQ ID NO: 627680 - DNA, 570 bp, Homo sapiens
tgaactgcgcatgtgagggatctaggttgtgcactctttaagagagtttaatgcctgatgatctgaggtggaacaatttcatcatgaaaccatcccctacagccccgtttgtggaaaaattgtcttccaggaaagtggtccccggtgaccaaaaggttgggaactactgctataagagacagttattcaaaaaatggctggttattaggcaataactagagtcatgtattgcttaacaagagggatatgttctgagaaatgtgtctttaggtgatttcatcagtgtgcaaacatcacagagtgtaattacacaaacctacatggtatagcctgctacacccctaggctttatggatacagctgatggcttctaagagacaaacctgtacagcatgttactgtactgaatactgtargcaactgtagcacaatgtatttttgtatctgttagtttggtgcaaaagcagttgcgagtttagctgcaatgaaaagttatgtcaaaaaccacaattactgttgcaacaacctaatcaatgtatctaaagctagaaaaaaaaagtacagtaaaaa

SEQ ID NO: 627681 - DNA, 592 bp, Homo sapiens
tgttttcaggatgtaaaaatgaagtaaacacacaaaatgcaaagtagacatgtaaatacagtacccagtacaaacaaagtgtttaactcaagttgaataaacaggcacaatgagaaactaaattatatatcagataaagtgaagcaaatttggaagagcaaaagcaatactgaagtcacataacattaaggggaaatgtgcttgcataataattgagctgtctatctcaaatagccacaagaagatgaaagaaccccagataattttgaaaggaaagcagtaccattaaagccttcaacaaagaagtttatagctttgttcgtttgacaaatatttatggagcacttgccatgtgccaggaattgtttcagggcctggagattcaggactgcgctctctcatagcatgtgtttcartgaaggatactatgataaggaaggaaggaaaataacatcaagtgagaaggctacttctgtaattactaagggaagaactctctgaggaggtgatatttaaaccaagatctaaatgaacgtatggggagccatgtgcatctggtggaaggaagagcagacacaccattttaaagtag

SEQ ID NO: 627682 - DNA, 601 bp, Homo sapiens
tgctaataaaacaggtttcagtaaagaacccagctaaaacccaccaaaactaatacratatggtgacaagagtgacctctggtagtcctcactgctatactcccaccagcaccatgacagtttacaaatgccacggcaacatcaggaagttaccctaaatggtgtaaaaacggaaggtatgaataagccaccccttgcttagcatataatcaggaaataaataaccatcagtatgggcaaccagcagccctgggggctgctctgtctatggagtagccattctttagtcctttactttcttaatacacttgctttcactttactctgtggactcgccttgaattctttcttgtgtgatatccaagaaccctctcttggggtctggatcaggacccctttcttgtaactgtatgacctagcaattctgctcctaggtgcatacccaagagaattggaaacacatgtctatacaaaaacttacacacaaaggttgatagcattattattcatgatattcaaaaagtgcaaacaacccaagtggtcatcagctgatggatgggtaaataaaatgtggtatattcatacaataaaatattacttg

SEQ ID NO: 627683 - DNA, 606 bp, Homo sapiens
acttacacgttgatttagtggttgaacaatattaactttttagcatctatctgagattctgtatttaattctcaacaaagatcttcctagttctaattctcagtgatttttatttctctccctatagagaggtccctctcccatattttgtaagtcaatttagccatcattacatagaaaaaaacaaatgcttgttcattgctttaaattggtgtctagttatgtgaacataacttgagatataaattccttaaaagcaaaactatattcatatttcctttaactgggttcctatatgcatttgattaaaacaacagtaataccttccacttattgatgcaaactctgtgccaggctaaggccatttgtctaatcccatctgrgtaataacaatagtactattcttattattcctagtcccaatgtgcaggtgggaagactgagcctcagataacacagcgaattaaatggggaagtattttaccctatgcaatccgaccctggaatcagtacctttcagtactatactgcattgtaacttgaaagtttgcggaattaataaaagaaaaacttctcccacccctgactctttcttttaaataggtt

SEQ ID NO: 627684 - DNA, 595 bp, Homo sapiens
gatgcaaactctgtgccaggctaaggccatttgtctaatcccatctgagtaataacaatagtactattcttattattcctagtcccaatgtgcaggtgggaagactgagcctcagataacacagcgaattaaatggggaagtattttaccctatgcaatccgaccctggaatcagtacctttcagtactatactgcattgtaacttgaaagtttgcggaattaataaaagaaaaamttctcccacccctgactctttcttttaaataggttgtacttccttctgaaaatatcgacttgacttattttttttttatttttttttttgtgagagtaattagctttttctcagtcagcattttaaatttgttgtgacagggatccattttatgctttccacgagacccgaaacaaagtgtttctagacattttattgccagaatatgcatgctttgctccatgctgcttgtaattcattaaaatgtatgtgctctgcaaataggaaaccaatctgcaataaatcagctttctagaaaacattcatggaaagtgttcgaaatggttgctctgtaagaatacacaaacctgcttggtatt

SEQ ID NO: 627685 - DNA, 491 bp, Homo sapiens
aaatagtggatttgtgtgaaactgtaaattagtagcctgccttcagcatgtgtgtgagatctgcttacaaaatgccatttgatagcatctgagcagatcacgatgagctccaaattccttttacagggacaagtgatgcacactggtctgaattagataaattgccctgacccaagattttcaactatttttttttcttaatccgagacatatttgtagctgccagaaaacytagctcacgggcttgtacacagttggcatctaaggcataaatcaatgaagaatagaagcccactcgtgcttacaagtaacaggctaaagataagaaaatcagttgggctttcagttttagccacagaatacaaagcttgtttgtgctagggagagttatcaaacaacgtggtgcaggagataatgtgggtattcagttccaggcctccccaagacctttgactacagagtacttctctgaatccatagcaagggcaacc

SEQ ID NO: 627686 - DNA, 580 bp, Homo sapiens
cacgggcttgtacacagttggcatctaaggcataaatcaatgaagaatagaagcccactcgtgcttacaagtaacaggctaaagataagaaaatcagttgggctttcagttttagccacagaatacaaagcttgtttgtgctagggagagttatcaaacaacgtggtgcaggagataatgtgggtattcagttccaggcctccccaagacctttgactacagagtacttctctgaatccatagcaagggcaacctactgcttccctgcggaaaaggaatcatgcagttccttaggccagggggtataagtctgtttcctggtagwtaaggctctgaaccagggcaggcagtattttagtaatgagcattcctcaaatcagtcaatgttaatgaggaacaaaccgtgaccaaccaaggctttagggagatggcagttgttgtgagaaaggatgttctgtttgcctcatgttctacgtgttcccttaattattatgagattctgtaagtgagctcctcttcactctctgggaagagctaccattcttttttattacttacacctaaaaattattattttaat

SEQ ID NO: 627687 - DNA, 580 bp, Homo sapiens
cacgggcttgtacacagttggcatctaaggcataaatcaatgaagaatagaagcccactcgtgcttacaagtaacaggctaaagataagaaaatcagttgggctttcagttttagccacagaatacaaagcttgtttgtgctagggagagttatcaaacaacgtggtgcaggagataatgtgggtattcagttccaggcctccccaagacctttgactacagagtacttctctgaatccatagcaagggcaacctactgcttccctgcggaaaaggaatcatgcagttccttaggccagggggtataagtctgtttcctggtagataaggctctgaaccagggcaggcagtattttagtaatgagcattcctcaaatcagtcaatgttaatgaggaacaaacygtgaccaaccaaggctttagggagatggcagttgttgtgagaaaggatgttctgtttgcctcatgttctacgtgttcccttaattattatgagattctgtaagtgagctcctcttcactctctgggaagagctaccattcttttttattacttacacctaaaaattattattttaat

SEQ ID NO: 627688 - DNA, 558 bp, Homo sapiens
aaggaataagactcatttttcttctatcatccttctcctttccctatccatcccagggagatataacaaaggccaaacctttagaaggatattttgaagaagaaagaaacttttgtagaagwtgttgattttccagtataaggccccggggagagagctgaactgttgtcagttactgttcactccacaaggatgtgaaggcctctgatagccatcttgccgatttcccagttacagtttagtgcttgcctatgggaatctcctaattaacaatcttacagtgttcatgtcttctctctttctgtttagtttcgtgtctacagaatagagatagtgatcctacatatatggatatatgtatgcatatatgtgtgtgtttatatatctatctttatatcgccatataattataatgcctgggtttgaatattggcagcaccctttaattgtggttcaatcattccttagctatgtgatcttgagcaagttacttaactcccctaagctccatttgttttcttctggaaaagaaggatagtaataatacctacctcatag

SEQ ID NO: 627689 - DNA, 443 bp, Homo sapiens
ttttgaagaagaaagaaacttttgtagaagttgttgattttccagtataaggccccgggsagagagctgaactgttgtcagttactgttcactccacaaggatgtgaaggcctctgatagccatcttgccgatttcccagttacagtttagtgcttgcctatgggaatctcctaattaacaatcttacagtgttcatgtcttctctctttctgtttagtttcgtgtctacagaatagagatagtgatcctacatatatggatatatgtatgcatatatgtgtgtgtttatatatctatctttatatcgccatataattataatgcctgggtttgaatattggcagcaccctttaattgtggttcaatcattccttagctatgtgatcttgagcaagttacttaactcccctaagctccatttgttttcttctggaaaagaagg

SEQ ID NO: 627690 - DNA, 558 bp, Homo sapiens
aaggaataagactcatttttcttctatcatccttctcctttccctatccatcccagggagatataacaaaggccaaacctttagaaggatattttgaagaagaaagaaacttttgtagaagttgttgattttccagtataaggccccggggagagagctgwactgttgtcagttactgttcactccacaaggatgtgaaggcctctgatagccatcttgccgatttcccagttacagtttagtgcttgcctatgggaatctcctaattaacaatcttacagtgttcatgtcttctctctttctgtttagtttcgtgtctacagaatagagatagtgatcctacatatatggatatatgtatgcatatatgtgtgtgtttatatatctatctttatatcgccatataattataatgcctgggtttgaatattggcagcaccctttaattgtggttcaatcattccttagctatgtgatcttgagcaagttacttaactcccctaagctccatttgttttcttctggaaaagaaggatagtaataatacctacctcatag

SEQ ID NO: 627691 - DNA, 544 bp, Homo sapiens
atgtactatacaattccaactacagtatacgacattctggaaaaggcaaaactatagagacagtaaaaaaatcaagggttgaggttgggagtgatgaaaagacagggctcagagaatttttargccagcaaaactattctgtatggtgctataattgtgaacacatgttttacatttatccacacccatagaatgtacaacaccaagagtgaaccctagtgtaaactatggactcttggcaataatgatgtgtcaatgtaggtatgtcaattataacaaatgtacgacagtggggcaggattttgatagtgagggaggctatgcatgtgtgggggaagggagtatacaggaaatctctgcacattcctttgctgtgaaacaattaatagaactaccctaaaaaataaagtctattcaaaataaacagaatagactaatgatagatgcacagaatgctatgtgaacccaaaagatgtgcatcctattttgtgggaatgagaagaagctttctcgggagggagggtgaagggtatttccagtactt

SEQ ID NO: 627692 - DNA, 621 bp, Homo sapiens
tttggcattgttgaaatttgccatttgatattggaatgcattcttaaataaatgtggttatgtcatacatcattttatgcttttttgccaatgacttattactttatgcttttttgctaatggcttattactttatgcttttgtgctaatggcttattacttgctgtttattttatgcttattttagactatggaaatgatgttagacaaaaagcaaattcaaaagatttttcttatttgagtttgaagtgggtcctaaagcagcagagacaacttgaaacatcaacaacacatttggcccaggaactgctaatgaatgtacagtgcagtggtgtttcaagaagttttgcaaaggagaggagaaccttgaagatggagaacacagtggctggccatcggaagttgacaacgaccagttgacagcaatcatctaagctgatcctcttacaactacacaagaacttgccaaaaaactcaacagtcatttgtcatttgaagcaaattggaaaggtgaaaaagatcaataaatgggtacctcatgarctgagagaaaaaaaaatcatcattttgaagtgtcgtcttctcttattctgtgcaacaacaacgaagcatttctcgaat

SEQ ID NO: 627693 - DNA, 573 bp, Homo sapiens
gggaatgtaaattgttacagtcaytatggaaaacagtatggagcttcctcaaaaaattaaaaatagaactaccatatgttcaagtaatcccatttctgaatacatagccagaggaaatcaaatcagtatggtgaagagatatctgcactccatatttactacagtgtattcacaatagacagggcatggaattaatctgtgtccatctacaagatgaatgaataaagaatatgtatatatatacacacatatatatatacacacatatatataacatatgtatgtatgtcatatgtatatatgtatatatacatatgtcatttatgtgtgtgtatatggtgtgtgtatttatatgtgtgtatacacacacaatgaaatattattgagccttaaaaagagaaaatactgccattcgcaacatggatgagcattgaggacattgtgctaagtgagataaagccaggcacagaaagataaatactgcataatcctacttaagtgtagaaactaaaaaaagtagaactcctaaaaacaagagcgtgaactgggggtttatagggctaggaattgggg

SEQ ID NO: 627694 - DNA, 537 bp, Homo sapiens
ctaggactacatgtgtgcaccaccatgcccagccaatttttgtacattttgtagagatgagcttttgccatgttgcctaggctggtcttgaattcctgggctcaagtgattctcccgctttggcctcccaaagttctaggactataggcgagggccaccactcctggcctattatcaaggatttgtatatccatatgataaattccttataggtcttggtgcttggacagcatttatcctgcctcttgatgaatgtgaatactttagttagtcagacattgcaaaccacatttccattattgcctgagatgaatttagccttagatataatgttcaactagagtaacttagtgttggaaatacagtatgcattttcttttggaaattttgttattttaacttttttcatctggctttatttaagtttttatattgttgattgtttcttatcttttgtggatataggcatrgcataagaattagtggattaatgtctaacacacttgtaaaagtcaaggtgtttgtgttagtccattt

SEQ ID NO: 627695 - DNA, 593 bp, Homo sapiens
ttttaacagcaataaggaaaatttgaatatgaatttgatactaagtaatattaggaaattattgttagtgtttgtgtcaatgatgctgtggtcatgtaagagaatgcatgtacttattcrtaaaagatacagggttgaatgtataggtctaaaggactatgacatcttattttctaaatacacgtgaacacacacacacatacatgtgtatgcatgcacacatacatagataaagcaacaactatttttgaatctaggttgtgggtacttggatgttcattttcctgctcttccaactttttagtctgtttggaatttttatatttaataaagtattaagtaatttggtgtcttaggtgaaccctaccactgtcttgttccaacaaggccaggggaagcaggttgcactgatctatgccaacttttcaaattggtaagagctgttcaaaatgttatggtaaaaacaaaaacaaaaacaaaactcatgatgttgatgaaaccagctttctccaggtctatttctatagttatggtacctatcatattccttaatacctatatttacatggtgaccacttcgggaaagggtgaaa

SEQ ID NO: 627696 - DNA, 607 bp, Homo sapiens
aagtattaagtaatttggtgtcttaggtgaaccctaccactgtcttgttccaacaaggccaggggaagcaggttgcactgatctatgccaacttttcaaattggtaagrgctgttcaaaatgttatggtaaaaacaaaaacaaaaacaaaactcatgatgttgatgaaaccagctttctccaggtctatttctatagttatggtacctatcatattccttaatacctatatttacatggtgaccacttcgggaaagggtgaaaagatttcctgggagagtagggtgtctgtggatttgatatgttctatactcagttaatctagttttatactctttatgcttttcttcaggatttttattagcttttgttttggaactttccaccatataacagctcttctacttaaatctgccattaccctctcaatatttaacactattttcacacactcttgaataatgagtcttcagtatgatttgcatctactgctaattttaacagggctactttttgagccatctaacagttatccagagtacataattttccaagttgttagcgatactgtgattctttaattatatatggtgttctgtttggaaatt

SEQ ID NO: 627697 - DNA, 593 bp, Homo sapiens
ttttaacagcaataaggaaaatttgaatatgaatttgatactaagtaatattaggaaattattgttagtgtttgtgtcaatgatgctgtggtcatgtaagagaatgcatgtacttattcataaaagatacagggttgaatgtataggtctaaaggactatgacatcttattttctaaatacacgtgaacacacacacacatacatgtgtatgcatgcacacatacatagataaagcaacaactatttttgaatctaggttgtgggtacttggatgttcattttcctgctcttccaactttttagtctgtttggaatttttatatttaataaagtattaagtaatttggtgtcttaggtgaaccctaccactgtcttgttccaacaaggccaggggaagcaggttgcactgatctatgccaacttttcaaattggtaagagctgttcaaaatgttatggtaaaaacaaaaacaaaaacaaaactcatgatgttgatgaaaccagctttctccaggtctatttctatwgttatggtacctatcatattccttaatacctatatttacatggtgaccacttcgggaaagggtgaaa

SEQ ID NO: 627698 - DNA, 607 bp, Homo sapiens
aagtattaagtaatttggtgtcttaggtgaaccctaccactgtcttgttccaacaaggccaggggaagcaggttgcactgatctatgccaacttttcaaattggtaagagctgttcaaaatgttatggtaaaaacaaaaacaaaaacaaaactcatgatgttgatgaaaccagctttctccaggtctatttctatagttatggtacctatcatattccttaataccyatatttacatggtgaccacttcgggaaagggtgaaaagatttcctgggagagtagggtgtctgtggatttgatatgttctatactcagttaatctagttttatactctttatgcttttcttcaggatttttattagcttttgttttggaactttccaccatataacagctcttctacttaaatctgccattaccctctcaatatttaacactattttcacacactcttgaataatgagtcttcagtatgatttgcatctactgctaattttaacagggctactttttgagccatctaacagttatccagagtacataattttccaagttgttagcgatactgtgattctttaattatatatggtgttctgtttggaaatt

SEQ ID NO: 627699 - DNA, 607 bp, Homo sapiens
aagtattaagtaatttggtgtcttaggtgaaccctaccactgtcttgttccaacaaggccaggggaagcaggttgcactgatctatgccaacttttcaaattggtaagagctgttcaaaatgttatggtaaaaacaaaaacaaaaacaaaactcatgatgttgatgaaaccagctttctccaggtctatttctatagttatggtacctatcatattccttaatacctatatttacatggtgaccacttcgggaaagggtgaaaagatttcctgggagagtagggtgtctgtggatttgatatgttctatactcagttaatctagttttatactctttatgcttttcttcaggatttttattagcttttgttttggaactttccaccatataacagctcttctacttaaatctgccattaccctctcaatatttaacactattwtcacacactcttgaataatgagtcttcagtatgatttgcatctactgctaattttaacagggctactttttgagccatctaacagttatccagagtacataattttccaagttgttagcgatactgtgattctttaattatatatggtgttctgtttggaaatt

SEQ ID NO: 627700 - DNA, 545 bp, Homo sapiens
attttagtctctagaataaactgacagtaagtgaattaacaggagaaaaagcatgtacattttttatgtgcatgtgcttgagaacatcacaaaatatagcttaaagaagggtcccatgattgaatcttagacagcaatttgcaytacagaaagaaatagaagattggggcttctctgaaggaggtggcaacacaagctatggaatggtgaggggaggaaatgcatgatgatcaaatattgtcttatcgcacagataaagtctctctggtacggccctcagaggaataggtgaaaagtctatctgggtttaatgctctagttatggaaacttttagtcccttctcctgtgatatgaataaatcttgcctggttaatgtcgattacagggagggggttcacaattgaaaatagaaatctagggaggttttaagcagtgtttctaggcccttttctacttaaatgatgttgtgattgtctccttaaagaaaaggctcattgaatgcggtgtattagtcatgaatggcaacaaatctgcccacacagga

SEQ ID NO: 627701 - DNA, 545 bp, Homo sapiens
attttagtctctagaataaactgacagtaagtgaattaacaggagaaaaagcatgtacattttttatgtgcatgtgcttgagaacatcacaaaatatagcttaaagaagggtcccatgattgaatcttagacagcaatttgcattacagaaagaaatagaagattggggcttctctgraggaggtggcaacacaagctatggaatggtgaggggaggaaatgcatgatgatcaaatattgtcttatcgcacagataaagtctctctggtacggccctcagaggaataggtgaaaagtctatctgggtttaatgctctagttatggaaacttttagtcccttctcctgtgatatgaataaatcttgcctggttaatgtcgattacagggagggggttcacaattgaaaatagaaatctagggaggttttaagcagtgtttctaggcccttttctacttaaatgatgttgtgattgtctccttaaagaaaaggctcattgaatgcggtgtattagtcatgaatggcaacaaatctgcccacacagga

SEQ ID NO: 627702 - DNA, 564 bp, Homo sapiens
cctcagtagggatagtcattgagcatatagtaatcatcactcctctctgttgaactctcagtgcttgccaagcttattgcatagctagttgtaaacttctaatttttcacaacaatgctgataggtatgtattattccaaatttataaatgatgcaactgaggctcagcaaaattaaatcatttccaaggtgacacatttataggtagtagagctgcatggaaacgtgaatmtttatttatttttatttttaattgacaaataataattgtatatgtttatgtggcacaatgtgatattttgatacatgtatacattgtggaatgaccaaatcaggacaattagcctatccatcacctcaaatatttatcatttatttgtggtgagaacattaaaaattaactcttttaggtattctgtaacatataatacattattattaattacaatcaccttgctttgccacagaagccagaactgattcctcctatctaactgaaacttttacttgttgaccaatgtctgccctttctctgtctaccttcttttcctccactccagcctc

SEQ ID NO: 627703 - DNA, 603 bp, Homo sapiens
gtatctatttatctaactagtgtatgtcatatagtatatattatgcaatattataaaagaaattatgcctgtcaattataagaaattatatatttgtaagaaattttgcctgcaattaaaaatatttcttacctagtgttatatttaatgcttactctaagaaatgtgaaacaattttctattttcataaaaaaatagaatatgaacagaactttgtttaaagctttggcacattttgaggtcagatggtcattatgaatatagtacagatcatcactaaataacctatagatgtaaatttttcactaaatttatttttatttaaatttaggaaaattattctttttttttttttttttttttttgagacggagtcttctgtttcaccagggtggagtgcagtgacgcaatcttggctcactgcaacctccacctcctgggttcaagtgagaaaattattcatttttaatgtaaagtggaatattagtgttataagaatratttgttttatatattagaaacatttatttgatgtgcttttctttctcagagaaaacaaagaaagttcatgtgatcaacacaagtgtgtcaagatggtcacct

SEQ ID NO: 627704 - DNA, 609 bp, Homo sapiens
gatgcctgtaatcttagcaccgcgggaggctgaagcgggtggatcacctgaggtcaggagtttgagaccagcctagccaacatggtgaaatgctgtctctactaaaaatacaaaaattagcccagtctgstgtgcatgcctgtatcccaactacttgggaggctgaggcagaagaattacttgaaccccagaggcagaggttggcagtgagccaagttcatgccattacactccagtctgggttatagggcgagactgggtctcaacaacaacaacaaaaagatcaacaggaacccattatttcaccaattatctctttgttaaagtatttgcttcatgttccagtgataatgatgacttgctccttttcttaaacatttgtgtctttaattagattgttttttaacttttaaaatagcattactactagaactttagctttcaatcagctttgcttagatgtcaatataggctgtgccttcctttttgttatggtggaaattattgttatgcctattattgttaatgaatgaaagtgtccagctgagtattctatgtatttgaaagtatctaactgtgtaaatgggattccacatggcatcctgctgt

SEQ ID NO: 627705 - DNA, 555 bp, Homo sapiens
tgatgtcatgatatcattttattgctagaaaccttgcaatatatttaaactacaaaatcatagtttaggtcctgtattttgtagtatttatagcactaagcaactttgtcctcaaactagctaatgcttctttttatttctaaaaatatctattttctgctttatccaattatgtctacttaatgctctttgccttctaatcctaccaaaacccattccatatatcatcttcccattctttaacccacctctgcttttattctatttagttagtayatagggaaaagaacatcgttcttggagccaaacaggcatgagtttgaattttatttctgccacacagtaaagaaaataatctggggggttacctaaccatttgaaaaagccttagaatggtcagccataaaacgagtattaagtgattaaacgaatatcaaggtactcaatgaatatggatttttcctcctcctttctgcacattttttatttctggtcttatcttgattcgctgcaaagttatgtttccttatctctctctggatatgattcttacct

SEQ ID NO: 627706 - DNA, 455 bp, Homo sapiens
acaaacgtgctgggatgtttatttcagtatttcagtgcttttgggacaacccaraaatacatcattaggagattaaataaattatggaatactatgcagctgttaatagataatcaggaaaaggtagcaaaaggtaatatgctaccttttgaataagaggagaaattaacagcatgtattcatccttatttgcttaaatttgcataaaaaaggactggaaagataaatagtaaaaatagttacctttatttaggtcagagattctcaactgggagacatttagcaatgtcttgagatatttttcgttattacaagtggagtttgtgggtggggttgttgctactggcttctagtggatatagactcattgtgctagtaagcatccttaaatgcacaggacaacctcacacaccccacaaaaaagaatcatccagccaaaaccatcaacagtgttg

SEQ ID NO: 627707 - DNA, 455 bp, Homo sapiens
acaaacgtgctgggatgtttatttcagtatttcagtgcttttgggacaacccagaaatacatcattaggagattaaataaattrtggaatactatgcagctgttaatagataatcaggaaaaggtagcaaaaggtaatatgctaccttttgaataagaggagaaattaacagcatgtattcatccttatttgcttaaatttgcataaaaaaggactggaaagataaatagtaaaaatagttacctttatttaggtcagagattctcaactgggagacatttagcaatgtcttgagatatttttcgttattacaagtggagtttgtgggtggggttgttgctactggcttctagtggatatagactcattgtgctagtaagcatccttaaatgcacaggacaacctcacacaccccacaaaaaagaatcatccagccaaaaccatcaacagtgttg

SEQ ID NO: 627708 - DNA, 455 bp, Homo sapiens
acaaacgtgctgggatgtttatttcagtatttcagtgcttttgggacaacccagaaatacatcattaggagattaaataaattatggaatactatgcagctgttaatagataatcaggaaaaggtagcaaaaggtaatatgctaccttttgaataagaggagaaattaacagcatgtattcatccttatttgcttaaatttgcataaaaaaggactggaaagataaatagtaaaaatagttacctttatttaggtcagagattctcaactgggagacatttagcaatgtcttgagatatttttcgttattacaagtggagtttgtgggtggggttgttgctactggcttctagtggatatagactcattgtgctagtaagcatccttaaatgcacaggacaacytcacacaccccacaaaaaagaatcatccagccaaaaccatcaacagtgttg

SEQ ID NO: 627709 - DNA, 609 bp, Homo sapiens
tgtccctatgtgcccctgggactgtgtggcttgtttccctggtttgtattctggctctttcaccaacattctattccttctagagggtcacttactcccctagactctatttccttttcctgactcctgcaaacactatctccatttattttatcaaacccagcttcaactaactctgtagagatcaaactaattggcatggatggcagcaggacacgatgagccaggtgagatcaggataagacatatagacaggttcttggaccaaaatagtgaggtatgcagaaacatggacataatgaagtttgctgactgctatagtttggatgtttgtcccctctaagacttgtgttgaaatttgatccccagtgttggaggtggggcctaatgggaggtatttgggttatgggagtgaatcccttatgaatagattaatgccctgggcaggatgggaaaagggtgagtgagttttctattagttcctgtgaaagctggttgctaaaaaagaaaaaaaaagcctgacacctcccctctytttcttgcttcctctctcaccatgtgatctctatacataccttctccccttcaccttccaccacgaggggaagc

SEQ ID NO: 627710 - DNA, 525 bp, Homo sapiens
taattcacatgataatgtcaccctggagaatttactgagttagcaataaattggaaataaccggtattttagtcaatggaggaatggtaacataaattatgtactgtgaaatataacacaaccattataaaaatcacaaggcagatctctatgtactaaaatgaaaagacaacctcgttataaagttaagtgagaaaaaaagaagaaacaagttgccaaaaatatgtaagaaaaaacctcacacctacataagcatgaattrgtttatataggcttagagaaaagtctaggaggatgtacaccaaactaaagttagcgtaatctggggtggtagaggagaaacaaaatgtttccccattaaattctcactgttttaaaaaatcattttggtacaacgagtttataaattaagaaaataaatataaatgtgcaaaaaatgtgcaaaaaatatatatactgagtgaaggacttgcgcccaccagcagctaaacagagtgcatatatgtggtttaaatagatgagaga

SEQ ID NO: 627711 - DNA, 253 bp, Homo sapiens
atgagagaactgggaagggtggaggaaaatagcactgtgcctgataaatttagattactgcaaagtggatgagtgttaaaaccattttaaagcaactatagcaaataataaattggtttcttaaatagtgcaattcggtgatttgaattaatcattcagcataatgtcgtaaarggttattattcctaaaacttttagtagcacattgtttgtcagagtaagaaaaatggtaatagcttagacttatttcaaa

SEQ ID NO: 627712 - DNA, 573 bp, Homo sapiens
ttgcgcccaccagcagctaaacagagtgcatatatgtggtttaaatagatgagagaactgggaagggtggaggaaaatagcactgtgcctgataaatttagattactgcaaagtggatgagtgttaaaaccattttaaagcaactatagcaaataataaattggtttcttaaatagtgcaattcggtgatttgaattaatcattcagcataatgtcgtaaaaggttattattcctaaaacttttagtagcacattgtttgtcagagtaagaaaaatggtaatagcttagayttatttcaaaggatcctgctgtactctctatctttcagcctaaattaaagtatcaggcaaggcttgattgagtcatgacttgtcccctgtcactcatctggtctgtttctgagatagtgtgttttatatcagacaatctgattttctattctagagtaactggagatcttcttgctggtgaagggttggaaagagggagacacatttcctcagcagccatcttaacattgagtttaacaattacatagtagtcctcatggttttaccagtacagtttagttg

SEQ ID NO: 627713 - DNA, 573 bp, Homo sapiens
ttgcgcccaccagcagctaaacagagtgcatatatgtggtttaaatagatgagagaactgggaagggtggaggaaaatagcactgtgcctgataaatttagattactgcaaagtggatgagtgttaaaaccattttaaagcaactatagcaaataataaattggtttcttaaatagtgcaattcggtgatttgaattaatcattcagcataatgtcgtaaaaggttattattcctaaaacttttagtagcacattgtttgtcagagtaagaaaaatggtaatagcttagacttatttcraaggatcctgctgtactctctatctttcagcctaaattaaagtatcaggcaaggcttgattgagtcatgacttgtcccctgtcactcatctggtctgtttctgagatagtgtgttttatatcagacaatctgattttctattctagagtaactggagatcttcttgctggtgaagggttggaaagagggagacacatttcctcagcagccatcttaacattgagtttaacaattacatagtagtcctcatggttttaccagtacagtttagttg

SEQ ID NO: 627714 - DNA, 589 bp, Homo sapiens
ttttaaagcaactatagcaaataataaattggtttcttaaatagtgcaattcggtgatttgaattaatcattcagcataatgtcgtaaaaggttattattcctaaaacttttagtagcacattgtttgtcagagtaagaaaaatggtaatagcttagacttatttcaaaggatcctgctgtactctctatctttcagcctaaattaaagtatcaggcaaggcttgaytgagtcatgacttgtcccctgtcactcatctggtctgtttctgagatagtgtgttttatatcagacaatctgattttctattctagagtaactggagatcttcttgctggtgaagggttggaaagagggagacacatttcctcagcagccatcttaacattgagtttaacaattacatagtagtcctcatggttttaccagtacagtttagttgaactgctgctccactctatgtgaactgtggctactgtgttctggtgtgaggaatgcaattacttctatgtccagcacaatcattctctcagtccaagcaagtcatttggcaagcatgaaattgaatttgcttctaaatcccaggcaac

SEQ ID NO: 627715 - DNA, 589 bp, Homo sapiens
ttttaaagcaactatagcaaataataaattggtttcttaaatagtgcaattcggtgatttgaattaatcattcagcataatgtcgtaaaaggttattattcctaaaacttttagtagcacattgtttgtcagagtaagaaaaatggtaatagcttagacttatttcaaaggatcctgctgtactctctatctttcagcctaaattaaagtatcaggcaaggcttgattgagtcatgacttgtcccctgtcactcatctggtctgtttctgagatagtgtgttttatatcagacaatctgattttctattctagagtaactggagatcttcttgctggtgaagggttggaaagagggagacacatttcctcagcagccatcttaacattgagtttaacaattacatagtagtcctcatggttttaccagtacagtttagttgaactgctgctccactctatgtgaactgtggctactgtgttctggtgtgaggaatgcaattacttstatgtccagcacaatcattctctcagtccaagcaagtcatttggcaagcatgaaattgaatttgcttctaaatcccaggcaac

SEQ ID NO: 627716 - DNA, 599 bp, Homo sapiens
gaggtgtggtaattttcatatatgctttatttctcctaccacgttttaagctccttagatcagggatattttctttgtgggccctattagccactggcatatagcaaatactaatcatatatagttctacgtatgttacatgtgacacctttttattcctcattccagatgaattaggtactcgtgtcatccctgtattactgggatgtaaaagttgmggcagacataggggaagtacatttcttcaagtcatccaaaaatagggtaaataagtaccctaaaggcatacatatactaggcagtagagctggggtttgaataggtgtgctcttaatcatgagacttttatttcagtcaagaaaggtaagtttgtactttcgaaaaaacaaccctcaaagtttgtggcttaaagtaaaaacacctatttgtcgctcatacctatgtgtcaattgtgtttctttgcttcatgttgtcttcaagctaggatccagcctgaaagaacagctatttatctggaatatcatcagaggctagctgtgtcagcagaaaagagagcgtggtgaatcacttactggttctcaaaacttctgcccagaagg

SEQ ID NO: 627717 - DNA, 599 bp, Homo sapiens
gaggtgtggtaattttcatatatgctttatttctcctaccacgttttaagctccttagatcagggatattttctttgtgggccctattagccactggcatatagcaaatactaatcatatatagttctacgtatgttacatgtgacacctttttattcctcattccagatgaattaggtactcgtgtcatccctgtattactgggatgtaaaagttgcggcagacataggggaagtacatttcttcaagtmatccaaaaatagggtaaataagtaccctaaaggcatacatatactaggcagtagagctggggtttgaataggtgtgctcttaatcatgagacttttatttcagtcaagaaaggtaagtttgtactttcgaaaaaacaaccctcaaagtttgtggcttaaagtaaaaacacctatttgtcgctcatacctatgtgtcaattgtgtttctttgcttcatgttgtcttcaagctaggatccagcctgaaagaacagctatttatctggaatatcatcagaggctagctgtgtcagcagaaaagagagcgtggtgaatcacttactggttctcaaaacttctgcccagaagg

SEQ ID NO: 627718 - DNA, 599 bp, Homo sapiens
gaggtgtggtaattttcatatatgctttatttctcctaccacgttttaagctccttagatcagggatattttctttgtgggccctattagccactggcatatagcaaatactaatcatatatagttctacgtatgttacatgtgacacctttttattcctcattccagatgaattaggtactcgtgtcatccctgtattactgggatgtaaaagttgcggcagacataggggaagtacatttcttcaagtcatccaaaaatagggtaaataagtaccctaaaggcatacatatactaggcagtagagctggggtttgaataggtgtgctcttaatcatgagacttttatttcagtcaagaaaggtaagtttgtactttcgaaaaaacaacsctcaaagtttgtggcttaaagtaaaaacacctatttgtcgctcatacctatgtgtcaattgtgtttctttgcttcatgttgtcttcaagctaggatccagcctgaaagaacagctatttatctggaatatcatcagaggctagctgtgtcagcagaaaagagagcgtggtgaatcacttactggttctcaaaacttctgcccagaagg

SEQ ID NO: 627719 - DNA, 583 bp, Homo sapiens
aaaaccattctgtaacaaacaaattcagagagaatccatgagttactgggaaaaattaagaagggtggtcttctgggatcccagcaacatagatttctctgcttgatatagaaacccacttcctcatggttggagagaaatctgatagagaatcggaagtgggaatgaaaaaatmctgctgaggtgcaaaataaatactagggcaatttagacaaagaaagcgtcttagtgtgtacatttcatctgtcctgagaagaggccaatacatcagtttgtcagtttaaaaaaagcatgagaaagtcagaattagcatcataggtccttttttgtttgtttgtttttggttttggcttggaataaagttaatcataatttatttatcaatatgattttaccaaggcgaactcttaacggacagcttagaatctggctgttgggcagcatgggtgtctatgaatctgagaatcctgattttctgactctttctagggtgcagggaaagcagcccctggaaagggaagcccttagaggcagcatgagcacagtgcttcacagcacaactaggggctttgttgtgaacact

SEQ ID NO: 627720 - DNA, 583 bp, Homo sapiens
aaaaccattctgtaacaaacaaattcagagagaatccatgagttactgggaaaaattaagaagggtggtcttctgggatcccagcaacatagatttctctgcttgatatagaaacccacttcctcatggttggagagaaatctgatagagaatcggaagtgggaatgaaaaaatcctgctgaggtgcaaaataaatactagggcaatttagacaaagaaagcrtcttagtgtgtacatttcatctgtcctgagaagaggccaatacatcagtttgtcagtttaaaaaaagcatgagaaagtcagaattagcatcataggtccttttttgtttgtttgtttttggttttggcttggaataaagttaatcataatttatttatcaatatgattttaccaaggcgaactcttaacggacagcttagaatctggctgttgggcagcatgggtgtctatgaatctgagaatcctgattttctgactctttctagggtgcagggaaagcagcccctggaaagggaagcccttagaggcagcatgagcacagtgcttcacagcacaactaggggctttgttgtgaacact

SEQ ID NO: 627721 - DNA, 583 bp, Homo sapiens
aaaaccattctgtaacaaacaaattcagagagaatccatgagttactgggaaaaattaagaagggtggtcttctgggatcccagcaacatagatttctctgcttgatatagaaacccacttcctcatggttggagagaaatctgatagagaatcggaagtgggaatgaaaaaatcctgctgaggtgcaaaataaatactagggcaatttagacaaagaaagcgtcttagtgtgtacatttcatctgtcctgagaagaggccaatacatcagtttgtcagtttaaaaaaagcatgagaaagtcagaattrgcatcataggtccttttttgtttgtttgtttttggttttggcttggaataaagttaatcataatttatttatcaatatgattttaccaaggcgaactcttaacggacagcttagaatctggctgttgggcagcatgggtgtctatgaatctgagaatcctgattttctgactctttctagggtgcagggaaagcagcccctggaaagggaagcccttagaggcagcatgagcacagtgcttcacagcacaactaggggctttgttgtgaacact

SEQ ID NO: 627722 - DNA, 583 bp, Homo sapiens
aaaaccattctgtaacaaacaaattcagagagaatccatgagttactgggaaaaattaagaagggtggtcttctgggatcccagcaacatagatttctctgcttgatatagaaacccacttcctcatggttggagagaaatctgatagagaatcggaagtgggaatgaaaaaatcctgctgaggtgcaaaataaatactagggcaatttagacaaagaaagcgtcttagtgtgtacatttcatctgtcctgagaagaggccaatacatcagtttgtcagtttaaaaaaagcatgagaaagtcagaattagcatcataggtccttttttgtttgtttgtttttggttttggcttggaataaagttaatcataatttatttatcaatatgattttaccaaggygaactcttaacggacagcttagaatctggctgttgggcagcatgggtgtctatgaatctgagaatcctgattttctgactctttctagggtgcagggaaagcagcccctggaaagggaagcccttagaggcagcatgagcacagtgcttcacagcacaactaggggctttgttgtgaacact

SEQ ID NO: 627723 - DNA, 487 bp, Homo sapiens
aactaggggctttgttgtgaacactccctttaccaaacccagtgtgagtgttttcaaggcagtgagggagagcaagggaaatccaaaactcaaaacagaataagctggcacctgcctccttacacacattattatctcacttaattttgacagctcctttaagaaagttaatcataatttatttaccaatatgattttactaaggcatttccattttactgaggcagtaacyagaatcgtgaaaattagcggtttcccagcatcagtaatgaatctcacacagataagccctgtttagtccaagaaaagactaagtccttggctaagagacttaatacattgattcattatgctggcctccccctgagcctgggtttggatttaaaaccaggtccaatccaaaaatcctcattctgttaatttatcaggccaatttcctataaatgggtaatgtcagaggaagaataatagaacaaatacttgtaaa

SEQ ID NO: 627724 - DNA, 487 bp, Homo sapiens
aactaggggctttgttgtgaacactccctttaccaaacccagtgtgagtgttttcaaggcagtgagggagagcaagggaaatccaaaactcaaaacagaataagctggcacctgcctccttacacacattattatctcacttaattttgacagctcctttaagaaagttaatcataatttatttaccaatatgattttactaaggcatttccattttactgaggcagtaaccagaatcgtgaaaattagcggtttcccagcatcagtaatgaatctcacacagataagccctgtttagtccaagaaaagactaagtccttggctaagagacttaatacattgattcattatgctggcctcyccctgagcctgggtttggatttaaaaccaggtccaatccaaaaatcctcattctgttaatttatcaggccaatttcctataaatgggtaatgtcagaggaagaataatagaacaaatacttgtaaa

SEQ ID NO: 627725 - DNA, 531 bp, Homo sapiens
atttaccaatatgattttactaaggcatttccattttactgaggcagtaaccagaatcgtgaaaattagcggtttcccagcatcagtaatgaatctcacacagataagccctgtttagtccaagaaaagactaagtccttggctaagagacttaatacattgattcattatgctggcctccccctgagcctgggtttggatttaaaaccaggtccaatccaaaaatcctcattctgttaatttatcaggccaatttcctataaatgggtaatgtcagaggaagaataatagaacaaatayttgtaaactttttatagaataaaaaaagtaatgtcaattggtgaatatgtgcaaaaatcattacaaatatattgaaaatattccttggaagtgcattgctataaacatttcaattcatggaaaagttcctaacatataattttggcatgtgtgtgtgtgtgtgtgtgtgtgtgtgtgtgtgtaatcatccatccatagttaaatctgaggtttttaaaagtaatttcaaaa

SEQ ID NO: 627726 - DNA, 531 bp, Homo sapiens
atttaccaatatgattttactaaggcatttccattttactgaggcagtaaccagaatcgtgaaaattagcggtttcccagcatcagtaatgaatctcacacagataagccctgtttagtccaagaaaagactaagtccttggctaagagacttaatacattgattcattatgctggcctccccctgagcctgggtttggatttaaaaccaggtccaatccaaaaatcctcattctgttaatttatcaggccaatttcctataaatgggtaatgtcagaggaagaataatagaacaaatacttgtaaactttttatagaataaaaaaagtaatgtcaattggtgaatatgtgcaaaaatcattacaaatatattgaaaatattccttggaagtgcattgctataaacatttcaattcatggaaaagttcctaacatataattttggcrtgtgtgtgtgtgtgtgtgtgtgtgtgtgtgtgtgtaatcatccatccatagttaaatctgaggtttttaaaagtaatttcaaaa

SEQ ID NO: 627727 - DNA, 398 bp, Homo sapiens
caaaactcccttgattcagggaatctgagaactttgttccaatgcttttgtgcatctatttgttagataggtatctgtccttaagctatctgtcctccttttcatttttctaataatcaaatcttctatgattcagtcttagtttatcttgccaaattaacctctcattgctgcttactacagtctctctgcattaacttaattattctgcctgtcctgtccagagttgaattcctagtgcttggcactgagcctggtacacaggaagtgtatatktaattaataaattaatatattacatttccatatctctgagtcttggcccataccattaacctcacctggaatgtactttccttcctgtctacctattttcaatctacctccatagtcaactg

SEQ ID NO: 627728 - DNA, 580 bp, Homo sapiens
ctttggtgaagctctctttgcattcaaaggctgcctgtccatatcattcaagtctgttttgcccctaagtatgctgttgccttacatgatttttttttttttttttttttttttactttattagtcagctcaggcggccataaaaatatcacaggcaggctggcttaaaacacaggaattcatttttcacaattctggaggctgggaagtcccaratcaaggtgccacccagtttggctccccaatgagtacactcttcctggcttgcagatggtcacttgcttgctgtgccctcatgttgcagtcacaccaatgcaccacaatgtagcagtctctcgttgcccaagatatcattcaaagttctttgtctcatggccaaaaaaattaaggagctcagacaccaagggtgaggttacagcaaaagtttaataagtgaaaaaagaaagctccccactgcagagaggaggcccaaaagagggttgctgtttcacagttaaatacgacgcttttataaaaaagcagtgagggctgggcatctcatttgcataaggcacacatttctggtatctccaccctgtcc

SEQ ID NO: 627729 - DNA, 431 bp, Homo sapiens
taaaaaagaaaacctcagagaaagtgactcatggtagtttccttgtctgcagacaattccctcttctgtgcctcaggctcttacagcactttatacttctgtctacaacttctcacagatggacatgaatcatagttctgtatgtgtttggttcccaagggatagtaagagacttgaggccagcaacttttctcgttcatcccagggtgactcaaatgaaatgggcctccttgagtcagccctgaactcaccccakttcatcttaagactaacagcacagttacatagcaaagtgaaagcaaaacaaaactaatcaaaggataaaatgtttacaaatatattatagtccaggtttctgctattttttaaaagcccagatcatgtcacagaagtccacttaaggatgattacagccaaaaacaaattgatat

SEQ ID NO: 627730 - DNA, 608 bp, Homo sapiens
tggatacacacacacacacatatattcacacatatatacatacatgcacacacacacatatatattgctttatatttatatatacatgtttaaattatatatgttatttattacactgttaaacattatttatgcatttctggttaatgatgtctaatayatacttggtagcatgttaaaaatattttttaaaaattgaattatgttaacttagtcatatgctatcctgagaagtaaaaaatacatatttctaggacaatttatccatacacatgggcaataagtttatttccagtgttaactgattcctcaactattgtagtagtggtatctttctgaaatttcatcttactttctgagtgtgctaagttggcctaattgtgagacacattcatttaaaaaagtaattctaatctggatgctgccaccatgaggtgggaagttgggaaaaaagagaatatacttcaaattatctttatgggaaagttagttgagtataacctgaggaaacagcatgtcttaaagaatagggcaaaaatctttcagaagaaaaatcctcttggtgtaatctttttgaaattggttcaatcttctttacatttctgttg

SEQ ID NO: 627731 - DNA, 504 bp, Homo sapiens
ttatatttatagagtacatggtatatacagctcatagtaatcatatcagggtaaatggggcgtccttcacctcaagcatttatccattctttgtgttacaaacaatccaattatactcttttagttatttttaaatgtacaataaattgttgactttagtcattctattttggtataaaatagtagatcttattcattctaagtatgtttttgtgcccattaaccacccccacaacttcacccctaccaactacccatctcagtctctggtaaccatcattctacytcctatctccatgagtttgattgttttaatttttagctctcacagataagtgaaaacatgccaagtttgtctttctgtgcctggcttatttcgcttcatagaatgatctccattttcatccatgttgttgtaaatcataggatctcattttttaatggctgaatagtactccactgtgtatatgcaccacattttctgtatccattcacctgttgatg

SEQ ID NO: 627732 - DNA, 608 bp, Homo sapiens
acttttcttagaagaccacctttgttgtatatttgtatgtatgtgttgtgttgtgtgtaaaataaataatcacagaacaaattactcatttctgatagacacttaaagagttcctcttttttgtcagtttgtggaagacagaaacagcagcaggtacagacagattgctctggcacctgcagattctgttcagttcctacaaatatgtggcaattatgccaggccccttgctatgtgccaaggccaacaggatgaatagatgcaggtttgtcttaataggggcccaatctgtgtgataggaactctggaggttggaaatggagacaaagaaccacaatcccaattattcctgtgagctctcacagggcctccttggttcctctccccatagagacacagaggatctttctgatgcaatgcaagggataggaaagtgaggtcagaggtaagaggcccccaccctgccttgcttacttccaaagagaagctgatgataaaccgacaggtaaagtaggaggacttgcggagwcaaatgagccagctgttctatggaaacatccactctgcattcagcgaagagctcttcttccacagcacaatgaagggaa

SEQ ID NO: 627733 - DNA, 558 bp, Homo sapiens
gtgaggtcagaggtaagaggcccccaccctgccttgcttacttccaaagagaagctgatgataaaccgacaggtaaagtaggaggacttgcggagtcaaatgagccagctgttctatggaaacatccactctgcattcagcgaagagctcttcttccacagcacaatgaagggaagctgaagggaggagttgagggatggaatgatgattccaaaatccttctggctggccctccagaaagtggtttgaggagaacagaaaggtgaaggacgtcctggaggcagcttccaagcaacaccagtaactgcagcataagcagcagagrtgggcaggagccacccccataagaggctgcctatgggggaaacacagaatagttgaacccagctctcacctgggaaagctgtccctgggatcctcagacatacgaattccttttttctctttatccccctctacatgaaatccttcctctgctcttattcctcttccatcacctgctgtttctgctccttctcctctgcttcccaatgttctccttctccacctctaatcctt

SEQ ID NO: 627734 - DNA, 558 bp, Homo sapiens
gtgaggtcagaggtaagaggcccccaccctgccttgcttacttccaaagagaagctgatgataaaccgacaggtaaagtaggaggacttgcggagtcaaatgagccagctgttctatggaaacatccactctgcattcagcgaagagctcttcttccacagcacaatgaagggaagctgaagggaggagttgagggatggaatgatgattccaaaatccttctggctggccctccagaaagtggtttgaggagaacagaaaggtgaaggacgtcctggaggcagcttccaagcaacaccagtaactgcagcataagcagcagaggtgggcaggagccacccccataagaggctgcctatgggggaaacacagaatagttgaacccagctctcacctgggaaagctgtccctgggatcctcagacatacraattccttttttctctttatccccctctacatgaaatccttcctctgctcttattcctcttccatcacctgctgtttctgctccttctcctctgcttcccaatgttctccttctccacctctaatcctt

SEQ ID NO: 627735 - DNA, 553 bp, Homo sapiens
tacatgaaatccttcctctgctcttattcctcttccatcacctgctgtttctgctccttctcctctgcttcccaatgttctccttctccacctctaatccttccccatgcttctttccsccttctccttttcttttctccctccactgtccttcaactcttcccttcccttttcctttctttcccttcttcatattcttttccttccctcctctttcttccctcctttcctccttctcctctcttccttttctctcttcttctcatccacttcttctctcttctctctcccttttttccatctcttctttatctaacccttcatctccccactccttctcttcaatcttactttacatccagaattatggcagagataaagaagctggacattgagttcctttcagaaacttataacatcttagaagaagggtccagaaatgaaaaaatagggaggatgaggaaagaagagggaggaagatacaggaaaatggagagaggagcggtttttaaccctaaatggagggattcctgtgaaggaggaggcaaacaag

SEQ ID NO: 627736 - DNA, 448 bp, Homo sapiens
taatgaactttaagataagatttaatgtacacttaagatttttttcatgccaatgaagattcatgagtgaataatcttttacttgcatgtttgtacacatgtccatttatgtcctctggaataaattgttgaaggtacatgattgatttggtggtcgtgcatatttaatctttgatacaacttgattttcgtgaagattgaatcactccacagtactaccagcagtttatgagagtgaccctttcaacacatctacactagttaaacatttttgcataggtgccaccatcagcttttgtctacagrtgaataaaggctcccagaggtttagcaacaatcactagactactcagctggttaatggcagagccatactttttaccatagaaatgtttgtccccagagccagtgaccttaattgaaattctgagtattatcattccttact

SEQ ID NO: 627737 - DNA, 543 bp, Homo sapiens
tggtgcaaagttggtaatttatgggaagaatgtaataaatctgagaaagaagccagattgtcctatttatgaaacaatatgaggattgatggctagtggtgggaggttggagggacaactggagttacagcagatggctggcaggtgatgaaggctttaaacccagacatggggtggtagacacccaaaagaagatatttatgaaagagatttatttgtctattgaagatttttaaaaaatatacttctatggtgtttcccatatctcaagcactgttctatgagctttaactcatttagtcataatcacaatacatgtggtagttcytatcattatattcaatgtatagatgaggaaactgaggcacagagacattagtaaaatgaggaaaacacatttagtaagtggtggggagagaggagagacttggagctgctttgtgggggcatggaatgtcaaggcatggaggattctgataggtagctgttgcttactgagaaacatcagaaaaaaaagagtaatgtttagaggggaatttatgg

SEQ ID NO: 627738 - DNA, 516 bp, Homo sapiens
ttaataaaataataactgaaaatatcccccaaatcttacaagagatatagacatccagatatgggaaattcaaagatcctaaatagattcaacccaaaaagttcttcaagacacattagagtcatcaacccaataagatcttcaaggcacagcacagtcaaactgtcaaaggttaaaaacaaagagagaattcgaaaaacagcaagagaaaagtgtcaagtcatagataagggaatcctcatcaggctaacagaagatacctaagttgaaacctcacaggacaggagagagtgggttgatatattcaaagtgctgaagaaaactaacaaacaaacaacracaacaacaaaaaactcggccaagaaatgaggaggaaataaagtgtttcccagacaagaaaaaaccaagggaattcatcaccagcagactgaacctataaaaaaatgcttaaaggagtcctacatctggaagcgaaaaaatgatctccaccatcatgaaaacatacaaaagtataca

SEQ ID NO: 627739 - DNA, 608 bp, Homo sapiens
agtttttgtttgacctgaagtcacttagggaagccaagtgggattttgttttgccatatatagtatcgttaggcagattcatatcaacatgactgaaggctcactaaggacagtcaccacaattttgctccatttttacctctgactcctagtccagtgatcagaamccaataagaaatcaagaattactcgatacatctttctttttggggggagtaggtccatttttaataaaattgtatttatatgaaatgatatgacactcttttattgggttgagaattatccagtagggaagaaagttaggatctagaagtctaatagttggaacaagagccaccaggagtcgatgatgtatgttataacttggtagttggtacaagggattttcttgtattattctatctaattatttgtatttttgacatatgccattgaaataaataaaactgatgttatgtaatgggattcattctataatgatattcttcagtaactctcccacacatcattttggatttatttttctctaagtgtcaaaacaaaagtttaattaattcaacaattaaagataggtggatttgctgtcattttgtgagtgaagaatt

SEQ ID NO: 627740 - DNA, 599 bp, Homo sapiens
ctgtaaaataaaaagatatctctcttattgcaacagtaaaagcttttgatcactaacatttcttgtgacaagaattatcattgatacagttaatacatatatacacacaaatacatactaataggtagtatggaggcagagtttttaagtagctgtcaaaagcctgtcgccacttcagatttggcttaagcttgtgaactttaaacaagtcatctgtaatagaaaaataaaatattacatcattctagtcctgagctctaagatataatcaagcaacccacatctagaaacttcagcttttaatgtagatgaaaatttcattggcgtttatttgattatcttttttagtggttgtactatttaccamaattatatatagtattttttctaaaaaatgaaataaattcttaagttacatattcctctttcatctgcaatgctacatgaaatacaatattaaaacaatgattttgatccacttgaaatattttcccaacctcttacatattggtaactagtaattttcacctcaggggcaatccatggtcactggttgatggaataacatttatttcatttaaacatagagggtgttatcc

SEQ ID NO: 627741 - DNA, 512 bp, Homo sapiens
ctgaagatagtggatggggtattcacacaaagccagctatcagacagtttaattaaacacaagctctgagaatggtgcttctcagggagttttggtggcatgctaaatagtgatgattaggctggccgcggtggctcatgcctgtagttccagctactccagaggctgaggcaggaggatctcttgaacccaggaggtcgaggctgcagtgagccataattgtgccagtgccatcgagtctgggagacagagagagaccctgtctcaaacataataataatattaatattcaaagtagtgattgtctggaaatagagattttaggggagctccaaccagtagctccctgcaagtggctgataatttgatggtattcagagctaccagagttgtgagggtgtaagtttaaaggctaacattggagcagagcagrgtgtgggggaatggaacaagttaaaacatcacaacgcttatggttggtagtgtgatttagccatttttcttgaataaat

SEQ ID NO: 627742 - DNA, 534 bp, Homo sapiens
ctgaagatagtggatggggtattcacacaaagccagctatcagacagtttaattaaacacaagctctgagaatggtgcttctcagggagttttggtggcatgctaaatagtgatgattaggctggccgcggtggctcatgcctgtagttccagctactccagaggctgaggcaggaggatctcttgaacccaggaggtcgaggctgcagtgagccataattgtgccagtgccatcgagtctgggagacagagagagaccctgtctcaaacataataataatattaatattcaaagtagtgattgtctggaaatagagattttaggggagctccaaccagtagctccctgcaagtggctgataatttgatggtattcagagctaccagagttgtgagggtgtaagtttaaaggctaacattggagcagagcagagtgtgggggaatggaacaagttaaaacatcacaamgcttatggttggtagtgtgatttagccatttttcttgaataaatattcttcggactgttgaattcc

SEQ ID NO: 627743 - DNA, 475 bp, Homo sapiens
gggctccctctgctgctgttgcccacaggcctgtggactgcttccttaccactagcccaacactgtatgtttcatttgctcattgtgcacgtactgtctgaccgccccatgaggatgtgagctccagaagggcagggaacgttgctctctgggctgtttactgctgatccccagctaccggcacgctgcctgccacagacgatgaataaatgagaggtgtcagacctggagtgaaaagaaagtcacttttgtgagacagaaaggaaggatgaggaaaatcatacactaaaagggattttttgttgatggagtacatrtagaactttcagcagtaatggccacctctattttctcagaatatgtttgatgtagagaggaggctggttgaggtgtgtccaagttgtctggcttccagcttagtaaaacatggcagtttgtaagtgaatttgagaaatcatgatatcaagtgagactt

SEQ ID NO: 627744 - DNA, 668 bp, Homo sapiens
ttgttgcaaatgactgaatctcattcttttttttatggctaaacagtactctgtggtgtatatgtaccatattttctttacccattcatgtgttagtggacacttaggttgcttccaaatcttggctactgtggatggtgctgcaacaaacatgggagtgcagatatctgttcggtacactgacttcctttctcttgggtatatacccagcagtgggattgctggatcatatgatagctccatttttagttgtttgaggaacctccaaastgttcttcatagttagttgttgtagtaatttatattctcaccaacagtgtatgaaggttcccttttctccacacccttgccagcatttgttatgccggctagactgcctcttaccatgcagatacatttctatttccatgctgactgttacttcatctttctatctgtcacagcgcttcctacagcataggttctttggctatcttttggttaatgacatgtctctttcttttcagatgtatgagacgagactttgttaagcaccttaagaagaaactgaaacgtatgatttgagaatacttgtccctggaggattatcacaccccaaatgcataatctcgttaatgattgaggagagaaaaggatcagattgctgttttctacaatggagcaggata

SEQ ID NO: 627745 - DNA, 668 bp, Homo sapiens
ttgttgcaaatgactgaatctcattcttttttttatggctaaacagtactctgtggtgtatatgtaccatattttctttacccattcatgtgttagtggacacttaggttgcttccaaatcttggctactgtggatggtgctgcaacaaacatgggagtgcagatatctgttcggtacactgacttcctttctcttgggtatatacccagcagtgggattgctggatcatatgatagctccatttttagttgtttgaggaacctccaaactgttcttcatagttagttgttgtagtaatttatattctcaccaacagtgtatgaaggttcccttttctccacacccttgccagcatttgttatgccggctagactgcctcttaccatgcagatacatttctatttccatgctgactgttacttcatctttctatcygtcacagcgcttcctacagcataggttctttggctatcttttggttaatgacatgtctctttcttttcagatgtatgagacgagactttgttaagcaccttaagaagaaactgaaacgtatgatttgagaatacttgtccctggaggattatcacaccccaaatgcataatctcgttaatgattgaggagagaaaaggatcagattgctgttttctacaatggagcaggata

SEQ ID NO: 627746 - DNA, 668 bp, Homo sapiens
ttgttgcaaatgactgaatctcattcttttttttatggctaaacagtactctgtggtgtatatgtaccatattttctttacccattcatgtgttagtggacacttaggttgcttccaaatcttggctactgtggatggtgctgcaacaaacatgggagtgcagatatctgttcggtacactgacttcctttctcttgggtatatacccagcagtgggattgctggatcatatgatagctccatttttagttgtttgaggaacctccaaactgttcttcatagttagttgttgtagtaatttatattctcaccaacagtgtatgaaggttcccttttctccacacccttgccagcatttgttatgccggctagactgcctcttaccatgcagatacatttctatttccatgctgactgttacttcatctttctatctrtcacagcgcttcctacagcataggttctttggctatcttttggttaatgacatgtctctttcttttcagatgtatgagacgagactttgttaagcaccttaagaagaaactgaaacgtatgatttgagaatacttgtccctggaggattatcacaccccaaatgcataatctcgttaatgattgaggagagaaaaggatcagattgctgttttctacaatggagcaggata

SEQ ID NO: 627747 - DNA, 668 bp, Homo sapiens
ttgttgcaaatgactgaatctcattcttttttttatggctaaacagtactctgtggtgtatatgtaccatattttctttacccattcatgtgttagtggacacttaggttgcttccaaatcttggctactgtggatggtgctgcaacaaacatgggagtgcagatatctgttcggtacactgacttcctttctcttgggtatatacccagcagtgggattgctggatcatatgatagctccatttttagttgtttgaggaacctccaaactgttcttcatagttagttgttgtagtaatttatattctcaccaacagtgtatgaaggttcccttttctccacacccttgccagcatttgttatgccggctagactgcctcttaccatgcagatacatttctatttccatgctgactgttacttcatctttctatctgtcacagygcttcctacagcataggttctttggctatcttttggttaatgacatgtctctttcttttcagatgtatgagacgagactttgttaagcaccttaagaagaaactgaaacgtatgatttgagaatacttgtccctggaggattatcacaccccaaatgcataatctcgttaatgattgaggagagaaaaggatcagattgctgttttctacaatggagcaggata

SEQ ID NO: 627748 - DNA, 499 bp, Homo sapiens
atgtacttctccccaacagaccaacttcattctgctttgtgcctcttgcaggggmcttccagagagctgccatatcttatacacctccacaagccatctgctcacttttcttcatgcaagtgcccattgtaacatattgctgagccccagaagaatccagccaccatccaggaggtccttaggatcatttcaggcagaaccactgagccccagattcttgctgtccatgaaggatgggaaggttttatggggagtgggaggaatgggacaggaaggcagaggagaaggcaggagagccccaggaaactggtagtggtcacagtcttgctgtaggtcccacaccctgtctgaggaagagactctatcacagtgggagtgggtggcccaagctgaggaggaagcatatgttatttgtgttctatttctaatacctaccacagagcctgacataaacaggtagtcagcagatgttagtggaatggcaggaacatattcagtg

SEQ ID NO: 627749 - DNA, 496 bp, Homo sapiens
tgggaaggcctcttaaaggaagccagcctagtagggagatctttcccatccttatttctattatgtcctataaatttctattgcattatgcccagaaaaccagacataatggctggagcgacagctgccatcttgtcccacaagttgatcttgaggacagaaacatgtgcaacaaagcaaacagagagatagcctggctccatgatggcttcatggaaccaccacacaaaccctggattatctccctctagagtttttaaagtaagagacttargcctcatgctttaacccatcactattttagttttttgttagctagagctgaatatgatactaaaagatagagctacttcgtgtcaggctgaagagattgtggagcaggtgggcatgaggaggtaagttcacagtgattgaggtgaagtaaaactgcagctaagggctgagaggctggctgcttaatctggggattgaatgggggggagaacagatttcagga

SEQ ID NO: 627750 - DNA, 571 bp, Homo sapiens
acaggcttgctacactcaggaaaacagcactacatttgaggaccattttaaacagagaaatcaccaatacacagcacagaaatgcaaaaaatgtttttttccaggatgacaaataggaagcagtgccagcatgcctctcccactttgaaggacagaacagtgtgtggagactctcactgtgaactttcgttccaagaatcaccataggaacttaccaggaaaaccaaaataataaacagatcctttgaaataagtggcaaactccatgagacaggcaaaaaactttgagttcccagagtgggagagggggacagcctacctgtgagcaaacatccccactggrgaaatctaaaaatctagatcacgggagaaggttttaaccttacttagagccagaacagatttggggagcagcatgaaatataaaagcagaaggagcagcaggaagagcctggtaagccctcccatttctcattttgagcccagttaagctttcggtgactgtatctcacaagggttcgtgggaaaggcagccatgaactcagagaggggttgcaggtgaaagaagctt

SEQ ID NO: 627751 - DNA, 620 bp, Homo sapiens
ctcctttctttttaaggctgagtaatattccatagcatgtatatatcacagtttgtttatacatttatcccctgaagaatccttgaattgcttccaccatttagctattttgaataatgttgcaatgaacatgggcatacaaatatgtgttcaagaccctgctttcatttattttggatatatacccagaagtggaattgctggatcatatcrtgatttctatttttaattttttgaggaaccaccatgtcattttccacaggggctgaaccacttcacattctcaccaatagtacacaagtgttccaatttctccatagcctcaccaacacttgttattttctgattatttgatttcaaataatcaaatttattctgattaggatggctttttataatagtcatcataatgtgtgtgaagtgatatttccttctggtttaaattgcatttcctcaatgaactagtgacatggagcatcttttcatgtgcttattggacagttgtatatcttctttgaagaaatgtctattcaagttccttactcatttctgaatcaggttgtttatttttttgttgttgttgaattgtaggagttttaaaaatacatatgatagatatt

SEQ ID NO: 627752 - DNA, 398 bp, Homo sapiens
  misc_feature 268: n = A,T,C or G
agagatgccacaacaaccagggtgacrgggagaaaggcttttggcttctctcttcctcccaccctccagtcttaccctatcaccttgcccctgccttcccgacacacacacacacacacacacacacacattgttcatatctacttggaagccagagggaaagagaacctgagaaacagttcccagaatagagaaaatgtggaccaaagcatggatataaaaacaaacaggcagtttccctacatgatcaaccccttttgcaacctgncatttattcttatttgcctagcgaggcatttgtcatacaaatcaaactgttctcactctctcccaacaggggagacccaaggtcccactggttgtcatatccatttcaagtgcatgatttccaactgaaa

SEQ ID NO: 627753 - DNA, 554 bp, Homo sapiens
gtttgtagtgacctaatgctaacaatgttttcttaaaggtctaaaggcagtgttttcttccaacataatattctgtgcagtccagaagatcttttcctttgccttttggtaacaaacagattttatggtttatygaaacaattcctatgccattattactaagttttggtttgcttaggaaaaaaactgagattaaaaaaaaattttgtagttaaggttattacatctgtatatctttctatatgtacttttaaagtacttttgacactgagttacagggttttgactcctggatctaaaaaggacaccaagtcctgctaaattttaaacactgacagcaattaaagcctcatcttcaggcctggtagaagatgccaatcaaaataaactgcattcctaagacacagggccagaaattaaagctattcaactccacaaggcccagagactatcatggaagaggtgggcatgtgcaattgtaagggccaattttgagagataaaataagttctgtttctccataaattaatcattaatatcaaaggcacactgat

SEQ ID NO: 627754 - DNA, 554 bp, Homo sapiens
gtttgtagtgacctaatgctaacaatgttttcttaaaggtctaaaggcagtgttttcttccaacataatattctgtgcagtccagaagatcttttcctttgccttttggtaacaaacagattttatggtttatcgaaacaattcctatgccattattactaagttttggtttgcttaggaaaaaaactgagattaaaaaaaaattttgtagttaaggttattacatctgtatatctttctatatgtacttttaaagtacttttgacactgagttacagggttttgactcctggrtctaaaaaggacaccaagtcctgctaaattttaaacactgacagcaattaaagcctcatcttcaggcctggtagaagatgccaatcaaaataaactgcattcctaagacacagggccagaaattaaagctattcaactccacaaggcccagagactatcatggaagaggtgggcatgtgcaattgtaagggccaattttgagagataaaataagttctgtttctccataaattaatcattaatatcaaaggcacactgat

SEQ ID NO: 627755 - DNA, 607 bp, Homo sapiens
tataggagtttagaattagcttccactacaattagattccgagctcaaataattcactgtaaccactcttcaccatcccttggctgagccttytgctgcagtggcttaatgcttaagctccatcatgagccctaacttctttgagctctctctttgtgctggtgaaatgaacttattggccaacaactttcaggtgggaaaaagatcaagcattctttcaggtagcagaaagagcaagattcattgtggaaagctctcttaaaagtctgaggttcactctgattagaccactttaggcttcctggcatctcttaaatcaattattgtggccagaagaatgtaatgcagtaattggcttaagccaagatcacatgttctacccctaaattttgggataaaagtctttagattgtacagattcagcatggagggtggattccccatccccaaatcagggactgtcaccagaaaaaggagaatagagctggggagataaatgactgtagtctttctacctgatctctatagccttaacccataacacagtgcctggcattgcatagactgcttaatgaaggaataaatgtatggtatgtgagtgctactg

SEQ ID NO: 627756 - DNA, 607 bp, Homo sapiens
tataggagtttagaattagcttccactacaattagattccgagctcaaataattcactgtaaccactcttcaccatcccttggctgagccttctgctgcagtggcttaatgcttaagctccatcatgagccctaacttctttgagctctctctttgtgctggtgaaatgaacttattggccaacaactttcaggtgggaaaaagaycaagcattctttcaggtagcagaaagagcaagattcattgtggaaagctctcttaaaagtctgaggttcactctgattagaccactttaggcttcctggcatctcttaaatcaattattgtggccagaagaatgtaatgcagtaattggcttaagccaagatcacatgttctacccctaaattttgggataaaagtctttagattgtacagattcagcatggagggtggattccccatccccaaatcagggactgtcaccagaaaaaggagaatagagctggggagataaatgactgtagtctttctacctgatctctatagccttaacccataacacagtgcctggcattgcatagactgcttaatgaaggaataaatgtatggtatgtgagtgctactg

SEQ ID NO: 627757 - DNA, 607 bp, Homo sapiens
tataggagtttagaattagcttccactacaattagattccgagctcaaataattcactgtaaccactcttcaccatcccttggctgagccttctgctgcagtggcttaatgcttaagctccatcatgagccctaacttctttgagctctctctttgtgctggtgaaatgaacttattggccaacaactttcaggtgggaaaaagatcaagcattctttcaggtagcagaaagagcaagattcattgtggaaagctctcttaaawgtctgaggttcactctgattagaccactttaggcttcctggcatctcttaaatcaattattgtggccagaagaatgtaatgcagtaattggcttaagccaagatcacatgttctacccctaaattttgggataaaagtctttagattgtacagattcagcatggagggtggattccccatccccaaatcagggactgtcaccagaaaaaggagaatagagctggggagataaatgactgtagtctttctacctgatctctatagccttaacccataacacagtgcctggcattgcatagactgcttaatgaaggaataaatgtatggtatgtgagtgctactg

SEQ ID NO: 627758 - DNA, 571 bp, Homo sapiens
  misc_feature 1, 2: n = A,T,C or G
nncttctttcttgctctaatctttgtaaaactaaaagcaaaatctgcacctgtgtggaggagatatggtgcagagctctcagtaaggactgagccagttaataaagtccctgggaccacccccaccccaggcaacctgggaaggctcagggtgctgggcccccrcctgggagctgagagtggtcctgctctgcacttcccagacacccccagtggggtgcaccaccatacccagcctgcccagccctgctgcaggacatgggccagcgaggccccacagagcactgggatgggggaagctcaggcagggggagccaagctgggcctcagggacctggggacgcaccacccccttgctttccacaacttgaaaacaaggactgatcagtcactgattcacaatccaaaaaccaacccccaaatcccagggcttccagcaacaaagaaggacctctctcacttccgggtcagcaagagcttcagggctgggcccactccatatctcctccctgcagaaggaccctctgctttccacccccagagcaatgcagtgggctgcctgggtttggagc

SEQ ID NO: 627759 - DNA, 571 bp, Homo sapiens
  misc_feature 1, 2: n = A,T,C or G
nncttctttcttgctctaatctttgtaaaactaaaagcaaaatctgcacctgtgtggaggagatatggtgcagagctctcagtaaggactgagccagttaataaagtccctgggaccacccccaccccaggcaacctgggaaggctcagggtgctgggcccccgcctgggagctgagagtggtcctgctctgcacttcccagacacccscagtggggtgcaccaccatacccagcctgcccagccctgctgcaggacatgggccagcgaggccccacagagcactgggatgggggaagctcaggcagggggagccaagctgggcctcagggacctggggacgcaccacccccttgctttccacaacttgaaaacaaggactgatcagtcactgattcacaatccaaaaaccaacccccaaatcccagggcttccagcaacaaagaaggacctctctcacttccgggtcagcaagagcttcagggctgggcccactccatatctcctccctgcagaaggaccctctgctttccacccccagagcaatgcagtgggctgcctgggtttggagc

SEQ ID NO: 627760 - DNA, 571 bp, Homo sapiens
  misc_feature 1, 2: n = A,T,C or G
nncttctttcttgctctaatctttgtaaaactaaaagcaaaatctgcacctgtgtggaggagatatggtgcagagctctcagtaaggactgagccagttaataaagtccctgggaccacccccaccccaggcaacctgggaaggctcagggtgctgggcccccgcctgggagctgagagtggtcctgctctgcacttcccagacacccccagtggggtgcaccaccatacccagcctgcccagccctgctgcaggacatgggccagcgaggccccacagagcactgggatgggggaagctcaggcagggggagccaagctgggcctcagggacctggggacgcaccayccccttgctttccacaacttgaaaacaaggactgatcagtcactgattcacaatccaaaaaccaacccccaaatcccagggcttccagcaacaaagaaggacctctctcacttccgggtcagcaagagcttcagggctgggcccactccatatctcctccctgcagaaggaccctctgctttccacccccagagcaatgcagtgggctgcctgggtttggagc

SEQ ID NO: 627761 - DNA, 598 bp, Homo sapiens
tgacactttgggtttaggtcgtgatctaccgaaaagtaaactcattaatattactatttatggaaattctkacaagtaatttaaaacaagatcactttattaattataaagcttcaaaaatacttagtaaaaaaactaacagattaactacaacagacttttcaggggaaaaaagccatacaaaaacaaaacaaaaaaaaaatgagaggagagacagaaactatccttgactaacattttaaaggtaagattacttactaacattattttccaaaattacattgtcaaattagcattcacttcctactaatatcctgaagccatctcactaaaaattatgctttcaaaacaaattaatgagctgaattcattttctatgagtgtatgtttggacttacttcgttaatttttttgacatggaattgttagctttcagtgctgctgcaaaggcttccttatattcttctaatttggttgtaacctcttcataagtagttttcattttggagaatttacattccacatctttaagtgtgagttccttcttatttagtgaagccgtattatccttaactgctctaattgtttttcatattgt

SEQ ID NO: 627762 - DNA, 627 bp, Homo sapiens
catggctgccctggactatttctggacttgtttcataaaactaacccytagcagaactaagaaacaattttaggagagatacttataataaattaaatgataaacctaaaaatgaataaaacatattataaaaataaagagaatagacaaaatgggcttgcagatgctgactggccacacatccttggtgctcacccccgtggatgcctcaccaactgtgacacttggagagctggcagccatcactcaagaaatcagaacacagtggcctctactgcaccatcagcgaacaaaaactaagcctgtcggctctcaagaaacatacttatgtgtatgtatatatatatgaaataaatttattcagttactttgagatatctcattgctaaacagataaaatgaattaaaactagtgcaaatttctggcaacagtacttcatctccccattatgtatccagggcattgaaaattggcacacatcacagatccttaagtcattctctgaatcaggaggagaaaagaggagaacagagagagcttaccatatgtgccagtcactgggctgagtgctgtgactaaaggaccccacttgatgcttgaaataaccctacaagatcaaactaaaa

SEQ ID NO: 627763 - DNA, 627 bp, Homo sapiens
catggctgccctggactatttctggacttgtttcataaaactaacccttagcagaactaagaaacaattttaggagagatacttataataaattaaatgataaacstaaaaatgaataaaacatattataaaaataaagagaatagacaaaatgggcttgcagatgctgactggccacacatccttggtgctcacccccgtggatgcctcaccaactgtgacacttggagagctggcagccatcactcaagaaatcagaacacagtggcctctactgcaccatcagcgaacaaaaactaagcctgtcggctctcaagaaacatacttatgtgtatgtatatatatatgaaataaatttattcagttactttgagatatctcattgctaaacagataaaatgaattaaaactagtgcaaatttctggcaacagtacttcatctccccattatgtatccagggcattgaaaattggcacacatcacagatccttaagtcattctctgaatcaggaggagaaaagaggagaacagagagagcttaccatatgtgccagtcactgggctgagtgctgtgactaaaggaccccacttgatgcttgaaataaccctacaagatcaaactaaaa

SEQ ID NO: 627764 - DNA, 627 bp, Homo sapiens
catggctgccctggactatttctggacttgtttcataaaactaacccttagcagaactaagaaacaattttaggagagatacttataataaattaaatgataaacctaaaaatgaataaaacatattataaaaataaagagaatagacaaaatgggcttgcagatgctgactggccacacatccttggtgctcacccccgtggatgcctcaccaactgtgacacttggagagctggcagccatcactcaagaaatcagaacacagtggcctctactgcaccatcagcgaacaaaaactaagcctgtcrgctctcaagaaacatacttatgtgtatgtatatatatatgaaataaatttattcagttactttgagatatctcattgctaaacagataaaatgaattaaaactagtgcaaatttctggcaacagtacttcatctccccattatgtatccagggcattgaaaattggcacacatcacagatccttaagtcattctctgaatcaggaggagaaaagaggagaacagagagagcttaccatatgtgccagtcactgggctgagtgctgtgactaaaggaccccacttgatgcttgaaataaccctacaagatcaaactaaaa

SEQ ID NO: 627765 - DNA, 428 bp, Homo sapiens
agatatctcattgctaaacagataaaatgaattaaaactagtgcaaatttctggcaacagtacttcatctccccattatgtatccagggcattgaaaaytggcacacatcacagatccttaagtcattctctgaatcaggaggagaaaagaggagaacagagagagcttaccatatgtgccagtcactgggctgagtgctgtgactaaaggaccccacttgatgcttgaaataaccctacaagatcaaactaaaaactcatacacactcacacacacacactcacacacacacacatgctcaagcacacgctagaaactacagaacaaagaaaacattgacaactaatagaagtatagtgctggctaagcacagtggctcatgcttgtaatctcagcactttaggccaggagttcaagacaagcctgg

SEQ ID NO: 627766 - DNA, 559 bp, Homo sapiens
ccttagctgacatgacaccagtgagcagttcttcttttgtgtgcatgaagatgcaattcccaggagcccacctggggtcttctaggacaagcatgtgggcacctactggctgcagttccacctttccttccctggactctcagggagaaataagttctggattcagctgaactgagttcaagttcaggctctgtgactcactgggtaagtctcttgctctccttgagtcccatatcctcattggtaaaatggagaggtagagttattgttaggtttggaaggcaaggcgagggttaaagaaagacagaaagagatagttggtggcttctaacagcaacatctttattgacagcaaaaccctggggaggaggaaaccagcttagtgccagcaccaaytgccgctcacaggctggggtaatcatgggactgggagggagggatctgggtggtagagcttgctgcccagcaggatatggctaggatgtccctgcagtcaggctgttgggcctttgcccaggaagatgcgataaggatgtttctgcagtcacgtggttaggaa

SEQ ID NO: 627767 - DNA, 562 bp, Homo sapiens
ggaaggcaaggcgagggttaaagaaagacagaaagagatagttggtggcttctaacagcaacatctttattgacagcaaaaccctggggaggaggaaaccagcttagtgccagcaccaattgccgctcacaggctggggtaatcatgggactgggagggagggatctgggtggtagagcttgctgcccagcaggatatggctaggatgtccctgcagtcaggctgttgggcctttgcccaggargatgcgataaggatgtttctgcagtcacgtggttaggaaggatgtttctcatggcccaagttcccatggaacgtttcactgtgatcagagtctgcaaaatggctggaggtttacaaaatggtacaggttagactaacagtaacatctcccaggtaaacagttctacaaagtaaacttcccttgagcatctacactgtaccagacatggtgctacgacccaggccacaggaggaacaggacagatgaggcccctgccatcctggtgctcacgtctgacgaaggaagctaacaggtcataagaccaggtcagatggtggt

SEQ ID NO: 627768 - DNA, 559 bp, Homo sapiens
ccttagctgacatgacaccagtgagcagttcttcttttgtgtgcatgaagatgcaattcccaggagcccacctggggtcttctaggacaagcatgtgggcacctactggctgcagttccacctttccttccctggactctcagggagaaataagttctggattcagctgaactgagttcaagttcaggctctgtgactcactgggtaagtctcttgctctccttgagtcccatatcctcattggtaaaatggagaggtagagttattgttaggtttggaaggcaaggcgagggttaaagaaagacagaaagagatagttggtggcttctaacagcaacatctttattgacagcaaaaccctggggaggaggaaaccagcttagtgccagcaccaattgccgctcacaggctggggtaatcatgggactgggagggagggatctgggtggtagagcttgctgcccagcaggatatggctaggatgtccctgcagtcaggctgttgggcctttgcccaggaagatgcgataaggatgtttcygcagtcacgtggttaggaa

SEQ ID NO: 627769 - DNA, 580 bp, Homo sapiens
tcacttcataattgtcaggcctcagagagagaagtttcattgacatgagtgaataagatgtgattaagttgcatatagatgctttggctaattttttttgagacagccagttctttgatatgatagctgctttataaaagtcctttacagtgtaagatgatataccaaacttagttaattttagaagcaattgtattataaaattcattctgtgaataccaaaatactcattttcaataagtactgcactgattttgaaatataaatgtgtattcgtatccagcaagtctgtggtaattcagtgttttcttttttgataaatattttgatattggaagcttattcgacatggtttatttgatgtgttttatggaccacctcgcacaagtggatcaaggagctctaactcaaggccaaatgaggggataggagaaatgtaggtgctgcagtagcccatgtgatcatgggaaaaatgagtattttgattagctgttatttcataagtgtgcrtcctagctgatcaatgtagaacactttctttgatgagaggtgaatcacacattcacctgaactgtcatcc

SEQ ID NO: 627770 - DNA, 523 bp, Homo sapiens
gccacccctctgaaagtcaggacggaagtagatgacactacatttctatctgctgtagacactcctcccagtgtctcaaaatgttttagcatctttcagtaaaattcttcaagtttgtcagtccttgatttaaacaaaaggagcgaactttttagagctcccttgaactctttatcaaacttctcataaaccccaatattttgatctcttattgaagagtccatactcctatccaatccagtgttgtttctcttcaaacttggccttcccctgctcattccatttttatctacttccattgggttcaccagctaattccattctcatactatccactgggtgcaccrgactcactcccatttgtattattaaagcacatgcaaataggatataaaaagaaggaagagtactgggcctcaaaatgagttcaaatctcatttctgccaattcctatgtctaaaaaaaaagcatcctaatctctttgagcctcacattctctgagaatcacttgaccagaatgttc

SEQ ID NO: 627771 - DNA, 344 bp, Homo sapiens
gagaaatgtgcttggaagtagtgctggtgaaactcagcctctgtgggtttctctstctttcagagtcagctctcttcaggatgcacatttatttctccctttggaggaggcctcagtccagctcagccaaggactgaaaggcacatctggctaattcaggactggggtattgggaagtccctttggccccagatctatgacatgttctcgagtcctgagacctgctgactctggtgcttcatttcccagttgggtcatatcttggggttatttgtgttcccagctctaacaggaaggttcccaagcactcatttcttcttaaccaatttctgaaggtaagatgt

SEQ ID NO: 627772 - DNA, 344 bp, Homo sapiens
gagaaatgtgcttggaagtagtgctggtgaaactcagcctctgtgggtttctctgtctttcagagtcagctctcttcaggatgcacatttatttctccctttggaggaggcctcagtccagctcagccaaggactgaaaggcacatctggctaattcaggactggggtattgggaagtccctttggccccagatctatgacatgttctcgagtcctgagacctgctgactctggtgcytcatttcccagttgggtcatatcttggggttatttgtgttcccagctctaacaggaaggttcccaagcactcatttcttcttaaccaatttctgaaggtaagatgt

SEQ ID NO: 627773 - DNA, 558 bp, Homo sapiens
ttaatgtgtctatacacacactgagagataaggcattgacataacatctcattataggtattagaaatgcagtctcaagagcaggttcttgtggggtgacaggcagggtattctaggggaaagaataccccaagaaaggtagcattacaaaggaagaggagaaagaaagatgtaaatgaggagacactggtattcttccactgcaatttttcccaaggctggccccttttctattacattgttacccagtaactcatactttccctagagctcttgcaagcaagaactattgagaaagtagcccatctgaaagtatatttcctgctakttttctgcttccagaactggctgaagtttactttttggtactccagagacctagctgcttcttgccttcttccagtgtggtctatttaatctcctgtcttgtgggaaattatattcaaaatttctgtgatcctctgtccatagtaagttacgcatgtagtgacaaatgcatgccacaaggtcttgagattatatctgcaatgtgttgctgctggctgttgatcaagatag

SEQ ID NO: 627774 - DNA, 558 bp, Homo sapiens
ttaatgtgtctatacacacactgagagataaggcattgacataacatctcattataggtattagaaatgcagtctcaagagcaggttcttgtggggtgacaggcagggtattctaggggaaagaataccccaagaaaggtagcattacaaaggaagaggagaaagaaagatgtaaatgaggagacactggtattcttccactgcaatttttcccaaggctggccccttttctattacattgttacccagtaactcatactttccctagagctcttgcaagcaagaactattgagaaagtagcccatctgaaagtatatttcctgctagttttctgcttccagaactggctgaagtttactttttggtactccagagacytagctgcttcttgccttcttccagtgtggtctatttaatctcctgtcttgtgggaaattatattcaaaatttctgtgatcctctgtccatagtaagttacgcatgtagtgacaaatgcatgccacaaggtcttgagattatatctgcaatgtgttgctgctggctgttgatcaagatag

SEQ ID NO: 627775 - DNA, 364 bp, Homo sapiens
ttctcaacataacacatcaaaacttatactcccttaaatattaaaaaataatacaaatgtaagcaatattttaaatacaatatttaattgttagatacattaggtatattatattacttataacattccattatataaaaattcatttgtctatttattcagattaaacaactattaaggctgaatgtctcatgcctgtaaccccagcactttgagaggctgaggcgggcagaacacttgagcccaacagttaaagaccagcctgggcaacaaggcaaaaccctgtctctacaaaactcrgccgagcatggtgacacaggtctatggtgacatagctctactgtttcaactacttggatggctg

SEQ ID NO: 627776 - DNA, 558 bp, Homo sapiens
gaaccaataatataagtagagaaacaatctctcctaaaaactatatgataccaaaataataagtttccaagaagaaaagctatatgctatgtgctgaacctttttgcaactaaaagttaccaggaggattccatgattactgcaaataatttgatccactgaagagttatacaggcataaatattatgaaagtcacactcacaggatttaaaactcaaagtattagtatttatccaaataaagcttaatcaaatttcatatttcctctattggagaaagcatttcctaatgtgattttcctgtcactacttattttccagttcattttttktcagctcctaccctgtcacggtacttatcaatctttgttagttaccaaagttaaacaaattttttcaatcaactagccatatatatgtttttctctgacccactttccgttaccaccataaaacaatgacagataaaccactgctaagtttgaaaagtaaatactctgcaaaactacattcagagtgagaaaattaattttacaagagaccaatttaccttagcagc

SEQ ID NO: 627777 - DNA, 620 bp, Homo sapiens
ttttcctgtcactacttattttccagttcattttttttcagctcctaccctgtcacggtacttatcaatctttgttagttaccaaagttaaacaaattttttcaatcaactagccatatatatgtttttctctgacccactttccgttaccaccataaaacaatgacagataaaccactgctaagtttgaaaagtaaatactmtgcaaaactacattcagagtgagaaaattaattttacaagagaccaatttaccttagcagcaacactcaagacttcgtcatctaatgcaggcaatgaatccacacacagttcatggaaaatgcttgggagcaaaaatacacaatgaaaatgagcaagttgatttctttacaattttttaactgccagtttatatccagcttccccctcaaaaaaggaaagaataatctggggaaaggtcagtgatctatatattaaattatgattcttgatataattaaaataggtcctctgttctaaaaatagattttagttacctatttctgcctccacctgtctaaatctataaaatgttcaatgaaaactaaccttcagcttcataacaaatagtgacagtcaatatattggcagagcctgac

SEQ ID NO: 627778 - DNA, 620 bp, Homo sapiens
ttttcctgtcactacttattttccagttcattttttttcagctcctaccctgtcacggtacttatcaatctttgttagttaccaaagttaaacaaattttttcaatcaactagccatatatatgtttttctctgacccactttccgttaccaccataaaacaatgacagataaaccactgctaagtttgaaaagtaaatactctgcaaaactacattcagagtgagaaaattaattttacaagagaccaatttaccttagcagcaacactcaagacttcgtcatctaatgcaggcaatgaatccacacacagttcatggaaaatgcttgggagcaaaaatacacaatgaaaatgagcaagttgatttctttacaattttttaactgccagtttatatccagcttccccctcaaaaaaggaaagaataatctggggaaargtcagtgatctatatattaaattatgattcttgatataattaaaataggtcctctgttctaaaaatagattttagttacctatttctgcctccacctgtctaaatctataaaatgttcaatgaaaactaaccttcagcttcataacaaatagtgacagtcaatatattggcagagcctgac

SEQ ID NO: 627779 - DNA, 417 bp, Homo sapiens
tccaacctctggctgttacccacttcygaacctgctttacattttcagctatctttgttgcagcctggcaatgcagaagaaaaagaagtccattttcagggggaaacttcaagaagccttcagatatttgcattaaaaagaagtccagtgctaatagccaagacgatggggaaatgtcattgaagatatttcatagctccacttcgcagtactttattttctgtatgatcataatgaaaaggggtttaattggctcatggttctgcaggctgtaaagaaagcatagtggcttctgcttctgggaggactcaggaagcctcccaatcataccagtaggaaaacagcaatgaaatgtttcatacagcaggagtaggagcaaggctgagagaggaaagacgtgccacaccgtcctataac

SEQ ID NO: 627780 - DNA, 397 bp, Homo sapiens
ctgttacccacttctgaacctgctttacattttcagmtatctttgttgcagcctggcaatgcagaagaaaaagaagtccattttcagggggaaacttcaagaagccttcagatatttgcattaaaaagaagtccagtgctaatagccaagacgatggggaaatgtcattgaagatatttcatagctccacttcgcagtactttattttctgtatgatcataatgaaaaggggtttaattggctcatggttctgcaggctgtaaagaaagcatagtggcttctgcttctgggaggactcaggaagcctcccaatcataccagtaggaaaacagcaatgaaatgtttcatacagcaggagtaggagcaaggctgagagaggaaagacgtgccacaccgt

SEQ ID NO: 627781 - DNA, 368 bp, Homo sapiens
ctgttacccacttctgaacctgctttacattttcagctatctttgttgcagcctggcaatgcagaagaaaaagaagtccattttcagggggaaacttcaagaagccttcagatatttgcattaaaaagaagtccartgctaatagccaagacgatggggaaatgtcattgaagatatttcatagctccacttcgcagtactttattttctgtatgatcataatgaaaaggggtttaattggctcatggttctgcaggctgtaaagaaagcatagtggcttctgcttctgggaggactcaggaagcctcccaatcataccagtaggaaaacagcaatgaaatgtttcatacagcaggagtaggagcaag

SEQ ID NO: 627782 - DNA, 404 bp, Homo sapiens
acctctggctgttacccacttctgaacctgctttacattttcagctatctttgttgcagcctggcaatgcagaagaaaaagaagtccattttcagggggaaacttcaagaagccttcagatatttgcattaaaaagaagtccagtgytaatagccaagacgatggggaaatgtcattgaagatatttcatagctccacttcgcagtactttattttctgtatgatcataatgaaaaggggtttaattggctcatggttctgcaggctgtaaagaaagcatagtggcttctgcttctgggaggactcaggaagcctcccaatcataccagtaggaaaacagcaatgaaatgtttcatacagcaggagtaggagcaaggctgagagaggaaagacgtgccacaccg

SEQ ID NO: 627783 - DNA, 399 bp, Homo sapiens
gctgttacccacttctgaacctgctttacattttcagctatctttgttgcagcctggcaatgcagaagaaaaagaagtccattttcagggggaaacttcaagaagccttcagatatttgcattaaaaagaagtccagtgctaatagccaagamgatggggaaatgtcattgaagatatttcatagctccacttcgcagtactttattttctgtatgatcataatgaaaaggggtttaattggctcatggttctgcaggctgtaaagaaagcatagtggcttctgcttctgggaggactcaggaagcctcccaatcataccagtaggaaaacagcaatgaaatgtttcatacagcaggagtaggagcaaggctgagagaggaaagacgtgccacaccgtc

SEQ ID NO: 627784 - DNA, 385 bp, Homo sapiens
ggcacctctttcctctctcagccttgctcctactcctgctgtatgaaacatttcattgctgttttcctactggtatgattgggaggcttcctgagtcctcccagaagcagaagccactatgctttctttacagcctgcagaaccatgagccaattaaaccccttttcattatgatcatacagaaaataaagtactgcgaagtggagctatgaaatatcttcaatkacatttccccatcgtcttggctattaacattggacttcttttaatgcaaatatctgaaggcttcttgaagtttccccctgaaaatggacttctttttcttctgcattgccaggctgcaacaaagatagctgaaaatgtaaagcaggttcagaagtgggta

SEQ ID NO: 627785 - DNA, 405 bp, Homo sapiens
acctctggctgttacccacttctgaacctgctttacattttcagctatctttgttgcagcctggcaatgcagaagaaaaagaagtccattttcagggggaaacttcaagaagccttcagatatttgcattaaaaagaagtccagtgctaatagccaagacgatggggaaatgtcattgaagatatttcatagctccacttcgcagtactttattttctgyatgatcataatgaaaaggggtttaattggctcatggttctgcaggctgtaaagaaagcatagtggcttctgcttctgggaggactcaggaagcctcccaatcataccagtaggaaaacagcaatgaaatgtttcatacagcaggagtaggagcaaggctgagagaggaaagacgtgccacaccgt

SEQ ID NO: 627786 - DNA, 353 bp, Homo sapiens
cacttctgaacctgctttacattttcagctatctttgttgcagcctggcaatgcagaagaaaaagaagtccattttcagggggaaacttcaagaagccttcagatatttgcattaaaaagaagtccagtgctaatagccaagacgatggggaaatgtcattgaagatatttcatagctccacttcgcagtactttattttctgtatgatcrtaatgaaaaggggtttaattggctcatggttctgcaggctgtaaagaaagcatagtggcttctgcttctgggaggactcaggaagcctcccaatcataccagtaggaaaacagcaatgaaatgtttcatacagcaggagtag

SEQ ID NO: 627787 - DNA, 405 bp, Homo sapiens
acctctggctgttacccacttctgaacctgctttacattttcagctatctttgttgcagcctggcaatgcagaagaaaaagaagtccattttcagggggaaacttcaagaagccttcagatatttgcattaaaaagaagtccagtgctaatagccaagacgatggggaaatgtcattgaagatatttcatagctccacttcgcagtactttattttctgtatgatcataaygaaaaggggtttaattggctcatggttctgcaggctgtaaagaaagcatagtggcttctgcttctgggaggactcaggaagcctcccaatcataccagtaggaaaacagcaatgaaatgtttcatacagcaggagtaggagcaaggctgagagaggaaagacgtgccacaccgt

SEQ ID NO: 627788 - DNA, 328 bp, Homo sapiens
ctctccaacctctggctgttacccacttctgaacctgctttacattttcagctatctttgttgcagcctggcaatgcagaagaaaaagaagtccattttcagggggaaacttcaagaagccttcagatatttgcattaaaaagaagtccagtgctaatagccaagacgatggggaaatgtcattgaagatatttcatagctccacttcgcagtactttattttctgtatgatcataatgaaaaggggtttaattggctcayggttctgcaggctgtaaagaaagcatagtggcttctgcttctgggaggactcaggaagcctcccaat

SEQ ID NO: 627789 - DNA, 385 bp, Homo sapiens
ggcacctctttcctctctcagccttgctcctactcctgctgtatgaaacatttcattgctgttttcctactggtatgattgggaggcttcctgagtcctcccagaagcagaagccactrtgctttctttacagcctgcagaaccatgagccaattaaaccccttttcattatgatcatacagaaaataaagtactgcgaagtggagctatgaaatatcttcaatgacatttccccatcgtcttggctattaacattggacttcttttaatgcaaatatctgaaggcttcttgaagtttccccctgaaaatggacttctttttcttctgcattgccaggctgcaacaaagatagctgaaaatgtaaagcaggttcagaagtgggta

SEQ ID NO: 627790 - DNA, 405 bp, Homo sapiens
acctctggctgttacccacttctgaacctgctttacattttcagctatctttgttgcagcctggcaatgcagaagaaaaagaagtccattttcagggggaaacttcaagaagccttcagatatttgcattaaaaagaagtccagtgctaatagccaagacgatggggaaatgtcattgaagatatttcatagctccacttcgcagtactttattttctgtatgatcataatgaaaaggggtttaattggctcatggttctgcaggctgtaaagaaagcatagtgrcttctgcttctgggaggactcaggaagcctcccaatcataccagtaggaaaacagcaatgaaatgtttcatacagcaggagtaggagcaaggctgagagaggaaagacgtgccacaccgt

SEQ ID NO: 627791 - DNA, 353 bp, Homo sapiens
cacttctgaacctgctttacattttcagctatctttgttgcagcctggcaatgcagaagaaaaagaagtccattttcagggggaaacttcaagaagccttcagatatttgcattaaaaagaagtccagtgctaatagccaagacgatggggaaatgtcattgaagatatttcatagctccacttcgcagtactttattttctgtatgatcataatgaaaaggggtttaattggctcatggttctgcaggctgtaaagaaagcatagtggcttctgcttctgggaggactcaggaagcctcccaatcatascagtaggaaaacagcaatgaaatgtttcatacagcaggagtag

SEQ ID NO: 627792 - DNA, 353 bp, Homo sapiens
cacttctgaacctgctttacattttcagctatctttgttgcagcctggcaatgcagaagaaaaagaagtccattttcagggggaaacttcaagaagccttcagatatttgcattaaaaagaagtccagtgctaatagccaagacgatggggaaatgtcattgaagatatttcatagctccacttcgcagtactttattttctgtatgatcataatgaaaaggggtttaattggctcatggttctgcaggctgtaaagaaagcatagtggcttctgcttctgggaggactcaggaagcctcccaatcataccagtaggaaaacwgcaatgaaatgtttcatacagcaggagtag

SEQ ID NO: 627793 - DNA, 397 bp, Homo sapiens
ctgttacccacttctgaacctgctttacattttcagctatctttgttgcagcctggcaatgcagaagaaaaagaagtccattttcagggggaaacttcaagaagccttcagatatttgcattaaaaagaagtccagtgctaatagccaagacgatggggaaatgtcattgaagatatttcatagctccacttcgcagtactttattttctgtatgatcataatgaaaaggggtttaattggctcatggttctgcaggctgtaaagaaagcatagtggcttctgcttctgggaggactcaggaagcctcccaatcataccagtaggaaaacagcaatgaaatgtttcatacagcaggagtargagcaaggctgagagaggaaagacgtgccacaccgt

SEQ ID NO: 627794 - DNA, 397 bp, Homo sapiens
ctgttacccacttctgaacctgctttacattttcagctatctttgttgcagcctggcaatgcagaagaaaaagaagtccattttcagggggaaacttcaagaagccttcagatatttgcattaaaaagaagtccagtgctaatagccaagacgatggggaaatgtcattgaagatatttcatagctccacttcgcagtactttattttctgtatgatcataatgaaaaggggtttaattggctcatggttctgcaggctgtaaagaaagcatagtggcttctgcttctgggaggactcaggaagcctcccaatcataccagtaggaaaacagcaatgaaatgtttcatacagcaggagtagragcaaggctgagagaggaaagacgtgccacaccgt

SEQ ID NO: 627795 - DNA, 404 bp, Homo sapiens
ctgttacccacttctgaacctgctttacattttcagctatctttgttgcagcctggcaatgcagaagaaaaagaagtccattttcagggggaaacttcaagaagccttcagatatttgcattaaaaagaagtccagtgctaatagccaagacgatggggaaatgtcattgaagatatttcatagctccacttcgcagtactttattttctgtatgatcataatgaaaaggggtttaattggctcatggttctgcaggctgtaaagaaagcatagtggcttctgcttctgggaggactcaggaagcctcccaatcataccagtaggaaaacagcaatgaaatgtttcatacagcaggagtaggagcaaggctgagagaggaaagasgtgccacaccgtcctataa

SEQ ID NO: 627796 - DNA, 241 bp, Homo sapiens
agaaagcagagatccagagaacagcatgaagacaataagagrcttgagactcactttcactttgccttgaggccacagaaagcccaaagcatctgaatatcttcttggaggcattttcctaaaatagagctattgaaacttgaagaaaaatgtgaatcaagaagctaaatttaaagatatgttattttctcctgccctcctccacaaattaaccacaggataagtctagtgagataaagca

SEQ ID NO: 627797 - DNA, 241 bp, Homo sapiens
agaaagcagagatccagagaacagcatgaagacaataagaggcttgagactcactttcactttgccttgaggccacagaaagcccaaagcatctgaatatcttcttggaggcattttcctaaaatagagctattgaaacttgaagaaaaatgtgaatcaagaagctaaatttaaagatatgttattttctcctgccctccyccacaaattaaccacaggataagtctagtgagataaagca

SEQ ID NO: 627798 - DNA, 654 bp, Homo sapiens
ttataattatctctatttaaatttgtrttggcccactcctgggtatctacctagaggaaaataagtcatatgaaaaagacatttgtacacacatttatagcagcacaatttgcagttgcaaaaatgtggaaccaggttaaatgtctatcagccaatgagtggacaaagaaaatgtgttatagatacaccatggaatactgctcagccctaaaaaggaatgaaataatggcatttgcagcaatctggatggagttagagatgattattctaagtgaagtaactcaggaataaaaaaacaaatattgtatgctctcacttataagtgggagataagctatgagggtgtaaagacataagaatgatataagggactctggggactcggagggaaggttgggggatgagggatgaaagactacacgttgggtacagtgtacacgactcgagtagtgcatacaccaaaatctcagaaaatcaccaccaaataacttttccatgtaaccagaaaccacttgtttcccaaaaacttattaaataaagtgatatgtatggaaacaatgaatatgatagtcttgaggtgcaacactcactgggtttcatatgggagaaaaacagctaaaatcaaacacatggatagacagtcagaacaatgtc

SEQ ID NO: 627799 - DNA, 654 bp, Homo sapiens
ttataattatctctatttaaatttgtgttggcccactcctgggtatctacctagaggaaaataagtcatatgaaaaagacatttgtacacacatttatagcagcacaatttgcagttgcaaaaatgtggaaccaggttaaatgtctatcagccaatgagtggacaaagaaaatgtgttatagatacaccatggaatactgctcagccctaaaaaggaatgaaataatggcatttgcagcaatctggatggagttagagatgattattctaagtgaagtaactcaggaataaaaaaacaaatattgtatgctctcacttataagtgggagataagctatgagggtgtaaagacataagaatgatataagggactctggggactcggagggaaggttgggggatgagggatgaaagactacacgttgggtacagtgtacacgactcgagtagtgcatacaccaaaatctcagaaaatcaccaccaaataacttttccatgtaaccagaaaccacttgtttcccaaaaacttattaaataaagtgatatgtatggaaacaatgaatatgatagtcttgaggtgcaacaytcactgggtttcatatgggagaaaaacagctaaaatcaaacacatggatagacagtcagaacaatgtc

SEQ ID NO: 627800 - DNA, 488 bp, Homo sapiens
agtgtggagctggaaacctggagcctgaggccgactgtctctccctgtgtcttggaggaaaggccatttcccaaaaaaaaccccagggcctgacctctgggcmcatatgcagggagggagggtctgtgagctgagggggacattgtaataagactttgagcacggctgctcaggggcctggtcagtggaccatggtcagaggtgacctggtcatcaggacctagtcatttgggacctcatcagcaggcgcctggttagtggtgggctcctcagtaaaggcctcatcagtggggacctggtgacctagtcattggaagcctggtcagtggggggtacctcatcagtggtggccttactagtggggcctgattggttggaacataaacaatgaaaaactggtttgtggggcatatacagtataccaggggcctggtcagtgtgggaccttggtggcttggagcctggtcagtgagggcctggtcagaggt

SEQ ID NO: 627801 - DNA, 488 bp, Homo sapiens
agtgtggagctggaaacctggagcctgaggccgactgtctctccctgtgtcttggaggaaaggccatttcccaaaaaaaaccccagggcctgacctctgggcacayatgcagggagggagggtctgtgagctgagggggacattgtaataagactttgagcacggctgctcaggggcctggtcagtggaccatggtcagaggtgacctggtcatcaggacctagtcatttgggacctcatcagcaggcgcctggttagtggtgggctcctcagtaaaggcctcatcagtggggacctggtgacctagtcattggaagcctggtcagtggggggtacctcatcagtggtggccttactagtggggcctgattggttggaacataaacaatgaaaaactggtttgtggggcatatacagtataccaggggcctggtcagtgtgggaccttggtggcttggagcctggtcagtgagggcctggtcagaggt

SEQ ID NO: 627802 - DNA, 488 bp, Homo sapiens
agtgtggagctggaaacctggagcctgaggccgactgtctctccctgtgtcttggaggaaaggccatttcccaaaaaaaaccccagggcctgacctctgggcacatatgcagggagggagggtctgtgagctgagggggacattgtaataagactttgagcacggctgctcaggggcctggtcagtggaccatggtcagaggtgacctggtcatcaggacctagtcatttgggacctcatcagcaggcgcctggttagtggtgggctcctcagtaaaggcctcatcagtggggacctggtgacctagtcattggaagcctggtcagtggggggtacctcatcagtggtggccttactagtggggcctgattggttggaacataaacaatgaaaaactggttkgtggggcatatacagtataccaggggcctggtcagtgtgggaccttggtggcttggagcctggtcagtgagggcctggtcagaggt

SEQ ID NO: 627803 - DNA, 488 bp, Homo sapiens
agtgtggagctggaaacctggagcctgaggccgactgtctctccctgtgtcttggaggaaaggccatttcccaaaaaaaaccccagggcctgacctctgggcacatatgcagggagggagggtctgtgagctgagggggacattgtaataagactttgagcacggctgctcaggggcctggtcagtggaccatggtcagaggtgacctggtcatcaggacctagtcatttgggacctcatcagcaggcgcctggttagtggtgggctcctcagtaaaggcctcatcagtggggacctggtgacctagtcattggaagcctggtcagtggggggtacctcatcagtggtggccttactagtggggcctgattggttggaacataaacaatgaaaaactggtttgtggggcatatacagtataccaggggcctggtcagtgtgrgaccttggtggcttggagcctggtcagtgagggcctggtcagaggt

SEQ ID NO: 627804 - DNA, 484 bp, Homo sapiens
gggaacctggtcaggggcggttggtcagtacctagtctgctggccactatgtgacctcaggcagggggtttgtctgtggagcctccttgcctccatctgcagggaaggtgagtcagggcaacctggagggtggctggaaagagaaggtgagaagatgtgttgaatccaatactgcttggcagacctacaactttacatatgacctgagttccacctagagagggtgccagccctctcagcattatgcagtgcccctcctctgtctgcatccccaggaccaccatgggtggggagggcagagattggggagcacctatagaggctctaatgctctaaggtgacagtgatgaggacctgggtgcacccatgagtggagaagctaggcctgtccagagaagcaagacaaacacacacatatgtgcacacacacacacaggcacacatgcatacacaaacacattgyatacacacatgtcagttcagg

SEQ ID NO: 627805 - DNA, 612 bp, Homo sapiens
aaatatcttttttaaatcaataactttatttcttagagcagttttaggttcacagcaaaaatgagaggaaggtacagagatttcttgtatattccatgcctccaacacatgcatagcctcccccattattagtattttccaccagagtgtggtacatttgttacaactgatgaacttacattgacacattataatcactcaaagttcatagtttacatcaggcttcactcttgatgctgtacattctgtgaatttggacaaatgtataatgacatgayatgtatctattactgttatattattgacagaacagtttcactgccctaaaaattctctatgctatgcctgttcatctctccctttctccctagcaacttgtggcagccattgatctttactctgtcttcatagttttacttttttcagaagagtcatatagttggaataatactgtggatatctttttgaatagttaaaaaaatcaaagctccatggcaattgaaggtagtcatttaagatgttctttgtccttttgtttttcttttgcttttttatcattgtaaagaatgatatatgctgatgaggtatgctttacatacttagaaaacatga

SEQ ID NO: 627806 - DNA, 509 bp, Homo sapiens
atgttagccttttaatcacaactatttaacaagtctctgcaatggtccaaagtttccctcatcttcctgttttcttccaagctctccaaactctcttaacctctggcccttacctaattcagaacctgcttctacactatcagctatcattttcrcagcctggcaatgtggtaacagaagaaaagtctattatcagggggaaacatcaagatggcatccaatatttgcattgaaaaaagctcagtgctaatagccaagagattgggggaaggcctagaagtcatttcatagcttcactttgcagcattaattttctgtatgtacataaagaaaagaggtttagttgactcacagttcttcaggctataaaataagcatagtggattctgcttgtaggaggactcaggaagcctcccaatcataccagaaggccaaacagcaatgaaatgtttcatgtgccaggagtagaagcaacacagagagaggaaagaggtgcgacatcctgttat

SEQ ID NO: 627807 - DNA, 596 bp, Homo sapiens
ggccaggtcaccgtgcagccacgttctttgctaaggaaacaaaagtaactttgacttctgttcccagtaagtgcttcattttcatctgagaccttctaagtygggctttcactgaccattttcctgtgagccttctgatcacaagtgtttaacaattctttacaaagatccaaactttctttcatcttcttgtctttgaagccctccaaactctcccgacctctgtccgctactcccttctgaacctgcttctatattatcactatctttgccacagcctggcaatgtggtaaaggaaaacaagtccattttcagggggaaatttcatgaagccttcacatacttgaatgaaaagaagctgagtgctgattggcaagacaatgacatttaatagttccactttgcaccactaattttctctatgatcataaagaaaagaggtttaattggctcatgattctgcaggccataaggaaacataatggcttctgaatttgggaggactcaggaagcctcccaatcatatcagaatgtccaggggcgacgagatgattcatgtggcaggagtaggcacaagacagagagaggaaagaggg

SEQ ID NO: 627808 - DNA, 626 bp, Homo sapiens
gagggtgcagtagaaagagcacacagctagcagtaaagagaggtggccctgactgcagctctgcctctgacttcctgagtaacctcagactagtcatgcagtgcctgctcccacatttctttttgtaagctgcaaggattgaatcagacaatagcctctaagtttcttctgaactctcatactcagggatgccaatgatgttggcaggatgagctacatagwttgtagggcccagtgaaaaatgaaagtacagggctccttgttcaaaaattaagcatttcaagatgcaacagcagagcattgtaaaccatgtgcacaacgcttctgagaccagggctctctgcaactgcccagttatagcccttgaagataggatggtgtcagcttcccgttacgaagctgatttatcactcagggctcagaagttggatcttccaggctgaaagtgggaggagaacacatgttgtgctagtcacagccagagataacacaaagacggcctaacaagggcccaggcacaacacacattgttataaagaagagaagagggtcacctagtgactcaacacaaaaatgatcctctgtctacatctcctctccaggtttcagtcatggtaaggactgtc

SEQ ID NO: 627809 - DNA, 576 bp, Homo sapiens
tcctctgtctacatctcctctccaggtttcagtcatggtaaggactgtcccaggtttcagagccttcaaagaagatcttaactctgaaacckgtgcaaagtctggggatagcaggttgtgtaccacctcactctcctgtctctttctctctgaataaacatcttttatcaggaagcccagcagaacacagtcaagaagctgataggtgactgctattcccctctcgctgaaaacgcagccacttggagtcagcttgatggcagtggtggctcaggccttgaacacgtgagaatagactatgttgtcaagatgctgatgaaccgcacttctgcctgacttgatgcattgtctcaggtctcagcactcaaaatggatgctcataatcctacacacaatccccaaatgtcaatgaggatcattggccaaccatacctcagtgcatggggggtagtaaggttatccattaaggccccaccttccacctcacaaatacttctgatcagagggatgagcttgggtaattttgggatgcatgacaggatggtgtcagcagactggccaaatccacattcagta

SEQ ID NO: 627810 - DNA, 365 bp, Homo sapiens
aggcagaaaggatagcatgagcaagacaagtgctgaaatctgcccaattaactctgaggataaagtccaatggcagggaaataaaaacacrtgtccacataataacccctaagtgaatgtttgcagcagcatttttcataatagctagaagtggaaactaacctaaatgtccatcaactgatgaatgaatggaaaaccagtatagccatgcaatagagtatcatttaactataacaagaaataaactaccaatgtgtgctaaaacatgcatgaattctgaaaacattaagctaagtgaaaaagccagtcacaaaggactatgtattgtctaactctatgtatatgaaatatgcagaacaggcaaa

SEQ ID NO: 627811 - DNA, 365 bp, Homo sapiens
aggcagaaaggatagcatgagcaagacaagtgctgaaatctgcccaattaactctgaggataaagtccaatggcagggaaataaaaacacatgtccacataataaccyctaagtgaatgtttgcagcagcatttttcataatagctagaagtggaaactaacctaaatgtccatcaactgatgaatgaatggaaaaccagtatagccatgcaatagagtatcatttaactataacaagaaataaactaccaatgtgtgctaaaacatgcatgaattctgaaaacattaagctaagtgaaaaagccagtcacaaaggactatgtattgtctaactctatgtatatgaaatatgcagaacaggcaaa

SEQ ID NO: 627812 - DNA, 365 bp, Homo sapiens
aggcagaaaggatagcatgagcaagacaagtgctgaaatctgcccaattaactctgaggataaagtccaatggcagggaaataaaaacacatgtccacataataacccctaagtgaatgtttgcagcagcatttttcataatagctagaagtggaaactaacstaaatgtccatcaactgatgaatgaatggaaaaccagtatagccatgcaatagagtatcatttaactataacaagaaataaactaccaatgtgtgctaaaacatgcatgaattctgaaaacattaagctaagtgaaaaagccagtcacaaaggactatgtattgtctaactctatgtatatgaaatatgcagaacaggcaaa

SEQ ID NO: 627813 - DNA, 401 bp, Homo sapiens
aactctccaacctctggctgttayccacttctgaacctgctttacattttcagctatctttgttgcagcctggcaatgcagaagaaaaagaagtccattttcagggggaaacttcaagaagccttcagatatttgcattaaaaagaagtccagtgctaatagccaagacgatggggaaatgtcattgaagatatttcatagctccacttcgcagtgctttattttctgtatgatcataatgaaaaggggtttaattggctcatggttctgcaggctgtaaagaaagcatagtgacttctgcttctgggaggactcagaaagcctcccaatcataccagtaggaaaacagcaatgaaatgtttcatacagcaggagtaaaagcaaggctgagagaggaaaga

SEQ ID NO: 627814 - DNA, 365 bp, Homo sapiens
aggcagaaaggatagcatgagcaagacaagtgctgaaatctgcccaattaactctgaggataaagtccaatggcagggaaataaaaacacatgtccacataataacccctaagtgaatgtttgcagcagcatttttcataatagctagaagtggaaactaacctaaaygtccatcaactgatgaatgaatggaaaaccagtatagccatgcaatagagtatcatttaactataacaagaaataaactaccaatgtgtgctaaaacatgcatgaattctgaaaacattaagctaagtgaaaaagccagtcacaaaggactatgtattgtctaactctatgtatatgaaatatgcagaacaggcaaa

SEQ ID NO: 627815 - DNA, 356 bp, Homo sapiens
ctttgttgcagcctggcaatgcagaagaaaaagaagtccattttcagggggaaacttcaagaagccttcagatatttgcattaaaaagaagtccagtgctaatagccaagacgatggggaaatgtcattgaagatatttcatagctccacttcgcagtrctttattttctgtatgatcataatgaaaaggggtttaattggctcatggttctgcaggctgtaaagaaagcatagtgacttctgcttctgggaggactcagaaagcctcccaatcataccagtaggaaaacagcaatgaaatgtttcatacagcaggagtaaaagcaaggctgagagaggaaagaagtgccacaccg

SEQ ID NO: 627816 - DNA, 406 bp, Homo sapiens
caacctctggctgttacccacttctgaacctgctttacattttcagctatctttgttgcagcctggcaatgcagaagaaaaagaagtccattttcagggggaaacttcaagaagccttcagatatttgcattaaaaagaagtccagtgctaatagccaagacgatggggaaatgtcattgaagatatttcatagctccacttcgcagtgctttattttctgtatgatcataatgaaaaggggtttaattggctcatggttctgcaggctgtaaagaaagcatagtgrcttctgcttctgggaggactcagaaagcctcccaatcataccagtaggaaaacagcaatgaaatgtttcatacagcaggagtaaaagcaaggctgagagaggaaagaagtgccacaccg

SEQ ID NO: 627817 - DNA, 406 bp, Homo sapiens
caacctctggctgttacccacttctgaacctgctttacattttcagctatctttgttgcagcctggcaatgcagaagaaaaagaagtccattttcagggggaaacttcaagaagccttcagatatttgcattaaaaagaagtccagtgctaatagccaagacgatggggaaatgtcattgaagatatttcatagctccacttcgcagtgctttattttctgtatgatcataatgaaaaggggtttaattggctcatggttctgcaggctgtaaagaaagcatagtgacttctgcttctgggaggactcagaaagcctcccaatcataccagtaggaaaacagcaatgaaatgtttcatacagcaggagtaraagcaaggctgagagaggaaagaagtgccacaccg

SEQ ID NO: 627818 - DNA, 406 bp, Homo sapiens
caacctctggctgttacccacttctgaacctgctttacattttcagctatctttgttgcagcctggcaatgcagaagaaaaagaagtccattttcagggggaaacttcaagaagccttcagatatttgcattaaaaagaagtccagtgctaatagccaagacgatggggaaatgtcattgaagatatttcatagctccacttcgcagtgctttattttctgtatgatcataatgaaaaggggtttaattggctcatggttctgcaggctgtaaagaaagcatagtgacttctgcttctgggaggactcagaaagcctcccaatcataccagtaggaaaacagcaatgaaatgtttcatacagcaggagtaaragcaaggctgagagaggaaagaagtgccacaccg

SEQ ID NO: 627819 - DNA, 568 bp, Homo sapiens
ctgggggtttgagcttcaatatgtgaattttgaggggacatatttagttcttagcaaatgctattataaatgaaattgtttttaattttccagattggtgattgctgatgtatagaaacacaattgattttggggtattctcttagtctattttctgctgctgtaacagaatactacagactgggtaayatataataaacagaagtttattggctcacggttctggatgctgaagattctaagattgaagggctagcatctggtgagagcctacttggtatgtatgttatcccatggtggaaggacaaagagagggctagagagcaagggatcaaacttgaagcctcaagttcttttacaattggcattaatctattcatgagggtgagacctcatgacctaaacaacttacattaggccttaccacccaacattgttgcattatgggttaagtttctagcacgtcctttggggggatatattcaaaccatagcaagtgttggccttgtactctgaacatttacttattagctctattaattttgtatgtgtgcctacatgtgtatat

SEQ ID NO: 627820 - DNA, 653 bp, Homo sapiens
cctctaacatactcagggaccctattaaatgatagcaaagattttcttttctggtatatggaatctcttttgctcctggcagaatacaaacatgctcaaatctctttcaattttaagataatcttgttatctagcagctaatctcccctaaccttcttcttaacagactttgtatatatttttaatgcatgacccatgaaagacccatgagtccccatctttcctaaggcacgtttctgattttcatgtgctcagagagacgaccttctcatactttccaaggtaaatgtcttctcctttgttcacattaccctttatagagagacccattctatcaaatgtggaattatatcatagttgatccatcaagacagaagccccacttttcatccttgggctacaacataattgctggttcaaaatagtgcgtctaagtagttgtcrggtgaataaattataaaaaataaaattaatagacatgatatttaatactactttaaactaattatgcaaatattaaaatttaaaactccattgttttgtaaatttcatatagccactaacaatatgaactatctctaaaattttgagtttttctgtgaaaaagttacctgaaagataaaatatctatcgacttttgctttctggtaact

SEQ ID NO: 627821 - DNA, 604 bp, Homo sapiens
tgcatactgtaagaaatctctaaatctctctattcagaatcactaacattttcctttktgagcatttgaacaaggcatgtcactgagctggactgataatatgaaaagaaataaaatatatcagtgacctcaaagaacttgctacctactaaggatattcaaattttaaatttaaaaattaatttgaaagtaagatagatcatttctatcataccttttttggttgcggaagaagagggacctagttcacctgccagaaacacttgaatggcgaatttagttaagaaaatataggccaggtgcattggctcactcctgtaatcccagcactttgggaggctgaggcaggcggatcacttgaggtcaggagttcgagaaaagcctgactaacatggtgaaaccccgtctctactaaaaatacaaaaattagccaggcatggtggtacatgcctgtaatcccagctactcgggaggctaaggcaggagaatcacttgaacccagcaggcggaggttgaagtgagccgagatcgcaccactgcactgtagcctgggtgacagagtgagactccatctaaaaaaaagaagaaaaaaatatgaatcaga

SEQ ID NO: 627822 - DNA, 604 bp, Homo sapiens
tgcatactgtaagaaatctctaaatctctctattcagaatcactaacattttcctttgtgagcatttgaacaaggcatgtcactgagctggactgataatatgaaaagaaataaaatatatcagtgacctcaaagaacttgctacctactaaggatattcaaattttaaatttaaaaattaatttgaaagtaagatagatcatttctatcataccttttttggttgyggaagaagagggacctagttcacctgccagaaacacttgaatggcgaatttagttaagaaaatataggccaggtgcattggctcactcctgtaatcccagcactttgggaggctgaggcaggcggatcacttgaggtcaggagttcgagaaaagcctgactaacatggtgaaaccccgtctctactaaaaatacaaaaattagccaggcatggtggtacatgcctgtaatcccagctactcgggaggctaaggcaggagaatcacttgaacccagcaggcggaggttgaagtgagccgagatcgcaccactgcactgtagcctgggtgacagagtgagactccatctaaaaaaaagaagaaaaaaatatgaatcaga

SEQ ID NO: 627823 - DNA, 604 bp, Homo sapiens
tgcatactgtaagaaatctctaaatctctctattcagaatcactaacattttcctttgtgagcatttgaacaaggcatgtcactgagctggactgataatatgaaaagaaataaaatatatcagtgacctcaaagaacttgctacctactaaggatattcaaattttaaatttaaaaattaatttgaaagtaagatagatcatttctatcataccttttttggttgcggaagaagagggacctagttcacctgccagaaacacttgaatggcgaatttagttaagaaaatataggccaggtgcattggctcackcctgtaatcccagcactttgggaggctgaggcaggcggatcacttgaggtcaggagttcgagaaaagcctgactaacatggtgaaaccccgtctctactaaaaatacaaaaattagccaggcatggtggtacatgcctgtaatcccagctactcgggaggctaaggcaggagaatcacttgaacccagcaggcggaggttgaagtgagccgagatcgcaccactgcactgtagcctgggtgacagagtgagactccatctaaaaaaaagaagaaaaaaatatgaatcaga

SEQ ID NO: 627824 - DNA, 604 bp, Homo sapiens
tgcatactgtaagaaatctctaaatctctctattcagaatcactaacattttcctttgtgagcatttgaacaaggcatgtcactgagctggactgataatatgaaaagaaataaaatatatcagtgacctcaaagaacttgctacctactaaggatattcaaattttaaatttaaaaattaatttgaaagtaagatagatcatttctatcataccttttttggttgcggaagaagagggacctagttcacctgccagaaacacttgaatggcgaatttagttaagaaaatataggccaggtgcattggctcactcctgtaatcccagcactttgggaggctgaggcaggcggatcacttgaggtcaggagttcgagaaaagcctgactaacatggtgaaacccygtctctactaaaaatacaaaaattagccaggcatggtggtacatgcctgtaatcccagctactcgggaggctaaggcaggagaatcacttgaacccagcaggcggaggttgaagtgagccgagatcgcaccactgcactgtagcctgggtgacagagtgagactccatctaaaaaaaagaagaaaaaaatatgaatcaga

SEQ ID NO: 627825 - DNA, 604 bp, Homo sapiens
ccaacctgacctccctctagcaagatatttttcagtgyttttattcagtatgcacttattctgaaatatttttgcattcttgccatttgaaaaggttgtggcatagttggtctataatgaagttgcagatttaaaactactgttagctttgtaaaacaaaatataggtgtttttgtcctagtatatcattattccatttttcttctagataccattcattgtcttcacagttcacaaaagaagaatgtgaaattcagtgaatgctgttactagtcatgccaagagatgaatctcatttcacaaaaattaaattatgtttttccactaaaaggtgatataagttgaagacacgtcactgtgatattgggagacctcaccacttaaggctccacagtggcttactcagctgaattctgagttactgctctttactttgttcacccattggagagtgcagtttttttaaatgttgggagatggccattctaactactgttcaatgtctctgttttggggagggtaaaacaagaaaataaaaaaaaaaaaagagtatacgtgtccgggcacagtggctcatgcctgtaatcccagcactttgggaggc

SEQ ID NO: 627826 - DNA, 604 bp, Homo sapiens
ccaacctgacctccctctagcaagatatttttcagtgtttttattcagtatgcacttattctgaaatatttttgcattcttgccatttgaaaaggttgtggcatagttggtctataatgaagttgcagatttaaaactactgttagctttgtaaaacaaaatataggtgtttttgtcctagtatatcattattccatttttcttctagataccattcattgtcttcacagttcacaaaagaagaatgtgaaattcagtgaatgctgttactagtcrtgccaagagatgaatctcatttcacaaaaattaaattatgtttttccactaaaaggtgatataagttgaagacacgtcactgtgatattgggagacctcaccacttaaggctccacagtggcttactcagctgaattctgagttactgctctttactttgttcacccattggagagtgcagtttttttaaatgttgggagatggccattctaactactgttcaatgtctctgttttggggagggtaaaacaagaaaataaaaaaaaaaaaagagtatacgtgtccgggcacagtggctcatgcctgtaatcccagcactttgggaggc

SEQ ID NO: 627827 - DNA, 604 bp, Homo sapiens
ccaacctgacctccctctagcaagatatttttcagtgtttttattcagtatgcacttattctgaaatatttttgcattcttgccatttgaaaaggttgtggcatagttggtctataatgaagttgcagatttaaaactactgttagctttgtaaaacaaaatataggtgtttttgtcctagtatatcattattccatttttcttctagataccattcattgtcttcacagttcacaaaagaagaatgtgaaattcagtgaatgctgttactagtcatgccaagagatgaatctcatttcacaaaaattaaattatgtttttccactaaaaggtgatataagttgaagacacgtcactgtgatattgggagacctcaccacttaaggctccacagtggcttactcwgctgaattctgagttactgctctttactttgttcacccattggagagtgcagtttttttaaatgttgggagatggccattctaactactgttcaatgtctctgttttggggagggtaaaacaagaaaataaaaaaaaaaaaagagtatacgtgtccgggcacagtggctcatgcctgtaatcccagcactttgggaggc

SEQ ID NO: 627828 - DNA, 606 bp, Homo sapiens
atcatcaaaataaagaccacgtgttataagcccctgtatgtcaggagtattgctacatgtgtagctcaaccaatcctctaaataggaggtattattcccacttcacggagaagaaaactgagattcaaatgattcaaatagtttaagcaacttgacccgatcacctcagacagagctaaactcatttctttctgaccacagagtatattatctttctaccatgctgtgaggcctctgagaatgtgggacttggctgatacagcacacaggtcttatgcaccttgtcagagactctcagggccagcagtaggctctcaggtgytcgccccttcccctgcagccactcctgccaccacagccttccaactccaccgggatctcctattatcctgtgcctgcagttgatgagttgcttgtattagtacaaacacaggtaatattagtatttgtattagtactgcacagatagtagcttttttatctcagagtatctgtggtcagcaatctgggctgttttctctggctttgggtcactcatcaggctgcatttaatgtgtcagttggaactacgtcatacaaggctaaactgaggaagagagaaagctt

SEQ ID NO: 627829 - DNA, 606 bp, Homo sapiens
atcatcaaaataaagaccacgtgttataagcccctgtatgtcaggagtattgctacatgtgtagctcaaccaatcctctaaataggaggtattattcccacttcacggagaagaaaactgagattcaaatgattcaaatagtttaagcaacttgacccgatcacctcagacagagctaaactcatttctttctgaccacagagtatattatctttctaccatgctgtgaggcctctgagaatgtgggacttggctgatacagcacacaggtcttatgcaccttgtcagagactctcagggccagcagtaggctctcaggtgttcgccccttcccctgcagccactcctgccaccacagccttccaactccacygggatctcctattatcctgtgcctgcagttgatgagttgcttgtattagtacaaacacaggtaatattagtatttgtattagtactgcacagatagtagcttttttatctcagagtatctgtggtcagcaatctgggctgttttctctggctttgggtcactcatcaggctgcatttaatgtgtcagttggaactacgtcatacaaggctaaactgaggaagagagaaagctt

SEQ ID NO: 627830 - DNA, 612 bp, Homo sapiens
atttatttaattccacactttgtgaagtatatttctcccccaccatcatccatccccatcccttgtatttctagctgttttttttgtttttttctaggtgttttttgtttttttaagmttctaagtgaatcaactaatataattcttaagagaattagctgtaaagatattcataccattgctcttcagacaagtagcactagctgcatgtgtctatttaaatttaaataaaatgaaaatttagttcctcagtttcattggccacatttaaattacttgttgctaaaagctaccttttttttttttaaaggagataaggtcttactgtgttgcccaggctggactcaaactccatcctcctgcctcagcttcctgaatagctgggactacagaagtgagccaccatgccccgcttgttgtatagcatttccatcatcacaaaaagttctctggcttataacatgatatgaatttattgttggatatgttgtagttcactcttactaaaaaagtatttcatgtccaacatcttagtaaatcatgataggctaaaaggaaaatctcattcataaagttacttggtgtgatttcctgattttctccagaggaccc

SEQ ID NO: 627831 - DNA, 612 bp, Homo sapiens
atttatttaattccacactttgtgaagtatatttctcccccaccatcatccatccccatcccttgtatttctagctgttttttttgtttttttctaggtgttttttgtttttttaagattctaagtgaatcaactaatataaytcttaagagaattagctgtaaagatattcataccattgctcttcagacaagtagcactagctgcatgtgtctatttaaatttaaataaaatgaaaatttagttcctcagtttcattggccacatttaaattacttgttgctaaaagctaccttttttttttttaaaggagataaggtcttactgtgttgcccaggctggactcaaactccatcctcctgcctcagcttcctgaatagctgggactacagaagtgagccaccatgccccgcttgttgtatagcatttccatcatcacaaaaagttctctggcttataacatgatatgaatttattgttggatatgttgtagttcactcttactaaaaaagtatttcatgtccaacatcttagtaaatcatgataggctaaaaggaaaatctcattcataaagttacttggtgtgatttcctgattttctccagaggaccc

SEQ ID NO: 627832 - DNA, 587 bp, Homo sapiens
caggcgtggtggtgtgccctgtaatcccagctacttgggaggctgaggcaggaaaatcrcttgaacccaggaggcggaggttgcagtgagccaagattgcgccattgcacttcagtctgggtgacaagagtgaaactccacctcaaaaaaaaaaaaaaaagaggtgctgcaatgcattactatgtatgtatatatacatacacacatataattttgcacagacatgaatatattttggctacctcctcagaaatagaaattttcagcacattcgaagttcccctttcatccagcacttcagtgttgactctgtttcttgtttagatttcatatatagtgatacattctttgaagaatacctcgcaggctcttgtttttagagacagaataaagttgcagtagagactgagagcaatatgtttccttttctgtttacaaaattacctgtgaccaacaaatgggaaaagccatggtctttaaaagaaaaaatatgcaattccatttccactatttattcttgttagttcactgactgaaactgaaatgtggtttattacaatggatgaaaatttggaaagaaacaatta

SEQ ID NO: 627833 - DNA, 587 bp, Homo sapiens
caggcgtggtggtgtgccctgtaatcccagctacttgggaggctgaggcaggaaaatcacttgaacccaggaggcggaggttgcagtgagccaagattgcgccattgcacttcagtctgggtgacaagagtgaaactccacctcaaaaaaaaaaaaaaaagaggtgctgcaatgcattactatgtatgtatatatacatacacacatataattttgcacagacatgaatatattttggctacctcctcagaaatagaaattttcagcacattcgaagttcccctttcatccagcacttcagtgttgactctgtttcttgtttagatttcatatatagtgatacattctttgaagaatacctcgcaggctcttgtttttagagacagaataaagttgcagtagagactgagagcaatatgtttccttttctgtttacaaaattacctgtgaccaacaaatgggaaaagccatggtctttaaaagaaaaaatatgcaattmcatttccactatttattcttgttagttcactgactgaaactgaaatgtggtttattacaatggatgaaaatttggaaagaaacaatta

SEQ ID NO: 627834 - DNA, 466 bp, Homo sapiens
atttgttctcaaagagcaaaatacctttttacttatgctatggaataatacattcagatacttaggaaatgagtaaattgctgggatcctggagggttttttttccattgaaaagataaagtctgtttttatggcctaattattgccctttctcatatctcttcaagtattttgcttacagtgagttttctccaaagaatttcttatctgagtaaatcatctgagttccattagtgaggccagccccaagaaacatcagccctgataatagctagttgctatgaaggaacaggaatacaattcaccttgactccaggaatcataacacacatcyatatatattgtttaaatttgacactgcaagataagattaaagagtaacattttatgtgaaatataggctattcatcccttttttttcttcttccagagtatatattacagggaatataacagagaaatatgt

SEQ ID NO: 627835 - DNA, 546 bp, Homo sapiens
ggaacctgatacccaatgtgagagtattaagaagtgagacctttaggaggtaattaagtcatgaagcttcatactcatgaatgagattattgcccttatagaagagggctaggagagcccatttgcccctttttccctgtgaggacacatagaagttgccatctacaaagaatgagccctcatcagacactgaatctgctaccaccttgatcttggactacccagcctccagaactataggcaacaaattcctgttgtttaaaagtacccagtctaagctatttcgttataacagcargaacagactaagccaccttaccactcagtactccctcctctttctccttctcacctaccacctccaatttctcttctcaattctctcagttgatcttcttttaagctgttttttaaaagtccagctaggtcactatcctttttggggttcactccatcaaagtttatttttttaagttaaaaagaaaaatcatattaaaaaaaaactgattttcacagcacaattcctgggagcaattttatgataaa

SEQ ID NO: 627836 - DNA, 583 bp, Homo sapiens
gttcacctaaatctgaagatcttatcagtactttccaagacaaaagctggaggtgccagctttaaaactcttagaaaaaaattaaatgtacatcttcatgaccttgtattaggcaacagtttcttaggtatgacactgaaagtacaagtaacaaaagaaaaaaataaatgaactcaacatcatcaaaattaaacatttttatgtttcaaatgactattaagaaaataaaaacgcaaccctcaaaatgagtgaaaatatttacaaatcacatatctgataagggatggtatccagaagagaaaactcttacaactcaacactagaaagacaaattatccagttttaaaatgggcaatagatctgaatagataattctgcaaagayatacaagtggccaataagcacatgaaaagatgctcaacatcattagctgtcaaggaaatgtgaaccaaaaccacaatgagatagcacttcacaactactaggatggctataatacaaaaagatacataacaacaaatattggcaggatatgaaggaattgaaaccacttcattcattgctagtgggaatataaaatggt

SEQ ID NO: 627837 - DNA, 480 bp, Homo sapiens
aaggaggctgctctttcagcctgcattctagaacaaagaggacacaggaagcagagatgcagctgatctacagcttacataaaacctgaatgataaataaactttgtcattgtaagccactgagatttgcgagttgttcctgctgcaaagccaagtaatatactgcgctacccacctcacatatttgtctgaagyggactttaaaaatgttttaaagcactttataatgttctatgcccgtctatgtctcaaaccagctccttctctcgccatagattgatgcaggtcagaaaagttaacagcactaacttatgtgagacagtaaagtgagaatacctgctttcaaagctgcacctctctctcctgcctttctgccattggcccccaaattcgttgctactgccccgttaggattatactcagttcctatcccatctcctcataaaacaaaataatcgcacgggttttgttatttgtgat

SEQ ID NO: 627838 - DNA, 416 bp, Homo sapiens
catagtatttaaggatctgagttcaggaatcagactgccaaggtgcattccacatacttcacttcttagctgttataaccttggaaaagttattttgcttaagctccaatttccgcacccagaaagggaataacatcaccataaagccaktatgagaattaaatgacataaaatgtgtgtaaagtcacagcacaatgtctgccttataataggtgttcaataaatgtaagctactattaatattgcaaggttctcatagatattattcctctaaaattaaaaaaagtagtaaagccaataaagagctctaatctatagatggggaatgagctcagagagtcacaattcagaaattaaaaaacatttccccattctagtgtattcctaaattattcctaattattatgaaggaatat

SEQ ID NO: 627839 - DNA, 584 bp, Homo sapiens
ggctagaatttacaaataaattacaaaaactttaagtaactttagcaagattayaggatacaagttactatgaaaaaatttaattgtatttctgtatgttagcgctatacatttaaaacttggaaattttctaaaataaacctttacaacagcagaaaaacatcaaatacttagggataaaattaacaaaatatgaagcaagtacaggacctgtacactgaaaactagtaaatattgctgaggaaaaacaaaaacctaaataagtggagtaagatatcatgttcatagatttgaacacttaattttgctgtagtgtcaaattttcccaaaccgacttacagagtcagtgcaattctgatcaaaaactcagcagactttttttgtagtctaatcagctaacctaaaatttacatggaaatcgaaaggaccagaacatccaaaacaattttgaaaaagggagatgaaggtgcctagatagttcagtgaggaaatgataatcttttcaacaaatcttgctaaaccatttagataccatatacaaaaaagtgcacctccacccctacttcatacatacaaaaattaat

SEQ ID NO: 627840 - DNA, 583 bp, Homo sapiens
tctccccctttaggataaattccagtaaatgaaattttcatgtattaatattccaatgtctactgacacatacatggatcctgtgaaattgttttattaaaggattttccaatttacacaattagaagaaatgtacagrccatacacatattttagcttttggcaatttcttcaacattaatattgataaccttgttctgtctatctatctatctatctatctatctctatctacttatctatctacctacctacctacctatcttcctacctatcaaccacccatccatccatatatgtgtatacatatctagtagaaagaaatgaaaaccattcaataagtacaaattcattattaatatcatttatgaccaagatgggtagcaataaaagtaaaaactattttacttggattcatttaaggatggagtaatactgccacttttaagtaatattttaaattttttattatgacatttttaaacacacacacacacacacacacacacacacacacacacacacacacgaaacattaatgtaatgggctgtatatacccatcattaagctaaggaattatct

SEQ ID NO: 627841 - DNA, 416 bp, Homo sapiens
gaattcctaatgcttggtaattccaagtgttatgaatttgaagactagtctctccatgtcctgctatttatatatcagtactgggtttgttgttgttgttgttgctgtttgtttgagacagggtctcactctgttgcccaggctggagtgcagtggcatgaacatggctcactgcagcttccatctcccaggctcaagtgatactctcacctcagsccccagagtagctgggaccacaggcccacaccaccatgccccactaatttttatattttttgtagagacagggttttgccatgttgcccagcctcatgtggaactccttgactcaagtgatccacccacctcggcctcccaaagtgctgggattacaggtgggagccactgcacccagccaattgataatgtttattagc

SEQ ID NO: 627842 - DNA, 510 bp, Homo sapiens
tttgtgtcagattcatattcatgatccacggttagacaacacaacttcctgcttcctcatgctgtctgtcccatgttagccacacagccagcatttcctgcccgaaacctcatcaggacgaggcacaattrcactgcagtttctcttggctcctttactctttatccttaattcagtgttttctcaaagcgtggtaccctgaccagcaaaaggagcactaacatcacccaaggacttattagatgtgcacattcttgggtctcacccagaaactactgggtcagaagctctgggggtgaagcccagcaatctgttttttaatagcctccagcgggttgctatgccagctacagtttgagaaccactgtcttaacccatgtctcatcctgccttctttcttcctgctgtttgcattttactaattctaataggaagcagctcatgattggaggttattgtgtaccatttttcaaagccattatcacagatgactttagaagttcatgtaaa

SEQ ID NO: 627843 - DNA, 520 bp, Homo sapiens
ttttacatgaacttctaaagtcatctgtgataatggctttgaaaaatggtacacaataacctccaatcatgagctgcttcctattagaattagtaaaatgcaaacagcaggaagaaagaaggcaggatgagacatgggttaagacagtggttctcaaactgtagctggcatagcaacccgctggaggctattaaaaaacagattgctgggcttcacccccagagcttctgacccagtagtttctgggtgagacccaagaatgtgcacatctaataagtccttgggtgatgttagtgctccttttgctggtcagggtaccacgctttgagaaaacactgaattaaggataaagagtaaaggagccaagagaaactgcagtgtaattgtgcctcgtcctgatgaggtttcsggcaggaaatgctggctgtgtggctaacatgggacagacagcatgaggaagcaggaagttgtgttgtctaaccgtggatcatgaatatgaatctgacacaaaggacaatgg

SEQ ID NO: 627844 - DNA, 459 bp, Homo sapiens
cttacatttatttttaaaaatacaaaaaaattgcatgctgccatgttacactaaaacaataatagcttggttagaggggaaacccattcctcattcctctggtttctacatggagacgttttccccagggcttctgcttgcctaccctcttgcccctcttaactgctgcttcattgctggggtataagcactggcccctgtgtctccactgggggagccaatccatcctttccctcctgccctggacccgtgttgactccagactcagactttcccagttggtgggctgatttgaggtcaaggctaggggaggagcatgatcagacccatcaamgacttcctccagcccagcttttgccagtgataaaggagatcccctacttcgatctcccatttgtcttatttctcacatggttcagaaactcagagacagaagatggttcagaaattcagagacag

SEQ ID NO: 627845 - DNA, 532 bp, Homo sapiens
tccagcattatgttggactttttatatatgatagtaataataacaacctctgaaacaatatttcagagaacttactatgtgccaggctgtgtttattttttccttccttccatccatccatcctatgaagttagtaccaaaatcactctcattgtttagagaaaagtgaacattagaaagttaaataacttgtgtgaagtccctagctcagtagatgctgagctagtactatatggtaagagagagggagggggagagagagagagagagaatgtatgtgatttaatttaaaatggcttacttggaaattttaattccttaaggatggcaagaaccacatagaatcctttataaataagacatgtagttgtsattaacaaaactcaaactctcttaactgttagttcttgtagaagagaataatgaacatcatgaaaccatggctacatttatgcttccattgtaaagaaacattatgtaagtgaagtgccatgcgacaattttagaccaaaaatcataagaagaattaact

SEQ ID NO: 627846 - DNA, 364 bp, Homo sapiens
cctcaaacacaaacataacctcccttaatcctttcctgttattttattaatgtagaaagggaattcacaaagctggaagtttagaaaaagaagctgaactcagctgtcattcaaaatytgactttcatatttcctaatctccttttttccagcatcctttccaagaaccactgtaagtaaaacagtgcactagacccctttaaatttgaagaaattcaaatagtcacccattccatgactgtaaacaattgactctcatctcaggcatcaaattcatctattacagtagaggtttaagtactaacccactcaaaagaatctttcagatttagtaactcagaggagttacaataactcagtggga

SEQ ID NO: 627847 - DNA, 589 bp, Homo sapiens
gaaccaaaaagtgactgtggtagagagcgagctactctggagtagaagtttgggttctggctctgattctttcattccctagtcatttgccctgagggyattagactaggtcatctgattactgtgtgcaaaatatgtgctttatgatcacaaaaagtaactaaaagaatgtagacatgtgctgtagagttggcatttctgaagctacaaggctgcagcattctctggctattaatgtactggaaatcttaggctctttgaaaagcatgtggccaagtctgtggtcctcatggagtcagcaagatagaaaacataattttagcctgacagttccaataacataagaaaaaaaaaaagaccacgatgtgtagcattctaagaataatcccaaattgagggtgaggaatgggaaacagaaacaccaagtaaaatgatgtcaacttctgcagaacctcccagcattaaggcagagtttctacataaaaatgccaaaattactgtgcttccaaaaatgttcacttgttgaggctattgggcagactctactaagtctcaataagcaagtcatctggattttttaataaataac

SEQ ID NO: 627848 - DNA, 324 bp, Homo sapiens
gctcaggtaatcctgtctgacttgatctgcagcatcgagtcaaccctcctttccccaagggaaacgttcttctattagaggatgagagcttcaacatagcataaatgtaaagtaacaaatatacacatataccatgtgataagttaaatttcagaacaatcagtaatcaacagatttagagttaaaatgtaatttctctagctcagcagttctcaatccagggcatttttgccacctactctcytgccctgccagacatttgccaatatctggaggtactacttgttgtcactacttgtaggggatgtgctactggcaaatagt

SEQ ID NO: 627849 - DNA, 548 bp, Homo sapiens
ctccttcacttctacttctctcacccccttcaaagccaggcttcgtggctaagtcctccagcttcagtgcatccatttttccacccctgtcctcagccctctccaatctggcttctcttcctgccacgccactgaaggggctctaggtgttgtcagtaacagcctccatggtgctaaacccagtgggcatttttttcaggcctcatctaaccttacagcagctctcagaactctttgtgggccatacctatcatcttactgttaacgaaaagattgacatgcaggtcaaagcaaatagcacttatttgggaagcaaaaatggcagctggggtacaccggatcagggcagccctgaagagtgccctataaggcaggctgcaggagagaatttttaaaatagaggattgtcataaaaagttattttcggaagtagttcattggccaggsagaaatcctaaatcacaaagccgttgtgattggttagttaatgagagtactctcagctgaggtgttgaaggccagcagatgctgacttcagttgtttgacc

SEQ ID NO: 627850 - DNA, 425 bp, Homo sapiens
agaactcactgtcaagaagctaggaccaagccatgagggctccccatccaagcaccttgcaccaggcctccccccgagcaatggggattaccattcaacatgagatttgggcagcgacaaatatccaaactatatgagacattgaagcccattccctatataggatgtgtgrtggtgacacgggaatgtcacagaagcaattgattctggcccagcacaataaacaaaaacacaaatgacaacaagctttgaattaaaaatatagtcctttctgggagattgattccaggactcccttggataccaaaatccaaggaagctcaagtcccttgtataaaatggcatagtatttgcaaaaaactatgtgtatcctcccatatcctttaaatcatctctaaattacttatatctaatacaagataaat

SEQ ID NO: 627851 - DNA, 425 bp, Homo sapiens
agaactcactgtcaagaagctaggaccaagccatgagggctccccatccaagcaccttgcaccaggcctccccccgagcaatggggattaccattcaacatgagatttgggcagcgacaaatatccaaactatatgagacattgaagcccattccctatataggatgtgtgatggtgacacgggaatgtcacagaagcaattgattctggcccagcacaataaacaaaaacacaaatgacaacaagctttgaattaaaaatatagtcctttctgggagattgattccaggactcccttggataccaaaatccaaggaagctcaagtcccttgtataaaatggcrtagtatttgcaaaaaactatgtgtatcctcccatatcctttaaatcatctctaaattacttatatctaatacaagataaat

SEQ ID NO: 627852 - DNA, 558 bp, Homo sapiens
ctgtgatgtatggggagtgctgaggctgttccctaagaaggcctctcagggacccactagcccagaatagatgctgggggaagaggcccccagagctcccagcccctgcagctacaactcacgtcccaggtttgttgcttttgcatctctgcttcctactgaggrggaggttcagacctctgcctgtgctccagcaggtcatccctgaagggcagggcctgagagaggctgagcggataaatgcttctgctaaagctttagcacctggggtctcaacagctcaccttcagctccaggaacacttccagcagaacagatgtttccatgagaagccgacgggtgttctttttcccagttacccttccctgtgtcattttccaggaatccaaacttgtagagacaaagtctgagtggtaagagcgtgtgccacagatttttccttgtatggaaacatccaactcaaacccacctttatttatgagggagtcgcttcctggagatgcaccctgcctgtcacatcaaatcgacctgctggatgaaatacgtggtgaaggggcc

SEQ ID NO: 627853 - DNA, 567 bp, Homo sapiens
gaaacatccaactcaaacccacctttatttatgagggagtcgcttcctggagatgcaccctgcctgtcacatcaaatcgacctgctggatgaaatacgtggtgaaggggcccatggacacatggtccgttagttctggaaatacctctcctggtgcctcctcttctctgtggagaaaacaccttcccttgccagtgtctcaagagtttacaamtattttattcattcttgccacatatgaaggacttccctcctggtctacaatctagctttgcaaactaacttttcctttcctccttcttcctttcttctccctccctgcttctccctctctccttctcttcctcccctcctttttttttcctggagaaaaacattccatttaaacaaagtaggaaaacagaagacccagtgaaattgaataacaaggggccccactgtgacatcccaaacccacactgctgagataggacttcttggcatggagagttaataggaaaatgatgatcttaaatgagttaaggacagagtccaggaaggctgactgtcgaagcacgctgctggccac

SEQ ID NO: 627854 - DNA, 537 bp, Homo sapiens
cgttagttctggaaatacctctcctggtgcctcctcttctctgtggagaaaacaccttcccttgccagtgtctcaagagtttacaaatattttattcattcttgccacatatgaaggacttccctcctggtctacaatctagctttgcaaactaacttttcctttcctccttcttcctttcttctccctccctgcttctccctctctccttctcttcctcccctcctttttttttcctggagaaaaacattccatttaaacaaagtaggaaaacagaagacccagtgaaattgaataacaaggggccccactgtgacatccyaaacccacactgctgagataggacttcttggcatggagagttaataggaaaatgatgatcttaaatgagttaaggacagagtccaggaaggctgactgtcgaagcacgctgctggccacttctgtcttcacagggtggggaggagaaagtgtaggagtggtttgggatggtagcaatttagaggaggccgaaggtggggtggctggttttctctt

SEQ ID NO: 627855 - DNA, 567 bp, Homo sapiens
aatcaaaaccatgatgaattgtgtttgtatatgttgtgactcacacacactagaggctcccatcacattcccttgtgttacctgtggcccgggccaggtaggagttgcatgctttcaggcttcacagtggtgtgtggtctgaggcagaggctggggacacaggcagtcctgaggtgcagtatttcaaatggcaggtttgaagatgaagaaccctgcacccgaagtcrgacagcccaagtctcaaaggaatcagggagcttgctatcttagctgggtgggggatgcaggtcctcccatgtgcagatgatccaaggaaatagagtgcccccactatccaaaaggctgagccaagatcctcatcaaaagaatccaagggatgtgggagtatgaactgcagagagctgggttataagcactgctccaaaatctaagcaggtctccctccccacagcattttaaccagaagctaccattgggacctcttgttgatgctaggagagtgatgcatcccacccgacttgggatgccacagagcacagcttcccataccatggagttcccaataaa

SEQ ID NO: 627856 - DNA, 582 bp, Homo sapiens
aaagaacagcaggttgaaatcaaaaccatgatgaattgtgtttgtatatgttgtgactcacacacactagaggctcccatcacattcccttgtgttacctgtggcccgggccaggtaggagttgcatgctttcaggcttcacagtggtgtgtggtctgaggcagaggctggggacacaggcagtcctgaggtgcagtatttcaaatggcaggtttgaagatgaagaaccctgcacccgaagtcagacagcccaagtctcaaaggaatcagggagcttgctatcttagctgggtgggggatgcaggtcctcccatgtgcagatgatccaaggaaatagagtgcccccactatccaaaaggctgagccaagatcctcatcaaaagaatccaagggatgtgggagtatgaactgcagagagcgrggttataagcactgctccaaaatctaagcaggtctccctccccacagcattttaaccagaagctaccattgggacctcttgttgatgctaggagagtgatgcatcccacccgacttgggatgccacagagcacagcttcccataccatggagttcccaata

SEQ ID NO: 627857 - DNA, 548 bp, Homo sapiens
cagctcatgcctgtaatcctagcactttgggaggccaatgcaggcaaatcacttgagcccaggagtttgagaccagcctgggcaacatggcaagaccccatctttactaaaaatacaaaaaattagccagacttggtggtgcacacctatagtcccagctacttgggaggctgaggtgggaggattgcctgagcctgggaagttgaggctgcagtgagccatgatcrtaccactacgctccatcctgggcagcaggagtgagaccctgtctcaaaaaaaaaaaatgttaaacatagtccaaattaaataaatgccttttgtatgaagatatttccacatggaagatgtccagattgtgcatctgtgcttggttaatatttgatattaagaatttaataatatttaaaaacatttatgttattcaagtaagatttccttctcgggactcagaccaaataatggtgcaagaagaaagaaaaatggttcaaatcatacaactgaattggctgtgtgtgagtgtgtgtaaattagaatttatgttagtcagt

SEQ ID NO: 627858 - DNA, 550 bp, Homo sapiens
tgacacccattgttggcatttgacaaaaccatagtaaagtgatcaagagcaggatcttaacattggtgccatattatcaactacagcattcattaaaatgtcacctatattggcagggygcagtggcgcatgcctgtaatcccagcactttgggaggccagggtgggcagatcacttgaggtcaggaggctgaaaccagcctggccaacatggcgaaaccccatctctactaaaaatacaaaaattagttgggcatggtggcacgcacctgtagtctcagctgcttgggaggttgaggcaggaaaatcgcctgaacccgggaggtgaaggttgcagtgagctgagatcgcactgctgcactccagcctgggcaacagagttgagactctgtctcaaaaaaataaaaaataaagaaaatttttttcgaaaagaatttcacctattttttccatgaaagtttattttctttcttggatcctatccaggacttcaaattgaatttagttaatatttctctttctctttagtctcctgtagtctgtaacaactt

SEQ ID NO: 627859 - DNA, 550 bp, Homo sapiens
tgacacccattgttggcatttgacaaaaccatagtaaagtgatcaagagcaggatcttaacattggtgccatattatcaactacagcattcattaaaatgtcacctatattggcagggtgcagtggcgcatgcctgtaatcccagcactttgggaggccagggtgggcagatcacttgaggtcaggaggctgaaaccagcctggccaacatggcgaaaccccatctctactaaaaatacaaaaattarttgggcatggtggcacgcacctgtagtctcagctgcttgggaggttgaggcaggaaaatcgcctgaacccgggaggtgaaggttgcagtgagctgagatcgcactgctgcactccagcctgggcaacagagttgagactctgtctcaaaaaaataaaaaataaagaaaatttttttcgaaaagaatttcacctattttttccatgaaagtttattttctttcttggatcctatccaggacttcaaattgaatttagttaatatttctctttctctttagtctcctgtagtctgtaacaactt

SEQ ID NO: 627860 - DNA, 550 bp, Homo sapiens
tgacacccattgttggcatttgacaaaaccatagtaaagtgatcaagagcaggatcttaacattggtgccatattatcaactacagcattcattaaaatgtcacctatattggcagggtgcagtggcgcatgcctgtaatcccagcactttgggaggccagggtgggcagatcacttgaggtcaggaggctgaaaccagcctggccaacatggcgaaaccccatctctactaaaaatacaaaaattagttgggcatggtggcacgcacctgtagtctcagctgcttgggaggttgaggcaggaaaatcgcctgaacccgggaggtgaaggttgcagtgagctgagatcgcactrctgcactccagcctgggcaacagagttgagactctgtctcaaaaaaataaaaaataaagaaaatttttttcgaaaagaatttcacctattttttccatgaaagtttattttctttcttggatcctatccaggacttcaaattgaatttagttaatatttctctttctctttagtctcctgtagtctgtaacaactt

SEQ ID NO: 627861 - DNA, 456 bp, Homo sapiens
attaagcatcatttattttacagagcctatttcattgcaacagtaattttttccttgaattagatgtttatatatgtttgaattgaaatctaggcactttcttattttctacttgtatctttgcctatcctgcacctgtactacattgttctaatcactgtagcctcatcattagactgaacatctagtagtatacatcctttaacttggttcttcaattgctcttaccattcttggtcctttgaatttccacacatactttttttttttttttttttytgagacagggtctcagtctgttgcccaggctggagtacagtggagtggcatgatcatggctcactgcagcctccacttcccgggctcaggcaatcttcccacctcagcctcccaagcagctgggactacagtcatgtgccaccacatttggctaattcacacatattttagaatcag

SEQ ID NO: 627862 - DNA, 619 bp, Homo sapiens
cagagagaggaagatcatgagaatctaacattacatatatttggctgtgagcttaaatacttttaaaagttgccctttcttcacctcagagcacagaaacaataatattacaaactaaagtcctcctttgacccttttggattataagacttttgaattctctgcaaagggaaagtggagatgaattttgtcaaaagcatgagtaagttaggaggaagggttgcattttttttttccagaaaaggaaatgaaggtttttattattgtggttttatttttaatttcaaaatagagacttagccacaaatttctttataattaatgaagaacagtagctttgctgaaattatttatatcttcctctgttgtgtgtgaygaaagtctttaattatgtgagccaatcaaagtttctagttaatgaggaaacctgcttagcttagcttggtatgtaacttgacttgacctctgtctttgaagcttcactggggcttgaaacaatgctgttctttcaagttcagttcctcaaatgaaagttttttgggaatacaaaggtacaatatgagttctgtaagccttccagttcaagcagattccaatagacagaaaatataaatacaac

SEQ ID NO: 627863 - DNA, 578 bp, Homo sapiens
aagcttatatgtgaaaccctaagtcctaactcttccttgcaagatcatatttaacttgacaaacaagaaaatgtcaggagacagccaggaagtgcatccttaaacagaagtcactcaacaaatgctttttggtatataaggaaacaacattttcctmatgaacatacaatcgaaggctccaaggtcaccactggaaggaaatgcacctagttagtgggtggctgggccaaggtgcctctgacaaccactcattttcccctttgagtttctcccaaggtggtgacaaagactctctccttgaacaaacttgagacagttcctctgaggtctctttccaactaggcttcaaccttggcctgtaagaactacaacattcagtacaaatgatttcacccacttttcaacactaagggacttgaacaaacactaccacagtttctagcagctcaaagccatgtccctaggaagataatcccagtaaccttaaaatgcctgcctgagaaggttcaacaccaccaaaaatatttgctgtttgttctaatcaacacttgaaaatagacccctaaattcccttttct

SEQ ID NO: 627864 - DNA, 590 bp, Homo sapiens
aaccatcactaggtttatggctgatgcccctacatcaatcaaaagatagattcacaagcaaaagaacatacaaatttatttaatgttaagtttagtataagttttgggggataaagaccccaagaaacaggtaaacttgttatttttatgcttaggtttgatgaagaagtggttagctatagtgaaatatgattggaggcaaaaggtctgtagtgattttttttctagtatttgcaaaaaagaactatttctacatgtgtataaaccccaaccgttaaacttgataacttgtctgcctgtagtaggtatgtcacaaaactacgaagacacaccattcagtaaaggagtggaggaaaaaatttcttttttcagctctccactcgctcacctccaaaactctctgtctccatacctgagtaccacactgttgcacgttatatttattcagttattcctctcttaccttgcaatggaagtcttggtatttccrtctcttggcttcttaaattcccaaattgtaagctagctggatggttgtgttttagcatgattaccctcaccaaattgtgtgattattaactttaggaaat

SEQ ID NO: 627865 - DNA, 605 bp, Homo sapiens
attcaattaatatatctacttataatatcaatatttatttataaaaatatgatagagtctaatgaagtgatatgcagtttatgcaagaatcttaacaaataatcctttacctgagtggtattccttcaacattcaaagtttcaagactatctgaacaattccctattttgtttatttggttgttagttggttttgtgcttgttattctcttacacttcacatgtcaacacctttacataagcagccaacaaaagcagcatattttaacagaactaaaaataaattaaaattcaggaagagacttggaacctggtctragctctacccccaaagtagttgggtgaccttgagcaagtaactgacccttcttgaccttcagtgtcctcatttataaaatgagtaggctgggccagatggctccacagtggctttcagtgcttccttctctgtcataactaacattgagctgaatcacactgtaaaagattgagtcttcgagattttccaaggctatgtagaatacaatagccagtagccacatgcagctactaagtgcttgaaatgtggctagtccaaattatgaggtgttataagtgtgaaataca

SEQ ID NO: 627866 - DNA, 425 bp, Homo sapiens
gtttgtatcttgttacagaaagcacaattaatgttggtaataaatggtaaaagtgaaagatgtttaatataaatatttttccataggattttctattgcagcagaccatgctacgagtgaaggatcctaagaagtcactggatttttatactagagttcttggaatgacgtaagtcaagtacttattggcaccttaatgtttaaatatatagctttgcaaatctakagagtgttttcagacccatcttaaagtttgtttcagaagtaacagaagttcttttggccaggagtctgtgattaggcctggctggacagggcttctctcgtaagttctttttcttctctatcccagccagcctgaaagggcaaaacaagacacaaatagttgcattttctccagtctgccttctctgagcgctcccagc

SEQ ID NO: 627867 - DNA, 562 bp, Homo sapiens
aaacctaatatgctacattaacattttgggcaaggcacagtgacttacacctrtaatcccagcactttgggaggctgaggtggaagaatcgcttgagcccaggagtttaagactagcctggacaacatttttaaaaaattatttaattagtcgggcatggtggcatatgacagtagtcccagctactcaggaggctgaggtgggaggatggcttaagcctggaaggttgaggctgcagtgagccgtgatcatgcctttgcactccagcctgggtgacagagtaagattctgtctttaaaaaaaaaaaaaaaaaaaaaaaaaaaaaaaaaaaaagcccaacaacaacaacaacatttttttggaaaaccataccgctcaagctcgatctaacaggcataactctccaagatatactatcaggggtggggaagggaagttgaaaaatattatgctatgacatttatttaatttaaaagttagaaacacaaaactaaactatgtcatttgtgcatagtaaactcacacatacataccacagaagatgttgaggaaaaaagtaaaa

SEQ ID NO: 627868 - DNA, 588 bp, Homo sapiens
gtatatcatgttcatggatggaaaattcaattatacaaagatggcagttttctctaaattcatgtacacattcaatgaaattctaatcaaaatctcaatagggtttttcatgatactttaaaaattagtcttaaaattaattttgaaaaacaattagcctgaaacagtcaatgtaattttgaggaaaaacagagaaaagacttggcatgccaaatgttggtttagtaaaacgctacagaattaaagcagtacagcatagtataaaaaataaataaatacaccagtgagacaaacaaaagggtctaacaactttatatatgacagaggttatattacaaatatgttagaaraaaatggactattaaacaatttaacagagaatcttaaatcgagacaattggctaactacaggtacatgaaaaacacaaaattagatttctgcctcccatcatacacacacgcacaattccagatggattaaacacctaaatgttaaaaataaaatggtaacatttctaaaagaaaatgtaggagacagggtaaaactagaaagaaaaacatggaattgaaaagcataattatcaagat

SEQ ID NO: 627869 - DNA, 614 bp, Homo sapiens
ctaggggcaagaaaagctgtttaaaactgggaagagaaacgcaaggacattttaaggcgctggtaatggtctatgttttttcttttctttatttatttattttgaggctgggtctcactgygttccccaggctggtcctgaactcctgggctcaagcgatcctcttgccttgggctcccaaagtgctgggattacaagcatgagccaccatgcctagccatgttctatttcttaacttgtgcaaaggttacacaggtgttcattttacagtttgttcctttcatcatattcatttttgtgttatattcactatttaaaataaataaagaatttaagagaatgcctttgtaacactggagtaggaaagcatttaataagtaaaatacaaaaagcacagagtttatatttatagtcactggggatagctaggttgaggctggattaacatttgtaattaatatatttatctacattaaaaacttaaatttccacatgactaaaggcactataccaaatgaaacatgacacaatggggaccaacataggattaatatcaggaaaatattatttaacctccaaaaatgtagtatgataacatcaagccatccaaacaa

SEQ ID NO: 627870 - DNA, 631 bp, Homo sapiens
catccagaacagtaaagagcgcttcctgaaagggtggagtttaaatgttattttacatgctaatcccactaaagaactgaaaaatcataacctgttttatattgcaataaacatagacaactaatacattttataaactattagggaatcttaagtggttatgaaccttagagttctaaagtcaacaaacttatattctgcccccaatttaattattcccatatttgctcatcaaagtgatgtttcatttgatgctttaatttctgcataggaaaggaacaatagcctggagcctattcaaggtgagggacgtggaaccaaacctgcgtaaagaaaatcctccgttgaaagttgccctgtccrtgatttttttttttctggtgaaaagcccttgcctagaagtttggtggaataaattaccagccgtaagaaaccaaaagcccagaaatcaaaagcccaccacccatgcgtgacctttcaattgatacatcttaagtgacttagaaatcccaagccaaaaaattaagattaaaaaacttgtctaggatcacaaaaaaaaatgatttctggttttttaactgtgagtgtgtggcaatgaagtataaaattactactcatacagtttggtgtc

SEQ ID NO: 627871 - DNA, 557 bp, Homo sapiens
ggtggagtttaaatgttattttacatgctaatcccactaaagaactgaaaaatcataacctgttttatattgcaataaacatagacaactaatacattttataaactattagggaatcttaagtggttatgaaccttagagttctaaagtcaacaaacttatattctgcccccaatttaattattcccatatttgctcatcaaagtgatgtttcatttgatgctttaatttctgcataggaaaggaacaatagcctggagcctattcaaggtgagggacgtggaaccaaacctgcgtaaagaaaatcctccgttgaaagttgccctgtccgtgatttttttttttctggtgaaaagcccttgcctagaagtttggtggaataaattaccagccgtaagaaaccaaaagcccagaaatcaaaagcccaccacccatgcgtgacctttcaattgatacatcttaagtgacttagaaatcccaagccaraaaattaagattaaaaaacttgtctaggatcacaaaaaaaaatgatttctggttttttaactgtgagtgtg

SEQ ID NO: 627872 - DNA, 557 bp, Homo sapiens
ggtggagtttaaatgttattttacatgctaatcccactaaagaactgaaaaatcataacctgttttatattgcaataaacatagacaactaatacattttataaactattagggaatcttaagtggttatgaaccttagagttctaaagtcaacaaacttatattctgcccccaatttaattattcccatatttgctcatcaaagtgatgtttcatttgatgctttaatttctgcataggaaaggaacaatagcctggagcctattcaaggtgagggacgtggaaccaaacctgcgtaaagaaaatcctccgttgaaagttgccctgtccgtgatttttttttttctggtgaaaagcccttgcctagaagtttggtggaataaattaccagccgtaagaaaccaaaagcccagaaatcaaaagcccaccacccatgcgtgacctttcaattgatacatcttaagtgacttagaaatcccaagccaaaaaattaagattaaaaaacttgtctaggrtcacaaaaaaaaatgatttctggttttttaactgtgagtgtg

SEQ ID NO: 627873 - DNA, 575 bp, Homo sapiens
taatagacattactcagtgattatacaatataagcttatgggagcaagggagttcctgaatatccttgctgactgtgccgaaatgcaagacctacctaccctctaactctgagccacttccttaaccaatctttaggcaactcagcaggccacagcaaccacggcaygaaaaggcacaattgctcacttcctggggagagggactagcttgtttactgctcgatacaaaagatactgagcacttagccctagattctttacctgcctcccagtccactgcctgcatctgggtccacggggttgcccattgggacttggggttgggggaaccggcctcccatatgatactcctgccatttgttgaggtagtgttgaggacaagtgctctacctcttgtccatcgaatctcattgtttacttttggcactgatggagctggggcaggttttatacttgccttcttttcctgtccctatgctgtctctctattctcatgtagtaagaaacaaaccagaataccatattccttaataaagagccttaaatatattcattcatatgccttaacctacaaa

SEQ ID NO: 627874 - DNA, 574 bp, Homo sapiens
gcacatcaaacgctgttaactctcactggcagccaaacctcatggtgactggctcagtccttcattattgctttaataacctgattactgtttaacaatcaagcaatcatcattatacaaaggcaagcattctactagaaaaacaacacagcaatttagaaagttatatgtagttctttttttttcttctgacttcattctaaaattgcttacacaaacacttcctaaaactgtscctccatttctccccagtccggggtcctgggctttgcccatacaaaggaatgagaaaagacaagttaagagtgcataaggtgggtccgggggccaatgctggtatggaggctgaaaaagccctgagctctgggatcctacactatttattggtgatcaaacaaagaagcaggtggtgaggacatgtggatgtgggggtaaacaggtgagggcgtgaggacatgggggtaaacaggtgagggcgtgaggacgtgggggtagaaaggtagcggtgcatgaagcatagctgtgatggtttagcattttctttgacacatatagaatatactctgctgcttga

SEQ ID NO: 627875 - DNA, 574 bp, Homo sapiens
gcacatcaaacgctgttaactctcactggcagccaaacctcatggtgactggctcagtccttcattattgctttaataacctgattactgtttaacaatcaagcaatcatcattatacaaaggcaagcattctactagaaaaacaacacagcaatttagaaagttatatgtagttctttttttttcttctgacttcattctaaaattgcttacacaaacacttcctaaaactgtccctccatttctccccagtccggggtcctgggctttgcccatacaaaggaatgagaaaagacaagttaagagtgcataaggtgggtccgggggccaatgctggtatggaggctgaaaaagccctgagctctgggatcctacactatttattggtgatcaaacaaagaagcaggtggtgaggacatgtggatgtgggggtaaacaggtgagggcgtgaggacatgggggtaaacaggtgagggcgtgaggacgtgggggtagaaaggtagcggtgcatgaagcrtagctgtgatggtttagcattttctttgacacatatagaatatactctgctgcttga

SEQ ID NO: 627876 - DNA, 595 bp, Homo sapiens
gtgttgcccaggctggtctcaaactcctgaactcaggcaatccacctgtctcagccttccaaagtgctagtgagccaccgcgcccagccttcattaagaaatttctaccatgaattcacaaaggcattttctaatattttattcttcaaggttttaagttttgccttttcacatttatgtctataatcctcttggayttacgttttcctttatggtatgaaatagagatctttttttatcacatacataatcaattgtccttaccccattcattgaaaaaataatcttttccccactagcagtaagataacacataccaaatttatatatatatacacacacacagagacacaaacatggtatgtgtgtatattggttgcctattaatgcacaacaacttattccaaaacttagcagctgaaaacaataaacatttattatctcacagtttctgtggtttaagaatctgggaatggtccagctaggtagttctggatcagggtctctcacaagacagtgactaagaggttggccaaagcagcagtcattttgaagctctactgaaaaaggacccacttgcaattttactgtgtag

SEQ ID NO: 627877 - DNA, 582 bp, Homo sapiens
gactgtccctccacacacatcccatccctgccatagtaaccccagcaattcattggagggcacctgaggaggtgccttagggctaaaaaaaaaagatgagagccactgaattagaggacagactgtagatcactgccgaggtactcactgtgcaagagaccaagcaaagaacttcgtgaactctaaaggttccttgcttcaaggaactatgtaatgcaatacagttcattaatcagacattctactgtctgccatctcatctaccataaaagcataaaacatcctcttagcagccaaaataaataaccccaagtccaaacagaaagttcacactgaaaagtgattgtgactatttattgaggcaatggtactatagagagcataaatctagcctgcctaaacagaaaagctctaataatraagaagtgtagaagttatgagcacataaccatggaaattaggggacgccagtggaaaaggagatgtcagttacagacaaaaaccatattgtaggacaataatgatgcctccaaccaaataaatatgttttcaggatgtggttaaaatccagaaaccagaata

SEQ ID NO: 627878 - DNA, 576 bp, Homo sapiens
gttcctgtgtcttacaaagaccttaaatatatttgccatttcttgctcatctaattcagtgatcatagtgtcattgatagagtgaattaatgtggtattctacagaatgtccaggtggtccggatcacttcaaactatgacacagggcgaaagtcaccatagcctcagaacaagatagtaaatgtatcatcttgtccatcccatgaacatgcaractagcttctagtcctctggaaaaatacatttagatcaaatggcttcacaatgtataactgaagctgtgttaatctgcttaaacaaagattccacatctggtagggcatctgtaactgggcaactacttgtggaacttgcagtagaacacagttatcttacaggatcgacttggtgtttatgtaggccagactgctgaattatatggagataagacggggttcaccacccatgcatcccttacatctttaaggctggtattaatttttgccattcctcccaggatctgatactgattttttatttattattttggccagagtggggtatgttgcagaaatttctacataacctacgccacta

SEQ ID NO: 627879 - DNA, 635 bp, Homo sapiens
ggtggttattgttactggtataattttaactctcaggtttcttgatcaaatagattgtggtatcatgtaccaaatttcagaatattggaatatttgagagagatagaaagttcatttggggggccagatgtggtggtgcatgcctgtaatcccagtactttggggggccaaggcagacggatcagtttagtttaagagttcaagaccagcctgggcaacatggtgaaaccccgtctttacagaaaatacaaaaatcaactggtgtggtggtgcgtgctatagtcccacctactcagggggctgaggtgggaggattgcttgagcctgggatgttgaggatgcagtgagctgtaattacaccactgcastctttctagcctgtgggacagagtgagatcctgtccaaaaaaaaaaaggaaggaaggaaggaaagaaggaagaaaggaaagaaaaagaaaagaaagtttatttttgggacatgctaaattttaaatgtgtttcggacttccaagtagaagggtctaatagtcaattaaatatatggatctggaacttggtagatgatgtagttaaaatgtcctaacattttaacttgcatattaatattatatgtgctgcacgaatggtatctgttt

SEQ ID NO: 627880 - DNA, 169 bp, Homo sapiens
aacagagggaccggctgaagccatgacagaagaacgtggattgtgaagattttatrgacatttattagttccccaaattgatacttttataatttcttatgcctgtctttactgcaatctctaaacacaaattgtaaagatttcatggacacttatcacttccccaatc

SEQ ID NO: 627881 - DNA, 175 bp, Homo sapiens
gattggggaagtgatgagtgtccatgaaatcttcacaatttatgtttagagattgcaataaagacaggcataagaaattacaaaagtattaatttggggaactaataaatgtmcatgaaatcttcacaatccacgttcttctgccatggcttcagccggtccctctgtttggggt

SEQ ID NO: 627882 - DNA, 169 bp, Homo sapiens
aacagagggaccggctgaagccatgacagaagaacgtggattgtgaagattttatagacatttattagttccccaaattratacttttataatttcttatgcctgtctttactgcaatctctaaacacaaattgtaaagatttcatggacacttatcacttccccaatc

SEQ ID NO: 627883 - DNA, 169 bp, Homo sapiens
aacagagggaccggctgaagccatgacagaagaacgtggattgtgaagattttatagacatttattagttccccaaattgatacttttrtaatttcttatgcctgtctttactgcaatctctaaacacaaattgtaaagatttcatggacacttatcacttccccaatc

SEQ ID NO: 627884 - DNA, 618 bp, Homo sapiens
gagactgtggcaggcactgatggtcatggtcacagaggcttgtgtgtattccagggggagtcaggaggcctttatgccactgatatcacgcatttgctatcttggtgcatatttcatagatctcatacrtgttctgctttatatctttcaactctaagtaaacagtcctctagagtggttggctatgccaagacagtgaatgtaggaagagaagtctaagaaggcttgcagggaacttctctggtgtacctgaaatgacactgcattaattaccacctcctctatttacactcaggggaactgaggagctgtcctgaatactccagaggcaggaacttggaagttcaaggcagagggaattcaagaagggagtggtggtgctcagtggcatcagatagtattacacaactacatctatgtaaacacttattaggaagttgatgaagctatcagcatgactggagacagattgggtgccctggggctcctaaattataacaaattatgtcaaagaaagagattcatttgacccaaatcatcaggtgccctgaggtaagagttcagaatttttatcccagcagtctgtatatggtttatgttgcattctaggttaacctc

SEQ ID NO: 627885 - DNA, 476 bp, Homo sapiens
aaagcctccacagcctatttaatccatttggtagctcctctgagagacctggtctggagatcacttgaaccttaagcccctgagcttctcagagatcacttagaacctgtgggctctgtgttctcctaagggcccggcagcagagctgggggagctggtagtgggagaaggtgaagagaacagacttacttctggcagtaggagaggggcgacggagagatgagcaccagttgcttcatggagcaggtcatccaggcagaggactgccttaaatcttcagttctgagcttactgctggtaaataccgaataaaacggatgcttgatttgctcaaaaatagaaagggtgaataggtggctagctattctagagtaaggaaatgaagctgggtggtttttatctttctcaaattttttcttttttttkgggggggttgatcttttatttatttatttattataattatactttaagtt

SEQ ID NO: 627886 - DNA, 611 bp, Homo sapiens
ttatctgggaaaagatagccagtgagggaactgggacttactggagagtgaggctgaaggaagtatattaaggacacagaacttgaaacaatcaccrcacatctccaaaacataagttcctttcctcttggttctcctattggccagcaatggagaaacataaatggtgcaagagcttacctgggagtgtgaggggttcccagattcaggatcagcttgtcagaataagcattatattgtagtctcccactgtcaccaacagatcaggcccaagccagatctaatagtctggacttagcattattgaaaaggtccagagaagagagtgcaatttccttcctcaaagttcaccctttacccccacttcagacaatgtacggtcctcaccttaggtacatgtgcatccatatcccagcttcaaaggaggccctgaaacattttagtgctctttcctcccttcactgaatcttctacaggataccttcacacagtacaagctatgcttttccatttgcccattccagttcctctttgtttctctctttactcctaagaacagatcactcatttatcatctttatttaaatgttcaggtagtatgcacactagac

SEQ ID NO: 627887 - DNA, 494 bp, Homo sapiens
gatgacagttgttattactaatgaatgttaatgaatagttcattagtcaaaaggctagaacaggataaacaatctcaaaggaggtgtttgtgacaccagaagcaaagctttgggcatgagattggcaatttggcatgtagcatctgtgctgaatgctacccctgcccttcaatttgaccagtatttcaactgtaaaccatgatggagttttctgttggcagcaatactactcctgctsctgcagctggaatggaaagaagtcaatttccgttacgttcattattggcatgaagagctcaccctgtgattccttcttattcattttgccaaaatgacaccagaactcagtgtgggccaccaaaccattaaaggcatttcataatttccagagaatctttgggcctgcttggtgctagagtggtaaatttattctatttcttaagtattaaatcatatgattggccaaagtagcttgagagattcccagtcatact

SEQ ID NO: 627888 - DNA, 494 bp, Homo sapiens
gatgacagttgttattactaatgaatgttaatgaatagttcattagtcaaaaggctagaacaggataaacaatctcaaaggaggtgtttgtgacaccagaagcaaagctttgggcatgagattggcaatttggcatgtagcatctgtgctgaatgctacccctgcccttcaatttgaccagtatttcaactgtaaaccatgatggagttttctgttggcagcaatactactcctgctgctgcagctggaatggaaagaagtcaatttccgttacgttcattattggcatgaagagctcaccctgtgattccttcttattcattttgccaaaatgacaccagaactcagtgtgggccaccaaaccattaaaggcatttcataatttccagagamtctttgggcctgcttggtgctagagtggtaaatttattctatttcttaagtattaaatcatatgattggccaaagtagcttgagagattcccagtcatact

SEQ ID NO: 627889 - DNA, 555 bp, Homo sapiens
caagacaatgacatgggagaggaagtcagctgagagtttatcagactttttaaaagaaacataagaaagggacatttctctcttctgcctttgaatggtgtcttcaacatttagccactatgaagtgtttaaggaatccaacctaaggaaaaaaaaaaaggcatacatcccggaggatggcagagaggaaagacwaaaggacatttgtccttgatgatgttactgaattgctgaattatgcaacttagacactttctgctgaactcagccccattccagtctctctctgctcttcccattattggggtaggctggggtgcagtctccactattacactgtaatcttcttgaggacttagactctgtatttattcatatttattattcaccattccttgcacagtgacctgcccagagcaggggcaatttattcatggatattttgaaaccaaaccagaggcatgatgcacactttcctttctccactatttggaaggacttgaggtttcctttcacattttcagattcaccagtagtgaaaacaaattagcaact

SEQ ID NO: 627890 - DNA, 526 bp, Homo sapiens
  misc_feature 52, 62: n = A,T,C or G
ttattacttgccatactctatttcttgtgcaggctcataaaaggaattaagntatcaaaatntaaggaaatacaaaaaaagacattgaagtaactcctcagtgtccttggaccagtagctggggaatggtggtttactccactggtctttagacctagctgcaaatcagaatcttttgaggatgaaattcactggccccatccctggagattctgattctctaaggctgggatggaccttaggaatctcagtgttttaaagaaactttgccagggcattctgatggtcagcctcaccyggaaaccactgagcaagtaacttggacatcctatatgtttttactaggctaacaaagtatttgaataaagtggccaaatgggttgctttggcttggaggttgaacattgttgatgtggaacttccatttctttccccatggccacatactaaaccttgaattcagtgctacaaagaatccctaggttagttagattcatgaagaaaaagtgaaatctttgattatatc

SEQ ID NO: 627891 - DNA, 596 bp, Homo sapiens
agtctttgcagatgtatttaaagtaagaattaatatgagatcatactggataagagttggcactaaatccaatgtgaatatctttataagatacagaaaaggacatacagagacacagagaaggtgaagtaaagacggaggcagaacctggtagagtgcatctataagccaaagaacacaatggattcctagtgaccaccagaagcaaggggagaggcatgaaacagtttctccgttagagcctccagaaagaaccgacactgccaacaccttgattttggacctctggcctcccaaactctgaaagaatgaatttcagttgtttctagccattcagtttgtgataatttgttacaycagccccaggaaactaatataccattgtatccctgttatgtagcaaagtatttgggcatagcaacggttcaataaatagctgtggaagtgacttttccatgtaaccaaaaaccacctgttctccaaaaatgattgaaataaaaattaaaagaaaatatctgtggggggaaggaaggtaggtcagttcttccccccttttttatatcttttgctaattcagtggttctctaagtgtaatt

SEQ ID NO: 627892 - DNA, 571 bp, Homo sapiens
tatctgtttttcttcctactgtaatgttcttttcccattctcaatatggtagttcctgctcattctttaatatacagcttaagtgtaatatatcctgggagaggtcttttctgaccactccgtctaaagtcagttcactttaatgtactatctatctcagccattttaaagaccataatagcaycacttaaaatcatttacttggctttatgcccccagcaattagctcaatatttttcagatgactttttgaacaaatgaatgaaggaatgaatcaagtatagaatataaatcatgactaaatgaagataagcctaggaaaaaaattttacatataaagaattttgatgaaatatatagattttcaaatccatttattgattcaattttcctagtagtatcaaactgtttcttttaacaatcaaccttacacacaaggattatgtattacaatacttgaaacaagtctcggaatgaaattatcattcgaattcttattacgtatgcagccatggacaagtcactgaacattaatttttttattgatacagttaggataattataccttca

SEQ ID NO: 627893 - DNA, 609 bp, Homo sapiens
aattataatgctgataagtaacatttcttaagtacttactattgtgactgagactccttcagccactcttttcttgtacattagtccacaaggtaagtactattattatctattttacagataacaaaatcctggaaaagagatgccaagtaacttttccaagatcaatgatctagtaactggcagagctgggtgcaaaccaaagtggtctgactttggaactaatatatgaaatataaatcatcttttaagtggagtggcccaagaacactttatatatgacctrtagaaagaacactcaactctttcctgaaaaacagtaccaagttgaaggctgaagagggagtgaataaatggaaaagtatttttttcttaggtaagaagactatattgcacatgtacacaaattatgttatgtaccatttgttacacaaacattttcaatagcaatgactgagaataccctgagattccatctgtaaatggacagtataaataaatgtggtatattcatatgagagagtatgtcatttttttaaggttgattaatatgtgctaatgtaaaaagacaggcaagctctactagtgaaaaaaagaaagtacagaaca

SEQ ID NO: 627894 - DNA, 586 bp, Homo sapiens
tcattacatttatactttcctctcatcgaaggacctcagaaattcccctgctgtatcagtattgccagatagttaatttctctgcccaagcaggataaacagatgtgctgacataacaatacccaatgtttcaagattctcaaggatattaataaaaagctatttcttatgggaaccttggatttttttcctgaggaaagattacagatcaggatttgttatctccaaatattaaggtagttagtgctggatgaatttttaaaaatgcaacattmacactcgtccagataaatactgaaatttggaggatgcttacttgaactttattgaaaccatggaaattctgttgtttgcaaatttgagctgcaaatctgtgggagaaagatttgtcttgcaagattttggaagcatcatgttgctggttgaaatgaaaatactacatgcatggccattccctactttttcatcattctctgggtcaacttaaaaagagaggaaaaaacccagaagtgcagagacattaaaaaggcaaatgtgagcgttcaaaaccttcataagtgaggtattttttgttttttgttttagt

SEQ ID NO: 627895 - DNA, 586 bp, Homo sapiens
tcattacatttatactttcctctcatcgaaggacctcagaaattcccctgctgtatcagtattgccagatagttaatttctctgcccaagcaggataaacagatgtgctgacataacaatacccaatgtttcaagattctcaaggatattaataaaaagctatttcttatgggaaccttggatttttttcctgaggaaagattacagatcaggatttgttatctccaaatattaaggtagttagtgctggatgaatttttaaaaatgcaacattaacactcgtccagataaatactgaaatttggaggatgcttacttgaactttattgaaaccatggaaattctgttgtttgcaaatttgagctgcaaatctgtgggrgaaagatttgtcttgcaagattttggaagcatcatgttgctggttgaaatgaaaatactacatgcatggccattccctactttttcatcattctctgggtcaacttaaaaagagaggaaaaaacccagaagtgcagagacattaaaaaggcaaatgtgagcgttcaaaaccttcataagtgaggtattttttgttttttgttttagt

SEQ ID NO: 627896 - DNA, 586 bp, Homo sapiens
tcattacatttatactttcctctcatcgaaggacctcagaaattcccctgctgtatcagtattgccagatagttaatttctctgcccaagcaggataaacagatgtgctgacataacaatacccaatgtttcaagattctcaaggatattaataaaaagctatttcttatgggaaccttggatttttttcctgaggaaagattacagatcaggatttgttatctccaaatattaaggtagttagtgctggatgaatttttaaaaatgcaacattaacactcgtccagataaatactgaaatttggaggatgcttacttgaactttattgaaaccatggaaattctgttgtttgcaaatttgagctgcaaatctgtgggagaaagatttgtcttgcaagattttggaagcmtcatgttgctggttgaaatgaaaatactacatgcatggccattccctactttttcatcattctctgggtcaacttaaaaagagaggaaaaaacccagaagtgcagagacattaaaaaggcaaatgtgagcgttcaaaaccttcataagtgaggtattttttgttttttgttttagt

SEQ ID NO: 627897 - DNA, 415 bp, Homo sapiens
atcatctcagccaggaaagattttgggggtgcttgttcagtgatgctctttgggattattragtagtactcaactcaactaacaccctttccagatcctgacaggtttcttgtattttacctacttcttttatcaggtaaggcagcaaacagatataagaaaaataaagttttagcagaaaaaaatattttttatttttatttttttgcatcaactaggggaaataaactttctttatctgggtcaggagtagaaatctggcaataggaaaaaagcagtttttttctgatgggggagttgttatgaaaggtgtgagaagctgtggaatcaaagcggaagggaaaatagaagcattgctgtgttgcagtcctgacctgaatgccatgtgtactgagtgtgcagtgagccagtgtac

SEQ ID NO: 627898 - DNA, 574 bp, Homo sapiens
gtagattaagtcatcaatctgagattttgctggaatcttcttggaaagttaatrtaaaactacaactttcagatcattattcaaattttccctttctctcttgtatttatagattatcattcaaatcatcagatatctttaattaaatgaatatctttgaagcactatatagtcacatacatacacctagagaaatgaattaaaacaaattgaacagtgatgcaccatttacctagatgattaccatgagacagtgtaaaaatatgaaaagagactgaagaaaagcacaaatcacttgagagaatattaagtcagtaatgcacatgaattatttggctagtggattttatctgcaaacaagcaaattagaaggcgtgatggtggggccaggtttgtctgctacacagtacttccaatatctggcacaaaaatataccaaaaatatttgttgaataagtgaatttgttcattctggaaagcatttattcaatgtcatctgaataaaagtaaagtaacagaagattttattatcctcttttaagaatgcaaggtgagaaagaaaatctattactat

SEQ ID NO: 627899 - DNA, 574 bp, Homo sapiens
gtagattaagtcatcaatctgagattttgctggaatcttcttggaaagttaatataaaactacaactttcagatcattattcaaattttycctttctctcttgtatttatagattatcattcaaatcatcagatatctttaattaaatgaatatctttgaagcactatatagtcacatacatacacctagagaaatgaattaaaacaaattgaacagtgatgcaccatttacctagatgattaccatgagacagtgtaaaaatatgaaaagagactgaagaaaagcacaaatcacttgagagaatattaagtcagtaatgcacatgaattatttggctagtggattttatctgcaaacaagcaaattagaaggcgtgatggtggggccaggtttgtctgctacacagtacttccaatatctggcacaaaaatataccaaaaatatttgttgaataagtgaatttgttcattctggaaagcatttattcaatgtcatctgaataaaagtaaagtaacagaagattttattatcctcttttaagaatgcaaggtgagaaagaaaatctattactat

SEQ ID NO: 627900 - DNA, 614 bp, Homo sapiens
aatgaaagaacaatctaggaggctttgtagttgcacaagaggtatctctgctgctatatgatttgatttgactgtgctactatagaacacaaggaaatacatcaacagagcccagtggagacaaatgtgggaacacaggagactcttgctgctcacttcatcacctagtagctttggaaacttggtgaaggcacagagtaggaaatccatggctgagcctggagaaaaagaatggcttagaaaaataaggcatttcttagccctgaggtccctatatctcttcttcctaaatgacttgcttgtatgtaarcactgattcccagtaggcagatacaaaccccaaacctggggtgaagagagaaggattagtttatactaccaacctagaaagttatttaacacaaagttatatttaaaacattcaaaaattatataattatatatgtgaggagacttcaaaaggtttatgaaaatgcatattatgaaaaactatgtatgaatttaaatttttttggtgacaaaataaactcatactgactcgttataacattcctaaaaaggacctagtttgaggcactaaggaggataagacatcagtttaaaaatatcccctt

SEQ ID NO: 627901 - DNA, 614 bp, Homo sapiens
aatgaaagaacaatctaggaggctttgtagttgcacaagaggtatctctgctgctatatgatttgatttgactgtgctactatagaacacaaggaaatacatcaacagagcccagtggagacaaatgtgggaacacaggagactcttgctgctcacttcatcacctagtagctttggaaacttggtgaaggcacagagtaggaaatccatggctgagcctggagaaaaagaatggcttagaaaaataaggcatttcttagccctgaggtccctatatctcttcttcctaaatgacttgcttgtatgtaaacactgattcccagtagkcagatacaaaccccaaacctggggtgaagagagaaggattagtttatactaccaacctagaaagttatttaacacaaagttatatttaaaacattcaaaaattatataattatatatgtgaggagacttcaaaaggtttatgaaaatgcatattatgaaaaactatgtatgaatttaaatttttttggtgacaaaataaactcatactgactcgttataacattcctaaaaaggacctagtttgaggcactaaggaggataagacatcagtttaaaaatatcccctt

SEQ ID NO: 627902 - DNA, 641 bp, Homo sapiens
cttgtcccaaagaattgtgggcaagaatgtctgttataagctattgatttgtgcagtagtttgctatgacacaataaataaccaatatgataccccaaagtttatcatagttttatataccttccagaaataggtgtaggttcataacgtaccaattactgtattgcctatagcrgttaactaaaggtgttctgtaacttattttgttgttgttttaaatctaaataattgtgagattttgtttgaaagctggtatttcatataatatgtacaagtagtagtgtatctcttaatgttgagtcaaaaatatatctaatcttataaaactgccatacacatagaacaaaataatttaactttatttaaataaaacatatcaactatattttaaaatttttgtatatattaataatatatcaaataaaaatatataagtatcattagaaaaataataacatagtggaccttcatgcatagtggaccctcatttatattaatattaaggaatattgttgctgtttaagttagattttcttgtgtacagattttgttacctgatttaaaatgacatggccaattttcagtatggacccaaaaatatttaaaaagttggaaatgttatatttaaccacaaaacaaat

SEQ ID NO: 627903 - DNA, 641 bp, Homo sapiens
cttgtcccaaagaattgtgggcaagaatgtctgttataagctattgatttgtgcagtagtttgctatgacacaataaataaccaatatgataccccaaagtttatcatagttttatataccttccagaaataggtgtaggttcataacgtaccaattactgtattgcctatagcggttaactaaaggtgttctgtaacttattttgttgttgttttaaatctaaataattgtgagattttgtttgaaagctggtatttcatataatatgtacaagtagtagtgtatctcttaatgttgagtcaaaaatatatctaatcttataaaactgccatacacatagaacaaaataatttaactttatttaaataaaacatatcaactatattttaaaawttttgtatatattaataatatatcaaataaaaatatataagtatcattagaaaaataataacatagtggaccttcatgcatagtggaccctcatttatattaatattaaggaatattgttgctgtttaagttagattttcttgtgtacagattttgttacctgatttaaaatgacatggccaattttcagtatggacccaaaaatatttaaaaagttggaaatgttatatttaaccacaaaacaaat

SEQ ID NO: 627904 - DNA, 569 bp, Homo sapiens
tatgcaatttacttttgcattcaaaatatttgtaggattctaatatattaattcaagtagtctagttcatttatttctaatagttcatctatgaaatatacatatataaaatttatgtgtgtgtatatatagagataatgtatatgtagagaatgtatatacagagaatatatagagagaatacatataaacagattatatatacagagaatatatatgtgtgtatacatacatagaatgcatatgcgtgtgtatacatacctagaacgtgcgtatgcgtgtgtgtacatacctagaacgtgcgtatgcgtgtgtgtrcatacctagaacgtgcgtatgcgtgtgtgtgcatacctagaacgtgcgtatgcgtgtgtgtgcatacctagaacgtgcgtatgcgtgtgtgtgcatacctagaacgtgcgtatgcgtgtgtgtgcatacctagaacgtgcgtatgcgtgtgtgtgcatacatagaacgtgcgtatgcgtgtgtgtatatagacatagaacgtgcatgtgtgtgtgtatatagacatagaacgtgcatgtgtgtgtgtatag

SEQ ID NO: 627905 - DNA, 617 bp, Homo sapiens
ttcctgcctacaatatgtaatgcatttgtttatgttaaggtttcctactctttttatagcataggtagaagtaagaccaatttttcagcttcaggtttccaaaatcttacatattttattttacatttctctcactaatatgtttagaaaaatatacgattgatagtgttattgtaagggttttttttaaaacactgtccaacctataaataattttataatctttctaagagttaatatattaataaacacatatatatgtatttatatgtgtatttatacatatgatcagaggyataaatgaaaaaacgtatccatacttaaaataacctaaaccatccttcaatgtttttccaagtattttgtttaatataattaattgattgtgtggggcacataaacctgcatattgtcaactactcagttatgatttatatatttgatatggaagtgaaatcccctgaacaaaaacagaaacttcatggaatcaacacaggaaactaatggaaatgcatatatattgtgaataaggtactagaatgtacaatactgtggtcacaagtaaaccattcagtaaagaaataaaaactagcaaagaataagattaagaataatct

SEQ ID NO: 627906 - DNA, 617 bp, Homo sapiens
ttcctgcctacaatatgtaatgcatttgtttatgttaaggtttcctactctttttatagcataggtagaagtaagaccaatttttcagcttcaggtttccaaaatcttacatattttattttacatttctctcactaatatgtttagaaaaatatacgattgatagtgttattgtaagggttttttttaaaacactgtccaacctataaataattttataatctttctaagagttaatatattaataaacacatatatatgtatttatatgtgtatttatacatatgatcagaggcataaatgaaaaaacgtatccatacttaaaataacctaaaccatccttcaatgtttttccaagtattttgtttaatataattaaytgattgtgtggggcacataaacctgcatattgtcaactactcagttatgatttatatatttgatatggaagtgaaatcccctgaacaaaaacagaaacttcatggaatcaacacaggaaactaatggaaatgcatatatattgtgaataaggtactagaatgtacaatactgtggtcacaagtaaaccattcagtaaagaaataaaaactagcaaagaataagattaagaataatct

SEQ ID NO: 627907 - DNA, 617 bp, Homo sapiens
ttcctgcctacaatatgtaatgcatttgtttatgttaaggtttcctactctttttatagcataggtagaagtaagaccaatttttcagcttcaggtttccaaaatcttacatattttattttacatttctctcactaatatgtttagaaaaatatacgattgatagtgttattgtaagggttttttttaaaacactgtccaacctataaataattttataatctttctaagagttaatatattaataaacacatatatatgtatttatatgtgtatttatacatatgatcagaggcataaatgaaaaaacgtatccatacttaaaataacctaaaccatccttcaatgtttttccaagtattttgtttaatataattaattgattgtgtggggcacataaacctgcatattgtcaactactcagttatgatttatatatttgatatggaagtgaaatcccctgaacaaaaacagaaacttcatggaatcaacacaggaaactaatggaaatgcatatatattgtgaataaggtactagaatgtacaatacwgtggtcacaagtaaaccattcagtaaagaaataaaaactagcaaagaataagattaagaataatct

SEQ ID NO: 627908 - DNA, 516 bp, Homo sapiens
taattagatttcaccatatataacagatttaatttgatcttggactaattcgtcatacttttgtcttgtgcccaatcctaaatcaatattwaaaaaaaaaagaagcaagatgcctatgactagcttagtaaaattgaagctccatttaaaagaaagtgtgggagttaatgaatttttgtatgaacaacctagactgcttcatccaacctgaaagcactatttaaaactgattcactcattgattcactcataaatatagacaatcccaaagaacaatagaaacaaacattaatggctaatgtagtaggccaaaggtaaccctacactaaagaattcaaatgaaagaacaaacaaaaaccccaaaacattttcatgtacattaaatgatagagtatcatgattaaattaattaattagaagacctgagttggagtatttgctgatttcctgggtgtaaatattccttccatggtccacttcaagctaccaacatgtagtcaagtgcctagtgagctg

SEQ ID NO: 627909 - DNA, 634 bp, Homo sapiens
tttccaattatcatgtccaaacatggcaaccgccaataaaatataaggccatctctcattcacagagaaagaattggttatgtgcctctcggtttgtgagaatactgtagataatggatctaattagatttcaccatatataacagatttaatttgatcttggactaattcgtcatacttttgtcttgtgcccaatcctaaatcaatatttaaaaaaaaaagaagcaagatgcctatgactagcttagtaaaattgaagctccatttaaaagaaagtgtgggagttaatgaatttttgtatgaacaacctagactgcttcatccaacmtgaaagcactatttaaaactgattcactcattgattcactcataaatatagacaatcccaaagaacaatagaaacaaacattaatggctaatgtagtaggccaaaggtaaccctacactaaagaattcaaatgaaagaacaaacaaaaaccccaaaacattttcatgtacattaaatgatagagtatcatgattaaattaattaattagaagacctgagttggagtatttgctgatttcctgggtgtaaatattccttccatggtccacttcaagctaccaacatgtagtcaagtgcctagtgagc

SEQ ID NO: 627910 - DNA, 634 bp, Homo sapiens
tttccaattatcatgtccaaacatggcaaccgccaataaaatataaggccatctctcattcacagagaaagaattggttatgtgcctctcggtttgtgagaatactgtagataatggatctaattagatttcaccatatataacagatttaatttgatcttggactaattcgtcatacttttgtcttgtgcccaatcctaaatcaatatttaaaaaaaaaagaagcaagatgcctatgactagcttagtaaaattgaagctccatttaaaagaaagtgtgggagttaatgaatttttgtatgaacaacctagactgcttcatccaacctgaaagcactatttaaaactgattcactcattgattcactcataaatatagacaatyccaaagaacaatagaaacaaacattaatggctaatgtagtaggccaaaggtaaccctacactaaagaattcaaatgaaagaacaaacaaaaaccccaaaacattttcatgtacattaaatgatagagtatcatgattaaattaattaattagaagacctgagttggagtatttgctgatttcctgggtgtaaatattccttccatggtccacttcaagctaccaacatgtagtcaagtgcctagtgagc

SEQ ID NO: 627911 - DNA, 516 bp, Homo sapiens
taattagatttcaccatatataacagatttaatttgatcttggactaattcgtcatacttttgtcttgtgcccaatcctaaatcaatatttaaaaaaaaaagaagcaagatgcctatgactagcttagtaaaattgaagctccatttaaaagaaagtgtgggagttaatgaatttttgtatgaacaacctagactgcttcatccaacctgaaagcactatttaaaactgattcactcattgattcactcataaatatagacaatcccaaagaayaatagaaacaaacattaatggctaatgtagtaggccaaaggtaaccctacactaaagaattcaaatgaaagaacaaacaaaaaccccaaaacattttcatgtacattaaatgatagagtatcatgattaaattaattaattagaagacctgagttggagtatttgctgatttcctgggtgtaaatattccttccatggtccacttcaagctaccaacatgtagtcaagtgcctagtgagctg

SEQ ID NO: 627912 - DNA, 562 bp, Homo sapiens
cctactgctgttaggttacagactcatagtgtgttttactgtactgaatacagcactgcaggcaattgtaacacaatggtaagtatttatatataaacatagaaacatttatatataaacatagaaaaagtacagtaaaaatacaatataaaaagtaaaaaatggtacacctgcataggacacttaccatgaatggaacgtgcaggaccagaagtagccctgggtgagtggtgagtgaatgcgaaggcctaggtcattactgcatgctactgtagactttataaacactataaacttaggctacagtacatttaaaaaaataagtaatctcactattctattatgatagctatgacatcactatgtaacaggaatttttcagctccatcagaatctcataagatcacctatgcatratctgtcattgactgaaatgttgctatgtggcacataactgtacatggttcttgctttcttctacagtgtcagagtttccagtttttagttaagtctgttaaatttcctcaaaaaattgtcttttttacattaatactcattccat

SEQ ID NO: 627913 - DNA, 531 bp, Homo sapiens
ggcccagccagaaagccaactatgagatccttctcatcttatgacattagtaagagaaatactcactcgtatgctggtattagcacattagactccccaaggccactcccactttacagaggaacaaagtgacacccagagccaagtccctaaactgagctcctctcactcgctgccaccgagctgcactcacaccacagctctcccttagagggaacagacaggtgtggtctctgtctcccttccaggacaggcttggacactgaggagatgccgtgcctatttcccaaacaccgagtaaaaggaacccctggggtccagcccacacccaggttctgattcacagacctagggtgaggccaaggggtttaatctttcagaagcttccccagtgactctgaaaaagccaatccaaagactgcaccyggggaaccccaagcgtgaacccaggactgctgtttcagcccagcaatttgtatcaacagccgttcaaagtccacaccctttgacccaacagcaccacttctagga

SEQ ID NO: 627914 - DNA, 512 bp, Homo sapiens
atccttctcatcttatgacattagtaagagaaatactcactcgtatgctggtattagcacattagactccccaaggccactcccactttacagaggaacaaagtgacacccagagccaagtccctaaactgagctcctctcactcgctgccaccgagctgcactcacaccacagctctcccttagagggaacagacaggtgtggtctctgtctcccttccaggacaggcttggacactgaggagatgccgtgcctatttcccaaacaccgagtaaaaggaacccctggggtccagcccacacccaggttctgattcacagacctagggtgaggccaaggggtttaatctttcagaagcttccccagtgactctgaaaaagccaatccaaagactgcacccggsgaaccccaagcgtgaacccaggactgctgtttcagcccagcaatttgtatcaacagccgttcaaagtccacaccctttgacccaacagcaccacttctaggaattcatc

SEQ ID NO: 627915 - DNA, 407 bp, Homo sapiens
ttcaccttccttcctccaactagctttctagttaatccagctaagaacacaggtgccggatgaaaggtgcctgaaaggtgactgccttgcagatgatttaagctctggggttgccctaagggaagtggcggccagaaagaactatatctcaggagcaggactgggagggaagagccagggagcctgtctggaaccctgatactgtgcaatggccagccttccactccyctaaaaccttgcttagccatagagggtcagactacgggagcaggcaggtatctttaaatagttcatttctgccatattggggtccatctggaggtcttaaagaacttgtaactctatggaccccattccagaaaaatatataaatgttcacaaaaaagttgagatcatgtcaaaagctt

SEQ ID NO: 627916 - DNA, 545 bp, Homo sapiens
tatgcaatagacctgcaagcatttgaagacaaccatgaagttcctttaccaccatatgcccatcagaatggctaaaataaaaagcaatgccaccaaatgctggcaaggatacagctggattctcaaaactggaattctcaaacactgctgatgagaatacaaagtcatgcagccacttcagaaaacagtttgacagtttcttataaagctaaacatgcaattgccataccacccagcaatcccattcttaggtattttacccaggagaaatgagaatttatgttcaaacaaaaaccagcacacagctgtttagagcagctagggaatgaataaacaactgtgttatgtccttatgatggagtattactcagcaatgaaaagggatgaatgactaatacaactgcggacrcacacagggtgtgggggaagctggaatgccctgcgttaatcaaaagaagcctgactctaaaagctacatactacacaaccattcatatgacattctgggaagggcaacactacagggacagaaaagagatgagtgg

SEQ ID NO: 627917 - DNA, 556 bp, Homo sapiens
gggtgggtcacagacctcgaggtcctttcagctgctccccccagccttcataacatggtaggatcctcgggtcagaagaccgagagagagagatcaggccccgtactgcttgcttccaccacgatgacggccaccctcggcctgctccacaagtgaaagctccttgggatagggtcgtgctcaccrggagctactccgcctccctgcaactcctaacctctggttctcactctagccttggagtcaaacagaataacctgttcccacagggcagcatccagatactcaaagaggctcgcaggccccaaacacttctcaccctttctctacaaacaggactcagtgccaggcctgtactatgtaaccaacagcctctgaacaaagctggggaaccaggtcatggttaactccggagaatccaaaaaactaaatctattggtctagaatttttccctctcgccatcagaggattatgttcttggtaggtatttccacatgcacatgcacacacgagtgcgcacacacacacacacacctaactacagtcaaatgttta

SEQ ID NO: 627918 - DNA, 573 bp, Homo sapiens
gaattcccagtgcgacagggtgggtcacagacctcgaggtcctttcagctgctccccccagccttcataacatggtaggatcctcgggtcagaagaccgagagagagagatcaggccccgtactgcttgcttccaccacgatgacggccaccctcggcctgctccacaagtgaaagctccttgggatagggtcgtgctcaccgggagctactccgcctccctgcaactcctaacctctggttctcactctagccttggagtcaaacagaataacctgttcccacagggcagcatccagatactcaaagaggctcgcaggccccaaacacttctcaccctttctctacaaacaggactcagtgccaggcctgtactatgtaaccaacagcctctgaacaaagctggggaaccaggtcatggttaactccggagaatccaaaaaactaaatctattggtctagaatttttccctctcgccatcaraggattatgttcttggtaggtatttccacatgcacatgcacacacgagtgcgcacacacacacacacacctaactacagtcaaatgttta

SEQ ID NO: 627919 - DNA, 516 bp, Homo sapiens
tcaagaattctaaggctatcctggggatatcagtagtcagygtaggctgggcgcggtggctcacgcctgtaatcccaacactttgggaggccgaggcaggcggatcacttgaggtcaggagttcaagaccagcctggccaacatggtgaaaccccatctctacccagggctcaaatgtaccactgccaggagtgttacaggttatttgacataaaacagagaaaaaccagtagcatcttttacaaagctcagaaacttattctctcctttccccttttgatgtggggtcactggcctccttagctctgaacaccttcagaacaaaaattagccaggcgtggtgatgcacgcctgtaatcccagctactcaggaggctgaggcacaagaattgcttgaacccaagaggcaaagtttgcagtgagccaagatcccgccacagcactccaggagactgtgtctcaaaaaaaaaaaatagtagtgagtgtaaatgtctatatcataacaacgtgttctaa

SEQ ID NO: 627920 - DNA, 516 bp, Homo sapiens
tcaagaattctaaggctatcctggggatatcagtagtcagcgtaggctgggcgcggtggctcacgcctgtaatcccaacactttgggaggccgaggcaggcggatcacttgaggtcaggagttcaagaccagcctggccaacatggtgaaaccccatctctacccagggctcaaatgtaccactgccaggagtgttacaggttatttgacataaaacagagaaaaaccagtagcatcttttacaaagctcagaaacttattctctcctttccccttttgatgtggggtcactggcctccttagctctgaacaccttcagaacaaaaattagccaggcgtggtgatgcacgcctgtaatcccagctactcaggaggctgaggcacaagaatygcttgaacccaagaggcaaagtttgcagtgagccaagatcccgccacagcactccaggagactgtgtctcaaaaaaaaaaaatagtagtgagtgtaaatgtctatatcataacaacgtgttctaa

SEQ ID NO: 627921 - DNA, 552 bp, Homo sapiens
ggcagcaaaaaggccctgaattctgtactttcttcccccagcctccttctccagcaaggagaatagcactcctccctccagaagccagctccctaagttggagccactatgtaagagaagaggaacgttcactttttaaaattcatatatttaaaaatcaagaccaaaaagtaaattctgtactcctattattgactgtagtcaatyaaacataaaaaggtgaaagtaaaatttaattttttacccttattttactgaccaatatggaagttcttggtatctttaaggctgaccttcctggtattgtgtaatgattgaatgtatctaaactgtaataatttgaaactgacaaacataaccttctcagacttacaaaactatgttctttctaaagatacagatttttattattttattttgactaggaaggatttataaataaatgtaatgaaaaatctttgatcttaataaagtaccttcaaacagtgtgtgtacttacttgaaaattgtttttgcacttggatattctattttattatactactattgtga

SEQ ID NO: 627922 - DNA, 413 bp, Homo sapiens
gaattcctatcctctggaattagagaacagcaggaattgcccraaaagggaaataagtgttacaaatttcctgattccatacattctaatgaatgaactgttcttaagtcagagatttctaggtaagaaactccccacattcattctggtagagcatatagacttcctattacgaaattatgaataaatataagacggttgttctgaaactaagtatatttgaatcaccatgtaaatctcacaataacttgactgttacattacataaatgtagaccacgcgggagggcacagtcgcactaaatattcacaaatatggctcccaatttctcatccttactctcaaggaaatctctgaaaagggcaacatatggccaccatttttagagtatgaattacaaaggcaacaattta

SEQ ID NO: 627923 - DNA, 413 bp, Homo sapiens
gaattcctatcctctggaattagagaacagcaggaattgcccaaaaagggaaataagtgttacaaatttcctgattccatacattctaatgaatgaactgttcttaagtcagagatttctaggtaagaaactccccacattcattctggtagagcatatagacttcctattacgaaattatgaataaatataagacggttgttctgaaactaagtatatttgaatcaccatgtaaatctcacaataacttgactgttacattacataaatgtagaccacgcgggagggcacagycgcactaaatattcacaaatatggctcccaatttctcatccttactctcaaggaaatctctgaaaagggcaacatatggccaccatttttagagtatgaattacaaaggcaacaattta

SEQ ID NO: 627924 - DNA, 413 bp, Homo sapiens
gaattcctatcctctggaattagagaacagcaggaattgcccaaaaagggaaataagtgttacaaatttcctgattccatacattctaatgaatgaactgttcttaagtcagagatttctaggtaagaaactccccacattcattctggtagagcatatagacttcctattacgaaattatgaataaatataagacggttgttctgaaactaagtatatttgaatcaccatgtaaatctcacaataacttgactgttacattacataaatgtagaccacgcgggagggcacagtcgcactaaatattcacaaatatggctccyaatttctcatccttactctcaaggaaatctctgaaaagggcaacatatggccaccatttttagagtatgaattacaaaggcaacaattta

SEQ ID NO: 627925 - DNA, 499 bp, Homo sapiens
ctgtttggtaacaaaaatgaattaatctagtaacaacataaatgaatcatataatttgagcaagagaagaaagacacaaacaaaatacatcctgcatggttccatttaaagaaacttccaagaacatggctgagcayggtggctcatgccatcccagcactttgggaggccgaggtgggcggatcacttgaggtcaggagtttgagaccagcctggtttacatggcaaaaccccatctctactaaaaatccataaatcagttgggcgtggtgatgcgcacctatagtcccagctacctgggagtctgaggcatgagaatcacttgaacccagggggcagagggtgcagtgagctgagattgcatcattgcactccagcctgggtaacagagtgagatgtcgtctcaaaaaaaaaaaggaaaaaaagaaacttccaagaacaggcaaaccacccataaactttaaagtgagccgagtgatttacttaggaagtagagttt

SEQ ID NO: 627926 - DNA, 571 bp, Homo sapiens
gatgaaaccttatctctactaaaaatacaaaaattagccaggcgtagtgacgcacacctgtaatcccagctacttgagaagctgaggcacgagaatcgcttgaaccccagaggcagcctgggtgacaaagtaagactctgyctttaaaaaaaaaaaaatcagtacccattcacaataaaaactctgagcaaactggaaatagaaagaactttctcaacttgatgaagaacatgtataaaatacctacagctaaaatcatacttaattttccctaagatcagtataaagaaaagatgtctgttttcaccacagctattcaacactatatgagaattcctagctaatgctataagacaaaaaaagatatatacagattgagaacaaataaacaaaactgtctttgtttacagatgagaaaatcccaaagaatcaacaacagcaaaagaccttggccacaagcaaacgattatagcaaggatgcaagacagaagcttaacatccaaaaatcaattgctttcctgtataccagtgctgaacagctgaaacttgaaattaaaaatataataccact

SEQ ID NO: 627927 - DNA, 511 bp, Homo sapiens
ttaacagccaaaacttgaatctttataaatcagttttstaaggaaatactccagagttgggacagacctacaaggtctccaaaaagggtgaatctgatcagaactggggcagggagaggaacctatgtaaaatttgttctttatgccactggagtatttccagttctgtttttcctaagcttacctaagagaaacttaaatcccatagtttatgtaactttcatctatttttgccactgccctgtcaattttataacataaactaataaggaatttaaatgaatcttttaaagttttctaggataattttattaggagttaaatatgtattcttagaaaagtaaaacaaacccaaataacaacaacaactcttcagtccataaatatcccttcagataataacatcagaagtcacgccaatattaaaaaaaagtggctcaaatttttgtgttttttttttttgcaaacatctattcaccgtactaataatataatgcttaattcaaccatg

SEQ ID NO: 627928 - DNA, 553 bp, Homo sapiens
aatccactatgatcaacttggctgtatctctgaaataaaaaattggttcaacatacaattaacaaatgttactcatcacataaacagaactaaagacaaaaaccacaaggttatttcagtagatgtttaaaaagctttcaataaaatttaccatcctttacgtttaaaaccctcaaaaaactaggcattyaaggtacatacatcaaaataatcagtcatctatgtatggcaaacttacagcaaacatactaaatggacacaagctggaagcattccttcatgaaaactggcacaagacaaggatgctttctctcaaaactcctattcaacatggaattgaaagtcttggccaaaacaatcagggaagagataaaagacattcaaacgggaaaaaagaaagtcaaactatattatccctatgtgcaggtgataagatgctatatcttcaaaaccctacagtctcagcagaaaagctctttaaattgataaacaacttcagcaaagtttcagggtactaagtcagtagcatccctgtacatcaacaatatcaagc

SEQ ID NO: 627929 - DNA, 561 bp, Homo sapiens
ggttgcggtggctcatgcctgtaatcccagcactttgggagtctgaggtggatggatcaggaggtcaggggttcaagaccagcctggccaacatagtgaaaccccatctctactaaaaatacaaaaatcagctgggcatggtgacgcatgcctgtagtcccaactacttgggaggctgaggcaggagaattgcttgaacctgggaggtggaggttacagtgagccaaaatcacaccactgtgctccagtttgggcaacagaatgagactctgtctaaaaaaaaaaaaaaaaaaaaaaaaaagaatgatgctggaagcattgcattgctcctcttcaaactacactacagtaaccaaagcaacattatactrgtaaaaaacaacaacaacaacaacaacaaaaaacagactcatagaacaatgcaacagaatagagagcccagaaataatgccacacacctccagccatctgatatttgacaaagctgacaagaggaatgtaaaaagaatttcctattcaataaatggtgctgaaataactagctagcactgtatagaagat

SEQ ID NO: 627930 - DNA, 579 bp, Homo sapiens
ccagccatctgatatttgacaaagctgacaagaggaatgtaaaaagaatttcctattyaataaatggtgctgaaataactagctagcactgtatagaagattgaaactggtccccttgcttacatcatatataaaaatcaactcaagatgaataaaagacttaaatgcaaaacttaaaaaaaaacctgcaagataaataacctagaaaataccattctaggcatagaaactagcaaagattacatgataaagataccaaaagcaattgcaacaacagcaaaaattgacaaattgaacctaattaaattaaaaagctttttcacagcaaaggaaaatatcaagagactaaccaatctacaaaattaaaaaaaatgcaaactattcttcttacagagatttaatatacagaattaagaaacttatgccaggcttggtgagtcacgcctataatcccaacactttcgaaggctgaggtgggtggatcatgaggtcagaagttcaagaccagcgtggtcaacgtagtgaaaccatgtctctactaaaaatacaaaaattagccaggtgtgggggcacacacct

SEQ ID NO: 627931 - DNA, 579 bp, Homo sapiens
ccagccatctgatatttgacaaagctgacaagaggaatgtaaaaagaatttcctattcaataaatggtgcwgaaataactagctagcactgtatagaagattgaaactggtccccttgcttacatcatatataaaaatcaactcaagatgaataaaagacttaaatgcaaaacttaaaaaaaaacctgcaagataaataacctagaaaataccattctaggcatagaaactagcaaagattacatgataaagataccaaaagcaattgcaacaacagcaaaaattgacaaattgaacctaattaaattaaaaagctttttcacagcaaaggaaaatatcaagagactaaccaatctacaaaattaaaaaaaatgcaaactattcttcttacagagatttaatatacagaattaagaaacttatgccaggcttggtgagtcacgcctataatcccaacactttcgaaggctgaggtgggtggatcatgaggtcagaagttcaagaccagcgtggtcaacgtagtgaaaccatgtctctactaaaaatacaaaaattagccaggtgtgggggcacacacct

SEQ ID NO: 627932 - DNA, 611 bp, Homo sapiens
aaatgggccactggaaagatgagtgccctgaataggaaaaggatggaaatgatggtcaatggtctaacatctgagtgcagyatttggttgctagtcatggcacctcaaaggcagatcccgatctgatcggcttagcaggggccaagaattttgaggactgagacagactgggctccatctttttaggggagcctatggtctctatggaagtagggggtggttaatggattttttggtcaatactggtgctgatttctctgtggtaactcacccaattagccccccctaaaaataactgtgctactatcgtaggggcttccagggccaaagaaaagagacctttttgcaaatccaggagatgtgttattggagaacaggaggtgcagcacgactttctatatatgccaaattgcccagtgcccttgttaggaagggacttactccagaagctgcaggcacaaatttcctttacacctaataggaatatgacccagagatagggaagccaaaggcaatggtattgactctaattgccccaagggctgaggaatggtggctctaagaactgtgtacaggaggctgccagagccagacctacacaatatgcaggt

SEQ ID NO: 627933 - DNA, 567 bp, Homo sapiens
ggctgaggaatggtggctctaagaactgtgtacaggaggctgccagagccagacctacacaatatgcaggtaatacggggtaatatgtgggtaatatgtgggggctgaggacaaccgccctggacttgctctaaacagaccccaatggtagtagagcttaaccctcatgctgccccagtacaagtccatcaatrcccactaccctgagaggcaattgatagaataacaaagcatctaaattggctttatatgcatgagattatagcaaaatgcaagtcctcatggaatactcctctgttacctgtgcgcaaaccaaatggggaatacaggccagtgcaggatctctgggcagtaaacaaagctgctgtcactattcatgccatagtgcccaacccatatacaatgctgggacagattcatgctgatgccacttggttcatgtgtctggacttaaaagatgccttcttttgtttgaggcttgctcctcaaagtcagcctgtatttgctatccagtgggggaaatcacaatatacctggacaaggctgccacaagggtttgagaattct

SEQ ID NO: 627934 - DNA, 524 bp, Homo sapiens
tttgtataaatatttacatagcccatcaggtatcagaaatgtacataaagttttgattgtcttctcaggattatatatttgaccaaaaaaaaaaaggtcctaacccattttagtaatctataatagtaaccaaacacacagacacaaacacccacacacacacttcatttattaacttagattattttttctctcttctgtgatgagtaattaaatgcagtgtttttgataaaagaagtttttttttttttcctttctgatcttggttatttctttacttctgctgggtttgggtttggtttgtttttgtttctcaagttccwtgagatgtgaccttagattgtctatttgtgctctttcagattttttgatgtaggcatttaaggctatgtactttccacttagcttcacctttgccatatcccagatgttttgataggttgtgtcactattattgttcagttcaaataatttttaaatttccatcttgattttattgttgacccaatgatcactcaggagca

SEQ ID NO: 627935 - DNA, 565 bp, Homo sapiens
aagcccaagtgcattctttgaaaggctttgtgaggcatataggctgtacactccaattattccaaaggctcctgaaaaccaacacatgataaatatgacctttgtcaggcaagcacagggagacataagacaaaagcttcagcagctggaaggctttgcagggaaaaataytagtgaactcctggaaatagcaaacaaagtatacataaactgggaagaagaggcagagagaaaggaagaaagaaaaaccagaaacagaaataaagacacagttcaatttacagctgcttcactagcagaaagtaaacctggatttgctagagggcgtggtcaaagcagaggctgaggaagagggcagacatgactgggagaggaaagcctgtcccctttggacaggaaccaatgtgcaaagtgcaggcaaataggccactggaaagatgagtgtcccaaaaaggcaaaggatggagatgatggtcaatggtctaacacccgagtgcggcgttctgttgctagtaatggtgcctcaaaggcagatcctgatctgattggcttagcaggggccaag

SEQ ID NO: 627936 - DNA, 565 bp, Homo sapiens
aagcccaagtgcattctttgaaaggctttgtgaggcatataggctgtacactccaattattccaaaggctcctgaaaaccaacacatgataaatatgacctttgtcaggcaagcacagggagacataagacaaaagcttcagcagctggaaggctttgcagggaaaaatactagtgaactcctggaaatagcaaacaaagtatacataaactgggaagaagaggcagagagaaaggaagaaagaaaaaccagaaacagaaataaagacacrgttcaatttacagctgcttcactagcagaaagtaaacctggatttgctagagggcgtggtcaaagcagaggctgaggaagagggcagacatgactgggagaggaaagcctgtcccctttggacaggaaccaatgtgcaaagtgcaggcaaataggccactggaaagatgagtgtcccaaaaaggcaaaggatggagatgatggtcaatggtctaacacccgagtgcggcgttctgttgctagtaatggtgcctcaaaggcagatcctgatctgattggcttagcaggggccaag

SEQ ID NO: 627937 - DNA, 559 bp, Homo sapiens
tcttctgcctgtgttaaacatcatcttttgcagtgttttgyggtgatgggcattccagcttctattaaaacagataatgccccagactatactagccaagctctacctacatttttctctatgtggaatattaaacacattactggtatctcatacaattctcagggacaagccatagtggaaagaatgaatctctccctaaaacagcagttgcaaaagcagaaagagggagacagagaatatgaaaccccacagatgcaattgaatctagcattattaactttaaattttttgagcctacccaaaggccagatgttatcagcagctgaacagcatctacagaaaccagttgcaaagacagaagcagaacaactgatttggtggagagatccaataacaaaaagttgggaaataggtaaaataataacttggagtagaggttatgcttgtgtttctccaggactgaatcaacagccaatttggataccatcaagacatctgaaaccttatcatgagccagatgccaaggaaaagactctgggaggatcctgaggacccc

SEQ ID NO: 627938 - DNA, 559 bp, Homo sapiens
tcttctgcctgtgttaaacatcatcttttgcagtgttttgtggtgatgggcattccagcttctattaaaacagataatgccccagactatactagccaagctctacctacatttttctctatgtggaatattaaacacattactggtatcycatacaattctcagggacaagccatagtggaaagaatgaatctctccctaaaacagcagttgcaaaagcagaaagagggagacagagaatatgaaaccccacagatgcaattgaatctagcattattaactttaaattttttgagcctacccaaaggccagatgttatcagcagctgaacagcatctacagaaaccagttgcaaagacagaagcagaacaactgatttggtggagagatccaataacaaaaagttgggaaataggtaaaataataacttggagtagaggttatgcttgtgtttctccaggactgaatcaacagccaatttggataccatcaagacatctgaaaccttatcatgagccagatgccaaggaaaagactctgggaggatcctgaggacccc

SEQ ID NO: 627939 - DNA, 521 bp, Homo sapiens
aataagggctgacacagagaacaattatacttattggttatatttatcagtcttggctggcaataatgcctggatgcaatcactttatgacacagttacacatgctttctgatctcagtatttaccataataaatctgctyctataattgaggcataccaccctcaaaaacctatttgtaaacaggattggacccagttagaaaaaatgaacctactagtttaggaagattgcattgcagagcaggcagaggtgctgcacaatgattcctatggaatcattattaattggtcccctaaggggatgtttagcttgaattccacctctcagtctgcatgccaggcccacactatgttcagctggtctgaacaaaatggtcagatggtagatataataagaagtacagcaagagttcctattatctggaaccatggcagtatagtggcacctcaaattcaaatgatatggcccactcaaggagcttaacataaggatttaaaattaaaagaacaaatatttaaa

SEQ ID NO: 627940 - DNA, 576 bp, Homo sapiens
cactgggttagggtctccccagccgagctggtcttggcaaaggtaggtggaccacctgaggtcaggagttcgagaccagcatggccaacatgatgaaaccccatctctactgaaattacaaaaaattagctggatgtggttgcrggagcctgtaacccagctactcaggagactgaggcaggagaatcgcttgaacctgggtggtggaggttgcagtgagctgagatcatgccactgcacttcagcctgggcaatgagcaacactccgtctcaaaataaataaataaacagacaaacataaataaaaaataagtgtgtgtgtttgtgtgtgttggggggtgactattctaaattattaaaataggttatgacatttttcttttgtcaaacatataaacatgagaaaacaatcaaaactgcatgttttctgctatcccatgggccatttaaacatttacacagaaattttattgaattgtcccttataacacatgttttcttaaagtagaaaagctttctgatgttagaaatctgctgttataccagtagctaaaaggatataaggaaatgtttctc

SEQ ID NO: 627941 - DNA, 545 bp, Homo sapiens
ggtgagatctaaacaaggccctcaagaagggtgaatctgaacagaactggggaaggggagaccctctgtagaattctgttctctatgccactggggtatttcaagttctgttttttgtaagcttacctaagagaaacttaaatcccagcgtttgcgtaattttaatcttttctagccactgccctgtcaattttataacatatactaataagcaatttaaacaaatctcttaaggttttctagggtaatattattagaagataaatatgtattattattagcaagataaaagaaatcaaaaaataataatgcttctgtccataaatatcccttcaagtgatgacatcagaagccacaacaatataaataaagtggcccraataaagctcacaattttttcacacatctatttgctataccaaccatatgatacttaattcaaccatttattcagttgctagtctagactaagagtttctggattgtagaaaccatgactgcttcatctatttttctaatggccatataaaattatagcaatcagt

SEQ ID NO: 627942 - DNA, 602 bp, Homo sapiens
ggagcttccctgctggcaggaggcagcaatagccatggtcattgaaaacaaggctctgctgataaatctcagacaccaggatcagaagaaaccggagaaactgctggagagcttgagccaaatggacagactgttggagcagctgagggtgaagctgcatgaacatcaccaaggatagaaatggaaatgatgaaggagtctgggaaataaatgatagaagataaaatacagccgtgaacatggtaaggtgatgacgattctggtccattggatcccaccatctccaaggcagtaaatctcatcacagtcaccacccagcaagttgccaccacagcattttctgtttgttcctaaataaataaaggtgattctcatcacaagggcaaatacaaatagtggtctattatgtttttaactaaactgtaggggtttcatttactttttctaagttctcataattttgaaaatgcggttgtcatatatatggcttaagaagtttttgataggctaacgttacttgaattgttcaaaaaccacwatattttaaattaagaagaataaacaatgtatttgttttatatatttaaagcttagagtcacaa

SEQ ID NO: 627943 - DNA, 514 bp, Homo sapiens
tcctgattttttggagtacattcagtagtagtacgagctcatctttgtatatgaggtaaaattttgttgtgattttacataatccaggrcttttatggttggtaggttttttattactaattcaatttcatcatatatattttatacatttttgccctgttcaagacttctgtttcttcctggttcaatcttggaaatttgtgtgtatccaggagtttatttattttcttaaaattttctagtttgcaggcatagagatgttcatagtagtctctgatgattttttgtatatatatagaattaattgtgatttcacatctctaacatttaaatagatgcagagtacaaaagaatagatgcacacaatggaagtttggcaaaatttgacattcctttatgataaatctctgaaaaaatttgttatagatcaaattattggcacctcagccaataagtgccacatacaaccaaaaaatgcacaggtaacaacatactaaatggggatatgttgcaa

SEQ ID NO: 627944 - DNA, 614 bp, Homo sapiens
caggtgatccatccgccagggcctcccaaaagtgctgggattacaggygtgagccactgcacccggccataattgtacattttaaaataagtaaaagtgtacaattggattgtttgtaatacaaaggataaatgctagaggtgatggataccacatgtatctcgatgtgagtattatgtattgtatttgtgtatcaaaatatgccatatatgccataagtatatacactcatgcacccacagaaattaagaaaaacaaattaaatgattaagaataaaaatttaacctacaggaacaatattctttaacttatttgcagtttaaagccactggcaaaagagatgactaaagatgttagtccattatgttaccaaatagtatattgttaacattttttacctatatttttgggcaaagtggaaaaggttaatctttgtggtaaaataacacttcattgaatgcacaatagtatttaacatgttaaaaatgttgaaacgattaacttcacacataatctaaaatttttaaaatgtactgcattttatcatataaaagtacaattagtacaatatatgaataatatactactagttttctcataatgcaaagaatat

SEQ ID NO: 627945 - DNA, 614 bp, Homo sapiens
caggtgatccatccgccagggcctcccaaaagtgctgggattacaggcgtgagccactgcacccggccataattgtacattttaaaataagtaaaagtgtacaattggattgtttgtaatacaaaggataaatgctagaggtgatggataccacatgtatctcgatgtgagtattatgtattgtatttgtgtatcaaaatatgccatatatgccataagtatatacactcatgyacccacagaaattaagaaaaacaaattaaatgattaagaataaaaatttaacctacaggaacaatattctttaacttatttgcagtttaaagccactggcaaaagagatgactaaagatgttagtccattatgttaccaaatagtatattgttaacattttttacctatatttttgggcaaagtggaaaaggttaatctttgtggtaaaataacacttcattgaatgcacaatagtatttaacatgttaaaaatgttgaaacgattaacttcacacataatctaaaatttttaaaatgtactgcattttatcatataaaagtacaattagtacaatatatgaataatatactactagttttctcataatgcaaagaatat

SEQ ID NO: 627946 - DNA, 584 bp, Homo sapiens
aatctgggcagtacagatgtatggaatctccccctgtgcagcacaccccctacaccaaggagcaaccagagtgctttgttaagtggttcctggatcttgtgcatcctgacttggtgagaacccccccctcaaaaggtggtgtcaggcaacttataaaggagtgttcccattgtcatcaggttggtgcccttctgggaacaggccttaaagaaactggccataaacgggatttctgcagcaatgtgacatgctcatgatggctataatgcacactgctagaagttgttggtttactggagcaggcaaggaacatctggcctgcccggagcagaaaactgctcaaaccacacacaatagcaggagcagcctgtgccttaacaacatgtttttgctacagataatcagccagagcctgtttctctactctttgctaagaatgctttgtttcccatarggaatgcttttagctaatctatagcctatagaaacaatgcttattactggcttgctgtcagtaaatatgtaggtcaaactcagtttgtggctctcagctctaaaggatgttgcccctctgactcccactc

SEQ ID NO: 627947 - DNA, 615 bp, Homo sapiens
tcatcatcttcataagctgaggatgtatgtggcctcaggaccctgtgatgattgtgttaactgcacaaattgttcataaagcatgtgtgtttaaacaatatgaaatctgggcaccttgaaaaaagaacaagataacagcaatgttcagggaacaagggagataaccctcaggtctgactgcctgagagccaggtggaacaaaccatatttctcttcttatgaaagtgaataggagaaatatcactgaattctttttctcagcaaggaacagccgtgagaaagagaatgcactcttagggggaggtctctgaaatggccgctctgggaatgtctgtcttrcacagttgtagataagggatgaaataagccccggtctcccatagcactcccaggcctattaggatgaggaaattcccacctagtaaattttagtcagacagtttgtctgccctcaaaccctgtctcctgataagatgttatcaatgacaatgtgtgcctgaaacttcattagcaattttaattttgccccattgctctgcccctatttgccttgtgacattttattgccttgtgaagcatgtgatccctgtgacccacaccctattcatacactcc

SEQ ID NO: 627948 - DNA, 579 bp, Homo sapiens
cttttagatggagtcttgccttgttgcccaggtgaaaatggctggaatgcaatggtgtgatctgagctcactgcaacctccacctccagggttcaaatgattctcctgcctcagtctcctgagcatctgggattacaggtgcatgtgaccacacccagctaatttcttatatctttagtagagatggggtttcaccatgttggccagactggtcttgaactcctgatcttgtgatccacccatcttggcctctcaaagtgctgggattacagtaagtgtgaggtgaagaagtcaggttctttgaataaaccagctctcatttgaattaatggagtgaaaactttctgattatcaaaaagatagtgtcaaggcatttatgaggtatttttccccttaacagacatgtacaaaactttctacttaaaagtcaaagaatacaaaatattcttatttgcacatgacrtattcagttaggaaatataacaagtcttattaaataataacagctgggggtagtggctaacatctataattccaacaatttggaagatgaaagtgagggagtcagttgggaccaga

SEQ ID NO: 627949 - DNA, 588 bp, Homo sapiens
cactcaaaatttcatcaaaacaacacccccctgtcggggaatgagaaagggacctggacctgggcacctcaaacaatgagggcattccccgtccaggccacaactccatttcaggggtgggtttccggaggagcattgattccctctccccaggaacacctggaagcgcaggattacatctcccagccagagaatgggttacattaattgaaggagaaaaacccaataagatgcccactggtatttgggtacctttgccaataggatatatgggattaattttaggtagaagtcatcttaacttacatagcattgttgtagtccctggagttgttgattctgattgtgaaggataaattcaagtagtggtattgtcacaagatctttgggatttttaactagaatataatgctcaactgttgcttattscctgtaaattgatctttgggtttttgaactaggagatcaactgttgcttgttccatgtaaatcgcacccatcttcacaaaaggagaaaggagggaattaaggatttggaagtacaactacatgggaaatttatctatcacaacccatagcatgtaatag

SEQ ID NO: 627950 - DNA, 621 bp, Homo sapiens
ggtcctcattctggtgggaaattataggacctctggtcttggctacagaccaagaaatggcccaaccaacttggtcacactgagaattctgaagttactctgtaaccrtcccaaacttctcccagttacagtctggtagagaccctgcccttccagagacctggagaaagacagccatttgtagccatgtaggcaggcctacagaccttggtttttactgtggtccctgaagcagttcaatgactctgttccagctccatgggtagcagttcatggccagttctgcctacatagaaacctgcacagtgacctgaggaaatcctctctggtactcagtgaaagccatactcatttgcatcctgatataagggccactatatatggacccgactgcagaaagctgccctagagtctgctccacagataaaagtcctgaaggatatttaatctgttaaaaaacaaacaacaacaacaacaaaaaaaaaaaacagcactttgggaggccgaggcaggtggatcacaaggtcaagagatcaagatcatcctggccaatatggtgaaaccccatctctactaaaaatacaaaaattagttgggcatggtggcacgcacctgtagtcg

SEQ ID NO: 627951 - DNA, 545 bp, Homo sapiens
gctgagttagaaggcacctctcaagttttaatatgtataataaactgaagatcttgtgcagattttttttccrgaagatctggaataaaatctgagtttctgaatttctaacaagctcactagtaatgccaatgcgtttggctgaaaaagaatattttatcaaacatctagtaagtgaaagaccctgtgttttacccaatttttctggcctggaaacaaagacaagagtcttcattcttcaaagacaggtatttgtaaagaaaactaagaaagaaaggcagctgccatattaaatgtgatggtttatgcacagctcttctttagctacacaaagatacttaataataaagagaaaaataattaactctatagtgaaataaatatttcagagagctctttaagtaaattgtaaaatcaactgcactaggatcaatttttatgatgtgctgatgcacacagaagaacacatcaccactgctgagatattgcccctcaaaaagtacagtctgaacttaaccacacagaaaaatcagttttatgcagag

SEQ ID NO: 627952 - DNA, 627 bp, Homo sapiens
ttaataataaagagaaaaataattaactctatagtgaaataaatatttcagagagctctttaagtaaattgtaaaatcaactgcactaggatcaatttttatgatgtgctgatgcacacagaagaacacatcaccactgctgagatattgcccctcaaaaagtacagtctgaacttaaccayacagaaaaatcagttttatgcagagttcaagatgcagatatcttctatgttctgtaatttttaataacaatttaaagtagtctttctttagcaccctagagagtgggtatctctcaataattttttttcagaactttctgggtaataaatgctatcctgtttaaataagcattttcttagtcctgttctgcatagagttaatggagaaaacagatgaaacctcaacattacatgttctctatttttactaaggaccccagctttcccccaataggaatcttgaatatccatattttcccatttcaacagcaacaaagggaacatttttaatagtgccgattatgaattcctggtaagaattccacatggcatataagaagccatgatttagagagtgtagagaagactctgggatataggagagaaatattttgcagagaccctt

SEQ ID NO: 627953 - DNA, 581 bp, Homo sapiens
tttggtgcgtggtgagggtttggtctctacttccaagatggcactgtggaggctktgtcctcacatgcttggaggtcaaaggcagaaaggggccaaatgctgtgtctggcctcttttataagatactaaatctcattcacaagggaagagccctcatgacctagtcacctcctaaaggcctctcctcttaatactttgcattagagattatgtttcaacatgaattttgaaggggcataaatgttcccatcatagcagaggtataacgatcagaaggtgtgcaggtgttaaggggataataaataacaccatctttataccacatcaagtcagaaaaaaacagacaaagacatgtgagtaaggtagatggaaataaaacattaccttataactgatgaagctgatattgaagaatgggcttggatcagccagtctggtggatttgcagtcattttacctctgaattttagagatttaccctgctgttggcacagacagacaattaggctgacctcactgcatagctgatggtgtgaaggagttcttgggcaggtgagctcccaaatgggatacacagaaag

SEQ ID NO: 627954 - DNA, 581 bp, Homo sapiens
tttggtgcgtggtgagggtttggtctctacttccaagatggcactgtggaggctttgtcctcacatgcttggaggtcaaaggcagaaaggggccaaatgctgtgtctggcctcttttataagatactaaatctcattcacaagggaagagccctcatgacctagtcacctcctaaaggcctctcctcttaatactttgcattagagattatgtttcaacatgaattttgaaggggcataaatgttcccatcatagcagaggtataacgatcagaaggtgtgcaggtgttaaggggataataaataacaccatctttataccacatcaagtcagaaaaaaacagacaaagacatgtgagtaaggtagatggaaataaaacattaccttataactgatgaagctgatattgaagaatgggcttggatcagccagtctggtggatttgcagtcattttacctctgaattttagagatttaccctgctgttggcacagacagacaattaggctgacctcactgcatagctgayggtgtgaaggagttcttgggcaggtgagctcccaaatgggatacacagaaag

SEQ ID NO: 627955 - DNA, 595 bp, Homo sapiens
aacacttacacactaatggtgagagtgtaaattagttcgaccattgtggaagacaacatggagattcttcaaagacctaaagtcagaaataccatttgacccagtaatcctactacgggggacataccatacccaaaggaatataaatcattctgttataaagacacatgcatgtgtatgttcattgcagcgctattcacaatagcaaagacatggaatcaacctaaaagcccaccaatgayagactggataaagaaaaagatagggcgtacatatataccatggaattctatgcagtcacaaaaaataatgaggtcatgtcctttgcaggagtgtggatggagctggaggccattatccttagcaaaacaacacaggaccagaaaaccaaataccacatgtttttacttataagtgggagctaaatgatgagaacacatggacacatagaaggaaacaacacacgctggtgcctttcaatgggtggaggctgggaggagggagaagatcaggaaaaataactgtgtactcggcttaatacccgagtgatgaaataatctgcacaacaaacccccatgacacaactttacctatg

SEQ ID NO: 627956 - DNA, 576 bp, Homo sapiens
caaatgggaagcaacgtgctttcttcacaaggtggcaggaagaagaagtgctgagcagagctgggtaagagccccttataaaaccatcagatctcgtgagagctcactatcacgagaacagcatgggagaaactgcccccatgattcaattacctccacctggtctctcccatgacatgtggggattatggggactacatttcaagatgagattcgggtgggggcacaaagcctagccatatcaggggttataagaataagctgggaggagggtgttgccttactygtctttgaaataaaaagtgtattctcaaatacgtataggaagtgtaatcacttagattatatccctttggatcaaataagccccctctgggactgaaatctatcttcaatttaaagtcttgtttccaatggctcccaaagaaaatctaactattctatactcaactcacacttaaggggttgctgaggagaaaatataaagacattattgggatatggcttccactactttttttcccccctgagcattagatttcagattactgtcaaaagacaaaaaattacaacttt

SEQ ID NO: 627957 - DNA, 576 bp, Homo sapiens
caaatgggaagcaacgtgctttcttcacaaggtggcaggaagaagaagtgctgagcagagctgggtaagagccccttataaaaccatcagatctcgtgagagctcactatcacgagaacagcatgggagaaactgcccccatgattcaattacctccacctggtctctcccatgacatgtggggattatggggactacatttcaagatgagattcgggtgggggcacaaagcctagccatatcaggggttataagaataagctgggaggagggtgttgccttacttgtctttgaaataaaaagtgtattctcaaatacgtataggaagwgtaatcacttagattatatccctttggatcaaataagccccctctgggactgaaatctatcttcaatttaaagtcttgtttccaatggctcccaaagaaaatctaactattctatactcaactcacacttaaggggttgctgaggagaaaatataaagacattattgggatatggcttccactactttttttcccccctgagcattagatttcagattactgtcaaaagacaaaaaattacaacttt

SEQ ID NO: 627958 - DNA, 589 bp, Homo sapiens
aaagcttctggtggacatttccaaatttctcaacaaaggcgacagttttgttgagacaatagcaggaagggggtggttagaagacagggaaaagagcccaggattgccattgtgaaatacacattaagacttcacagaggtgaacatggagattatagagtagccacaagagyccatttgaaataaaaagagaagtccagggccaggcacccaggggcagaacagcaggttaggacagagcagaaactcaagggaaagaagacaactgagaagaggtgagggcaggctgtcttccttttgtgtgtttttccttccctttctttccttctctctgatttcctttccttttctccttctctcttttcctttctgatttcttctttaagaagtaataaatagtagaaagagtggttaatcattcgttcttcagtgttttccaccttctcatgagactcaaagaattgatgtctgttctgtaggctcttgtaaaacatattcagttcgtctgaagaaggagctgtatagatgaaaataacagcactaataaatgctgaaagtctcacagtattaacatgattatatgcagcct

SEQ ID NO: 627959 - DNA, 419 bp, Homo sapiens
gcttcatagtattccatgatgtatatgtaccacatttcctttatccattctgtcattgatgggcatttaggttgatttcatgactttgttgttatgaatagtgctgcaatgaacatacacatgcatgtgtctttatgatagaacaatttacattctttggggtatatacccagcaatgggattgctgggtcaaatgttattgctgacattaggtctttgaggaagtgccacacggttttccactatggttaaactaatttacactcacaccaacagtgtatatgtgttcctgacagattcttttcaagggcatgcagttctcacacttgttggtgtcarcacttcttacagtcttaagattgaagattacaaagagcttttgttcttgtggattatgtatctatcaatgtttatcatgt

SEQ ID NO: 627960 - DNA, 439 bp, Homo sapiens
gtgcagctggactccctggaactctgaagctgaggtcagagatgactctgcttctgtccaactccttaatcacatttctacaaggcactaagcatctccatttttctgtctgtagaataggtatcttggttgccatacaccaacttttctgatgttttaattaaaactaggaaaactgtcttttaggattgggctgctagcaatacrgaaaggagcacaaatttctgggtaatggagagaaaatctattctagttcaagtatttggagttcctataaatcttactctatatacaattgttgcttgagaaatagtgttaccaatacaccgcaaacaatatgctttttaatcaactgtgtctcatctgagctgtgatacatctttggccttatgaaaagagaatgtttatttaataagagcagctgctgtaatttttcaaa

SEQ ID NO: 627961 - DNA, 612 bp, Homo sapiens
gcttccctgccttagctgagcagcagttgctacagagagagacacgtcttccccaaccccaatcagaaagtcaattgaggagattcctgaagtgctatagccrtgctgtgaagggtggcgggagattaggcagagatgggagtgggataaaaaggaaacagagaaaccttctgtgctgtgaatggttggggagaggtgaagcagggatgggaatgggatgaaaagaaaacagagaagcccaaatggatgggagacaagaggaagacagacaatgtacagtccagccctgcagaggcctctgggcccctctagaactccaggaggccccctcagctccatggtttgcattcctgccccagcgattcctggctttcatttagaaccctgggtgtgtattagtttgaatcatagcccacagcttgctgcactgtcaaatttgtgtctgccaacagaaaggaatgtatttcagccagcaagagagggaactcaggatttgtggcaaggaaaaatggaatgcagtagaggagaaaactccattagaaattctctgaggagccaggatcattcgtcttcctcttctggttgtcagtgggccactctctgcctacagct

SEQ ID NO: 627962 - DNA, 612 bp, Homo sapiens
gcttccctgccttagctgagcagcagttgctacagagagagacacgtcttccccaaccccaatcagaaagtcaattgaggagattcctgaagtgctatagccgtgctgtgaagggtggcgggagattaggcagagatgggagtgggataaaaaggaaacagagaaaccttctgtgctgtgaatggttggggagaggtgaagcagggatgggaatgggatgaaaagaaaacagagaagcccaaatggatgggagacaagaggaagayagacaatgtacagtccagccctgcagaggcctctgggcccctctagaactccaggaggccccctcagctccatggtttgcattcctgccccagcgattcctggctttcatttagaaccctgggtgtgtattagtttgaatcatagcccacagcttgctgcactgtcaaatttgtgtctgccaacagaaaggaatgtatttcagccagcaagagagggaactcaggatttgtggcaaggaaaaatggaatgcagtagaggagaaaactccattagaaattctctgaggagccaggatcattcgtcttcctcttctggttgtcagtgggccactctctgcctacagct

SEQ ID NO: 627963 - DNA, 554 bp, Homo sapiens
gagtgagaaacgcttacctttagcatttgaaagaatgagctggtggtgatgagctcaagatttagagtcagacaggtttaggtttgaatgtggccctgtcactttgtaactgtataagcttgtgcaagttacttgatttttttgaacctcagtttcctcatctataaaataacagtaatacctgcctcttcaggtggttaacacttaaatcagttcaatgatgtaaaccacttagtacacagcatacactatgtagtgtgagctactaccgtcattattataygcaacatcatctcttctcagatttctataattagccttggttattatttcggttatttacttcctcatcagagtctttctttagttgtcagcaatttttgaaccctctttaacaatagtcagcacttgtttttttgcaagaaatgattctaaaacagtttgcaaatttctacataagaaattgatgcaataataacagcagcagcagtaatttctataggattactgagatagagctatcatcgtggccaggcttgcttctatgtctaaat

SEQ ID NO: 627964 - DNA, 571 bp, Homo sapiens
ctgcttataccaatattttacaccacagttcaacttttgaagggtgtattgttttcagtgtcaaagtaggtcaatctggatgctttaagctgcagtaacagaaaaccaactcaaattgattaaacaatttggggatccattgcttaacaaagaggacatcaaaagatagggttrgctttggtttaattggcagaatcaggctcatgatataatcaagaccgaggttctttccaggactctcctctgctatccagcctcaactgcatcctaaagcatcctcttggtcatagagtggcttctagcagcaaccaggcctattcccttgttcacatccaataggagaaagggtgagtttcttatggaaaactttcagggaggcaaataagtatgtttccagaaatttccagcaaaatgcttctcatgtctcatcaacgagctgcatatcacatgccaattcctgaaccaacccctgataaagaaggaggaataccccttggacccatcaggaataatcagtcaggctctagggagccaagggaggtatgtggattatttgggaaagggtagatag

SEQ ID NO: 627965 - DNA, 568 bp, Homo sapiens
gaattctttcaacaaaagagtataaataagcaaagaatgttttttagttcatttcactctgaatgtgacccctatgatagatayaaaccaaaaataaaattttaagtcccacgaccaactgagtggaccccccccttttagccagaggacccaactaaacctggaaaactagttcagatcatgccaggaagaagagtggtcagacatacctcaattactctcttcccttgtggttaagacacacaactgaccagcattaacattaaaacacaggtcctaaaactgacagaacagactttttgtaacaataagataccaaattccaacctgactctagtatagcatcacatgatagtgggaccttgaaagaaaccaaagtattttactccaaaatatatttctttgacatattttgaaatggccctgccaagctgtttcttgtggaggaaatttacattctgtagagaatccccgttccttaccaggcccttttctaatcctgaggagattagctgagagcctagcactttttaaaggtctgaataggaaacacttgctatctattgcc

SEQ ID NO: 627966 - DNA, 518 bp, Homo sapiens
tcacaccacgtgtgggatgctcggaccctgattactatgtacctcattttgtgtgtgtgtgtgtgtgtgtgtgtgtgtgtgtgtgtgtgtgtttctcataatgacatyagaagcggatcgccataacaggggtaaccaggagtggtagctgagaagtctagttttagtagaaccttctgatcctcatggttggcttccaccatcttgtgcccaccccccagcctctgcctccttatcatgtctgtgtctcccaatgtcatggtggatgtgatatgctcctttacacatcttatttctaccagtggaagataaagtacaaaatgctctcaatacatctacctctagaagatctctaaccaaatgcattatatacacttaattcttaacctataaattcccataatttactacaacaaatactcttctcaccaatattatgtataatttttgtacacactattttatctaattttcctaaaaatccaactttgttggtctaactattctcctcatttata

SEQ ID NO: 627967 - DNA, 592 bp, Homo sapiens
tgatacgaggtccgaatatggaaggtagaggcagagaaatactttaatyagggtggtcagggagctctcattgagaaggtgacgttggagcaaaacatcaggtatctgaaggaagggtattctagaccagtggtccccaacctttttggcaccagggactggtttcatggaagacaacttttccatggaccggggttgacagagggcatggttttgggatgattcaagtgcactatatttattgtgtactttatttctattattattacattgtaatatataatgaagtaattatacaactcactataatgcagaatcagtgggagctctgagcttgttttcctgcaactagacggtcccatctgggggtgatgggagacagcgacagatcaccaggcattagattctcaaaaggagcatgcaacctagatctcttgcatgtgcagttcacattagggtgctactcctatgagaatctaatgctgccactaatctgacaggaggcagagttcaggtggtaatgcaagtgatagggagtggctggaaatgtagacgaagcttcccttgctctcttgttgctcacctcctggtg

SEQ ID NO: 627968 - DNA, 592 bp, Homo sapiens
tgatacgaggtccgaatatggaaggtagaggcagagaaatactttaatcagggtggtcagggagctctcattgagaaggtgacgttggagcaaaacatcaggtatctgaaggaagggtattctagaccagtggtccccaacytttttggcaccagggactggtttcatggaagacaacttttccatggaccggggttgacagagggcatggttttgggatgattcaagtgcactatatttattgtgtactttatttctattattattacattgtaatatataatgaagtaattatacaactcactataatgcagaatcagtgggagctctgagcttgttttcctgcaactagacggtcccatctgggggtgatgggagacagcgacagatcaccaggcattagattctcaaaaggagcatgcaacctagatctcttgcatgtgcagttcacattagggtgctactcctatgagaatctaatgctgccactaatctgacaggaggcagagttcaggtggtaatgcaagtgatagggagtggctggaaatgtagacgaagcttcccttgctctcttgttgctcacctcctggtg

SEQ ID NO: 627969 - DNA, 447 bp, Homo sapiens
tgagttgtacacttaagaaagcacgatggctcacatctgtaatcctagcactttgggaggctgaggcgggcggatcacttgaggtcaggaatttgaaaccagcctggccaacaaaccctgtctctacgaaaaatacaaaaagttagccaggcatggtgggaggtgcctgtaatcccagctacttgggaggctaaggcaggagaattgcttgaacccagcaggcagaggttgcagtgagccaagattgcaccactgcactccagcctgggctacagagcgagactctgtctcaaaacaaacaaacaaacaaacaaacaaaacaaacaaaaagaatggtataacttacttcatgtargttataccctgcctgattaaaataaaaagaggtgaagggaggtgtctttccatgaggaaagacggaatgacatggaaaatgttcaggcagag

SEQ ID NO: 627970 - DNA, 564 bp, Homo sapiens
gaagggaggtgtctttccatgaggaaagacggaatgacatggaaaatgttcaggcagagtatgggtaactatcaggaatggttcacagaagactgcattaggatgaaaggatccacattgggctcctcaccttggtaaaatctgtagagatcatttagattagaaatgtgcttccatgctgggcagtttgtaatacagaactctagagagaggaaaatggagtcagagatttctgtcttgtaatggtctaaaacaggactttttaacaaggcactagattttaaatctgttttcacactcattgcttttacctcagtggaaggtgcttatatgaggggacccctttggcacctgtcatgatcccaygagtcctgcctacagggatgttatttctgcatcccagttgagactgtccaacctctccaaataaggagcaggacagtatggtggttacgagcagggcgggttgtgatcttgaacagaagcatagttgttaagagggcagagctgacattgactccctgggttgaaatcctctttgtcctagaacaagttattcaaccc

SEQ ID NO: 627971 - DNA, 564 bp, Homo sapiens
gaagggaggtgtctttccatgaggaaagacggaatgacatggaaaatgttcaggcagagtatgggtaactatcaggaatggttcacagaagactgcattaggatgaaaggatccacattgggctcctcaccttggtaaaatctgtagagatcatttagattagaaatgtgcttccatgctgggcagtttgtaatacagaactctagagagaggaaaatggagtcagagatttctgtcttgtaatggtctaaaacaggactttttaacaaggcactagattttaaatctgttttcacactcattgcttttacctcagtggaaggtgcttatatgaggggacccctttggcacctgtcatgatcccatgagtcctgcctacagggatgttatttctgcatcccagttgagactgtccaacctctccaaatraggagcaggacagtatggtggttacgagcagggcgggttgtgatcttgaacagaagcatagttgttaagagggcagagctgacattgactccctgggttgaaatcctctttgtcctagaacaagttattcaaccc

SEQ ID NO: 627972 - DNA, 559 bp, Homo sapiens
cctctcatcctgccaagaactgaactttgtctctccatgcatcaaactcttcgataggatgccccagtggtggacacasacagcatatttgctgttgttgagttagccacttagaggattgaatcagtaacatcattttctctttttagcaactcgttttcattgatgttaccttgcactctattcctccctaacccatgtagctctgtccaccctaattttccccaagatgtcctgaccaagtgggaacaaaagagatcaacagtagcgctttaattatatcctctcacaaaagtctgcacctgcagtcactttcaatctctcttggatgagagagagtagaaggtagtagagtggagtgggaagaactctgaacatgaagtccaaatacctgagttttcccctgttctgccccttacttttcatgtgacctggggtcatgcctccactcgcttacctgtaaaggaggaccaggtcaccttgcacatcctaaagcacggagtctatgattctgcagttggttcactgtgctacttggagggatatggcaggaacaaga

SEQ ID NO: 627973 - DNA, 559 bp, Homo sapiens
cctctcatcctgccaagaactgaactttgtctctccatgcatcaaactcttcgataggatgccccagtggtggacacacacagcatatttgctgttgttgagttagccacttagaggattgaatcagtaacatcattttctctttttagcaactcgttttcattgatgttaccttgcactctattcctccctaacccatgtagctctgtccaccctaattttccccaagatgtcctgaccaagtgggaacaaaagagatcaacagtagcgctttaattatwtcctctcacaaaagtctgcacctgcagtcactttcaatctctcttggatgagagagagtagaaggtagtagagtggagtgggaagaactctgaacatgaagtccaaatacctgagttttcccctgttctgccccttacttttcatgtgacctggggtcatgcctccactcgcttacctgtaaaggaggaccaggtcaccttgcacatcctaaagcacggagtctatgattctgcagttggttcactgtgctacttggagggatatggcaggaacaaga

SEQ ID NO: 627974 - DNA, 572 bp, Homo sapiens
agtttgcagtactatttgtctgcctgtaatctttttaaatactccaaggtctaattgtctagttgcttaataaaactgattccctttgaggttccctaacaagctaaataatgcctttcaaaaaagagctgagtaaccagttaaatggaattacataggcacgactatttgctgcttaagtcaactgtgatattctcagacttcataattggttatgtatttgctaactctgcggcaaatgaacatctcatacttcctagtttgccagtataaaagaaaatcatttaaaactttactttctgatatgtattttatggtaagatgttgraaaaatatacattttcaaatgctgaacacacttctataaaaggtcatgctgaccattggaaaattagctggtatatataacttcatcattttagcagttcaattaatctcagtttcacagcatagagtggggtggagaggaggaaaatcaaaacgatgcctagggcacagtctctgaatttgaagcagcatggacttcctccagatcagaggtagatgcctagtgaatgcatcagtgctatgac

SEQ ID NO: 627975 - DNA, 523 bp, Homo sapiens
aagaaattttaaaacacagatcatacccttgggaagctcaaagacaaaatacatgacaggtatgtaggtaactgcaggtacatcttctgatgtgtataatgggagatacaagcataggtgcacagaggaggggtgtacctaacataagggaggggaagggggaaggggcatagctacttggttggtattcactgaagtcactgtgaccgaacctaaaatcaccatcttcttccccaaaccctttcctcyccctgtatctccaatccagagtaatgacttcccatctttccccaggaaaactgaggagagggaaaaacccaaacagcaagaaatggggagtcatatttaggtctggtctctcattgaccacctcttttattcattgctagttctgggttcttcaaggactgccacccaatggcactcttccagatcacaggtcggagaaaattgagaaagaaacaaaaagcaggagatgacatcaaaatgttaccttttctccctagagaggctcagtagaaga

SEQ ID NO: 627976 - DNA, 580 bp, Homo sapiens
aatgcatcagtgcttttggaagggaataaagtgactgaaagtgatgtttatattcattactttctgttccttcaagcttttggtttttagcttcagacttttgatccacaggaaaggcattgtactaggctggctcaggtgaggaataatggagacagacaacagcaatgggagcacaggggcgaagcagctacaagtattagtaatcttcacaatgtgtkagtcttaactctgtgctggcacattgtgattcacatgtagactattcttaatggaaggatcgccttgaattaaaggagaatgtttaagaaaatgatggatacacaagatttcttccctcctgccagctgtgaaactgattgatcttaaagtttttgccatggttattatctcaaggagagagaaatgcgtgtaggagtggaaattattcaaggatatcatctttcttgattttctcatttccttctcaagtgggtggaagataattttgtgaggttcaaagatatgcgagtgaatccttggtaatgtcaaaaaacatccatggaccatctaaaccaacttttgaattctagtataacca

SEQ ID NO: 627977 - DNA, 543 bp, Homo sapiens
atttgtgtgagcttaaacattttaaaagaagtttttataaatcaggcctatcaaaagggctcatgtttcctttggggaaaaatatcccttccttctctagttcatactatcctccttcccacaatctagcttcacagtaacttattttagaaatatgatctcctctcagtatttgtggagtgtttgttcgaggacctccctcatggcccaacacaattcacagatgttcacatccctgatatgcmatgttacattaatgttgtatataaatgttatattaataatgttatattatataaaaatataattaatgtattaatataacatctattaatacctacatcatacacacattctcacacatactttatgtcatctctggattacttataacacctaatacattgtaaatgctttataaatagttgttataatattttgtttagggaataatgataagaaaaaagtctgtacatggttcatcacagacacaaacattcttttttttccaaatattttctatcggtggttagatgaaatcat

SEQ ID NO: 627978 - DNA, 538 bp, Homo sapiens
tctcaaattcatatgtctccatgattttcaggatgcccctctattgtagtcagtaccctagctttaacatataggatcctatgtgattattaattcaatttatatcatgattcagctactcrtaggtttagattttgggtttcgtttcagcaacgttggccctatagctacaagagttaagggtttctttcacagtagtaatacaaactttctggcattttttctttttgcttggtcttgaggtggatttttaaaatcccaaactcaacattttctttcccaagttctccagaacacttagaagcaaccagccagctccaccacttttttaatttttcaataaaaatgttctatgttagcaattacttggctatccaaaacattgctacctataaggcatctggttatagaagtctacaggttatttaagcaacacttttgccaatgcgtgtcataggactaccagtgcccacctttccactggcgaaggagtcattaacagctttaaagcaaattgaaacagagaaccaattccaga

SEQ ID NO: 627979 - DNA, 551 bp, Homo sapiens
atgtaggactcccttacacatttcttattcgctgatctagtagagatgaattcttcaagtttttgcttktctgagagactttatttctccttcatttttaaaggatagcttttcaggtatagtagtatttgcttaaaggtttttttcttttagcactttaaaaatatcatccaattctctcctggcctgtgagtttctgttgagaaatatgctgttagtctgatggggattcccttatatgagatttaacacttttcccttgctctttttggaattctgtctttgtctttgaatttctgacagtttgattataatgtgcctcagagaaaacctttttggattgaatctatatggggagttttgagcttcctgtatctgagtgtccatatttctcacaagactttggaagttttcagctattattttattaaataggttttctatgcatttttctcctgttgttctgaaacttccatattataaatgtttgcttaatggtgcctaatatgtcacataggatttcttctttaattatttttttttgccagact

SEQ ID NO: 627980 - DNA, 593 bp, Homo sapiens
cattgcttgatcgcattgtggcatataaataaataaatggaatttgctaaaattttattcaattaaatcacaggctttgtttcatgaaatacttgactctgtgggtcaagggctattttattgaatgcagaacactgtaaaattcatcaggtacatcctagaataatgttatatctattttattgaatgatttaaattgacatttggttaataggaaacaataggacctgattaaaaaaaatgtaatgatggcaggaataggaaagactatcactcaatcagtgttttccagggatgcatagagtttagttatatagataaagtacaccttggaaagctggggaytgattataggaagtaggatcattttatatagaggatgtaggtagagccccatgagaagggtcttctttctgggatatctcctcataatcttttttgctaatgactgagattttaccattaataaataattgttcattactagaatggagcaactttaggtctggttttataataagctttactagctttagcaccttgatgtgtattaggtctgatagggtagtctgtccttgagagaataagtaggt

SEQ ID NO: 627981 - DNA, 533 bp, Homo sapiens
tgtacatattaacttagaattatacttatttgtataaattcatattttaaatcttcaagaaaaatagagtacaattccaaaatttcaaaaatacatgttttcatattttgccacctattcacattgactaggacatctttataggtctaaatggctgttagttactatctatttcctctccttcatcctgaattattcacttcagcatttcttgtagagaaaaaaataatgaatcagggattggaggtccctataccattttcttacattcccaagtgttcctaaaaaccaagtgttgagctttgagaaattacaagtttttttggttcctttccttttttttttttttttaactaggagttctgtggaaatagagggctaagtaatgaactggctggaataagcctgtagcagatctagtatttacaaatgactgccctaatgattatctcacatctggaaaaacatgttakgcttgctaaagaaattcgacatttaaaattttttcttaggagttacacacttgacctgta

SEQ ID NO: 627982 - DNA, 576 bp, Homo sapiens
aaagccagagaccatcaagggaatgaaaatagacagaaaacagtccacgaaattggcctagggcactccaaagtttatagcctccctgaattttaaggaatacatagtttaaggaaagattgtgggctgcaaaacatgcwgggagacctgacttgagaaagcctctttgatggggttaaggtggccgccagagtaagaacagttgagtgaaagtgttagtgtgcccaggtcaaaaaccactgtcctcaaaatgctttcaccaggatatcccaagttctcaaaagagtattctgaaatgaaaatttatgtccccatgattagctgatttactttgtactcctaaaaactatgtgaaagaattacatgtctttgtaagagttgttcctaacatttactaaagtttgaaaactttgtgcaattttgcaaacactgtttccaaaagatttttgggattttggagagtttgctttattagatgtattattcaccattttggccttaatttgagagtaatatgtaatggctttaagacattttgtctttcatacttacaagcatgccttattttatgtatga

SEQ ID NO: 627983 - DNA, 576 bp, Homo sapiens
aaagccagagaccatcaagggaatgaaaatagacagaaaacagtccacgaaattggcctagggcactccaaagtttatagcctccctgaattttaaggaatacatagtttaaggaaagattgtgggctgcaaaacatgctgggagacctgacttgagaaagcctctttgatggggttaaggtggccgccagagtaagaacagttgagtgaaaktgttagtgtgcccaggtcaaaaaccactgtcctcaaaatgctttcaccaggatatcccaagttctcaaaagagtattctgaaatgaaaatttatgtccccatgattagctgatttactttgtactcctaaaaactatgtgaaagaattacatgtctttgtaagagttgttcctaacatttactaaagtttgaaaactttgtgcaattttgcaaacactgtttccaaaagatttttgggattttggagagtttgctttattagatgtattattcaccattttggccttaatttgagagtaatatgtaatggctttaagacattttgtctttcatacttacaagcatgccttattttatgtatga

SEQ ID NO: 627984 - DNA, 576 bp, Homo sapiens
aaagccagagaccatcaagggaatgaaaatagacagaaaacagtccacgaaattggcctagggcactccaaagtttatagcctccctgaattttaaggaatacatagtttaaggaaagattgtgggctgcaaaacatgctgggagacctgacttgagaaagcctctttgatggggttaaggtggccgccagagtaagaacagttgagtgaaagtgttagtgtgcccaggtcaaaaaccactgtcctcaaaatgctttcaccaggatatcccaagttctcaaaagagtattctgaaatgaaaatttatgtccccatgattagctgatttactttgtactcctaaaaactatgtgaaagaattacatgtctttgtaagagttgttcctaacattyactaaagtttgaaaactttgtgcaattttgcaaacactgtttccaaaagatttttgggattttggagagtttgctttattagatgtattattcaccattttggccttaatttgagagtaatatgtaatggctttaagacattttgtctttcatacttacaagcatgccttattttatgtatga

SEQ ID NO: 627985 - DNA, 538 bp, Homo sapiens
aactgggacaaaacaaacagatatttggcaataggacaggaagagggggcatgaagaaccgaaaggagagaaggccaagggagctcacctggttgcagacaggcttgtacttgagtcctggcttgttgaggatcatctccagctgcctgcggttgaagtttgacaccccaatggacttggccaatcctgcatccttacayttctccatggcctgtggagaaaggggttgtgaggaattatttgtgcagttggctgcaaatcacggtaaatgcaagacagaactgtgagagcaacaactttcaaagtatgacaatgaaaatagctagcagtgattgtcaaaaaaagaaaaattcaaacagcaaataggggaagaagatagaggcagcaagagtaagaatttctatctcttccttaggaaactggatagattaatgcacaagcaaggaaagagattcctgtcctccttgcccccaagtcttgtgccccactctctaaacattccttttgtgtttttcccttcatctcaccaaagctactc

SEQ ID NO: 627986 - DNA, 524 bp, Homo sapiens
agataactgggacaaaacaaacagatatttggcaataggacaggaagagggggcatgaagaaccgaaaggagagaaggccaagggagctcacctggttgcagacaggcttgtacttgagtcctggcttgttgaggatcatctccagctgcctgcggttgaagtttgacaccccaatggacttggccaatcctgcatccttacacttctccatggcctgtggagaaaggggttgtgaggaattatttgtgcagttggctgcaaatcacggtaaatgcaagacagaactgtgagagcaacaactttcaaagtatgacaatgaaaatagctagcagtgattgtcaaaaaaagaaaaattcaaacagcaaataggggaagaagatagaggcagcaagagtaagaatttctatctcttccttaggaaactgsatagattaatgcacaagcaaggaaagagattcctgtcctccttgcccccaagtcttgtgccccactctctaaacattccttttgtgtttttcccttc

SEQ ID NO: 627987 - DNA, 554 bp, Homo sapiens
ttctacttcacaaagataactgggacaaaacaaacagatatttggcaataggacaggaagagggggcatgaagaaccgaaaggagagaaggccaagggagctcacctggttgcagacaggcttgtacttgagtcctggcttgttgaggatcatctccagctgcctgcggttgaagtttgacaccccaatggacttggccaatcctgcatccttacacttctccatggcctgtggagaaaggggttgtgaggaattatttgtgcagttggctgcaaatcacggtaaatgcaagacagaactgtgagagcaacaactttcaaagtatgacaatgaaaatagctagcagtgattgtcaaaaaaagaaaaattcaaacagcaaataggggaagaagatagaggcagcaagagtaagaatttctatctcttccttaggaaactggatagattaatgcacaagyaaggaaagagattcctgtcctccttgcccccaagtcttgtgccccactctctaaacattccttttgtgtttttcccttcatctcaccaaagctact

SEQ ID NO: 627988 - DNA, 648 bp, Homo sapiens
ttcaaaatttactcgaaagaaaggaaattaggtgttccacttacggttcttcttctgtgtgataatccctacatcctcctaataaaaagctctgttcaactatccagataaacaatgtttataatgacagcagaagcgcaattttatgctcatacaaactgcatacctttagagacattggagaatgaataagatagaggtcaacatagtccaattgagctttyttcagtgagttttccaaggctggtcggaccaactctggtcgatgaaaagtggaccaaagctgcagaggttaaagaatggaggtgattttgaatgaatgcttgagcaaatcttattactttgtgccatctagtatttagatattttcctactgcttcaaaatttatgaccactggcaaacatattctcttccttctcatgattcctttggctctgacctatccttataaactttattatacgttggatgtatagtttgtacatctactgaatgataggagtaaattcttaaaatgtaaagattagtattaagtaataactatgatgttacctgaattatcttcagtagagtttacaactcattttaacagtctaattcttctatccattcaacccaatgcttaagaatagctatttatgttgctt

SEQ ID NO: 627989 - DNA, 604 bp, Homo sapiens
gagtcataacaaaatgaggtgtactgtgttcataaatgggttcatttataaggaatatatcaagtgtaaccgttaattttaggtgccaactggattggattaagcagtatgccaatacatggtagggcatcatttctgggtgtacctgtgaggatgactctgcatgatattgacatttgaatcaagggaccaacttaaaaaaactgccctaattcaatatgggaaacaacccttctattagctgacgtttctgatmaacaagcacaggaaaagtcagcttgctctctctctcctgaagctgggtcacccatcttctacccgtggacatcagaactccaagccttctgatctttgaacttgttcacgagtgccttctacccctggacgtcagaaacatcagaactccaggccttctgatctttgcactctaggactttcaccagtggccctcagcttctcaggctttcagccttagactggaggatactttgatgactcccctgatttcaggccttcacagttggaattggccatggcactggctttcatggttctacagcttttgaaaggtgcttggtagcgcttttcagaaaacataattgaa

SEQ ID NO: 627990 - DNA, 602 bp, Homo sapiens
tgttcatttttgtgtcagaagaccactcctaccactttgatacaaatatgatgcatacaaaaaaggactaagaatttagactttcctttgttaggttctagattttacttaaaatgaggtggtatttttttctttcaggaagttctttttaaaagtgaaatagtacagtggaaactctagtccaggtccggtaatactgggtggcactcactgccgcccatcagaacagtgatactctgccgacagttttgtgcacaccatatccagtaatttttgctataagtatttctctggatcgtatgttcttggaagatggaaagatttcttcagctgtagaaacagagaaatcactcctattgcaattaatctccaccagagggagatgaccaacagtgttcttcaatactgagtttaacatattctgccaagctgggaactagacatgaacagaagaaagaaacagtgcacaaacgaaaaayaagcagtacgtgaccataggaatggacctcaatgcagaacaaggattgcctacttttttctcctagcctaagaaacctagaccagtgagtcatccagagtaaggtaggaacacgaaccttaca

SEQ ID NO: 627991 - DNA, 645 bp, Homo sapiens
actctagtccaggtccggtaatactgggtggcactcactgccgcccatcagaacagtgatactctgccgacagttttgtgcacaccatatccagtaatttttgctataagtatttctctggatcgtatgttcttggaagatggaaagatttcttcagctgtagaaacagagaaatcactcctattgcaattaatctccaccagagggagatgaccaacagtgttcttcaatactgagtttaacatattctgccaagctgggaactagacatgaacagaagaaagaaacagtgcacaaacgaaaaataagcagtacgtgaccataggaatggacctcaatgcagaacaaggattgcctacttttttctcctagcctargaaacctagaccagtgagtcatccagagtaaggtaggaacacgaaccttacaacccaatacgggtttcacttctactaggtttattcttttgaaatccgaaaactaaaaggaattattcttacctctggaggtgcataggtgccaaatcccaatacaggcatgaagtggccatcatttagctttacacactggtgtttggaatccattccctgtcacttgtctgactagcaaatgtttgctgctgcttctcctcagagattacaaaaa

SEQ ID NO: 627992 - DNA, 440 bp, Homo sapiens
gcctacttttttctcctagcctaagaaacctagaccagtgagtcatccagagtaaggtaggaacacgaaccttacaacccaatacgggtttcacttctactaggtttattcttttgaaatccgaaaactaaaaggaattattcttacctctggaggtgcataggtgccaaatcccaatacaggcatgaagtggccatcatttagctttacacactgstgtttggaatccattccctgtcacttgtctgactagcaaatgtttgctgctgcttctcctcagagattacaaaaacaatgggcaggaaacccctccccccacccctgcaaactgactgatggttaaccaatggcatgtaggaggaggtacataggcagtcttatatggtctgtggagaaaattgcattcagttcatttgtttcttatcaaagagaattcctaa

SEQ ID NO: 627993 - DNA, 544 bp, Homo sapiens
aacaaatagcaaccatatgttagactataaaaacctccagctacaaatatcttttttcgtttctgccgtgataatgccccttctttatactgcatcatttgaaataattaaccatcttacgtctttctctcacatacacataatttaaaggaatgactaatgagaatttttcaaayagttggtcctcaataaaaaattaaagttaaaactgtaaaaatatttgcctttttacattttcaatcagaaaatttattttgatttttctttctttgcgttgtaagagaaatattcatttctgaagaagatgcagtcctgataaagctgtaatcctgatgagggtgcaaataaaaagaaattctggtgtagtttttattggagtgttaattattaacagtttttggagtttggacatcatttaatatatgcaagcagtgccttaatagtatttgttcttcaaccaggtttattacagactatcaagaagtaactagccaaaaaactgataaccattttatataatctgtcatcttgttaaacattattt

SEQ ID NO: 627994 - DNA, 618 bp, Homo sapiens
ctaaatctctatattaaattattcaaaaggatttgtagaacaaatagcaaccatatgttagactataaaaacctccagctacaaatatcttttttcgtttctgccgtgataatgccccttctttatactgcatcatttgaaataattaaccatcttacgtctttctctcacatacacataatttaaaggaatgactaatgagaatttttcaaatagttggtcctcaataaaaaattaaagttaaaactgtaaaaatatttgcctttttacattttcaatcagaaaatttattttgatttttctttctttgcgttgtaagagaaatattcatttctgaagaagatgcagtcctgataaagctgtaatcctgatgagggtgcaaataaaaagaaattctggtrtagtttttattggagtgttaattattaacagtttttggagtttggacatcatttaatatatgcaagcagtgccttaatagtatttgttcttcaaccaggtttattacagactatcaagaagtaactagccaaaaaactgataaccattttatataatctgtcatcttgttaaacattatttgtaaggaaaaactggaaattaattacatataaatgg

SEQ ID NO: 627995 - DNA, 619 bp, Homo sapiens
gggcttgtaggacaccatcaagccaagtagtatacacagcattggattctgagaaggagaagcaggagcctatgggggtggagagattatgtggtgaaaacaatcatcaaaaagttctcaaattggcaacagacatkaatctaaatatgtgagtaacttaaagaactggagttcagataaagagaccaaggcccacatacattaaaatcaaactctaaaagccaacaacaaatagactatcttaaaagcagcaggagaaacataactctgtattatgtacagaacaataaattctgttcaagatgatcaacagatttttgattagacaatttgaaggatgtaataggtaatacatttaatgtggtaaaaataaaactgcctcccaacaaatctatatttggcaaaaatttttttttaattagaaagttattaatacaatgtgagataaaagctgcaagagtccattgccattagatctgctttgcaagaaatggtaaagggactaattcagcttaaaataaaagcattttagacagtaacctgaagccatatagaagtatgaagccctttactaaaggtatacatatggcaaaatgtgaaaatacgtgtttttgaaagt

SEQ ID NO: 627996 - DNA, 453 bp, Homo sapiens
tgaaggatgtaataggtaatacatttaatgtggtaaaaataaaactgcctcccaacaaatctatatttggcaaaaatttttttttaattagaaagttattaatacaatgtgagataaaagctgcaagagtccattgccattagatctgctttgcaagaaatggtaaagggactaattcagcttaaaataaaagcattttagacagtaacctgaagccatatagaagtatgaagccctttactaaaggtatacatatggcaaaatgtgaaaataygtgtttttgaaagtttggttttattctacacttcttcaacgtttaaaatacaaatgtgtacaagtaagtataaatctatgttaacatgtacacaatgtataaatttgtaattcatgaaatcaataatgtgaagtggaaacgaagctgtggaagaagttttgtataggattgcagttaaa

SEQ ID NO: 627997 - DNA, 617 bp, Homo sapiens
agtaagtataaatctatgttaacatgtacacaatgtataaatttgtaattcatgaaatcaataatgtgaagtggaaacgaagctgtggaagaagttttgtataggattgcagttaaattggcattgctttcaaagtagattkttataactatagggtgctgtatataatcccaagagtaactacaaagaaaataactacagaataaataaaagagcaattgagaaaggaatacaaatattattaaaaatcatacacaaaaaacattgttaattaaggatatgaggatatgaaggacaaaaagctaaagacataaataaaaaatgacaaagtaattgcagtcatgtattacctaacattagagatatgttctgaaaaatacatgtttaggcctgtggccacattgacattagcccattgaaccagactttggaattctagtctccagaacttcgagaaaattaatttgtggtgtttcaagccataacgtttgtggtaatttgttacagcaggaacagaaaactaatttggacgtaatttcagcaattctcattctctctttcctgcatcatcagttttttttctctctgctaagttctccctaagagcacacaggcat

SEQ ID NO: 627998 - DNA, 579 bp, Homo sapiens
tattatgccagttaaatttttgtatttttggtaggtacggkgtttcgctatgttgcccaggctcaagctcccaaactcaagggatccacctgcctctgccgcccaaaatgctgcgattacaggcgtgagccactgcaggaagcctcctaattatttttaatatagtgaaattaacacatggaagaaggcacatggaaggaactacaggaagaatacagtgcaagttcctatgattcctctctcagtgatgttgcacaaaacacactgacttcctccagcatcacattttgagaatataggggaaatgttgtctacaagggatgctatttggacacttcattcccaagatttacctgggtactgattacattgacccagtctgtgtaccacacacaaaactccaagtcttgtaaacaaagcagatatgtagaaaccccacactttgtacaagcagttaattatagacagcacccttattagttaggaaatggtgagaaattctggcctccaactttgaaaacaggtacatctacgggtggcagtctgttgtgttcactcctttctacacagccattagcc

SEQ ID NO: 627999 - DNA, 623 bp, Homo sapiens
gcacttattctatcttgaaagccaactgcatggcatcttaggatctcttccctatgggtctttccttacacatcctctttgattgtggccctcctgggtgccacttgtaaggattttgagatgacattgccyatccagatgattcaggaaatgcttctatcttaggatccttaacataatcacatctgcaaagtttgttttgccaggtaaggtaacatagtcacagcttccaaagataaaggcatgagttattggcagggcagggggagggagcagtattgagcctactgtactagctttgtggagaacttgaagcaagtaagccttaattttctagccttgctaatagaaagtactatatcactagccactaggtcctgaaaaatctagatttcatctcagatataatgaaataaaaacctgttccttagctctgatatcatttataccctatcatatgtccccttctagatatagtccctttattcccttagtttaccctttctcccaggatttgtgaatatcttttttcgctgtacatgcagagaactccagcattgctgttctttacattctcaacaactgaaagtttctactcatacctagattatacttcaggcaac

SEQ ID NO: 628000 - DNA, 623 bp, Homo sapiens
gcacttattctatcttgaaagccaactgcatggcatcttaggatctcttccctatgggtctttccttacacatcctctttgattgtggccctcctgggtgccacttgtaaggattttgagatgacattgcccatccagatgattcaggaaaygcttctatcttaggatccttaacataatcacatctgcaaagtttgttttgccaggtaaggtaacatagtcacagcttccaaagataaaggcatgagttattggcagggcagggggagggagcagtattgagcctactgtactagctttgtggagaacttgaagcaagtaagccttaattttctagccttgctaatagaaagtactatatcactagccactaggtcctgaaaaatctagatttcatctcagatataatgaaataaaaacctgttccttagctctgatatcatttataccctatcatatgtccccttctagatatagtccctttattcccttagtttaccctttctcccaggatttgtgaatatcttttttcgctgtacatgcagagaactccagcattgctgttctttacattctcaacaactgaaagtttctactcatacctagattatacttcaggcaac

SEQ ID NO: 628001 - DNA, 623 bp, Homo sapiens
gcacttattctatcttgaaagccaactgcatggcatcttaggatctcttccctatgggtctttccttacacatcctctttgattgtggccctcctgggtgccacttgtaaggattttgagatgacattgcccatccagatgattcaggaaatgcttctatcttaggatccttaacataatcacatctgcaaagtttgttttgccaggtaaggtaacatagtcacagcttccaaagataaaggcatgagttattggcagggcagggggagggagcagtattgagcctactgtactagctttgtggagaacttgaagcaagtaagccttaattttctagccttgctaatagaaagtactatatcactagccactaggtcctgaaaaatctagatttcatctcagatataatgaaataaaaacctgttccttagctctgatatcatttataccctatcatatgtccccttctagatatagtccctttattcccttagtttaccmtttctcccaggatttgtgaatatcttttttcgctgtacatgcagagaactccagcattgctgttctttacattctcaacaactgaaagtttctactcatacctagattatacttcaggcaac

SEQ ID NO: 628002 - DNA, 623 bp, Homo sapiens
gcacttattctatcttgaaagccaactgcatggcatcttaggatctcttccctatgggtctttccttacacatcctctttgattgtggccctcctgggtgccacttgtaaggattttgagatgacattgcccatccagatgattcaggaaatgcttctatcttaggatccttaacataatcacatctgcaaagtttgttttgccaggtaaggtaacatagtcacagcttccaaagataaaggcatgagttattggcagggcagggggagggagcagtattgagcctactgtactagctttgtggagaacttgaagcaagtaagccttaattttctagccttgctaatagaaagtactatatcactagccactaggtcctgaaaaatctagatttcatctcagatataatgaaataaaaacctgttccttagctctgatatcatttataccctatcatatgtccccttctagatatagtccctttattcccttagtttaccctttctcccaggatttgtgaatatcttttttcrctgtacatgcagagaactccagcattgctgttctttacattctcaacaactgaaagtttctactcatacctagattatacttcaggcaac

SEQ ID NO: 628003 - DNA, 589 bp, Homo sapiens
atcctctttgattgtggccctcctgggtgccacttgtaaggattttgagatgacattgcccatccagatgattcaggaaatgcttctatcttaggatccttaacataatcacatctgcaaagtttgttttgccaggtaaggtaacatagtcacagcttccaaagataaaggcatgagttattggcagggcagggggagggagcagtattgagcctactgtactagctttgtggagaacttgaagcaagtaagccttaattttctagccttgctaatagaaagtactatatcactagccactaggtcctgaaaaatctagatttcatctcagatataatgaaataaaaacctgttccttagctctgatatcatttataccctatcatatgtccccttctagatatagtccctttattcccttagtttaccctttctcccaggatttgtgaatatcttttttcgctgtacatgyagagaactccagcattgctgttctttacattctcaacaactgaaagtttctactcatacctagattatacttcaggcaactacttccatgttataacttatacagacaaagaagtac

SEQ ID NO: 628004 - DNA, 589 bp, Homo sapiens
atcctctttgattgtggccctcctgggtgccacttgtaaggattttgagatgacattgcccatccagatgattcaggaaatgcttctatcttaggatccttaacataatcacatctgcaaagtttgttttgccaggtaaggtaacatagtcacagcttccaaagataaaggcatgagttattggcagggcagggggagggagcagtattgagcctactgtactagctttgtggagaacttgaagcaagtaagccttaattttctagccttgctaatagaaagtactatatcactagccactaggtcctgaaaaatctagatttcatctcagatataatgaaataaaaacctgttccttagctctgatatcatttataccctatcatatgtccccttctagatatagtccctttattcccttagtttaccctttctcccaggatttgtgaatatcttttttcgctgtacatgcagagaactccagcattgctgttctttacattctcaacaactgaaagtttctactcatacytagattatacttcaggcaactacttccatgttataacttatacagacaaagaagtac

SEQ ID NO: 628005 - DNA, 593 bp, Homo sapiens
atgagagaagttacagactctcctgggcgaccccgagagcttaccattcctcagacttcttcacatggtgctaacagatttgtatrtgaaatgagacagtttcctgattccccttgcaggacttgcgacaggggtgtggctcaccggttcaaactgcttgagggagggggagcatggagatgggcaggtgcacaggccagggcgagcgctttgggctctggctccatggtagtgtctagtggtgggtgcctgcaaccacagtgttgtaaagctctttcagctttgccatctgcagacggcttgagtctgcagctccatggaccctctgacttatctcaaaggcagagggccagtgtgacagctttctatatcccaagctcttgccaggcatcccagaagagtcagatcacatgtgggctcaaaggatgagggcaagattttattgagtggtggaggcagctctcagcaagatggatggggagccggaatgggggaatgagtaggaaggtgatctttccttggagtcaggctgcccagtggccggactcttctccaatcctcctaggccaaattcctttcagtgtccaatgtcc

SEQ ID NO: 628006 - DNA, 593 bp, Homo sapiens
atgagagaagttacagactctcctgggcgaccccgagagcttaccattcctcagacttcttcacatggtgctaacagatttgtatgtgwaatgagacagtttcctgattccccttgcaggacttgcgacaggggtgtggctcaccggttcaaactgcttgagggagggggagcatggagatgggcaggtgcacaggccagggcgagcgctttgggctctggctccatggtagtgtctagtggtgggtgcctgcaaccacagtgttgtaaagctctttcagctttgccatctgcagacggcttgagtctgcagctccatggaccctctgacttatctcaaaggcagagggccagtgtgacagctttctatatcccaagctcttgccaggcatcccagaagagtcagatcacatgtgggctcaaaggatgagggcaagattttattgagtggtggaggcagctctcagcaagatggatggggagccggaatgggggaatgagtaggaaggtgatctttccttggagtcaggctgcccagtggccggactcttctccaatcctcctaggccaaattcctttcagtgtccaatgtcc

SEQ ID NO: 628007 - DNA, 593 bp, Homo sapiens
atgagagaagttacagactctcctgggcgaccccgagagcttaccattcctcagacttcttcacatggtgctaacagatttgtatgtgaaatgagacagtttcctgattccccttgsaggacttgcgacaggggtgtggctcaccggttcaaactgcttgagggagggggagcatggagatgggcaggtgcacaggccagggcgagcgctttgggctctggctccatggtagtgtctagtggtgggtgcctgcaaccacagtgttgtaaagctctttcagctttgccatctgcagacggcttgagtctgcagctccatggaccctctgacttatctcaaaggcagagggccagtgtgacagctttctatatcccaagctcttgccaggcatcccagaagagtcagatcacatgtgggctcaaaggatgagggcaagattttattgagtggtggaggcagctctcagcaagatggatggggagccggaatgggggaatgagtaggaaggtgatctttccttggagtcaggctgcccagtggccggactcttctccaatcctcctaggccaaattcctttcagtgtccaatgtcc

SEQ ID NO: 628008 - DNA, 538 bp, Homo sapiens
cctcagacttcttcacatggtgctaacagatttgtatgtgaaatgagacagtttcctgattccccttgcaggacttgcgacaggggtgtggctcaccrgttcaaactgcttgagggagggggagcatggagatgggcaggtgcacaggccagggcgagcgctttgggctctggctccatggtagtgtctagtggtgggtgcctgcaaccacagtgttgtaaagctctttcagctttgccatctgcagacggcttgagtctgcagctccatggaccctctgacttatctcaaaggcagagggccagtgtgacagctttctatatcccaagctcttgccaggcatcccagaagagtcagatcacatgtgggctcaaaggatgagggcaagattttattgagtggtggaggcagctctcagcaagatggatggggagccggaatgggggaatgagtaggaaggtgatctttccttggagtcaggctgcccagtggccggactcttctccaatcctcctaggccaaattcctttcagtgtcc

SEQ ID NO: 628009 - DNA, 538 bp, Homo sapiens
cctcagacttcttcacatggtgctaacagatttgtatgtgaaatgagacagtttcctgattccccttgcaggacttgcgacaggggtgtggctcaccggttcaaactgcttgagggagggggagcatggagatgggcaggtgcacaggccagggcgagcgctttgggctctggctccatggtagtgtctagtggtgggtgcctgcaaccacagtgttgtaaagctctttcagctttgccatctgcagayggcttgagtctgcagctccatggaccctctgacttatctcaaaggcagagggccagtgtgacagctttctatatcccaagctcttgccaggcatcccagaagagtcagatcacatgtgggctcaaaggatgagggcaagattttattgagtggtggaggcagctctcagcaagatggatggggagccggaatgggggaatgagtaggaaggtgatctttccttggagtcaggctgcccagtggccggactcttctccaatcctcctaggccaaattcctttcagtgtcc

SEQ ID NO: 628010 - DNA, 538 bp, Homo sapiens
cctcagacttcttcacatggtgctaacagatttgtatgtgaaatgagacagtttcctgattccccttgcaggacttgcgacaggggtgtggctcaccggttcaaactgcttgagggagggggagcatggagatgggcaggtgcacaggccagggcgagcgctttgggctctggctccatggtagtgtctagtggtgggtgcctgcaaccacagtgttgtaaagctctttcagctttgccatctgcagacggcttgagtctgcrgctccatggaccctctgacttatctcaaaggcagagggccagtgtgacagctttctatatcccaagctcttgccaggcatcccagaagagtcagatcacatgtgggctcaaaggatgagggcaagattttattgagtggtggaggcagctctcagcaagatggatggggagccggaatgggggaatgagtaggaaggtgatctttccttggagtcaggctgcccagtggccggactcttctccaatcctcctaggccaaattcctttcagtgtcc

SEQ ID NO: 628011 - DNA, 586 bp, Homo sapiens
aaaccattcagaaatagttttttctcacctggttttatgctaaccaaaacaactataatattaatacttttctctttacaacctcccctgcttgttgacctatctaggagtggtcgcaaggtgtgcaagctgctgagtcaccctgactgcatcaaccccaggagcttgaggggtgaacaatagtattgagcaatagtaaaataacaaayagtgcagacaaggcagacgtctcaaaaagtgctcggtgcaattgtcactcatccagagtcaacattggtgacacagttgtttcttcaaacagagttcactctgaaaaaactgagcaaggtggaatttactttaaatttcatgggttgtgaaatttcaactaatgtcataattaaaacttcctacatattgctttaggcatctctgtcttttccccaaaattttctccatggcatcagcagtacctcagcctcctccacagcctcccagctcttcctttttcctcctgcacggcttttggcatcccaccattttccacagcaatgcaggctaactgtgagcttccacagcctctcacagacatgacttcacccacaaa

SEQ ID NO: 628012 - DNA, 622 bp, Homo sapiens
gttcaaccactgcctataaaaccattgtaatttggaaggaaataacttgtttttgattttacaggctcatagccggtagaaatttttcttggatctcagataaatctttgcattttagacatttaagttgattctaaacctgataaggctttagagactcttgaggtaaactgattggattttgtatgtaagaaagacctgaaatttatgtctgcagctttttctcctttatatcctcaactaacaatattttggggtttctatgattctttgctaaaatytggattcccgtttcaatttctcttgtgcataatctgtaattattttctctgtagttaccattggaatgacatactgcatcctatagttataccatccactctgaaatcaatgtgaatttaacttcagttccatacagaaacttcttttccacaggtacgtttctgcttcacattattgatgtcactaattacaactttatatatggtgtacatgttaacagaaagttattcttattgtaatgtaaatcttgaagaaaatgaaagtaaaagcaaatttcacaaatacatgtttccacgtttttcatacacctacctttacgagaggtctttatacctctata

SEQ ID NO: 628013 - DNA, 622 bp, Homo sapiens
gttcaaccactgcctataaaaccattgtaatttggaaggaaataacttgtttttgattttacaggctcatagccggtagaaatttttcttggatctcagataaatctttgcattttagacatttaagttgattctaaacctgataaggctttagagactcttgaggtaaactgattggattttgtatgtaagaaagacctgaaatttatgtctgcagctttttctcctttatatcctcaactaacaatattttggggtttctatgattctttgctaaaatctggattcccgtttcaatttctcttgtgcataatctgtaattattttctctgtagttaccattggaatgacatactgcatcctatagttataccatccactctgaaatcaatgtgamtttaacttcagttccatacagaaacttcttttccacaggtacgtttctgcttcacattattgatgtcactaattacaactttatatatggtgtacatgttaacagaaagttattcttattgtaatgtaaatcttgaagaaaatgaaagtaaaagcaaatttcacaaatacatgtttccacgtttttcatacacctacctttacgagaggtctttatacctctata

SEQ ID NO: 628014 - DNA, 622 bp, Homo sapiens
gttcaaccactgcctataaaaccattgtaatttggaaggaaataacttgtttttgattttacaggctcatagccggtagaaatttttcttggatctcagataaatctttgcattttagacatttaagttgattctaaacctgataaggctttagagactcttgaggtaaactgattggattttgtatgtaagaaagacctgaaatttatgtctgcagctttttctcctttatatcctcaactaacaatattttggggtttctatgattctttgctaaaatctggattcccgtttcaatttctcttgtgcataatctgtaattattttctctgtagttaccattggaatgacatactgcatcctatagttataccatccactctgaaatcaatgtgaatttaacttcagttccatacagaaacttcttttccacaggtamgtttctgcttcacattattgatgtcactaattacaactttatatatggtgtacatgttaacagaaagttattcttattgtaatgtaaatcttgaagaaaatgaaagtaaaagcaaatttcacaaatacatgtttccacgtttttcatacacctacctttacgagaggtctttatacctctata

SEQ ID NO: 628015 - DNA, 622 bp, Homo sapiens
gttcaaccactgcctataaaaccattgtaatttggaaggaaataacttgtttttgattttacaggctcatagccggtagaaatttttcttggatctcagataaatctttgcattttagacatttaagttgattctaaacctgataaggctttagagactcttgaggtaaactgattggattttgtatgtaagaaagacctgaaatttatgtctgcagctttttctcctttatatcctcaactaacaatattttggggtttctatgattctttgctaaaatctggattcccgtttcaatttctcttgtgcataatctgtaattattttctctgtagttaccattggaatgacatactgcatcctatagttataccatccactctgaaatcaatgtgaatttaacttcagttccatacagaaacttcttttccacaggtacgtttctgcttcacattattgatgtcactaattacaactttatatatggtgtacatgttaacagaaagttattcttattgtaatgtaaatcttgaagaaaatgaragtaaaagcaaatttcacaaatacatgtttccacgtttttcatacacctacctttacgagaggtctttatacctctata

SEQ ID NO: 628016 - DNA, 601 bp, Homo sapiens
attttattctccaaataatttctctrctaccatgggtttgcacttccccttctgggaatccaatactatcatactggttggcttgaaggtgtcccataagtcccttaggacctgttcacatttctttattcttgcttcatgtccttagactcaggaatttcaagtgtgctatccctatgtgtattgattatatcttcatcctgctcaaatttgctattgaaacactctctggtgagtttttcattcaggtatattttttagctccaatttgtttccttttctttttataatttctgtattaatactatattgtgattttcttattttttcagattttctgtagttcttaatccatatttttcattagcaattttagcatatttaagacagctgtttaaatgcttctctactaattctaatgcctgtgattcttcaggaatgatttctactgatttatttcttcctcataatggactgtgatttcttgtttctttgtatgccttgtcattttatttttttgagctggagtcttgctctgtcaccagaatggagtgcagtggtgccatctcggctcactgcaacctctgcctcctgggttcaa

SEQ ID NO: 628017 - DNA, 571 bp, Homo sapiens
aggcactgtttgcatgttacaaattatatccaaagaccaaaagctgttaataagaaatcttccaataaaaccacatcatattttcttttttatttacacccacatcaggattacaactttatcaggactgcaccttgatcaggaagggatgtttctcttacaaggctaataagaaaggaacaataaatttgctgatgaaaaaaagtcatgcatttaaaaattttaactttaatttttaattgagggcaatattttaaagaaatgctcattagtcattcctttaaattgtgtgtgtgagagagagaaaaatgaaaattagtcatttcaaatgctgcaagatgcagaaggaactcatcatcatgrcacacacaaaaaagagctgtgccgctagaggtttctatattcttatgtaaagtcacaatttgttctacaaatctctttgagtaatttatgtctcatatatagagatctggaatagcaaaaatacttcagaggaaattaatgagtgtatcatgaccacataataatttacttatgaattttcttaggtaagaaacggttgaactggatg

SEQ ID NO: 628018 - DNA, 571 bp, Homo sapiens
aggcactgtttgcatgttacaaattatatccaaagaccaaaagctgttaataagaaatcttccaataaaaccacatcatattttcttttttatttacacccacatcaggattacaactttatcaggactgcaccttgatcaggaagggatgtttctcttacaaggctaataagaaaggaacaataaatttgctgatgaaaaaaagtcatgcatttaaaaattttaactttaatttttaattgagggcaatattttaaagaaatgctcattagtcattcctttaaattgtgtgtgtgagagagagaaaaatgaaaattagtcatttcaaatgctgcaagatgcagaaggaactcatcatcatggcacamacaaaaaagagctgtgccgctagaggtttctatattcttatgtaaagtcacaatttgttctacaaatctctttgagtaatttatgtctcatatatagagatctggaatagcaaaaatacttcagaggaaattaatgagtgtatcatgaccacataataatttacttatgaattttcttaggtaagaaacggttgaactggatg

SEQ ID NO: 628019 - DNA, 571 bp, Homo sapiens
aggcactgtttgcatgttacaaattatatccaaagaccaaaagctgttaataagaaatcttccaataaaaccacatcatattttcttttttatttacacccacatcaggattacaactttatcaggactgcaccttgatcaggaagggatgtttctcttacaaggctaataagaaaggaacaataaatttgctgatgaaaaaaagtcatgcatttaaaaattttaactttaatttttaattgagggcaatattttaaagaaatgctcattagtcattcctttaaattgtgtgtgtgagagagagaaaaatgaaaattagtcatttcaaatgctgcaagatgcagaaggaactcatcatcatggcacacacaaaaaagagctgtgccgctagaggtttctrtattcttatgtaaagtcacaatttgttctacaaatctctttgagtaatttatgtctcatatatagagatctggaatagcaaaaatacttcagaggaaattaatgagtgtatcatgaccacataataatttacttatgaattttcttaggtaagaaacggttgaactggatg

SEQ ID NO: 628020 - DNA, 554 bp, Homo sapiens
tcacctcttgggatgttcacagacacagagtttcatgaagctgtggtgtccagaaaacctgctgcacatagggtgcacaatgagtttccatcttcttgcctcttttcaaggggcaagaactcagtccgggaatgtcttaaactacaaaccttcatgggaaaccttgttgcttctgcttcctctcttttcacactggaggttttatttttgcttagccatgaattcttgtgtcattcataacttttgtcttaaggtactgaaaactagtcaggctagttaatgcaaaagggtatattagatatgataatgggaaatcaaagccagggctacattaagaatttgataaaaactctaaaaatatatcctttctccacccttatctctgctttattacaaaaggctttttaaatatttgttccaacctttttcgttggtggcatttatggctttggagcactgtcaggcccatgttcattaccgtgagctcctgtgcatctcctaatttccaaactagcctkgaaaacgcctccattgaccatgattggttcatggtc

SEQ ID NO: 628021 - DNA, 567 bp, Homo sapiens
gtgtccagaaaacctgctgcacatagggtgcacaatgagtttccatcttcttgcctcttttcaaggggcaagaactcagtccgggaatgtcttaaactacaaaccttcatgggaaaccttgttgcttctgcttcctctcttttcacactggaggttttatttttgcttagccatgaattcttgtgtcattcataacttttgtcttaaggtactgaaaactagtcaggctagttaatgcaaaagggtatattagatatgataatgggaaatcaaagccagggctacattaagaatttgataaaaactctaaaaatatatcctttctccacccttatctctgctttattacaaaaggctttttaaatatttgttccaacctttttcgttggtggcatttatggctttggagcactgtcaggcccatgttcattaccgtgagctcctgtgcatctcctaatttccaaactagcctggaaaacrcctccattgaccatgattggttcatggtcctgtgcatggaacatcatatgttcagggagataaagaactctgatagtggcacctggg

SEQ ID NO: 628022 - DNA, 645 bp, Homo sapiens
agatcttgcagaaggatctccctacaagcacttagcaatttctaacaactacgtacttatatgtttcttgcattcatagttgacattctccactagactacaaactcagggattttaaaatttttattttgtttaatttttgcctatttaatttactgctaaaacaacgtgtggcatacaatggatactcaataaagttttgcttaataaatgaatgaatggaacaatatacaaaaataataaaaatgccgaaatgtgggtagatgattaagaaacaaaatacattgaaagatacactgctttacaacaagtaaaatataattctgtaatttttgaataatagttgcttgcttggaaaaatatggtagttatttaaaaagtatagaatctgaacattgattatttyaagtttataaaaacacatatgtaaataagtgaacattgggttagtccgttgtcacactgctataaaggaatacctaagactgggtaacttttataaaagtttaattggctcacagttctgcaggctgtgtaggatgcatggctgggtaagcgtcaggaaacttacagtcatggtggaaggcaagggggagcagacgcgtcttcatgtggccagagcagcaggaagagagtgaaggggag

SEQ ID NO: 628023 - DNA, 446 bp, Homo sapiens
caaaccatatcagacatgttgtttagaaaaatcatgaaggaaaatgcatcaaatgataagtattctgtaaggaaagaattacaggtcttyttttgtattttttatttttctaaaatttatgggtattactttaataatcaggaaaaacaaacatcttcttgttaaagtcttcatttcataaaataaagaaaggcaagcaacctgcaactacagatcctacttcctactcctctatcaaatactaaaatcctctctctgtcacctaaaaggaggaaattgtggtggtaatgttcaatagctcatggtcaatattcttcagaaaatggaaaataagggtgattagcagcactgaaagagaaaaaatattaatttagtaacttttttccattctgtcaaagagtttttctgaagaagcacttgggatgggctaaaattcccgaatttac

SEQ ID NO: 628024 - DNA, 605 bp, Homo sapiens
catggtggaaggcaagggggagcagacgcgtcttcatgtggccagagcagcaggaagagagtgaaggggagatgctacacatttttaaacaaccagatttcatgagaactcactatcaccagaacagcaagggtaaagaccgcccctatgatccaataacctcccaccagatccctcctccaatactggagattatcattgacatgatatttgtgtggggacacagatccaaaccatatcagacatgttgtttagaaaaatcatgaaggaaaatgcatcaaatgataagtattctgtaaggaaagaattacaggtcttcttttgtattttttatttttctaaaatttatgggtattactttaataatcaggaaaaacaaacatcttcttgttaaagtcttcatttcataaaataaagaaaggcaagcaacctgcaactacagatcctacttcctactcctctatcaaatactraaatcctctctctgtcacctaaaaggaggaaattgtggtggtaatgttcaatagctcatggtcaatattcttcagaaaatggaaaataagggtgattagcagcactgaaagagaaaaaatattaatttagta

SEQ ID NO: 628025 - DNA, 589 bp, Homo sapiens
taacaggtgaatggataaacaagttatccataccctggaataacacccagcaataaaatggaaagaactacagatactcacagctacatgaatgcagctcacagatatggtgaaagaagccaggtgcaaactaatgcacatgatctctttcataggaaattttagagcacacaaaactaatctaaggtgaaaaaaccagaaaatagtttcctagcaatgagaagttattgtctcagaaggaaaaaaaataacttctttgggagataacaagtttgtataccacattagggatgtgggttacagagtatgtccatttgccaaaattgtacagcattacagcctaggcaaatcttacctaaagaccactttaaaatttattttaggagtggggttgggagtaagtagtcacatagatgaaacaggaaggaaagaatgttggtgacrtttaagctcagtagtgatacatgggaacaaactacaccgttgcttttcgcttttaatctttgagcttttttataatacaatttttaaaacttcgctttaatagtttttcagcatcagcagaattcccgccataggttaactcttt

SEQ ID NO: 628026 - DNA, 609 bp, Homo sapiens
acattaatagatgtactatacttttcatgttggcccttttccccatgcaccttctgaagcactttcaaatcccatcatttgccatactgatacagtaattttcttattccttttctattcgtgtttgaaaattattaaaataccttgtgccccaattatagcctctaaaagccattttgagtgaaagaaaccaagattccttagaggaagggcatattccagttctgagtgtgaaagtttccatttgagcctagaagagcttgcactctagaaaggagagaagataagaatgacaatgacgcatgctgccaaaggacccaggatcttacttgaagaggctcctgctggtcaaaatatggaaacttgagcatcaaaaaaatagtaattatgatgaatggaaaatgacgtattggctaaaattcataaattcgcatggcattaatcaartgagatcagatctgtagcactaagcttcaatttacaggaagtacaaaaggaacatgtcaaagtgtgtcacgtggatcgatgagtaagccattaggaagtgatgtggaaatctttacaggacaaacgacttgatttctttcataaaaccgaaactttcactgg

SEQ ID NO: 628027 - DNA, 540 bp, Homo sapiens
ctttcataaaaccgaaactttcactggattcctgacaccaccctctcctggttgtctccatctgtctggcagcttcttttcagtctccttgccagtgcctctctgcctcaccctctcctgtggatcttcctacctgttccttttcatccatgaactttccctaggagaacaaatccatgtctgtgagtttagttaccatacataaagcaatgactacaaacatctgtatctgcacctggaccatcccgagctccagaccaaagctgtcattttccaactcagcacctgcacatggctgtctcatagaaactttcaccccttctgaagaattgtgctcttccaccccactcaaattgctcttgctctggtatctcctatttctgagagaaaagaactctcwtctacacagaagacatcaaagcagaaacttggagacatgattaagcaggaagtgtgtgaacagcaaaaagtcagagaaggccccggtgggctaagggctcacctggttgcaggtgggcttgtacctgagccctggcttgt

SEQ ID NO: 628028 - DNA, 616 bp, Homo sapiens
tcttgtaaacaaagcagatatgtagaaaccccacactttgtacaagcagttaattatagacagcacccttattagttaggaaatggtgagaaattctggcctccaactttgaaaacaggtacatctacgggtggcagtctgttgtgttcactcctttctacacagccattagccattctgtgtgcatgacagaagtaaatatgacgagtaaagacacacactccaaggatgtagatttatacataagaaattatctgcaacctgtaaaagattagtaaagtatattttagtcttaaaaaataagggcaacttttttaggaaagatataatttcrgtgaaatttaaaattattgatttatctaccaaatttggatgaagatttgaaaggtacattttttaaacaacaaagccatgaatagaacaattttctattttaatatgagtatttcagaagctttctattttcaatgatattaaaaggaactagatgccaggtctcactgccttcccctgataccagccctgatcttctctttgctgtggaggcactcaaggtttaccaaggctaaagcttccatgttgtgcttttccttacttccccctcatgccaattttc

SEQ ID NO: 628029 - DNA, 616 bp, Homo sapiens
tcttgtaaacaaagcagatatgtagaaaccccacactttgtacaagcagttaattatagacagcacccttattagttaggaaatggtgagaaattctggcctccaactttgaaaacaggtacatctacgggtggcagtctgttgtgttcactcctttctacacagccattagccattctgtgtgcatgacagaagtaaatatgacgagtaaagacacacactccaaggatgtagatttatacataagaaattatctgcaacctgtaaaagattagtaaagtatattttagtcttaaaaaataagggcaacttttttaggaaagatataatttcagtgaaatttaaaattattgatttatctaccaaatttggatraagatttgaaaggtacattttttaaacaacaaagccatgaatagaacaattttctattttaatatgagtatttcagaagctttctattttcaatgatattaaaaggaactagatgccaggtctcactgccttcccctgataccagccctgatcttctctttgctgtggaggcactcaaggtttaccaaggctaaagcttccatgttgtgcttttccttacttccccctcatgccaattttc

SEQ ID NO: 628030 - DNA, 616 bp, Homo sapiens
tcttgtaaacaaagcagatatgtagaaaccccacactttgtacaagcagttaattatagacagcacccttattagttaggaaatggtgagaaattctggcctccaactttgaaaacaggtacatctacgggtggcagtctgttgtgttcactcctttctacacagccattagccattctgtgtgcatgacagaagtaaatatgacgagtaaagacacacactccaaggatgtagatttatacataagaaattatctgcaacctgtaaaagattagtaaagtatattttagtcttaaaaaataagggcaacttttttaggaaagatataatttcagtgaaatttaaaattattgatttatctaccaaatttggatgaagatttgawaggtacattttttaaacaacaaagccatgaatagaacaattttctattttaatatgagtatttcagaagctttctattttcaatgatattaaaaggaactagatgccaggtctcactgccttcccctgataccagccctgatcttctctttgctgtggaggcactcaaggtttaccaaggctaaagcttccatgttgtgcttttccttacttccccctcatgccaattttc

SEQ ID NO: 628031 - DNA, 505 bp, Homo sapiens
ggcacacaaacttatgaccatgtgtaggggagaaccacagagcaacgtgtaaaccatctaagtttataaaaaaaaaatgagagagggacttaaatcttggcaaaacagattgtagtggcaacatgggttatgggagggagaaragaggaggcctggctagcagaggtcttgttattgtcaaccaaagaatgatgagacaggtctcagtaattttaggagatttatttgccaaagttgaggatgcacccaggagacaggtctatgcctttctctgattttgagggctccaaatttaaaggggaaagggcgggatattgagaagcacacagttctcacatcaacaacagggggcagaggaaaaatatggggactctgcattttacataagataacacagacaaaatggggtaggtgaacaatcggaaatgcatttgtgtctgtggggtgaccgcaactgtaaagataagctatggatttgtatcaccatggtgaagtttcaacagct

SEQ ID NO: 628032 - DNA, 588 bp, Homo sapiens
gatgtttcaagaactgtggtacacctgttattagagtctagtctccacagtagtttttgtatttttatctgcaatttagactaaccctgcctattccatgaaccaaccagtgatctctggctacagctcagaagaaactagagagatggaccttcaagctccaaattatcctcagtgaggataccatcttctaaatactcaggagtcacccttctatagaagaccactaggctgcccatcagtagaacacaacaaaggaaaaatcctgtttgtgtttcccttcgacctacctggatagcactttcaccaaaccacagagccactctgycctgacagttatcaagaggccaaaacccacaggacaactttcaccacccctctgtcagtaggaagcagttatagacgcctgacctttgtccattttccccaagaactgggtcttggagtattgaggtaggtagttagtcagacatgagcagggcatgagagtggccctccccaggaatatcaggtgaccatcaggtgatggtcaagcagtcgttaacctgtctctctaaaataataattggttgcaatgggtgccagaga

SEQ ID NO: 628033 - DNA, 563 bp, Homo sapiens
ttgacattagttaggtaacattaataataataataacaataatactaaatataatctacccacaaaattatcaacctctgaatcctcatagtcatgagcttgtcacgtcactttcgtgcaaaaaaagatctctgtgacctagagagaggcaagttagagacagtgaaatggaagctcagagtggcccttccaagtacccactgtcaaccaggtgcagggctcctgcctgctgaccaccctgcaaggacagctgatctaggacccttcagaccccggagtccgcttgcattttcaggagcataagtgccaaatcccagcacccgyatgaagtgtccaccattcagcctcatgggatggctgtgcttcagatccgtcatcggcccaagctaatctgcctttcctccttttcctctgtgagatcccagtagaaaataaggctcccacattctttatttccaccaacttcaatgtaggaagagctcatattacaactgccagtgattccaaatgaagctggaattaatctattgcctttttttcaatttcttcctatctgtgcaggt

SEQ ID NO: 628034 - DNA, 563 bp, Homo sapiens
ttgacattagttaggtaacattaataataataataacaataatactaaatataatctacccacaaaattatcaacctctgaatcctcatagtcatgagcttgtcacgtcactttcgtgcaaaaaaagatctctgtgacctagagagaggcaagttagagacagtgaaatggaagctcagagtggcccttccaagtacccactgtcaaccaggtgcagggctcctgcctgctgaccaccctgcaaggacagctgatctaggacccttcagaccccggagtccgcttgcattttcaggagcataagtgccaaatcccagcacccgtatgaagtgtccaccattcagcctcatgggatggctgtgcttcagatccgtcatcrgcccaagctaatctgcctttcctccttttcctctgtgagatcccagtagaaaataaggctcccacattctttatttccaccaacttcaatgtaggaagagctcatattacaactgccagtgattccaaatgaagctggaattaatctattgcctttttttcaatttcttcctatctgtgcaggt

SEQ ID NO: 628035 - DNA, 229 bp, Homo sapiens
ttcttgctttcttccagctatttcctctttttaggacagcctgctcggcttgcatgttgtttccagcaggtttctgatgtcttacttatcctaaatacacccgatccagccacacrtgtttcaggagtccttttatgaccccctggataatgttggccaccctttcctgtgtgcccttcatttttattgcttctactatgcaggccaaagaacaacattagtaaaagtt

SEQ ID NO: 628036 - DNA, 229 bp, Homo sapiens
ttcttgctttcttccagctatttcctctttttaggacagcctgctcggcttgcatgttgtttccagcaggtttctgatgtcttacttatcctaaatacacccgatccagccacacgtgtttcagragtccttttatgaccccctggataatgttggccaccctttcctgtgtgcccttcatttttattgcttctactatgcaggccaaagaacaacattagtaaaagtt

SEQ ID NO: 628037 - DNA, 227 bp, Homo sapiens
ctcttaccaaactgtgccctgtgtccggctgtgtgcagttgggggtgaagggaagggaggaaggaaagacaagagacttggccctgatggtcctcagtcrtggggagaccaatcttaggccatgcactattccttcattgccattgtcagggccatgtttgctacttctgggactgggttttattactttccttcaccttttctgctttgcatgggaaatgcagata

SEQ ID NO: 628038 - DNA, 554 bp, Homo sapiens
gctttgctcttttaaatgcccaacactgaaaatatgattatgttacctctggaggtacacargtgccaaatcctaatacaggcatgaaatgaccatcatttagctccacacactgatatttgggatccattgaatgtcattcctttcgctaagcagacacggtttccttcttcaacatccagcatttatattcacaggttgtataaacaatgggcaggcaatgctacactgcccactgtctggggctgaccaatgtcatgtaggaagaggcaagtgatggtgtattacacaggctatgaagaaaattgaatccagtgcacttgttttttatcaaagagaattcttaagtacattttaatatagtcagaataaaattattattttcttactaaagtaaaattttccatctggaatctatctatctatctatctatctggctatctattatctatctatctatcatctatcatctatctatctatcatctatcatctgtctatctcataaattcctccaatagatttatagaatgattaattatcatatgttggac

SEQ ID NO: 628039 - DNA, 611 bp, Homo sapiens
ggtgcaactcagaacaggtgcaatgatccaggctggtgattggcaggtctaaaatgccacccaagtcccctagtcactgtgagtcagcaagattttccagagaaggaggttggagataacactatcaaatcacttttagatgatcatgcctggtgaatgtgagtgccttaatgaggggtggggtagagcaggcatgtctgatacatgaaagcaaatgggcctgctccacacatcgctcagcaaacagccgtctcaagctgctcttctcttatttaataatgaggcagtcacttgcttcaacagaaaacattttcaactgactacattatcccataaagcaaaggtatacggttgaaatcatatatgttcttaacatttctggaccctcctatacctatgaataaatttaaatgacttgcttattccaaaatgaaattcctatgttatttagaaaacatgttgaggaaaatattggactggagagaaaaayaactcacaaagagtcctgtactcttccggtgacctacttcgcatttggaagtttggttactttttatgccaatcaaaacatcctgccatgtaactatggagcatgttcagtaaaatcaaat

SEQ ID NO: 628040 - DNA, 357 bp, Homo sapiens
tgtctgtagtctcagctacttgggaggctgaagtagaaggattgcttgaacccaggaggtcaasgctgcagggcactgtgattgcaccattgcacttaaatcttggcaaaattttttacagtggcaacacaggttatgggatggagagaagaacaagcctggctagcaaacgaggtttcattatttagatgaaatctcccaggaagcagccctcagagagaacagctgggaaatgtttttctttagacctttaaaggtatcagattctcagttaatctttcttctatccaagagagattctcagagaaagcccagctgtaacaatgcaaattttctctacagatgcaagtctttccc

SEQ ID NO: 628041 - DNA, 589 bp, Homo sapiens
ctagtttcatgaaaagcaaattctgtgacttcacaaactagatatttcattaaggtcacaatgtagccaagcaattctgggcatgactgtttaaaacaggaatgtgaaaccagagcaaaggcagccctcctttggctgggcgatggcatagcagaccaggaactttcccccacatggtgctctatacaggacaggggtgaatcagctcagctacaccatgtgccttagagactctgaacatgagacatgtggaaaaagaccctaaaaaacaattacaggcagaatgcaggaaaaacagccagatcaccaggcgtggtggctcataccaataattccagcattttgggaggctgagccaggaggatctcttcagctcagaccaacctggaacacaccacaagaacttgtctctgctaaaaggaaaaattttaaaaattagctgggtgtagtggcacctgtctgtagtctcagctacttgggaggctgaagtagaaggattgcttgaacccaggaggtcaacgctgcagggcaytgtgattgcaccattgcacttaaatcttggcaaaattttttacagtggcaacacagg

SEQ ID NO: 628042 - DNA, 357 bp, Homo sapiens
tgtctgtagtctcagctacttgggaggctgaagtagaaggattgcttgaacccaggaggtcaacgctgcagggcactgtgattgcaccattgcacttaaatcttggcaaaattttttacagtggcaacacaggttatgggatggagagaagaacaagcctggctagcaaamgaggtttcattatttagatgaaatctcccaggaagcagccctcagagagaacagctgggaaatgtttttctttagacctttaaaggtatcagattctcagttaatctttcttctatccaagagagattctcagagaaagcccagctgtaacaatgcaaattttctctacagatgcaagtctttccc

SEQ ID NO: 628043 - DNA, 357 bp, Homo sapiens
tgtctgtagtctcagctacttgggaggctgaagtagaaggattgcttgaacccaggaggtcaacgctgcagggcactgtgattgcaccattgcacttaaatcttggcaaaattttttacagtggcaacacaggttatgggatggagagaagaacaagcctggctagcaaacgaggtttcattatttagatgaaatctcccaggaagcagccctcagagagaacagctgggaaatgtttttctttagacctttaaaggtatcagattctcagttaatctttcttctatccaagrgagattctcagagaaagcccagctgtaacaatgcaaattttctctacagatgcaagtctttccc

SEQ ID NO: 628044 - DNA, 607 bp, Homo sapiens
ttggcaaaattttttacagtggcaacacaggttatgggatggagagaagaacaagcctggctagcaaacgaggtttcattatttagatgaaatctcccaggaagcagccctcagagagaacagctgggaaatgtttttctttagacctttaaaggtatcagattctcagttaatctttcttctatccaagagagattctcagagaaagcccagctrtaacaatgcaaattttctctacagatgcaagtctttcccactaaagacagctttttggctcttctcgtatttcctgcccttctgaatagctgtcttgaaatgtgtcaaagaaatttattttagtgcaaaatgtattggttcccttgaagctcaactctgactccaagtaagacaagaggggatttataaccatagagcacggtgaggtcagaggagaaaaaattgctaagaggaagcaccagaggttagggtggcaacagcaaggcagaaattctggaataccaaacgatatggtttggttctgtgtccccaccgaaatatcatgtcaaattgtaattcccggtgttgaaggaggggcctagtgggaggagattgaatcatgagggctgac

SEQ ID NO: 628045 - DNA, 608 bp, Homo sapiens
gacccagggctggaattgctccctcagtgaatcactgggggtgggattgacagagatagggggtccatatgcytaggaaagtggatgtaattgggctgtaccaatgaggagtctgtgttagggagggtagttctgtgtctacagaacacagagggaatttatgctactacaggtagaaattataagcccctggggacatccaatgtcagtcttcttttacctaatttgggacataactgtcaagtatgttttcctttatactggagaataatgttagaaatgatatctcctgcctatctacaaaacttctctataaaaatgtagaaaacgaaagaaaataattttctcattcaaaaggcattaaaccacactgcaatgtgcaccataggtaatgtctaatgaaactacagggcactggagccttagaccctgccactttgttgacacctactgggcaaccaaaggaactagtacacaactgcctagtggttatagatcaagagtcttccaggcgaccagatctgaaggacacagccctccagggtggagactggatgctctttgtggacagaagcagcctagtcaccaacagaaggaggaatgctgtc

SEQ ID NO: 628046 - DNA, 601 bp, Homo sapiens
gacaataggagagaggttttgctttggaaaaataaatttctaaattgactggggcatgtctcagrtatttggggctcacaatacctaaataaattaaaagcagaaactaaaacatgtttttgaagcaatgttagtattcatgataaccttattcataataattctattcacaataatcaaaaggtgaaaatgcaagtgagcatcagcaaatgaaaggataaacagagtttagtgtctacaaagggacattatttagttttaaaaaggaaggaaattcagatacgtgcaataatatggttgaaccttgaggacattttactaagccaaataaaccagacacaaaaggacaaatactgtataagtccaactatgtgaggtgcctagaataattaaatgcaaagacaggaagtagaatggtggttgccagaggatgaaataaagggaaatgggaagttgttgtttaatgagcagagttttaggttgggatgattaaaattgtaatatatgtatactggtgatgcttgctcaataaggttgatggacttaatgctaataaactatatgttttaaaatggttaaatgatgaattgtatgttataca

SEQ ID NO: 628047 - DNA, 601 bp, Homo sapiens
gacaataggagagaggttttgctttggaaaaataaatttctaaattgactggggcatgtctcaggtatttggggctcacaatacctaaataaattaaaagcagaaactaaaacatgtttttgaagcaatgttaktattcatgataaccttattcataataattctattcacaataatcaaaaggtgaaaatgcaagtgagcatcagcaaatgaaaggataaacagagtttagtgtctacaaagggacattatttagttttaaaaaggaaggaaattcagatacgtgcaataatatggttgaaccttgaggacattttactaagccaaataaaccagacacaaaaggacaaatactgtataagtccaactatgtgaggtgcctagaataattaaatgcaaagacaggaagtagaatggtggttgccagaggatgaaataaagggaaatgggaagttgttgtttaatgagcagagttttaggttgggatgattaaaattgtaatatatgtatactggtgatgcttgctcaataaggttgatggacttaatgctaataaactatatgttttaaaatggttaaatgatgaattgtatgttataca

SEQ ID NO: 628048 - DNA, 601 bp, Homo sapiens
gacaataggagagaggttttgctttggaaaaataaatttctaaattgactggggcatgtctcaggtatttggggctcacaatacctaaataaattaaaagcagaaactaaaacatgtttttgaagcaatgttagtattcatgataaccttattcataataatyctattcacaataatcaaaaggtgaaaatgcaagtgagcatcagcaaatgaaaggataaacagagtttagtgtctacaaagggacattatttagttttaaaaaggaaggaaattcagatacgtgcaataatatggttgaaccttgaggacattttactaagccaaataaaccagacacaaaaggacaaatactgtataagtccaactatgtgaggtgcctagaataattaaatgcaaagacaggaagtagaatggtggttgccagaggatgaaataaagggaaatgggaagttgttgtttaatgagcagagttttaggttgggatgattaaaattgtaatatatgtatactggtgatgcttgctcaataaggttgatggacttaatgctaataaactatatgttttaaaatggttaaatgatgaattgtatgttataca

SEQ ID NO: 628049 - DNA, 605 bp, Homo sapiens
gaaagggacaaattccctaccagtcagcaagccatccccagtatggatccccactgggaccttgactcagatcatggggactggagtcgtaaacatctgttgacctgtgttctagaaggactaaggagaattagaaaaaagcacatgaattattcaatgatgtccaccatgactcaggaaagggaagaaaatccttctgccttccttgagtggctacatgaggccttaagaaattatactcccgtcacccaaatcactcgagggtcaattgattctaaaagataagtttaatacccaatcagccacagatatcaggagaaagctccaaaagcaagccctgggccctgaacaaaatctagaggcattattaaacctggcaacttcagtgttctataatagggaccaagaggaacagacccaaaaggaaaagcaygatcagagaaaggctgcagccttagtcatggccctcagacaaacaaaccttggtggttcagagaggacagaaaatggagcaggcccatcacctggtagggcctgttatcagtgtggtttactaggacactttaaaaaagattgtccaatgagaaacaagctgccccctcatc

SEQ ID NO: 628050 - DNA, 525 bp, Homo sapiens
ttgtttgcatcatgcatgaccaatatctttgagttgttttgcaacgccctgattgcttccatttgctttttgatgaaacaacaaaaaaagagaaataggtaaattattatatattgacataatgtaatattataaagtcatgaaaattttcacagagaatgatttcagtaagatagtggattaaaaagctaacagtggacacatggaatcctcaagaaactgtctaaaattgactaaagtatatgtatttatttacscagtgtcttagtagagattcagggtgactatatgtgggcgaaggattacccaggtgccaaggcaagagattgaaggcacaaactgtttcagtataatatagaaaatagctagaataagaatagttataataaaaattagatatagagatgatcatggacattaccaatcattactacaaacattgttaatcattagcttttaatattactctttgttttattactaatataaccaaggaataaccggtaggcatacggtcaggtgctg

SEQ ID NO: 628051 - DNA, 525 bp, Homo sapiens
ttgtttgcatcatgcatgaccaatatctttgagttgttttgcaacgccctgattgcttccatttgctttttgatgaaacaacaaaaaaagagaaataggtaaattattatatattgacataatgtaatattataaagtcatgaaaattttcacagagaatgatttcagtaagatagtggattaaaaagctaacagtggacacatggaatcctcaagaaactgtctaaaattgactaaagtatatgtatttatttacccagtgtcttagtagagattcagggtgactatatgtgggcraaggattacccaggtgccaaggcaagagattgaaggcacaaactgtttcagtataatatagaaaatagctagaataagaatagttataataaaaattagatatagagatgatcatggacattaccaatcattactacaaacattgttaatcattagcttttaatattactctttgttttattactaatataaccaaggaataaccggtaggcatacggtcaggtgctg

SEQ ID NO: 628052 - DNA, 525 bp, Homo sapiens
ttgtttgcatcatgcatgaccaatatctttgagttgttttgcaacgccctgattgcttccatttgctttttgatgaaacaacaaaaaaagagaaataggtaaattattatatattgacataatgtaatattataaagtcatgaaaattttcacagagaatgatttcagtaagatagtggattaaaaagctaacagtggacacatggaatcctcaagaaactgtctaaaattgactaaagtatatgtatttatttacccagtgtcttagtagagattcagggtgactatatgtgggcgaaggattacccaggtgccaaggcaagagattgaaggcacaaactktttcagtataatatagaaaatagctagaataagaatagttataataaaaattagatatagagatgatcatggacattaccaatcattactacaaacattgttaatcattagcttttaatattactctttgttttattactaatataaccaaggaataaccggtaggcatacggtcaggtgctg

SEQ ID NO: 628053 - DNA, 476 bp, Homo sapiens
cacttcaaaaccagggaaatggtaagaggggccagccccaggcccctccagacaatgargcattccccaactcccagccttggccttgcagccagatgagggcatccccagctcaaccaatcgatccaaccactcagtttccacttcaaccattcatgccacaagcatagatgtcacaacccccacaaggatctcatttcaatgcttgtcccccgccaccacaggatctgcagcagtagatctctgctgtattagagacatttcccttttgcctggagagccaccaatagctgttcccacaggtgcttttgggcccttgccacctggctctgttggtttattgctcagtcactcaagcttaaatttaaaaggtgttcaggtacataatggtgtaattgactctgattactctggggaaatacacattactgttagttctgcagttccttgccaagcttcagcaggagattgaattg

SEQ ID NO: 628054 - DNA, 476 bp, Homo sapiens
cacttcaaaaccagggaaatggtaagaggggccagccccaggcccctccagacaatgaagcattccccaactcccagccttggccttgcagccagatgagggcatccccagctcaaccaatcgatccaaccactcagtttccacttcaaccattcatgccacaagcatagatgtcacaacccccacaaggatctcatttcaatgctygtcccccgccaccacaggatctgcagcagtagatctctgctgtattagagacatttcccttttgcctggagagccaccaatagctgttcccacaggtgcttttgggcccttgccacctggctctgttggtttattgctcagtcactcaagcttaaatttaaaaggtgttcaggtacataatggtgtaattgactctgattactctggggaaatacacattactgttagttctgcagttccttgccaagcttcagcaggagattgaattg

SEQ ID NO: 628055 - DNA, 563 bp, Homo sapiens
tttcccttttgcctggagagccaccaatagctgttcccacaggtgcttttgggcccttgccacctggctctgttggtttattgctcagycactcaagcttaaatttaaaaggtgttcaggtacataatggtgtaattgactctgattactctggggaaatacacattactgttagttctgcagttccttgccaagcttcagcaggagattgaattgctcaacttcttcttctgctgtacattccactcagatccagttctcataaaagaactggaggttttaggagtgcagataatcagggtaaagtggcttactgggctaataaaatttctgacacctgacctgtttgttccacgcatatacacagaaagaaattcatgggcatgattgacctgggtgctgatgtttccattattgctttacaccaatggcctcgtcactggcccaaagaagtcacattcaccgggttggtgggagttggtcaggccactgaggtttatgaaagttccactattttacattgtactggcccagagggacagactggtactgttcaccctcta

SEQ ID NO: 628056 - DNA, 660 bp, Homo sapiens
ggttcaacatacacaaatcaataaacgtaatctatcacataaacaggaccaacaacaaaaatcacatgattatctcaatagatggagaaaaggccttcgacaaaattcaaccctgcttcatgctaaaaactctcaataaactaggtaataagagctatttatgacaaacccacagccgaatatcatactgaatgggcaaaaactggaagcattccctttgaaaactggcacaatattggggcaacttgcccccaatacttcagtgtatgttctttctattttccatgagtgtcagccagctgagaaataaagagagacagtataaagagaggaattttacaactgggccgccaggggtgacatcacatatcagtaggaccgtgatgcctgcctgagcctcaaaaccagcaaatttttattaaggatttcaaaaggggagggggtgtaagaacagggaataggtacaaagatcacatgcttcaaagggcaaaaagcagaactactaataagggtctaagaaagatcacatgcttctgagggaacaggacaaagggcaaaakcagaactactgataagggtccaacaaagatcataaggcaaagggcaaaagcagaactactgataagggtctatgttcagcggtgcacgtactgtcttgat

SEQ ID NO: 628057 - DNA, 492 bp, Homo sapiens
tgaaagcctcccgttcttttcactgtgctgcttcctagttttatgtaaggtaacagcaacaacttagcaattctttctcctggggaggcagaccacggaggaactaataactaattgaatttctctggtataatcagagacaattattcccacatgcacagtgatggcttttaaatttagactagatcttccaagtaatagactgttcctgagggtaagggtcccctaactcccatagggaccttctttggtggctccccaggaagtaaggagatgggaattgtgctgtagaggtctgcggcagcattgcctgcgargcgggggataattgttgtacatttgtaagggcactggctgtgctgggtatgcctcagtttgttaaggggctcaaggaggggccccttttcctctttcctgaaagagattgtccatctttgctaaatttagaatgacactgacttgcccagtgattgccttacaccagggacgtat

SEQ ID NO: 628058 - DNA, 310 bp, Homo sapiens
tattttatttattgagtatcccctacccagggataccaccccaggccagtagaggtggtatctctggataggaaccatttgtagttaaagtaggtagataaatgaagtacccaatgtggttgggagagctctcaactggattccctatcttatcaacgtaaaggggggaagctacctcagctcccataccaggttgacaggaaagctatgcacttmccagcctcactcttgtcccagtgttctgaatcttgagatcagacaggtacctcttttcatctgtagaaatgttgatgttacaagtagggagaaa

SEQ ID NO: 628059 - DNA, 447 bp, Homo sapiens
caaacaagttttcttcttcctgggtgcaatgttattctacccagggatgctgtaatgaactgtgttggttggtttccagctcttgcaaaagagcaccggctgtgagatttgagcttgccttatgttgccctaggggaggtattctggtttctcaggtgacaggcagggtcacagagttcccaaaagtttatgtcctttgtgttaagctaccagggtgggtagctttcaaagctagcataggaatgaagatattctcccagtaacagtacaactgttatatctaaggaagtaccaataatgacctcagattatttaataccccatctgtaytgagatttaccattgtttccttgaatggtcttttataactcttatttttaaccataaacagcagatgaaaaaaattaatgataccatataatataaaaagatattaagtaccaaaag

SEQ ID NO: 628060 - DNA, 188 bp, Homo sapiens
tgtgttattattttattattgtatttgttcyttccttggggctttaaagtaattactttcaattttaactactagttttattattctgactttacattttattatgaaaaaaagaatccctcaccaagtcaagaaaagaaatagttattcctctcagaagtgctaaaagcttaactctttccctttaa

SEQ ID NO: 628061 - DNA, 630 bp, Homo sapiens
ccaggtgatgctgctgctgttattcaggggcctcacttgagacgctctggtgcagaatgaacaccttagtctgtttagggagccgcctaacaaactgaatccagcctcagggcttcagcatttctgggtttccttccagggtggaccagaactcaccagttcttttggaggacccagttatttgtgtcatggcaaaaatgcacaagtgatccccagccctgattgctctgtgctaccagctgcagygtggggctgtggtcctggtcaagagctccaatgaacagcagatcagagagaacatgcaggtgaggcgttgggtgggcattaggactcctgcatggtgtccttcacacatgtgcttcctgtaaggtgagaacaggatactgttggactaagtccatttcctggttatttcctatgcacaaatgctttctgtacatcctaaaggttttctactctaccacagaagaggcagcatgggtggagagaattaggatggaaccaaaaccagagatttgggtttcaacattaagttggcaatttattatgcattcctgtgctagcgacatctgcttttcttgattttctgaaatgaggagttggattaggtgttctctagtctccaaatca

SEQ ID NO: 628062 - DNA, 461 bp, Homo sapiens
caacagcttttatctacaggagatctaccattaggtctaatgacacctacagatttgttttcatttacatgatatatcaatgtcagcaagcaggactagccattcttatactagataaaacagacttttataccaatgatattttaaaaagacagagaagagcattatattataaagattccatacagcaagaagatttaaccaycctaaatataaatgtattcaatattggagcacccagattcataaaagaaatactactacacctaagaaaacagactgggagaagtacaataatagtaaatgacatcaacaccccacttataaatgttgcagatcattgagacagaaaatcagccaaaaaaaaaactctctggacttaagctggaatatgaaccaaatggacatcataatcatttacagaacattctacctaacaactacagaatacacatttttct

SEQ ID NO: 628063 - DNA, 461 bp, Homo sapiens
caacagcttttatctacaggagatctaccattaggtctaatgacacctacagatttgttttcatttacatgatatatcaatgtcagcaagcaggactagccattcttatactagataaaacagacttttataccaatgatattttaaaaagacagagaagagcattatattataaagattccatacagcaagaagatttaaccatcctaaatataaatgtattcaatattggagcacccagattcataaaagaaatactactacacctaagaaaacagactgggagaagtacaataatagtaaatgacatcaacacccyacttataaatgttgcagatcattgagacagaaaatcagccaaaaaaaaaactctctggacttaagctggaatatgaaccaaatggacatcataatcatttacagaacattctacctaacaactacagaatacacatttttct

SEQ ID NO: 628064 - DNA, 598 bp, Homo sapiens
aaaattgaccacatccttggttataaagcaagtctcaataaaattaaaaactcaaaatcatatcaagtattttttcagactgcagttgaataaaactagaaatcaatatcaagaggaactctcaaagctatacaagtgcatgaaaaattaaacaatgtgtccctgaacaacttttgggtaaagaatgaaattcagaattcaacagattttttgaaatgaatgaaaatagacatacaacatgccaaaatctctcggatatgggaaagcagtgctaagasataaatttatagtgttaaaccctccctgaaaagatagaaagacctcaaactcaccacctaaagtcacttctaaggaactagaaaaataagagcaaaccaagcccaaagttagcagaagaaaagaaataagaatggtcacaccataactaaatgaaattgagacaagaaaaaaaataggtataaaggatcaatgagacaaaaatttggttctttgaaaggataaacaaaattgatagtcagctagctaacaaagaaaaaaaaagaatattcaaaaaaatacaatacagaaaagataaaggtgaggctggacaaagtggctt

SEQ ID NO: 628065 - DNA, 448 bp, Homo sapiens
ttagggatttacaaatgtgtttaatttatggccaaaccctggcataagtcaaaataaatgcttatatttgatcactaaaatacraggtaatgatccacctcagggaggagagtatgtgactgcaattagaatctttaaagccttctgtttagaaagcatgcttgcttgaacttcaagtttctaggcaaatgtaagggtcatttgtaaaagctgagtttttcctgttgccaataaggatagagaccttttcttctatgctcatgtcttagactattttcttaagaaaaaaattgtatttgtaaactcttccttagtccctttattatgcatgtcagttttttgaaaagctgactaagcctctagccagaattgcaacctgccagtgttgtgttaagggtaagagagacgactctttggaaatgaaaatatcaagaaagataacttccta

SEQ ID NO: 628066 - DNA, 448 bp, Homo sapiens
ttagggatttacaaatgtgtttaatttatggccaaaccctggcataagtcaaaataaatgcttatatttgatcactaaaatacgaggtaatgatccacctcagggaggagagtatgtgactgcaattagaatctttaaagccttctgtttagaaagcatgcttgcttgaacttcaagtttctaggcaaatgtaagggtcatttgtaaaagctgagtttttcctgttgccaataaggatagagaccttttcttctatgctcatgtcttagactattttcttaagaaaaaaattgtatttgtaaactcttccttagtccctttattatgcatgtcarttttttgaaaagctgactaagcctctagccagaattgcaacctgccagtgttgtgttaagggtaagagagacgactctttggaaatgaaaatatcaagaaagataacttccta

SEQ ID NO: 628067 - DNA, 330 bp, Homo sapiens
tatggaagaaaccagcttctattgctaattttgtaacctccacaactctattcctaggaacccggaggagtaatgaaaagtagtatttggtgatcaatgtgctcaacaggtagttcaggcacaaacaatgaccctcacaaaaatcacattattcttgcatcttgggttagttctatayatggggtgataaatccatcccaatttgctttagtctttcctgcttagtaataaatgttgggtatccctggacctcttcaatcccaggtaattcctggttgatcactagcaatgagtttcccaagaacaacctcagattcagtcatttgttgg

SEQ ID NO: 628068 - DNA, 579 bp, Homo sapiens
aagattttgtcatcccaaaaccctggggtcacccaaatcaccccaaaaagatcacactagctccccagcaataaatccaaactaagataaaatatttaaaataccagataatgaatttagaaggttcattattaagctactcaacaagatatcacagaaaggtgaaaaacaacctaaaawttttttttaaaaaaattcaggatataaatgaaaaattttccagagagatagatatcacaaagaaaaaccaatcagaacttctggaaatgaaaggcacatttagggaaatacaaaatgcagtggaaagtttcaacaatagactagaacaagtaaaggaaagaatttcagagctcaaagacaaggcttttgaattaacccaatcagacaataagaaaaaaggatcaggctggatgggtggctcacacctgtaatcccagcactttgggaggccaagctgggtgaatcacttgaggtcaggagttcaagatcagcctggccaacatggtgaaacccagtctctactaaaaatataaaaattagcctggcatgctggcatgtgcctgtaatcccagctactca

SEQ ID NO: 628069 - DNA, 259 bp, Homo sapiens
ttgtatccagcaaaactatatttcataawtgaaggagaaatacagtcatttttagaaaaacaaatgatgaaggaatttgacattatcaaaccagttctacaaggcatgctataaggagttctaaatcttcaaccaaaagactgttatacaccacaatggaacctcctgaaagcataaaactcacaaatcctataaaacaataacacaacaacagcaaccaaaagtatttaggtaacaattgaaatgatgaaaagaactg

SEQ ID NO: 628070 - DNA, 259 bp, Homo sapiens
ttgtatccagcaaaactatatttcataattgaaggagaaatacagtcatttttagraaaacaaatgatgaaggaatttgacattatcaaaccagttctacaaggcatgctataaggagttctaaatcttcaaccaaaagactgttatacaccacaatggaacctcctgaaagcataaaactcacaaatcctataaaacaataacacaacaacagcaaccaaaagtatttaggtaacaattgaaatgatgaaaagaactg

SEQ ID NO: 628071 - DNA, 259 bp, Homo sapiens
ttgtatccagcaaaactatatttcataattgaaggagaaatacagtcatttttagaaaaacaaatgatgaaggaatttgacattatcaaaccagttctacaaggcatgctataaggagttctaaatcttcaaccaaaagrctgttatacaccacaatggaacctcctgaaagcataaaactcacaaatcctataaaacaataacacaacaacagcaaccaaaagtatttaggtaacaattgaaatgatgaaaagaactg

SEQ ID NO: 628072 - DNA, 511 bp, Homo sapiens
ggttaacaataaaatcaaaatggcaattaagtaattttttgaaataaattataatagtgacacaatgaagacctctggaatatagcaaaagcagtgctaagaggcaagttcatatcattaaatgcctacatctaaaagtctgaaacagcacaaattgacaacctaatatcacacctctatgtactagagaaayaggaactaactaaacccaaagatatctgaagaaaagaaataatatcagaacagaactaaatgaaattgaaacaaaacacccccacaaaagatcaatgaaagataaagctggttctttgatgagatgaagaaacttgatagaccattagtgagattaaccaagaaaaggagagaagatccaagtaagctcaattagaaatgaaactggacacattacaaatgatatcacagaaatacaaaaaatcattcaagacaactaagaacacctttatgtgcacaaactgtaaaatctagagtaaatggataaattcctagaaac

SEQ ID NO: 628073 - DNA, 511 bp, Homo sapiens
ggttaacaataaaatcaaaatggcaattaagtaattttttgaaataaattataatagtgacacaatgaagacctctggaatatagcaaaagcagtgctaagaggcaagttcatatcattaaatgcctacatctaaaagtctgaaacagcacaaattgacaacctaatatcacacctctatgtactagagaaataggaactaactaaacccaaagatatctgaagaaaagaaataatatcagaacagaactaaatgaaattgaaacaaaacacccccacaaaagatcaatgaaagataaagctggttctttgatgagatgaagaaacttgatagaccattagtgagattaaccaagaaaaggagagaagatccaagtaagctcaattagaaatgaaactggacayattacaaatgatatcacagaaatacaaaaaatcattcaagacaactaagaacacctttatgtgcacaaactgtaaaatctagagtaaatggataaattcctagaaac

SEQ ID NO: 628074 - DNA, 555 bp, Homo sapiens
aaaaaatcattcaagacaactaagaacacctttatgtgcacaaactgtaaaatctagagtaaatggataaattcctagaaacatacaaccttcttagattagatcaggaagaaatagaaaaccagaacagaccaataacaagcaccaagaatgaatcagtaataaaaaattgccaacaaaaaaagccaaggatcagatggattcacagcagaattctacttgacattcaaaaagaagttggtacgaatcctaytgaaaatattcaaaaagatagagagagacggaactctgcctaaattattctgtgaagccagtatcaccctaataccaaaacgaggaaaggacataacaaaaatagaaaactataggccaatatccctggtgaacatagattaaaaaaatcctcaagaaaatactagctaaccaaatgcatcagcatatcaaaaagataatacatcatgatcaagtgggttccatcccaagggtgcagggatggtataacataggcaagtcaataaatatgatatataacacaaagagaattaaaaaagaaaa

SEQ ID NO: 628075 - DNA, 555 bp, Homo sapiens
aaaaaatcattcaagacaactaagaacacctttatgtgcacaaactgtaaaatctagagtaaatggataaattcctagaaacatacaaccttcttagattagatcaggaagaaatagaaaaccagaacagaccaataacaagcaccaagaatgaatcagtaataaaaaattgccaacaaaaaaagccaaggatcagatggattcacagcagaattctacttgacattcaaaaagaagttggtacgaatcctactgaaaatattcaaaaagatagagagagasggaactctgcctaaattattctgtgaagccagtatcaccctaataccaaaacgaggaaaggacataacaaaaatagaaaactataggccaatatccctggtgaacatagattaaaaaaatcctcaagaaaatactagctaaccaaatgcatcagcatatcaaaaagataatacatcatgatcaagtgggttccatcccaagggtgcagggatggtataacataggcaagtcaataaatatgatatataacacaaagagaattaaaaaagaaaa

SEQ ID NO: 628076 - DNA, 423 bp, Homo sapiens
cattttctgcaggatgcacaaaaacagagggacacatctttcctacatcaggaagacaggcctgaattcaggcatggggtgaaacaggagattcactgtagccctcagaccataggtttcctccasggctcaatttctgacccaacaggaatgttggtctgtaagtaacactgcctatgtctgcaccattgtgaatcactttttttgatgccctcactacctgtgcctgggtcctacgctttggacgctcttacccattagactagaaggcacagggctgtcttaatttatgctaaaaaaagaaaaattaatatgataacaaatatgtaataatgactcaaacctggtccctctttgtgtctccaccgaggcaacgtaagacataattttaatatttttatggagatgggcccaggtaggtaa

SEQ ID NO: 628077 - DNA, 447 bp, Homo sapiens
aagttacaattttaagtgatgcagattctttcacagaccattttctgcaggatgcacaaaaacagagggacacatctttcctacatcaggaagacaggcctgaattcaggcatggggtgaaacaggagattcactgtagccctcagaccataggtttcctccacggctcaatttctgacccaacaggaatgttggtctgtaagtaacactgcctatgtctgcaccattgtgaatcaytttttttgatgccctcactacctgtgcctgggtcctacgctttggacgctcttacccattagactagaaggcacagggctgtcttaatttatgctaaaaaaagaaaaattaatatgataacaaatatgtaataatgactcaaacctggtccctctttgtgtctccaccgaggcaacgtaagacataattttaatatttttatggagatgg

SEQ ID NO: 628078 - DNA, 575 bp, Homo sapiens
caaacaaccttcagtgtgggtgtcatagccatcatgagcatgtcacagtgctgcagagatttgtttatggctagttttggggcctgtctatggccagatttgggggcctgttcccaacaactttttgcatgtctagatattagagatacatgttatgggatgctagcaaaccctcactgtaccttcggaaaaacacttgcattcgcagagtgggaaaagaattataaattaatattcttttttctatttcaatgctgctaatcacccttgttatccattatctgaagaatatygaccatgagctattgagtgatactagcagaatttcttccttttaggcatcttggagaggatctctgtatttggtgaggggattagaaagcagagtctatagtttctgttcgcctgcctttcacttcttcactttatgaaataacaaagatttgaatatgaggatgtttgtttttctaattattaaaaagtgtgcataaataacataaatatttagacaatacaaaagatagagaacaaaaataatgtgtaattcatccattccagaataatttacatttggt

SEQ ID NO: 628079 - DNA, 575 bp, Homo sapiens
caaacaaccttcagtgtgggtgtcatagccatcatgagcatgtcacagtgctgcagagatttgtttatggctagttttggggcctgtctatggccagatttgggggcctgttcccaacaactttttgcatgtctagatattagagatacatgttatgggatgctagcaaaccctcactgtaccttcggaaaaacacttgcattcgcagagtgggaaaagaattataaattaatattcttttttctatttcaatgctgctaatcacccttgttatccattatctgaagaatattgaccatgagctattgagtgatactagcagaatttcttccttttaggcatcttggagaggatctctgtatttggtgaggggattagaaagcagagtctatagtttctgttcgcctgcctttcacttcttcactttatgaaataacaaagatttgaatatgaggatgtttgtttttctaattattaaaaagtgtgcataaataacataaatatttagacaatacaaaagatagagaacraaaataatgtgtaattcatccattccagaataatttacatttggt

SEQ ID NO: 628080 - DNA, 560 bp, Homo sapiens
tgggaactattgggatgaaatggctacattttgcgtgtaagaagaacatgaggttatggatcaggggcagaatgctatggttggcatatttgaccctcctaaccatatgctgaattttcgatgtaggaggtgaggcctagtgaagtcattatggtcatgggggcagatctctcatgaatggcttggtgctctccctgcagtaacaagtgaattctggctttattacttttttcatagctgcttgttaaaaagagcctggcaccttactttcctctcttgctttcctctctcactctgtgaactyggaacatgctggttctcctttcctttctgccatgagtggaagcagcctgaagacctcaccaaaggcctaagagatgccaatgctatgcttcttgtacagccaccagactgtgagccaacaaacctcttctttataaattctcagcttcaggtattcctttatagcaacacaatggactaagacagtttctaatttctctacacacctagaaccagcatgtcctgagtgggtgatcttaatacctgataatcacaga

SEQ ID NO: 628081 - DNA, 560 bp, Homo sapiens
tgggaactattgggatgaaatggctacattttgcgtgtaagaagaacatgaggttatggatcaggggcagaatgctatggttggcatatttgaccctcctaaccatatgctgaattttcgatgtaggaggtgaggcctagtgaagtcattatggtcatgggggcagatctctcatgaatggcttggtgctctccctgcagtaacaagtgaattctggctttattacttttttcatagctgcttgttaaaaagagcctggcaccttactttcctctcttgctttcctctctcactctgtgaactcggaacatgctggttctcctttcctttctgccatgagtggaagcagcctgaaracctcaccaaaggcctaagagatgccaatgctatgcttcttgtacagccaccagactgtgagccaacaaacctcttctttataaattctcagcttcaggtattcctttatagcaacacaatggactaagacagtttctaatttctctacacacctagaaccagcatgtcctgagtgggtgatcttaatacctgataatcacaga

SEQ ID NO: 628082 - DNA, 506 bp, Homo sapiens
caagtgtgggaaaatgatgttaacatcacacatacgaatgctacgctttccaggatttaacatttccagtgatcaagaattactgtattttgtaagtcattcacagatggttctgcatgatacgcaggggccacccaaaagcagacagctgcagcactacagcccctttgatgtcctacatccctgaaggacagcaatgaagggaaatcttcccagtgggcagaacttcaagcagtgcacctggttgtgcactttgcatggaaggagaaatgaccagatgtgtgattatatagtgattcatggcctgtagccaatattttggctgggtggtcagggacttggaagaagcatgattagaaagttggtgacagtgctttgcagggatggggcaaagttctccagaaggctgtgtatgccctgaatcagcatccaatgtattagtactstttctctcatagccaggattcacggtccaggaatcaaggggtggaagtggaagtggcacc

SEQ ID NO: 628083 - DNA, 637 bp, Homo sapiens
tttcttttctttccttttttttttcttttcgagacagggttttgctctgtcacccaaaacagggtcttgttctgtcacccaggctggagtgcagtggcatgagcctagctcactgcagtctcaaagtcctggactcaagcagtcttcccacctcaacctcctgagtagctaggactacagacacacaacaccaacatgcctggctaatttcttttttagagatggagtcttgctgtattgcccaggctggtctcatactcctaagtttaagtgatcctaccaccttggcctccaaaagcactgggattacaggcaggagctactgcactcagccaaatattttcttaaagtaccagagagtaagtattttagactctgtggaacataccagctgtgttgcaactacctgactctacggtcatggcttaaaagcagccataaacwatacataaacaaataagcatggctgtgttccaataaaacctttatttgtttatatttttattttcaattttgtgggtacatagtaggtgtatatatttatggggtagatgacatgttttgatccaggcatgcaatacataataatcccagcatggagaatggggtatctatcccctcaagcatttatcctttg

SEQ ID NO: 628084 - DNA, 503 bp, Homo sapiens
gttgagacttaagaacaagtgagggaaatgattggttaggcaagattacaaagtgccttgaatatcagattgagaaccaaggatttaaacttgtaagaggtacagagtctatgaggtttctaggcaggaaaccaagatgataaaaacaaaagccatgttttagaacctggtagagtagtaggactagttgtaatgaagattgaaaagaaagactggaagcaaggaacgctattagagacctatttcagcaatccagcctagcccagtcaactacacttgcctgatctcttcaggcttaatccctcgtcaaacagaccatgaaatctaaatggggaaccttcagccggcattggaggacagatggccatatttggaacaagttcagaacattacatgaccagtaaatgaaattgatatcactgcagatcactygttggatggcttcagtttttaaataggggttcttttccactgtaacataaatatctgaagtgtctccttta

SEQ ID NO: 628085 - DNA, 570 bp, Homo sapiens
tactgagctgaatattgtttccagatcttttcagtgaacaaagctaggaaattattatacattcgactaatattttcatttcaaattcagaactggatattaacatcttctgtctttatctgttgattttgcttatggttttttggcatgcaaaagttgaaaaaaattcatgtaatcaaatttatcttcttttgctgttaaattttgagtcatagaattttctctttcctaggttatagagaagttcacacrtattttctactactgatattgttttttgttcatttaaatttctgatccagttgtaatttatcctgtttatggtgtgaggaatggatccaattttatcctttgtccttatggctgtctagttatctcaatagcatttattaagaagtctatgttttcctcactgatttgaggtgctaatttcattataaaccaaacttgcgtatgtaattagatctatttctatattttatattctattattggtctgtcttatcattcaattgtaattatagaggtttttaatggtatattttaatatcagatggagttagtgctcct

SEQ ID NO: 628086 - DNA, 539 bp, Homo sapiens
tttattttattttattttattttttgagagaggktctcactctgtcacccaggctggaatgcagtgatgtgatcatggttcactgcagcctcaatactccctccaggctcaggtcatcctcccacctcagcctcccaagttcctgggactacaggcgcatgtcaccatgcctgactagttttgtatttttgtagagatgaggtctcactatgttgctcaggtagttctcaaactcctgggctcaaaagatctgcctgccttggcctcccaaagtactgggattacaggcataagccactgtacctgtccattgtaccatttttaatctcttatctgggtggcatcatgttagacatggtacttgtccagaggaacttatcattttcccagcctgcacttggggatgcaagacactggttctagtgctctaagaatctaccaaacttacttggaaccacccccttcttcttcctaggcaccctcctctaggaaccagaaaaggctatatatgacttcctcttcctatgtggatgagatga

SEQ ID NO: 628087 - DNA, 523 bp, Homo sapiens
ctggaatgcagtgatgtgatcatggttcactgcagcctcaatactccctccaggctcaggtcatcctcccacctcagcctcccaagttyctgggactacaggcgcatgtcaccatgcctgactagttttgtatttttgtagagatgaggtctcactatgttgctcaggtagttctcaaactcctgggctcaaaagatctgcctgccttggcctcccaaagtactgggattacaggcataagccactgtacctgtccattgtaccatttttaatctcttatctgggtggcatcatgttagacatggtacttgtccagaggaacttatcattttcccagcctgcacttggggatgcaagacactggttctagtgctctaagaatctaccaaacttacttggaaccacccccttcttcttcctaggcaccctcctctaggaaccagaaaaggctatatatgacttcctcttcctatgtggatgagatgaaatgtgccctccttctcaaggcggcattcaccttatc

SEQ ID NO: 628088 - DNA, 539 bp, Homo sapiens
tttattttattttattttattttttgagagagggtctcactctgtcacccaggctggaatgcagtgatgtgatcatggttcactgcagcctcaatactccctccaggctcaggtcatcctcccacctcagcctcccaagttcctgggactacaggcgcatgtcaccatgcctgactagttttgtatttttgtagagatgagrtctcactatgttgctcaggtagttctcaaactcctgggctcaaaagatctgcctgccttggcctcccaaagtactgggattacaggcataagccactgtacctgtccattgtaccatttttaatctcttatctgggtggcatcatgttagacatggtacttgtccagaggaacttatcattttcccagcctgcacttggggatgcaagacactggttctagtgctctaagaatctaccaaacttacttggaaccacccccttcttcttcctaggcaccctcctctaggaaccagaaaaggctatatatgacttcctcttcctatgtggatgagatga

SEQ ID NO: 628089 - DNA, 523 bp, Homo sapiens
ctggaatgcagtgatgtgatcatggttcactgcagcctcaatactccctccaggctcaggtcatcctcccacctcagcctcccaagttcctgggactacaggcgcatgtcaccatgcctgactagttttgtatttttgtagagatgaggtctcactatgttgctcaggtagttctcaaactcctgggctcaaaagatctgcctgccttggcctcccaaagtactgggattacaggcataagccactgtacctgtccattgtaccatttttaatctcttatctgggtggcatcatgttagacatggtacttgtccagaggaacttatcattttcccagcctgcacttggggatgcaagacactggttctagtgctctaagaatctaccaaacktacttggaaccacccccttcttcttcctaggcaccctcctctaggaaccagaaaaggctatatatgacttcctcttcctatgtggatgagatgaaatgtgccctccttctcaaggcggcattcaccttatc

SEQ ID NO: 628090 - DNA, 516 bp, Homo sapiens
ctcttcctatgtggatgagatgaaatgtgccctccttctcaaggcggcattcaccttatccattccctggccccttaataatggaaagttatcagattaccaaaacaaacacattgaaaggtatttgaaaaattattrttatgcacatcacatacattttaaagccttaatacatattaccaaattaccctgcaaaatatgataccaatttaaactctcagtagcagtatatgaaatgtttccttcccattgtccttcaacagtgagcactaaacttggccaacctgttgggcaaaatcttgtaatctcaatcttttaatttgcatttctatgagtacagtgaagttgacatttttgatatgtttatttcttttgtaaattttctgttcatgatctttgctcattattctattggtcttcttatgtttgtcttattgatttattgatttatgagagctctatatatagtaagactattaacccaagtttgcctttgtctttacattttacttgtga

SEQ ID NO: 628091 - DNA, 470 bp, Homo sapiens
taccatgtatatcaaatctggtctttctggacatttctccatcgttggaccctggagatgattttttttttcgacagctcccttttccactgcttctatgatgaatttccttggtcttattcctaaaatttccactcctttcaaactgcatttttacactttgacttttatgttttgttttccttggctttctactattctcattttacacaaacttctaaatgatcttattctgatttatttcttcatctgatgtagatgtgatggaaatcacctctgtccagacctttctcctaagctgtaaatcagcacaataaaatacctcttgtacaaagtcagtycctttaatctcttttaacctcttcccttgaaagctgcttctcctcatgttctctttttcttagttgattctactgctatctacccagtcccccaagtcaataatgtcattgttttcttcttaactcatc

SEQ ID NO: 628092 - DNA, 638 bp, Homo sapiens
tgagcgactactttgtctatattccaaaaatactgcataattattgtttatcttagccaatcttctgaaagttattgaaaaataataatgtcaagattttactccctggcaaatacctaaagtctagctgttcagtgctattagtaaaacagagtcttatgcattatcaaatagattaactagggtggaagggatattgcctgtaaaaatagagaagaaaaaattaagcatgaacctgaatagagggatttctggttggagtgctaaaattcctcttggaatctgattttgaactttttaggcataattaaaaagttcttaaaatagaaaaattgtagctatgatagaacataagaaacattcttggtggakcagaaattgtatgattctccaaaagatagaacatagagttgtataaagaagaaaaatcagtgaaaacttaaaatgccaacaatagagagaaaacctagggagaccttcaggttgtgtggactcaaatcccggctgtgctttcttcttagtgtgtgacttgaacaaattagagaacttttctctgcttcatttttttctacttacaaagtcatggtaaaattagctactcacagagttgctgtgacaattaaatgtgtatgtaaagc

SEQ ID NO: 628093 - DNA, 642 bp, Homo sapiens
taagaattgaatcataaaagtagcttaaagaaattaaaaaatgtataatctgaccatttttcttaagtaaggttttgccatattattttaaaagaaaaatcwtaactctgctatgtatctgttgaatgtagaagctaaacgacgttctagttctattttatcttacttgcacctctttgcaaatgttttcacttcttgtaggagacagttggtggactgtagtgaggcctctcaagaaaccaaatcctcattagaaattgtctaattacacagattaaagagatcaggaaggtttggttgcaccagaactgagaagacagagaaggaaccatgttcctacacatgagcagagtattttgcaatcttttgctatagtaattacaagtttggaagacctgagttctttattcctgaataagctatttggcctagggggaaagttgtgatcttaaaatgcaatgctttaagtttcgccattaacttcctggagtcaacttttctgttaccctgcatttacacacaggagtattcttatattcttgagtaatattttttcccaaggtctccagaaattccattttttttattctaagaagatttgagatcaaatattaagtaagtttttatttacttattatatgt

SEQ ID NO: 628094 - DNA, 642 bp, Homo sapiens
taagaattgaatcataaaagtagcttaaagaaattaaaaaatgtataatctgaccatttttcttaagtaaggttttgccatattattttaaaagaaaaatcataactctgctatgtatctgttgaatgtagaagctaaaygacgttctagttctattttatcttacttgcacctctttgcaaatgttttcacttcttgtaggagacagttggtggactgtagtgaggcctctcaagaaaccaaatcctcattagaaattgtctaattacacagattaaagagatcaggaaggtttggttgcaccagaactgagaagacagagaaggaaccatgttcctacacatgagcagagtattttgcaatcttttgctatagtaattacaagtttggaagacctgagttctttattcctgaataagctatttggcctagggggaaagttgtgatcttaaaatgcaatgctttaagtttcgccattaacttcctggagtcaacttttctgttaccctgcatttacacacaggagtattcttatattcttgagtaatattttttcccaaggtctccagaaattccattttttttattctaagaagatttgagatcaaatattaagtaagtttttatttacttattatatgt

SEQ ID NO: 628095 - DNA, 642 bp, Homo sapiens
taagaattgaatcataaaagtagcttaaagaaattaaaaaatgtataatctgaccatttttcttaagtaaggttttgccatattattttaaaagaaaaatcataactctgctatgtatctgttgaatgtagaagctaaacgacgttctagttctattttatcttacttgcacctctttgcaaatgttttcacttcttgtaggagacagttggtggactgtagtgaggcctctcaagaaaccaaatcctcattagaaattgtctaattacacagattaaagagatcaggaaggtttggttgcaccagaactgagaagacagagaaggaaccatgttcctacacatgagcagagtattttgcaatcttttgctatagtaattacaagtttggaagacctgagttctttattcctgaataagctatttggcctagggggaaagttgtgatcttaaaatgcaatgctttaagtttckccattaacttcctggagtcaacttttctgttaccctgcatttacacacaggagtattcttatattcttgagtaatattttttcccaaggtctccagaaattccattttttttattctaagaagatttgagatcaaatattaagtaagtttttatttacttattatatgt

SEQ ID NO: 628096 - DNA, 584 bp, Homo sapiens
tctggcttgacttttggagactcaactcattgacccttctttactcttaaattccatcccttctaatactatattattaaagagaggtggacttaaaatcatagccatttaaagctaaatatcgaagatcatttaatgtgaaattttatttcacagataaacaaaatgtcttaatctattcctgctgctctaacaaaatgtcttaggctgggtamtttataaggctaagacatttacttctgacagttctggaggctgggaattccaagatcaaggtgctatcattcagtgtctgatgagggccttcttgctgcatcctacaaggagagaaaaatgaaaagatcaaaggcggtgactgctatgccctcacatggcagaaaagatgaaagggcaaaagaggagggggtagcactcagaagctccttttacaaagggcattaatcctattcactatggcagagctctcatgacctaatctcatctcagaggccccaccttccaatattatcaccttggtgattagctttcaacttatgaattgtgaagggatacatataagcatatcttctttattgtgcttttct

SEQ ID NO: 628097 - DNA, 584 bp, Homo sapiens
tctggcttgacttttggagactcaactcattgacccttctttactcttaaattccatcccttctaatactatattattaaagagaggtggacttaaaatcatagccatttaaagctaaatatcgaagatcatttaatgtgaaattttatttcacagataaacaaaatgtcttaatctattcctgctgctctaacaaaatgtcttaggctgggtaatttataaggctaagacatttacttctgacagttctggaggctgggaattccaagatcaaggtgctatcattcagtgtctgatgagggccttcttgctgcatcctacaaggagagaaaaatgaaaagatcaaaggcggtgactgctatgccctcacatggcagaaaagatgaaagggcaaaagaggagggggtagcactcagaagctccttttayaaagggcattaatcctattcactatggcagagctctcatgacctaatctcatctcagaggccccaccttccaatattatcaccttggtgattagctttcaacttatgaattgtgaagggatacatataagcatatcttctttattgtgcttttct

SEQ ID NO: 628098 - DNA, 450 bp, Homo sapiens
tgtaataatcacttctgtaatacataaattatatggtacaatataataagcaataatagtacatattacaaaatggtctgacatcttaacaaaaaacatcctaacacatggctattataccagaggaaaatagtattgtgaagtagctatacttgcaattcacacagaaaatgaatcataatgcattaacgcctttgaataatttgcaagtaaatgaaccaaaaaactacatggcaygacataggtacttacgttatttgagggtggggaggagtaaaggtaagggaaagaaaaattagaataaaatattgtgttagtaagtgcttacatgtgtgctaaaccatcttataacagttaaccagcagatgtctgaaatgcagttactttctatttattattttgctgatttgtttgctaataaaatgttattgcccaaatgacaatgttgaa

SEQ ID NO: 628099 - DNA, 450 bp, Homo sapiens
tgtaataatcacttctgtaatacataaattatatggtacaatataataagcaataatagtacatattacaaaatggtctgacatcttaacaaaaaacatcctaacacatggctattataccagaggaaaatagtattgtgaagtagctatacttgcaattcacacagaaaatgaatcataatgcattaacgcctttgaataatttgcaagtaaatgaaccaaaaaactacatggcacgacataggtacttacgttatttkagggtggggaggagtaaaggtaagggaaagaaaaattagaataaaatattgtgttagtaagtgcttacatgtgtgctaaaccatcttataacagttaaccagcagatgtctgaaatgcagttactttctatttattattttgctgatttgtttgctaataaaatgttattgcccaaatgacaatgttgaa

SEQ ID NO: 628100 - DNA, 450 bp, Homo sapiens
tgtaataatcacttctgtaatacataaattatatggtacaatataataagcaataatagtacatattacaaaatggtctgacatcttaacaaaaaacatcctaacacatggctattataccagaggaaaatagtattgtgaagtagctatacttgcaattcacacagaaaatgaatcataatgcattaacgcctttgaataatttgcaagtaaatgaaccaaaaaactacatggcacgacataggtacttacgttatttgwgggtggggaggagtaaaggtaagggaaagaaaaattagaataaaatattgtgttagtaagtgcttacatgtgtgctaaaccatcttataacagttaaccagcagatgtctgaaatgcagttactttctatttattattttgctgatttgtttgctaataaaatgttattgcccaaatgacaatgttgaa

SEQ ID NO: 628101 - DNA, 450 bp, Homo sapiens
tgtaataatcacttctgtaatacataaattatatggtacaatataataagcaataatagtacatattacaaaatggtctgacatcttaacaaaaaacatcctaacacatggctattataccagaggaaaatagtattgtgaagtagctatacttgcaattcacacagaaaatgaatcataatgcattaacgcctttgaataatttgcaagtaaatgaaccaaaaaactacatggcacgacataggtacttacgttatttgagggtggggaggagtaaaggtaagggaaagaaaaattagaataaaatattgtgttagtaagtgcttacatgtgtgctaaaccatcttataacagttaaccagcagatgtctgaaatgcarttactttctatttattattttgctgatttgtttgctaataaaatgttattgcccaaatgacaatgttgaa

SEQ ID NO: 628102 - DNA, 534 bp, Homo sapiens
tgattgtaattctgagtcttgcaacctttttgctttctgattactttatatgctgatttctgagtgtcttcggtatcatctaacgaactgaagtcaggaaaattgaaaatactttggatagaaagaattttaattggggtccaggctgaaaatgggttttccatattggacagaaatatatgccatcaaataccattacctctctttctcccttctgttctcacccccaacaactgaagctcaggagaatatttctaacttaaactgtgtcatgtactgggagcccaagttcacggacgtacagcaccttacaygcagttggaattgaattaaagtgctaaaatttaaatgtgaaaatatttactaagccacaatttcaaaatgtaacagtcttttctttgagtagctattatatattaggcactgtgctaggctctagggatgcaaagataaggtccacgactcaaggaacttactgtatagtgagaagaaagatagataaatagagtgtcaattgctaaaatacatacatat

SEQ ID NO: 628103 - DNA, 437 bp, Homo sapiens
gacgattttaccaaaataacaactcaagaaataaaccccgaggtgtagagttgtatatgtgatagctactaagcaagttcaaaaatcagcagaattttacacttcttccttctcctactcttccaytgaaagataaatgtccaagccatacattgtctatttaggctacaataggaaaggctgacccaggcatagcactaattaattagagagctccatcagtgtcaatttctctaagtatatttaaaaatcagttatctctatagtagccaccagaagtcatgtaagtctaaaaaaaagagctatgaaaatatgttcagaagaatatagtgccatcaacgttctgaggtcatattgtcttggaatcaatactaatagatttggaaacaaacaagaagtgagtcacatctgacacagtaggtaagatgtcatattgt

SEQ ID NO: 628104 - DNA, 437 bp, Homo sapiens
gacgattttaccaaaataacaactcaagaaataaaccccgaggtgtagagttgtatatgtgatagctactaagcaagttcaaaaatcagcagaattttacacttcttccttctcctactcttccactgaaagataaatgtccaagccatacattgtctatttaggctacaataggaaaggctgacccaggcatagcactaattaattagagagctccatcagtgtcaatttcyctaagtatatttaaaaatcagttatctctatagtagccaccagaagtcatgtaagtctaaaaaaaagagctatgaaaatatgttcagaagaatatagtgccatcaacgttctgaggtcatattgtcttggaatcaatactaatagatttggaaacaaacaagaagtgagtcacatctgacacagtaggtaagatgtcatattgt

SEQ ID NO: 628105 - DNA, 606 bp, Homo sapiens
ctgtcacaaattcctaccttgaagccttaacccccaatgtgactatgtatgaagatagggcctttaaagagaaaattaatattaaatgatgttacaaggttgggatcctaatccaatacgactagtgtccttataagaaaaggaagaaatactagggatatacacactcagagaaaaggccaagagagaatgcagggagaaggtggcctcctgcaagcaaaggagaaacaggagaaaccagaccttttgacactttgatctaggacatcyaatctccagaactatgagaaataaatttctgtcctttaagatagtctgtggtagtttgttatggctgactaacacagtctgaaaggtggagataggaaggcagagtggctagggatcttggggtaaaagaatcaatatggaaaagttgacaacctaggaatgccagtggatgcagacagaaatgacccaacaaaagcttactttctatagctaaaggaccaggagaggggtcctatagctaaaggaccaggagaggtgtagtctggtccctttctaaatatatttaaaaaaaccttttagataactgccacactctagccaaataccacagaaaaa

SEQ ID NO: 628106 - DNA, 572 bp, Homo sapiens
tgagccactatagggaggggtggccatagtctccatggaccagcagacttagtctttcctcctggtagctctgaggaatctgggcagcccagatgagggggtttcccctcagtgcagccagcacaccccctccaccaaggggcagccaaagttcttcattaaatgggtcctgcttcccatgccacccaactgggtgagacccctcaacaggggttgtcagacatcctatataggagcgtccctactggcatcagatcagtgacccttgaggtcagaggtatgagaggaaagagcagtcacccatctttgctcttctccaacctcctcgagtgacatctccaggcgtggaagtgaaccagatgaatagggcctgaagtgaacccacagcaaaccacagcagccccagagaagagggacttgactattgaaataaaaagaaacasaaagcaacagcaacagcatcaacgaaaaatgtacccatgaaaacctcatccaaaagtcagcagcctcaaagatcaaaactagacaaattcatgaagatgagaaagagtcaatgaaaaaacactgaaaac

SEQ ID NO: 628107 - DNA, 579 bp, Homo sapiens
caaaaacccaacaaattgctactggaatttctccaggatcacaataatatttagtcatgtgtttctgagaaataatttaattccctaaacaaaaataggtggaatttatctcagaagtttcctcctttctatcattcaaaactatggaataacactgtttattacttgttaaaatctttataggagactgtgaaatttgtatattttccatatgggattcgttgcgrtatgttttttaaaagctttccatttgtaaaagttttgaccaataaatgtgtttttatgcctgaaaaaaaaaaaaaaaacccaacaagccagaaaagagtggaggccaatcatcaacatttttaaataaaatcattttcagcccagaattttgtatctggccaaactaagcctcataagcaaaggagaaataaaatcattttcagacaagcaaatgctgagggaattcatcactaccaggcctaccttgcaagagctactgaaggcagtactaaatatggaaagggaaaactggtaccaccacagcaaaacacacaaaaatataaagaccaatgacgctatgaagaaatggca

SEQ ID NO: 628108 - DNA, 579 bp, Homo sapiens
caaaaacccaacaaattgctactggaatttctccaggatcacaataatatttagtcatgtgtttctgagaaataatttaattccctaaacaaaaataggtggaatttatctcagaagtttcctcctttctatcattcaaaactatggaataacactgtttattacttgttaaaatctttataggagactgtgaaatttgtatattttccatatgggattcgttgcggtatgttttttaaaagctttccatttgtaaaagttttgaccaataaatgtgtttttatgcctgaaaaaaaaaaaaaaaacccaacaagccagaaaagagtggaggccaatcatcaacatttttaaataaaatcattttcagcccagaattttgtatctggccaaactaagcctcataagcaaaggagaaataaaatcattttcagacaagcaaatgctgagggaattcatcactaccaggcctaccttgcaagagctactgaaggcagtactaaatayggaaagggaaaactggtaccaccacagcaaaacacacaaaaatataaagaccaatgacgctatgaagaaatggca

SEQ ID NO: 628109 - DNA, 533 bp, Homo sapiens
cactagggagactccttttgtggaagtcttacatgattaatcataaggaggtgggaagaggtgggtgcacatgcgcagtagctgtacatgcttgtttatacattgcatgtctcattagcatcttaaatctccacccaggggtgtgttttttaccatcatgatgagcaaagggtcagtctgaggacaggtaaaatcaaagtgtgcatgctgtctacaggggaaattccctactgaagatagctttgcttgaatgcacataactacgatgagaatgctgaggctcactgtgttgattgtagggtcccacggttgccatgtcccaacgacatggtcacttccttgactacctgtcctgcctcaatagtrgtagaggcacaatgaaaaaaatcagcaaaatatatagcatattgaattgttataaaatttatggagaaaactaaagcaggagaggtggaaaatgttcctgaaaagttggcatttgagtaaaacccaaacttgatagtgagggaagagtactcccaaaagagtcaaca

SEQ ID NO: 628110 - DNA, 533 bp, Homo sapiens
cactagggagactccttttgtggaagtcttacatgattaatcataaggaggtgggaagaggtgggtgcacatgcgcagtagctgtacatgcttgtttatacattgcatgtctcattagcatcttaaatctccacccaggggtgtgttttttaccatcatgatgagcaaagggtcagtctgaggacaggtaaaatcaaagtgtgcatgctgtctacaggggaaattccctactgaagatagctttgcttgaatgcacataactacgatgagaatgctgaggctcactgtgttgattgtagggtcccacggttgccatgtcccaacgacatggtcacttccttgactacctgtcctgcctcaatagtagtagaggcacaatgaaaaaaatcagcaaaatatatagcatattgaattgttataaaatttatggagaaaactaaagcaggagaggtggaaaatgttcctgaaaagttggcatttgagtaaaacccaaacttgayagtgagggaagagtactcccaaaagagtcaaca

SEQ ID NO: 628111 - DNA, 608 bp, Homo sapiens
taaaatttagcactttttttttctaaaaaaagagggttacttctttttgactatatctgtgctatgcttttactctgactattcatttaggacrctgttgaagcagctccctgacaaaatttatccatttatagtaaatgtttcacttcatggaaacctgctgaaatggaaagtattttggaaataaattaaacatagactatttttgaaaactatgcataggcagattcagcaaatgttgatagcttggaaattcctgatactttaaagggaagaggaaaaaaaaaaaactatacttctttggtaaaaagtttttagtttcccacatcttacctcatttttacagatgcagtgattaagaccctgatcaggtgtcccaaggagtctaatacatctgaaaagaaaacttcttagttattcatataaccttgaacagcacaaatcaaaatgcagaaataatatatctacatttaactctcttattactaaaatattatgagatcttctttatttcctttttctgtcaacacatgtaacaatttagacatcaaatttgagctatatgaagagcagggggcagccattagaagaaataagtagaaaacata

SEQ ID NO: 628112 - DNA, 608 bp, Homo sapiens
taaaatttagcactttttttttctaaaaaaagagggttacttctttttgactatatctgtgctatgcttttactctgactattcatttaggacactgttgaagcagctccctgacaaaatttatccatttatagtaaatgtttcacttcatggaaacctgctgaaatggaaagtattttggaaataaattaaacatagactatttttgaaaactatgcataggcagattcagcaaatgttgatagcttggaaattcctgatactttaaagggaagaggaaaaaaaaaaaactatacttctttggtaaaaagtttttagtttcccacatcttacctcatttttacagatgcagtgattaagaccctgatcaggtgtcccaaggagtctaatacatctgaaaagaaaacttcttagttattcatataaccttgaacagcacaaatcaaaatgcagaaataatatatctacatttaactctcttattactaaaatattatgagatcttctttatttcctttttctgtcaacacatgtaacaatttrgacatcaaatttgagctatatgaagagcagggggcagccattagaagaaataagtagaaaacata

SEQ ID NO: 628113 - DNA, 560 bp, Homo sapiens
aacgtaagttctaaaggtgaaaatggcgcaatagtggtcagagctgaataattcacttttctcagatcaggtttaattttacttgtactataaatgcatagacagatatttgctactctaaaaatacactgtgtatatttacttgctacagatgtctgatgagtcactgcacaatatgtttcggataggtgaaaatgatttgaatatctaacagaattgcaactaaaataaatatagtatttaaaaataaactacagaggttaaacatgctgagacattttaaggttagcattgcctacttgatgaacagaggattcatgatcatctctctgtttccctctgcatttctcattgtttgacatgctygtctcaaacagagcagatgttggctggttcttataagtagtttctgagagaccccatcttccttgcagttgtcaaccatcaggagctggggatcctgttcactattagtaggtagtcccctacattatacttagaaatcaggaaattttgtgtcaaaaatgaagttctaaagtgggagaggggaatgtaaattg

SEQ ID NO: 628114 - DNA, 472 bp, Homo sapiens
cctttatcatcaccatgactcatgactatacaaagacgttactattttgagatctagtatkataaacccaagaataactcacatttaaaaaaatacccaaatttgaatgtaaaacttcgtttgtgttcaatttattgggagataagagagtcaacaaatttctgatctcaaggagtttataatctaattaaagaaataaagtgacaattacagtgctatttgatcagtgctttgacagaaatagctgttctgtgctaaaagtaaataaaaagggacccaattagaaggagtggaggcatttatcttagaggatatgaaacatgagctgagttgtgatttacagataggagtgagccagaaaaaggtgataagaagcatacacaaggcagatgcaacaaatgaaccttgttgtaaacctgggagagggacttttgtaccctgagaattatttgtgatggtgaaatatgtaatg

SEQ ID NO: 628115 - DNA, 472 bp, Homo sapiens
cctttatcatcaccatgactcatgactatacaaagacgttactattttgagatctagtattataaacccaagaataactcacatttaaaaaaatacccaaatttgaatgtaaaacttcgtttgtgttcaatttattgggagataagagagtcaacaaatttctgatctcaaggagtttataatctaattaaagaaataaagtgacaattacagtgctatttgatcagtgctttgacagaaatagmtgttctgtgctaaaagtaaataaaaagggacccaattagaaggagtggaggcatttatcttagaggatatgaaacatgagctgagttgtgatttacagataggagtgagccagaaaaaggtgataagaagcatacacaaggcagatgcaacaaatgaaccttgttgtaaacctgggagagggacttttgtaccctgagaattatttgtgatggtgaaatatgtaatg

SEQ ID NO: 628116 - DNA, 472 bp, Homo sapiens
cctttatcatcaccatgactcatgactatacaaagacgttactattttgagatctagtattataaacccaagaataactcacatttaaaaaaatacccaaatttgaatgtaaaacttcgtttgtgttcaatttattgggagataagagagtcaacaaatttctgatctcaaggagtttataatctaattaaagaaataaagtgacaattacagtgctatttgatcagtgctttgacagaaatagctgttctgtgctaaaagtaaataaaaagggacccaattagaaggagtggaggcatttatcttagaggatatgaaacatgagctgagttgtgatttacagataggagtgagccagaaaaaggtgataagaagcatacacaaggcagatgcaacaaatgaaccttgttgtaaacctgggagagggacttttgtaccctgagarttatttgtgatggtgaaatatgtaatg

SEQ ID NO: 628117 - DNA, 613 bp, Homo sapiens
ctttggcggcaactgtatttctgaggagatgttgctttcagaactaggggtataaaattatgtgacatgaaaataacagtattgtatttttgattgattattaatcaaggtaacagtagaaaactaaggaaaataatcagatcagcagaagcatcttttttccgagacaactsttggaatactattttcccctggatgaataactaaccaggtaaatagaaagaggacagatattttgatcactacttgtatttctttgtaaatttttattttttcacttaataaatcatgaatgctttccatatcttaaatatgattccacaaaatgattgtaaatcctgcattttacttgtgctgcactaacatttatgtgcctacttcttcattaattgcagaaagagggaaataaaggtagggaaggagtgtaggaaccagaatgaatgaaaaagagagtgacgagaagacgagacaggtagatggtagagtgcagaagcagagagaatagtgagacggtaagctctattgatttggggtttgggtctcagtttactagctctcctgatgcagaccacctctatttgttatctgatttcaaattgtacatcgtctactt

SEQ ID NO: 628118 - DNA, 613 bp, Homo sapiens
ctttggcggcaactgtatttctgaggagatgttgctttcagaactaggggtataaaattatgtgacatgaaaataacagtattgtatttttgattgattattaatcaaggtaacagtagaaaactaaggaaaataatcagatcagcagaagcatcttttttccgagacaactgttggaatactattttcccctggmtgaataactaaccaggtaaatagaaagaggacagatattttgatcactacttgtatttctttgtaaatttttattttttcacttaataaatcatgaatgctttccatatcttaaatatgattccacaaaatgattgtaaatcctgcattttacttgtgctgcactaacatttatgtgcctacttcttcattaattgcagaaagagggaaataaaggtagggaaggagtgtaggaaccagaatgaatgaaaaagagagtgacgagaagacgagacaggtagatggtagagtgcagaagcagagagaatagtgagacggtaagctctattgatttggggtttgggtctcagtttactagctctcctgatgcagaccacctctatttgttatctgatttcaaattgtacatcgtctactt

SEQ ID NO: 628119 - DNA, 512 bp, Homo sapiens
attctgtgtcataaagctttctctgactcccctagtaagacataactacactgcccccaggcttccactgaaccctctacacacagccatattggcaattataatcctgtatttggacctgtctgtcccccattgaattgtgaactgcttgagaccaggaacagcatctttacactgaagtattctcaacattttgcataataactgaaacacagtagatacccccaaatagttcctgaacaaattaacaaatgaatgaatcaacctcttttaagggctcaacaacagattatctgcttttkggggatgggagtgggtattagctatctatttttatcttcccttccttcctctttccttcaatcctgtaattcctttcttttcaattgaaggtttaaaaaattccagtttatctccctgtttagaagtgtatgggagttttgaagatgctgatttgcataggtatatagaatgaacaagtaaatcacacatataaatgaatacactccttg

SEQ ID NO: 628120 - DNA, 567 bp, Homo sapiens
atagaaaaaaaaagctacagggcaatccacctggcctgaggatcagtttgtctcttgtactcactgtactgaggcacacagcagaacctggaacacaattagtgcttaactgtggttcattgagtgaaagaataaatgaatgttaccccatagagattcacttwccatggttcaccccaaaagtctgatttcctttttagcttgctgcattaagtgcttggcaccttgccttcctttggcacctcctctcataaatatggccttctaactatcagcaaggcagctttccagacttgtttcctacatacatttggttttgttctagaaaactgattctcagcccaactagctgtagtcctggccttctggcttttacatcactagttttactctttgagaccacagacatttaatgtaaatgtcaactgtgtctacccaaaatgttgttctctacctattctcttcgcatcttccaagagactcatttgtagatgttgctaggcatgaccaataatctgtgttccaataatttgaggtttgttttgtttcatttttcagcatttccag

SEQ ID NO: 628121 - DNA, 584 bp, Homo sapiens
gaaaatggcaacaacaaaatgagggtggtggagagttttaagacatgagccttggagaaaattcaagagctaataaaaaccacaccagagaaattaacagaggatgacttgatagagatgagtgcttctgatccagtgccaaatggtgaggaagatgtagaaaaagcagtgacagaaaacaaattgacattagacaatttggaagaagtgttttgattagtcaagattgctttagacttattttatggcatggacccttctatgatacaggcactgaaatgaaagcaaacagtggatgaaagattggyaccatatagaaacatttttacagaaatgaaaagtcaaaaaaaaaaagaaaagaaagccagacagaaattatgtctttctgtaaagttacatcaagtgtgtgcctgtctctcctgcctccccttccacctcctccacctcttgtactgttgtcacccccagaaagcaagactaacccctcctcttcttcttcctcctcagcctactcaacatgaagataaggataaaggcttttaaaatgattcacttccacttaatgaagtaaatacattttctct

SEQ ID NO: 628122 - DNA, 587 bp, Homo sapiens
ttggggatattactctaaaagcacagccaaaaaacaaaaacaaaaacaaaaaaacagataggcaaagggattgcatcaaactgaaaaatttctacacagcaaaggagacaatcaacagaggtaagagacaacctacaggatgggagaaaatattttcaaaatgtacatctgatayggggttaatatccaacgtatataagaagctcaagcaatagcaaaacaaaagccaatttaaaaaatgggataggatctgaatagaaattgctcaaaagaagacattcaaatggctaaaaagtatattaaaaatgttcagcattattaatcattaggaaatgtaaactaaaaccacagtgatacatcacctcacacatgttaaaatggctattatcaaaaagacaaaagataagtgttggcaaggatgtggagaaagaggaaccctcgtatactgttgttggaaatgtaaagggatgctgtcattatggaaaacaatacagaggttcctcaaagaataaaaagtgggactaccatatgattcaagaaacccatttatggatatatatccaaaataaatgaagtcagtttgtcaa

SEQ ID NO: 628123 - DNA, 548 bp, Homo sapiens
acctcactgtggcaacaccagattttaacaactatgcacacagaaaagcaccatcacaagaacaaaaatcaggcaagcaatcacagtacctcatttttgacttcatrtcactacaagaagcattgaagaggaatggaaagacagccttgaatctccaacaccacctctcccttatgagcagctgccatgtggcatggagagagaatctgtgcactttggggagggagagaccagtgattgagtactttacattgaactcagtgctgctgtgtcacagcagagaataaagctgtgctgaggtcagccagcacccatgaacagagaaagcatttggaccagccctagccagaagggaatcgctcacagcaatggttggaacttgagtttctcagtaagccttgccactgtggactgaagtgatctgggttctcaggtaaacttgaagcctaggacacatggattgcaatttctaggcaattccgcatgctagactgggcttagagccagtggactagagtggcacatgacctagcgagacaccagctgcc

SEQ ID NO: 628124 - DNA, 548 bp, Homo sapiens
acctcactgtggcaacaccagattttaacaactatgcacacagaaaagcaccatcacaagaacaaaaatcaggcaagcaatcacagtacctcatttttgacttcatatcactacaagaagcattgaagaggaatggaaagacagccttgaatctccaacaccacctctcccttatgagcagctgccatgtggcatggagagagaatctgtgcactttggggagggagagaccagtgattgagtactttacattgaactcagtgctgctgtgtcacagcagagaataaagctgtgctgaggtcagccagcacccatgaacagagaaagcatttggaccagccctarccagaagggaatcgctcacagcaatggttggaacttgagtttctcagtaagccttgccactgtggactgaagtgatctgggttctcaggtaaacttgaagcctaggacacatggattgcaatttctaggcaattccgcatgctagactgggcttagagccagtggactagagtggcacatgacctagcgagacaccagctgcc

SEQ ID NO: 628125 - DNA, 624 bp, Homo sapiens
gtgtgagccactgcacccagcagaagtttttttaaagggcttctcaaatctatagagagatatcaatattcaagtacaaaagggttgtggaacactaagcaaatttaacccgaagtagactacctcaagacatttaataatcaaacttccaaaggctagggacaaagaaaggatcctaaaagcatcaagtgaaaagtaagaaataacatacaatggagctccaatgcatctggcagcacacttttcagtggaaatcttacaggccaggagagagcgacatggcatatttaaagtgctaaaggaaaaaaaaaaaacttgaatagtatatctagtgaaatatgttccattcgtgaaggacaaacaaaagctaagggatttcatcaataccagacttgtcctataagaaatgccaaaaagagttattcaatctgaaataaaaagaggttaatgagcaagaagaaatcatctgaaggttgaaaactcactgataatagtaaacatagaaaaacacagaatagtataacacggcaatgatggtatgtaaacyactcttgtcttaagtagaaagactaaatgatgacccattcataaacaataactacaatgacttttcaaggcatggac

SEQ ID NO: 628126 - DNA, 593 bp, Homo sapiens
cagacagaaaatcaacaaacatcagatttaatttacactacagatgaaatggacgtaatcaatatttacagaaaatttcatccaacagctgcagaatacacattcttctcagcacatggwtcattctcaaggatagatcatatgttaggtcatgaaacacaccctaaaccttcaaaaaattaaaataatatcagacatcttctctgataacaataaaataaaactacaactcaataacaaaaggaattttggagaccataaaaaaacatggaaattaaacaatgtgctcctgaatgaccagtgggtcaatgaagaaattaagaagaaaattgaaaaattgctttgctatcgtgaataatgctgcagtgaacatagtgtgaatgtgtctttatagtagaatgatttatatttctttgggtatatacccagtaatgggattgctgggttgcatggtatttagacacatgcaagcatattttcacgcagcagaatgcacaatagcgaagacatagaatcagcctaaattctcatcaatgatagactggataaataaagaaaatgtggtacatatacaccatggaatactatgcagc

SEQ ID NO: 628127 - DNA, 596 bp, Homo sapiens
cttgaggggatggatacccaattttctatgatgtgattattaggcattgaatgtctataccaaaatatctcatgtaccccataaatatatatactgacggtgtacccacaaaaattaaaaattaaaaaaacacaatgggatgccattaaggcctaaaaaaaagatggaaatcctgtcatctaggacaacatgagtaaacctggaggacattatgctaagatgtgcacagaaagatcaataccgcatgatctcacttatacatggaatttwaaaaaattgaccttatataaactgagagtctaatgggggttacaagggtactggggagatgttggtcaaaagataaaaagtttcaattaaaagcagtaagttctggagagctattgtacccatgatgactacagttactacattcttgaaattatcaagagagtagaccttaaatattctcactataacaaatttataagtcttaggtgatagatatattattttttctttatcatttcatttcacaatgtatacatatatcaaaacatcacactgtgcaccataaatataggcaatttttatttgttaaatttaccttaataaag

SEQ ID NO: 628128 - DNA, 606 bp, Homo sapiens
ctcattcctggagctgtgtgtgaatccttatgtagtaccaagtccaggtttggttgttgttttcttgttttgtttcgttttggaagagagaggatgtctaaaagggcacgtatatctgattttgggcattattatatagccaccttgaaaactgatgacaaattctcatggacattgtcagtacatctctcrcttaatgtccagcaggaatgccatctttcattcccccaaagtattaagatactcataagttccccatatttcagatggagagtgagatggacccaggtcttcactgtccaatatgatagctactagccttacatggctattgagtaatagaaatgcagtagtcagaattgaaatgtgctgttaagtgtaaaatacacatctattttaaaggctttgcaggaaaaaagtaaaatatctaattagtatttctgtattgattacatattgaaacagtgttttagttatgttggattaaataaaatgtagtgttaagttactttaatgttagctgttttgtatttattttttaaaaaaatctattggaaaaaatacttaaatagcttgcattggtggcttacatttctattagacagt

SEQ ID NO: 628129 - DNA, 606 bp, Homo sapiens
ctcattcctggagctgtgtgtgaatccttatgtagtaccaagtccaggtttggttgttgttttcttgttttgtttcgttttggaagagagaggatgtctaaaagggcacgtatatctgattttgggcattattatatagccaccttgaaaactgatgacaaattctcatggacattgtcagtacatctctcgcttaatgtccagcaggaatgccatctttcattcccccaaagtattaagatactcataagttccccatatttcagatggagagtgagatggacccaggtcttcactgtccaatatgatagctactagccttacatggctattgagtaatagaaatgcagtagtcagarttgaaatgtgctgttaagtgtaaaatacacatctattttaaaggctttgcaggaaaaaagtaaaatatctaattagtatttctgtattgattacatattgaaacagtgttttagttatgttggattaaataaaatgtagtgttaagttactttaatgttagctgttttgtatttattttttaaaaaaatctattggaaaaaatacttaaatagcttgcattggtggcttacatttctattagacagt

SEQ ID NO: 628130 - DNA, 511 bp, Homo sapiens
gaaagtagcaatatagaggaaaagcctccctatccaatacaggagtgtgaagtgcccttccacaggtgatatttggtgaaagtgaataataaagattgacttcaggaaaaatcacaggtaaatatcatagagtctgagaacaatggtgtgcatagcagaaactttcaataacttccccatatttcctctcattcattattcagtaaacactgcctgcttcctcctgaaaacactcagacagttcctcaagattattctaatagcaagagtatctccaacccagcaggacagaagatgaaggggcctggatattattgtctcaaagaatagcctttaactgaaataagagagaacmcaaacaaatggaaaaacatttcatgctcatggacagaaataatcaatatcatgaaaatggccatacaacccaaagtaatttatagattcaatgctattcccatcaagctgccattgactttcttcacagaattggaaaaaaactactttaagtttt

SEQ ID NO: 628131 - DNA, 587 bp, Homo sapiens
cactcctgaagtcagcgaggccacaaacatttgaaggaaccaactccgcacacaccatctttaagaactgtaacactcactgcaagggtctgcagcttcattcgtgaggtcagtgagaccaagaacccaccggaaggaaccaattctggacacactaccacagtgtctaggttacattaaaacaagcacagtaataataacaatagcaaacaatagcaccacttctcgtaagtaaagtgctttctggtttgtaaaacactttcatagatatcttctcctttgattctttcaacagcactataagagaagcaacagttgtggatacgctggcaaattatttggcattgcaatcctacccatctgtactcttgcactygctaatttctataatctagtttcatggctttaaggaaacatccaggcctagagcaatcaataaaactgtgtacaaaaatcgtttgatgcatgaacactcaatctttgcaacattaatttcaaacgggcacttggccaagtcacatgtattatcttagctcactccaccccaatgtctattttctttatctttctcccatccacaaatcatc

SEQ ID NO: 628132 - DNA, 663 bp, Homo sapiens
aagttttatgacaggaagtgctaaataaatggtctgttaaaagattgagtaagtaaaaaaatagagacattgatatgtcaagcaaggtagaagttagtatatcataaaatgatgtcatgctaccaagcagggtgagttcatgaaacttaccagagaatccaggcattggtcagcatttctagtggaagtgtttggtttatgtttatggcaaagaattatcctagaatgtaagcttcataagagcgtggctttgtccttstatcccactatgtcaccagatcctaatacagtgtctggtacaaagagagcatgcacagtttttaaataaatggataccacaatgattaaataaatttgtcatctagtctataataatctcactcctattctgaagccactggtatcatagggtgccctagaaataggcatattttaaggaagacatttgaacagtccctttaaattttctcaagcttcctttaatgaagcaaagaaaaattcagttgcattttgtatttctcagttaggaatggtctggccacggggcacagtgatatttttaaatgcagggaaaataatccaccagtttaatctgcacaatgtttaacacaaatatcttctccattaacaatatggtgcgagagagagtcggggggtcattag

SEQ ID NO: 628133 - DNA, 553 bp, Homo sapiens
agttctcaaaagcctcttttataaggatattaatcccattcacatgggcagagccccctcgtgatttcactacttctccaaagtcctctcctcttaagaatatcaccttggactttaaatttcaacatgtgaattttagaggaacacataaattcaaactgtagcaatatacatagaaaaaataagctaaaagctaaattgataaatttctatagtaattagggaatttcaacaattctgtctcgagattaatataatagatcaagtgtttgatctgtttcaaaaagttgcttgcttagactactgtcagaaatgaaatttgagaytgatcttgaaggctatagacatacagagtagaaaaaggcattctgtacagtagactttctaaaaatgttttaaaatatcaaggtttagggcatcattgcataattgtgtcacatatggatatttggagtagctttctttttcttaaagaaactcatctgtttgataaaataggaaagtatcccacactgaaaatctgtattgccatgacttgccaccatgtttatga

SEQ ID NO: 628134 - DNA, 482 bp, Homo sapiens
ctgggtttacaagcgacttggaatttctttgaagctactttgagatatgccttttaatgccggatgttacaaaaatcctttatttgtaaatataaccaaatgaagagataaaatttccagatatttagctgtctttgtaaaaatwaaaaaaaattgtaaagtcaaaatgtttcctttaatcttgaattctaaactcaggtatctaaatacagatgcaaattcttaataattatatctgattgcattaaacaagggctacataatcaggatgatttcctttgatctttcctaaaactgcaggtatttattgagctgtctctgtaacttttgatgtacctattattataaattataaaatattattgaatatttcagaatagattatcctggaatatgccctgtcacaaagcgtaggtcccagttatcaacaaacaagtctattgaaataaggacttttcattaaaagttagaactctgtagta

SEQ ID NO: 628135 - DNA, 482 bp, Homo sapiens
ctgggtttacaagcgacttggaatttctttgaagctactttgagatatgccttttaatgccggatgttacaaaaatcctttatttgtaaatataaccaaatgaagagataaaatttccagatatttagctgtctttgtaaaaataaaaaaaaattgtraagtcaaaatgtttcctttaatcttgaattctaaactcaggtatctaaatacagatgcaaattcttaataattatatctgattgcattaaacaagggctacataatcaggatgatttcctttgatctttcctaaaactgcaggtatttattgagctgtctctgtaacttttgatgtacctattattataaattataaaatattattgaatatttcagaatagattatcctggaatatgccctgtcacaaagcgtaggtcccagttatcaacaaacaagtctattgaaataaggacttttcattaaaagttagaactctgtagta

SEQ ID NO: 628136 - DNA, 479 bp, Homo sapiens
aatggagggtttctattttcatcatcaacacactgctgttcaggaaaataaggctcaaagcttatcttacttaaggtcacattgatagtagtgactgaagcaggagaagaaacctagctgtcttggtctaatttctatctttcaactacggtgctatactgactgtaaatagtagaatttatcacttgaaaaataagaaaatttagcataggaaagtttagaatcattcccaagatcataaagatgattaaaaaaggaatatacattttttgaccccaaattctgagtgtttttcctactgctcttgcaccttcacccagcaaatccagaggaattgattccacaatttagctctttgtagctccagtgtgaaacttakctatagacctatttttacctttttaaaatccagacactgattaatgtgttctgttcaacaatgtgccctctactttggaactcacacattcttcctccca

SEQ ID NO: 628137 - DNA, 401 bp, Homo sapiens
aaatctttgtttgaactctaaaaataactttttactcatctcctcctacttagcaagtatatctgtaaccaacaataacactttttatactagtcaatttgcccaaatatgtattttttatttttctaagctgccttatttttagattatgaaaaacataattatcaaactgcactattgatatttattaataaacartatgaacagtggaaagaacatgggttttagaatcctgatatttaacaagggtatgaattcccacttacttactggagggcctagagcaaggcataagtcttttctgactcattagttaagtgggaagaataagacccattcctggtatgagataacgtttagaaaatatttggtgtttagtaggtagttaatatagttttcct

SEQ ID NO: 628138 - DNA, 602 bp, Homo sapiens
tggagacaagtgcatccccagatctcagggacctccccctgcctgtcacctggggagtgagaggacaggatagtgcatgttctttgtctctgaatttttagttatatgtgctgtaatgttgctctgaggaagcccctggaaagtctatcccaacatatccacatcttatattccacaaattaagctgtagtatgtaccctaagacgctgctaattgactgccacttcgcaactcaggggcggctgcattttagtaatgggtcaaatgattcactttttatgatgcttccaaaggtgccttggcttctcttcccaactgacaaatgccaaagttgagaaaaatgatcataattttagcataaacagagcagtcggcgacaccgattttataaataaactgagcaccttctttttaaacaaacaaatgcgggtttatttctcagatgatgttcatccgtgaatggtccagggaaggacctttcaccttgwctatatggcattatgtcatcacaagctctgaggcttctcctttccatcctgcgtggacagctaagacctcagttttcaatagcatctagagcagtgggactcagctggggtgat

SEQ ID NO: 628139 - DNA, 622 bp, Homo sapiens
tacatacaggtggacaaactaattgctatattgtcaagaaatctgactttcactactgagaaattattaaattctcaaacattagagctgtaaaaaactcaaagtcatcttttctagtcctttaatttttcagaggaagacccagagactcagggtaaaagaaatgtaactggctatgctcagattttataacattataaaagccacactggtaattgatagagagatgtaatctacagaaaatttaattgccaaatggaaaattcccagaggatttttagaccaactttgccctgttgcattcccagtttggtcccaatataggccttctgcaagaagagatcaatgccgaaccgaactgtgaaagyatgaacaatcccggcccagattaattatttggctttgtccgtgagcacacagtaggtacattagacaacagatgtgtcatatcaccccgactgcaaggaccagattttgaggtacaccatagacatctggggatgttcaaaccgatgtgccaaaggagaaaacatttcagaagtgtcgacacatttgagggaacagacaagtcaaacttcaaggtgaagtatgggctgtcagctatctccaggttgtaaataca

SEQ ID NO: 628140 - DNA, 587 bp, Homo sapiens
cagcttaagaccaacctcacaaatccttttacctaattaaaacttttcagagtggccaggcacaatggctcacacytgtaatgccagcactttgggaggctgaggtgggcagaccacctgaggtcaggagtttgagaacagcctggacagcatgatgaaaccttgtctctactaaaaatacaaaaattagccaggcgtggtggtgcgtggctgtttttccagctacttgggaggcttaggcaggagcatagtttgaacctgggaggcagaggttgcagtgagctgagatagcaccactgcactccagcctgagtgtcagagctagactctatctcaaaaaacaaacaaacaaacaaacaaaaaaaactttgcagagaatataaacagtgatccttatcattcctggcctagtaaaacatcttctaaaagcaaaaaacaaaaacaaaaacaaaacaaaacaactccttaaaagttaactgctgacagggtagagaaaaggagagaagtttaaagtgcagggttggaaagacgcctggggaaagaacctcttattcttaatgcaaatggttcctttcccctgggtttgg

SEQ ID NO: 628141 - DNA, 589 bp, Homo sapiens
gaacctctgctggcacagtgtggaaggaaaatgtggggctggagtccccagagtcctaactggggcactgcctagtggagctgtgaaaasagtgccagcatcctccagaccccagaatggtagatccactgacaacttgtatcatgtgcctggaaaagctgcagatgctcaatgccagcccatgaaagcagccacgagtggagccatacctgccaaagccaaaggggcagagcttccccaggctgtgggagcccacctattgcatcagcatgacctggatgtgagacatggagtcaaaggagatcattttggaactttaaggtttaatgactgcactattggattttggaattgcatagggcctatacccctttgttttggccaatttctcccgtttggaataggtatatttacccaatgcccataccttcattttatctaggaagtaactgacttgcttttgattttacaggcctataggcaaaagggacttgccttgtctcagatgagaccttggactcggggttaatgctggaattaagatttttggggactgttagaaaggcataattgtgttttgagttgtgag

SEQ ID NO: 628142 - DNA, 451 bp, Homo sapiens
tataaactttataaatagagaaccctaccatactgtgaattgaaacatccaaataatgtaaggacttcaactattttctacctacttgacattaatacaygtcccataaaaattccaatatttggggacttgaaaaaatgatttttaatatttgtttaaagaaatgaacatctggccaggcacagtggctcatgactgtgataccagtactctgggaggctaagatatgtggatcgcttgaggccaggagttcacaaccagcctggacaacatggtgaagccctgtctctacaaaaaaaaaaagaacatcaaataatgaaaaacaggaaaaacttaaattcacagatgtcaaaacaaattacaataattaaaactatagttcttacacaagaaaaaacaggaaaaacagctaaaaatagaatgcatttacatataagaattttttacatga

SEQ ID NO: 628143 - DNA, 602 bp, Homo sapiens
caccacacctggcccatagacatgcttgtgaatatttatttgtagggatgctcaccacatttttatctgtaatagcaaaaatttttaacaagtatgaattatgaatttaaatgtctatataaattagaatatatttgtacattgaatgaattttcacagtgttttgaggatatccaatggtcactatgtcatgttaggtataaaaatgtaatatgaaattgcaaacttgaacatatagtagaatcctaattctgaaaaaaaaactaaaaaggttgatagtttacaactatttccttctttcaacttggcaaattttctaacatctctatattacacatatatttcatttatgtaacacccggttaagagagttgactcctgcctctagtctttccattaagaaatatagatagtgtccttgtctctktaaaatcaaggtcattataattcactattattgagctgataagagaactttcaattaagtgcttccagattaagcactactaagtctatttgaatgtgtctgctccttcttttattaataattcattgatactttttataataattctttttcatgttgaaatcatgttttgaaa

SEQ ID NO: 628144 - DNA, 594 bp, Homo sapiens
tttctgcttttcatgttgtcttaaagtgagcatatattcattcttgcaattaggagtatttgattgtaaaactgctaaatacaaaaaaataaaacagataaatatagagtaatgctagcaagtagtaattcagttgaaggaaaaaaaatcacatcagtgaaatcayttttccatgaggcttttccatcaaatataaatttttatatagtttaagcacatttgtttacttttattcctcattattctaccctctctggtctagaataagtctaacatgggcatttttaaaaggccatacatatttaaacgaaaatgaaaagattaataactgtgcaagtattgaaactttaattatataaattctcaggcatgaaagtgttctttggcatttggctgtatgtaccattacttgtaatatggctccttattaaaagtcttttttatgcaagaagataaataatacaaacatcaacaatagagtggcatgggtttatttagatattaaactgttaattatgtatttgtcaaaaatcataaatcaggacaagttgagctggagaatgaaatattcagcctaggtctcattgtcatcat

SEQ ID NO: 628145 - DNA, 643 bp, Homo sapiens
acacagtaacacgcccagctaatttttgtatttttagtagatatgggatctcaccatgttggccaggttggtctcgaactcctgacttcaagtgatctgcccgccttggcctcacaaagtgctgggattataggcgtaagccaccgcacccagccttgacaggcttttccartacaccatgtcatatttcatttttgccaattatgttacatgctttagctttattttatttttttctttttcttatggaaaatggaaacagaactgcttttacttttaaacttatattggcttgttttaactcctcttatgttttatcataaaacactcaaaatatatatgcttttaattccaatccgctcattgtcttaaattgtattttcaaggaaagaatggaatgcacacaactgctttgattgtcatttctatttccagttactcatgtaatggcactgccaggctggttggttggcattgtcttaggtgacgcatggaccatttcccctgtcttccagctgtgggcgttataacattcttgtttttcagaatgccagtgaatgtaccctaacaaacaagaaaaggaaagactgaccaaatctgaacattttttagctggaaaacatgtaaatttaatacttttaat

SEQ ID NO: 628146 - DNA, 600 bp, Homo sapiens
tcagtcactgaagtattttgctttttaaaatttcctaacgatgaagtatttttcttactccaaacacattacaaagcactgtgacatttaawttttaaattcatttctgtatgtatttattcaatagtatcttagtgataggaggtgctcagtaaacatttgttgaataggagtatgactgaaacatactacttaaatagagtgctgtacaaaatggcactttattaataactacattggaatttttagaagtggctgatgcaggaacaaatgtaagccttttattcacagcaaagcttgagagatgaatagcaggcacatgtgatgtgtgatttattcatacacaccagtaggagatttataggcatctattaacctactcgagttccaattttgtcttaggctagtcttttgtcatgattagctatgttgtgagtctatgttaaataacaggctgtctgtactgaaatatgcaagaaatatgaagacagaaggccaaaattattaaatatgtacatcatttcacttaaactataggtatatatctgcttatgtgtgttacaaaaattagagatgtacatgcatctcacaaaagcaaag

SEQ ID NO: 628147 - DNA, 600 bp, Homo sapiens
tcagtcactgaagtattttgctttttaaaatttcctaacgatgaagtatttttcttactccaaacacattacaaagcactgtgacatttaatttttaaattcatttctgtatgtatttattcaatagtatcttagtgataggaggtgctcagtaaacatttgttgaataggagtaygactgaaacatactacttaaatagagtgctgtacaaaatggcactttattaataactacattggaatttttagaagtggctgatgcaggaacaaatgtaagccttttattcacagcaaagcttgagagatgaatagcaggcacatgtgatgtgtgatttattcatacacaccagtaggagatttataggcatctattaacctactcgagttccaattttgtcttaggctagtcttttgtcatgattagctatgttgtgagtctatgttaaataacaggctgtctgtactgaaatatgcaagaaatatgaagacagaaggccaaaattattaaatatgtacatcatttcacttaaactataggtatatatctgcttatgtgtgttacaaaaattagagatgtacatgcatctcacaaaagcaaag

SEQ ID NO: 628148 - DNA, 462 bp, Homo sapiens
catactgtggtgggacctgatctgattcctcctyttggtaaaacaccatcaaagaaagccactactttagctaatgcttctgattcatcccttcttcaattgattacgaattcaaacataattgattgcattggccacttccaaatgattatcccattagattggccactgtaacatggttgaggatctaaaagagcttgcatgcacatcacgctttgaaggagtagctcattcctggattttcccttaaggtcttaatgtcacttgtgtgctttgtatccatacatgcacagtcacaataaatatgagagaggaggagtgtggagagaaacaatccccactccccttcttccccaacccaggtttgcagagcataggaatagggtgcaaattttgtaactagggtgaatgcagcggcactgccaaagtcatatatgaacaccacatgtcaggggtgaggaa

SEQ ID NO: 628149 - DNA, 570 bp, Homo sapiens
ttcgatcacaaagcactcgccatcattgagacagtatgcaaggtccttgtctcggcagggtttgaagtgctcggatcgctctgtggaatatgtcgtcgtatctgtcagggaaagcacagggggaaacgctgtcagcagtacattctgacaccaacaactcctgtcactggctctggatctctgtatggaggccttctcatgggctctgacctctgggactctagacagacagctccaaccctccttggtactgaccaaatgcagctggctgtaaccactatattcaattgtcttatttctccactaaattttatctattggagtcactctggagaagccccatttgtggacaagtaaacactaaaagctgaatgatcctaagtcaaacaccccaaatccaccytcattaatttcagttttaacaaacatgttgtatgaaggattgaaacaacattcccttccctttattgctgccaaatataattaaacatctgatcaatgtatattgtgactgttctgtggaatccaatgtcagtttgggggatttttttttcagttacagctataatt

SEQ ID NO: 628150 - DNA, 579 bp, Homo sapiens
ttaattatttgcaagattcattaattggcaacagcccttccagattttccttagaattaacaatattccactataatttatagattatgtgtcactcttcytcctcagcttgaaaagggcatacatatttcaaaatcacttttgaatcttgaaatttaaacattttccccaatgacatctattttaatgcacatgatttaaaacatgagcttttgatataaaataaagatagtttgaaagaaaaatagcagcctctaagttttcatatggttcttcctcctggggatatttctagaattgaaaacacttaagagggtgcagaattctttgtcgagtgcttgcttttgcttatttagaaatagagggacaatggcagagaggggtatgaactctcctttatcagacctgccttctgggctcatttctatatcttatcaataatatgactttggacatacaattccaaatctctaggtcgtagttttcccatctgtaaaatgggaaaaccctcaacctcaacaaattttttggggggttaaaagtgaactaatatatgaaaaacaattttgtatgccctga

SEQ ID NO: 628151 - DNA, 553 bp, Homo sapiens
aacagtcacacagaatcaatctctctatgggaaatatttaaaattcaagagctctgagcaaaaaattcaatatgaaacggtgcacagttgactgctactctggctgctgaagtatattaactcatgatcagttagttaacttttcctttaatttcttattatccatttattgatattcactgatcatgcttctaagaacagctttcattaacataatctacagcataaaaagtgagatccttattttataatcagtggttttaacaagctacagacttcaagtgcaatacaatggcaaagcaattacaatcaattaatttccatctgacaactgctrtctctagtggttaccgccccattctaccaactgatttctccatcatgttatcatctatcagcacattacagaggatcagagacccaagtcaatggctctgcaaaagtctggggtgggaaagctcagatatcaggcttaacatgtactgaggctttccatttccatagcttaaagaatctccaaattaatttaaaatgcacatgcttaaccttcaca

SEQ ID NO: 628152 - DNA, 516 bp, Homo sapiens
tcactcttactgaggttttctatcacttacaaccaaacaaagcctactaaagagatgctaataattttggatgatatcctcctacatttgtacatctgattaaagttcatgtatgtattcatacatctatttgtttaattttcaacatayaagatacactacaaaacacataaaatagaacataaataagaatgagccaaaaataaaatgtaaggtgcaattctttattttctttctgtgccctaaggtggcacagtgtgctctaatgtatccagctgagtgttttattctgaagaagaaacacggaacatttgtgagaatgagaacatggataagatctaatgccaaactataaaagttatgatcctaaacaaccttggtgtatcttagtaatcaaaaactctcatctgtgagcaaattcaacacttttggaagcttgtttatattttttaaagctatgccacttttaagacagtccaatacactaagctggctatgctatatggtactattttg

SEQ ID NO: 628153 - DNA, 516 bp, Homo sapiens
tcactcttactgaggttttctatcacttacaaccaaacaaagcctactaaagagatgctaataattttggatgatatcctcctacatttgtacatctgattaaagttcatgtatgtattcatacatctatttgtttaattttcaacatacaagatacactacaaaacacataaaatagaacataaataagaatgagccaaaaataaaatrtaaggtgcaattctttattttctttctgtgccctaaggtggcacagtgtgctctaatgtatccagctgagtgttttattctgaagaagaaacacggaacatttgtgagaatgagaacatggataagatctaatgccaaactataaaagttatgatcctaaacaaccttggtgtatcttagtaatcaaaaactctcatctgtgagcaaattcaacacttttggaagcttgtttatattttttaaagctatgccacttttaagacagtccaatacactaagctggctatgctatatggtactattttg

SEQ ID NO: 628154 - DNA, 620 bp, Homo sapiens
ttgtttgtatattaatgatccaaatatacatatacacatatatatatatatttatattactcataagaaatttaaaaattctgcaatagatgtcatggagccaataaaggacttcaggcagggaaatgtcctgttgagattagtaattttgggatgtaatttttgkttggggcaggagcatcagtgatggggtgaagagattgaagctggaggcccaagggtcagtgaggagatgggagctgagaagaggagatgggctggacaggaagctaggaatattcatctcactggaggatgcggggactgagaggggaagtctgccttgatcccaagattgggggtgattagggggctatgtggatagcagtgccattctcagagacaggtgctgtaagaatagttttggggagaaagatagtaaatctgatttgagtttattgagtgggagatatgactatacaagtctaaaattgatcttgcaaagtgggtaggctgataactgtcttttttattttttcctattttgttgatgtgaaaactgtggctcacagaggttgcttgaatgaccaaaatagaaaagagccagggagatatagggctggtcttgaacccaagatgac

SEQ ID NO: 628155 - DNA, 483 bp, Homo sapiens
tgagcaaaatgctctctctctctctgtcttctctcaatatatgcctgagggcaccactgatgttgggaaaccatattctcagttggctttttaaatagctatacagcagcaagtggaaggggcgttgtatttagaagccatgacatgaatatggcctattttccttgatcatgttagtattgttaattaacatactgaccatttagtactgttgtgaggatttaggaaggaaaggagctaactaacattaactgatggcctcctctgtgcttgataatttactgatatgctctcactacctcttcagaacatgtcaaggctggataacygggcaaagtcatgcagctaccacatggcagagaaccaacccctcaactgcctgaatccagaacctatgcatttgtacaagcttgtttatctgcactctcttgtagtgtatttacttaacaagccaagttagattgtaatcgaaagcaggtgctg

SEQ ID NO: 628156 - DNA, 483 bp, Homo sapiens
tgagcaaaatgctctctctctctctgtcttctctcaatatatgcctgagggcaccactgatgttgggaaaccatattctcagttggctttttaaatagctatacagcagcaagtggaaggggcgttgtatttagaagccatgacatgaatatggcctattttccttgatcatgttagtattgttaattaacatactgaccatttagtactgttgtgaggatttaggaaggaaaggagctaactaacattaactgatggcctcctctgtgcttgataatttactgatatgctctcactacctcttcagaacatgtcaaggctggataactgggcaaagtcatgcagctaccrcatggcagagaaccaacccctcaactgcctgaatccagaacctatgcatttgtacaagcttgtttatctgcactctcttgtagtgtatttacttaacaagccaagttagattgtaatcgaaagcaggtgctg

SEQ ID NO: 628157 - DNA, 501 bp, Homo sapiens
ctgactttgcagagattctatcaacttatttaaataggggaccgttattgaatttttacctgttccccagcagatagaatcaamtgagacagcatgtgaaggagccctgtaaacagtcaagcactgcactttattgacaagtttatcctttatagaactgctggtgttctgtgagcccattattgtactcactaaatattagctactcaaacatttgctattatgatgtggcagggaaaattgtgaagtattaatttacatttatgcatttcctcttgcccttatccaaaaaggtagcaggctctgggcttcctggcctgcaatacacttctgttcctcattttatctcttccacgctgccaaactcatggtgaatatttaagaggcagaggccctctcagggaaacaagtaaaaatgggatatgttttcctttgatctgaagacaatttgcagtcctggaaaaggaaggaaggattttgaatcctgctgaagagggaact

SEQ ID NO: 628158 - DNA, 543 bp, Homo sapiens
atcattaatatttgcagtaaagatatctttcagtgagagtcaagaaacttggtagaaatcgctgaggccttgaagccagatagaggtagatgaaagatctgtcctcactactcatgctgtgggtaacttcacacaagtggctgaaaccctctaggcttcaattttctcctctcttgagaatgtattataaggataatatgagacggaatgtgtaaaacacattataagtactcaataaaagagaacgataattatttaacagtgttagctacagggacagaaatcatggagagttcaatagtactttgttaagactggaaagattctgcaccctcacaatagagttcgtcagaggcccatgactgcctaatggcactttgcaaagaaagctgataagctggaggcaggttccagcagtgcccagaactcagccaggtwaaacagcaatgctgtgtctcagtgacaaacctcagtgtcctctggcaatggtcacatttgctgttagctccagctctggttgctgtcctgcctgggttcagctca

SEQ ID NO: 628159 - DNA, 541 bp, Homo sapiens
acagctaacctgccccattccccagtctgctgtccacacaattccctggttctcccaggggcctggttctgcggctgtctttcttttttgatggtccctgcacctctctgtgcaagagctgacagagactccaggctcctctgtggtcctcttgttgctggactttttccttagttcagctaaaaacgggatccttgtcacatgaccatgaaagattaggcacacagacacttcgaagggtgagaagggcaggctttattggrtgaaaaggggaaaaagggaaatagtgactctcagcaaagcaagagtcctgcaagtagacttcctacctcacagattgaaacccatttgaccaccctggaactcgagaggccaggcgcctctcccctacaaacggtccgaacttcccacggctccaccccattctcccagtgtgcaggcctgttggaggctctctggggatctctttaaacttggctgtctcactctctgttacctggttgcctgctggctgtcaacccacctgaactattgagagatc

SEQ ID NO: 628160 - DNA, 617 bp, Homo sapiens
aaatttgtgatattacagttaatgtttcctaagagtgggcaaataatgacagggaattgttttaattcagttgaaagaattataatgataggtaaatgtaggtatacattgggaacgttgtggtttcagtttccagaggtttgagaccactgcaataaagaaaatggtgcaataaagcaagtgactagaaatgtttgttttcccagtgcatatacaagttatgtttacactatactgtagtctataaaatatgcaatagcatcatgtcaaaaaatgtacatatcctaattaaaaaacactttattgattaaaaaaaggtaacaatcatgtgagccttcagtgagttataatcyttttgctggtggggagtcctacctcaatgttgatggctgctgactgatcagggtggtggttgctgaaggttagggtggctttgtcagtttcttaaaataagacaacaatgaagtttactgtatcatttgactcttcctttcacaaaatatttctctgtagcatgtgatgttgcttaatagcattttacctacagcagaactgctttcaaaattggagtcaatcctctcaactactgccactactttatcaaataagtttgtgca

SEQ ID NO: 628161 - DNA, 592 bp, Homo sapiens
aagcaattcatgagcaatcaatctgccttcactttttcacctatttttattcagaaagtcacttagtctggaaaatgtcgttcatatggttgcatgccctattgttaagtgaatragtgtttcaagggctttcctgttaggtttatttcatttagctctgttgcagcattacgatgtaagtgcttaccacaaaggtttgctaatgagtgcccttaatttgtattcagatgggagcaaagagaaggaaaaatacacaagaaggagtcttgtaattatgctacataaaattattaggcaatttagaaaattgtcagtgggaaactgcccatcatgcataaaaataattttgattttgatgtacagagtttaatgtaagagtgattgtagggagaccatgttattaatttttcccttaattatccaagcacacttgaatttattttaaggaaagtgatactttataaagttgagtcacgctactccagagaatacttgttttcgttctgtgacaaagtttattttgcagggcttgctgtgaactgtataattggtaggacgtgaaagaaccattaattatgtccttccccttccc

SEQ ID NO: 628162 - DNA, 588 bp, Homo sapiens
accttacataatacacaccctttctaggtacctacaggtcttctgcaaaagcagccatacaatcttcagattgtgaccaagttgcttttaaaattctcatccaggttgcctcttttttctctctcttggttgtagcaattctcatcagtagtgctgccaaagttgaatcctctttcgagcacatgcaaaaaaaaaaaaaaaaacaaaaaaaaaacccacgaaactaggaaaagcattagaattgccccatgtgaattccactcacatttcaaagccaatacatgtaaaagattaaatgaaaatatcccatctactgttatcacactctgctgtcttcaccaatgtgaactgagaataagagatggcagcttttcaatgtattgcctarattcctctggcttgtagtgctcccgtcatttctatttcctaccatgcttctgtgataaagcgagaaataatatgccaaaatgccactagcattcaatacagggtatgctgtcctctacaattagcatatttttttctgatagaccaagtgtttaggatgcaatgatttataggtccaggaaatatatagacagttgcttg

SEQ ID NO: 628163 - DNA, 584 bp, Homo sapiens
ttgtgtttgagtcttgcctgttgtctttgggttctcctagagactccttcttaaatagttcattagccttgtagttttttgttctagcctgttattatagaagagtcctattgatgtggtgataagctgccgtgagaggggaagcattttacaaacctgtgattagatctgaaccttttagtgaacatgtgtccctgagatgtgaccatcacaaataattcttggctttccaccttcctctaaggtaaaacgggttttgctagagtctaaccaacctcagacaaaggaaatacccaactccagcccactctagcctttyggctcaggtagtattatttccattgagggcagacctttcttaagaacagagcactctgggtatatttcaaaatacaacaccagaggtttttctcccatcttcactctgagacccctggtgggactcctgaaggtaaaagttatgaaagtgtgtgagggctcccgctaaagctgggacaagaggaattttaatttctcattatagtccacgctcagtctccagtagtgagtaagttcatttttaatgatttatgactgttgttgtc

SEQ ID NO: 628164 - DNA, 649 bp, Homo sapiens
tacaaaggactggtattaattcatctttaaacatttggtagattttatcagtgatgtcatctgggcttggtcttttattgtaggaggttttaaaattactaaactgattttatttatttgctatatatattcagatattttatttcttcttaagtcagattttatagtttgtacccttttaagaatttgtccatttcattaagattatttaatttgctaacaacagttgttcatagcattccttattcttcttattttcctctaagtttggaagtgatatctcctctttcatttctggctagcaatttgaacttctgtattcatggttagtctagttaaaawtttttcaatttggtcgatctttttaatgagctaaagttttgttttgttgagtttctctatatttttagttctctactattttttccaatctaatctttattattttcttttcttctgcttatttagtttgctcttatttctccactttcttaaggtatatgtttaggttttgatttgagatatttcttcttttttaatataggcatttgtgcctattaatactttactaagcacagcaatagctgaatttcataattgttggtacgttgttttttctgttaattgatctgaaatgatttcctaattc

SEQ ID NO: 628165 - DNA, 649 bp, Homo sapiens
tacaaaggactggtattaattcatctttaaacatttggtagattttatcagtgatgtcatctgggcttggtcttttattgtaggaggttttaaaattactaaactgattttatttatttgctatatatattcagatattttatttcttcttaagtcagattttatagtttgtacccttttaagaatttgtccatttcattaagattatttaatttgctaacaacagttgttcatagcattccttattcttcttattttcctctaagtttggaagtgatatctcctctttcatttctggctagcaatttgaacttctgtattcatggttagtctagttaaaaatttttcaatttggtcgatctttttaatgagctaaagttttgttttgttgagtttctctatatttttagttctctactattttttycaatctaatctttattattttcttttcttctgcttatttagtttgctcttatttctccactttcttaaggtatatgtttaggttttgatttgagatatttcttcttttttaatataggcatttgtgcctattaatactttactaagcacagcaatagctgaatttcataattgttggtacgttgttttttctgttaattgatctgaaatgatttcctaattc

SEQ ID NO: 628166 - DNA, 576 bp, Homo sapiens
tcctctttcatttctggctagcaatttgaacttctgtattcatggttagtctagttaaaaatttttcaatttggtcgatctttttaatgagctaaagttttgttttgttgagtttctctatatttttagttctctactattttttccaatctaatctttattattttcttttcttctgcttatttagtttgctcttatttctccactttcttaaggtatatgtttaggttttgatttgagatatttcttcttttttaatataggcatttgtgcctattaatactttactaagcacagcaatagctgaatttcataattgttggtacgttgttttttctgttaattgatctgaaatgatttcctaattccccttgtgaatttttttcctttgactcctttgttatttaacagtgtgggttttgtttgttgtttgtttgttttttacttacatatatttgtgaatttcctaaatgtcctttagttaatgatttctaaaatttcatttcattgtgttcagaaaatatactttgtatgatttcaatatttttaratgcataaatgtttgatttatgtcct

SEQ ID NO: 628167 - DNA, 576 bp, Homo sapiens
cttcctcttagttgttttattcattattgaaagaaggtgatcaaaatatccaactattagggctgaattgtctatttctcccttcaattctatcattttcccacatatatttcagtctatgttgttaggtgtatatatgtttatattaataattaacgtatattactgatacattaaaaatttatcattataaatttcatccttttcctgagtaataatatttgtcttaaagtctctttcgcctgatagtatgttttgagttatttgcttagtttttgtccaggggattgcaatttacatgttaatttataacaatctaattggattagtagcaaattaatgtcaaagcttaaactcctctttgtwctattattgacatacaaattcattttttacattataagtcaatcaacacagttttatccttattgcttgatacagttgtttttaaatcagataggaaaagaaaatccttacaaaacaagtatatttatattatctgttatatttacctatgtactttaactagtgcttttatttcttcttgtggatttgacttcctgtccagtattcccc

SEQ ID NO: 628168 - DNA, 576 bp, Homo sapiens
cttcctcttagttgttttattcattattgaaagaaggtgatcaaaatatccaactattagggctgaattgtctatttctcccttcaattctatcattttcccacatatatttcagtctatgttgttaggtgtatatatgtttatattaataattaacgtatattactgatacattaaaaatttatcattataaatttcatccttttcctgagtaataatatttgtcttaaagtctctttcgcctgatagtatgttttgagttatttgcttagtttttgtccaggggattgcaatttacatgttaatttataacaatctaattggattagtagcaaattaatgtcaaagcttaaactcctctttgttctattattgacatacaaattcattttttacattataagtcaatcaacacagttttatccttattgcttgatacagttgtttttaaatcagataggaaaagaaaatccttacaaaacaagtatatttatattatctrttatatttacctatgtactttaactagtgcttttatttcttcttgtggatttgacttcctgtccagtattcccc

SEQ ID NO: 628169 - DNA, 627 bp, Homo sapiens
tagcccatttgttttacaaatcacagtgttcattgcaatatctttcaagctgaaagcactaaatcactttatattatggagacctggaagaatgcagcattatagcttggctggcagaacatgtatcagtgagatattgatctaaccaggaaaaagaaaagctgtgctgaatggactccacactgcaaggagtgttatctgcaggctgcagtgtttgttcaaatcccatattgctggaggtgaggtcatatatatatatatatatattttttgcaggcttcatatgattttagtgacagttatggccattttcttaatctgaaagattaagaaagttgtttgttgaagaatgtctgtagataattccttgacatcaggagtagctcacctttctgcaggaatgggttaaaatggaatgttgatcaaatgctctsacttcttaagtatggtttgtctatacttccaaacctgtatcacagaacccctctggaccctttggcaattcaaagtatcaacactgagacaaaggtgtagctgtcagtcggaggggatattgtgtagttgccttaagtagtgttttcctagaagacccctcagaagtaaagaaactgaaacagaagtaagaca

SEQ ID NO: 628170 - DNA, 627 bp, Homo sapiens
tagcccatttgttttacaaatcacagtgttcattgcaatatctttcaagctgaaagcactaaatcactttatattatggagacctggaagaatgcagcattatagcttggctggcagaacatgtatcagtgagatattgatctaaccaggaaaaagaaaagctgtgctgaatggactccacactgcaaggagtgttatctgcaggctgcagtgtttgttcaaatcccatattgctggaggtgaggtcatatatatatatatatatattttttgcaggcttcatatgattttagtgacagttatggccattttcttaatctgaaagattaagaaagttgtttgttgaagaatgtctgtagataattccttgacatcaggagtagctcacctttctgcaggaatgggttaaaatggaatgttgatcaaatgctctgacttcttaagtatggtttgtctatacttccaaacctgtatcacagaacccctctggaccctttggcaattcaaagtatcaacactgagacaaaggtgtagctgtcagtcggaggggatattgtgtagttgccttaagtagtgttttcctagaagacccctcagaagtraagaaactgaaacagaagtaagaca

SEQ ID NO: 628171 - DNA, 578 bp, Homo sapiens
ttttgtaaatatctcctctgtgtacatacttacatctcatttattatatataatgtacatttttacttctctcatttaaaaaaaaaatcctttctactagtttgcctgtttgattttttttttttttgaacagccttcttttasttttatttatatgtatgctatacttttgggctttttgcttcattaatgatagttttttacttctttaattctccatcctgttattttggttgattttgatgtttcctgtgtctcggaggctttgcagtgaaacttgattgttaatgtaattgagattcagaagctatgagatgtggctaatatcttatctgtaacattgcttaaacatgactttgtggaactcttgtggagatggtaactttttcctgaatgcttgaatcagctttgaactatgcaatcaatttacctgtaatccaggaggctgcaagaagataggtcccatggtaaatgattgcaattcttttatctggattcataaaaatcatctgctaaacacttaagacattatattatattagcttacattaagtactctgctttttcatattgcctca

SEQ ID NO: 628172 - DNA, 655 bp, Homo sapiens
tggcaatcagtatgtgcctgacagtgttctaactatgctatgctcatttaaccctcagaacaatctcattttacaggttttacagaagacattgaaatggagaggtaagttatctccccaaggtcacacgactgctcaggctggggccatgatttgatcccaggtagtatgaattctccaattactcaagtgtgattatcagaaagtgtattggtccattttcaccctgctataaagaaatacctaaggttgagtaatttataaaggaaagaggcttcattgactcttgttctacatggctggggaggcctcaggaaacttacgatcacagtggaaaaggaagcaggcacttcttacatggtggcaggccagagagcgtgagcgtgtgaaggagcaactgtcaaacacgtataaaatcatcagatctcgtgagaactcactcactattatgagaacagcgtggggaaaactgtccccatgatccagtcatctcccactgggtccctccctcaacacgtggggattatgggattacarttcaagatgagatttgggtggggacatgcccaaaccatatcagaaagtaaaggtagaagtcaagcttggagggaaagtgacatagtagattagtacatttttaaaagaaaaacctttt

SEQ ID NO: 628173 - DNA, 601 bp, Homo sapiens
tgattctcctgccctcagcctcctgagtagctgagattacaggcacacatcaccatgtccagytaatctttgtatttttagtagagacggggtttcaccatgttggtcaggctggtcttgagctcctgacctcgtgatctgcccacctcgacctcccaaagtgctgggatttcaggcgcgagccactgcacccggcccacagatatccatgactttaaaaaggaagaattttaaactctctaaacaggaaaatattgggaagcattgttatgaaaatagattttaaaacattttggttgaagacaatattgaagtacattaagaaaaatcctatcctaccatgacattggcaagtctgagagagcaaagagaaataagttggagtactgtgatttgaattaatcaggagcttgattctgtgaaatgagctgagaccttgtttctttatggctccaaagtaaactaattcatccattcattcaatacctatttagtacctgagcccttagcaaacatgccgcacactgtatgtaagttctggggctattgcttggaccaacataaacaaggttcttattcttgtaaaacttatcttccagta

SEQ ID NO: 628174 - DNA, 601 bp, Homo sapiens
tgattctcctgccctcagcctcctgagtagctgagattacaggcacacatcaccatgtccagctaatctttgtatttttagtagagacggggtttcaccatgttggtcaggctggtcttgagctcctgacctcgtgatctgcccacctcgacctcccaaagtgctgggatttcaggcgcgagccactgcacccggcccacagatatccatgactttaaaaaggaagaattttaaactctctaaacaggaaaatattgggaagcattgttatgaaaatagattttaaaacattttggttgaagacaatattgaagtacattaagaaaaatcctatcctaccatgacattggcaagtctgagagagcaaagagaaataagttggagtactgtgatttgaattaatcaggagcttgattctgtgaaatgagctgagaccttgtttctttatggctccaaagtaaactaattcatccattcattcaatacctatttagtacctragcccttagcaaacatgccgcacactgtatgtaagttctggggctattgcttggaccaacataaacaaggttcttattcttgtaaaacttatcttccagta

SEQ ID NO: 628175 - DNA, 536 bp, Homo sapiens
ctttgtgttggctcaatgacaccactcagctgaaccagaaaaatatcaaaaagtggtcagaggtgtcatcataaattcaaattacttacataacaaattggccctaaatatttccaaaaatcaataaaagttttgtttctccaatgacatcatttcttcagaaacccaacatgtataaccaatcttttctatgttcctctaacttttattctacttctttcacctgaatatcttgccatatcattcaaggagaaaatatatcccattaggcaagagccgatcatcttcccatcacctaagaaactaatatgcacaggatgcaaccacctcatctttctctgactcatcatatcagaaaaagtacctttccttttctcacaaggcaaatctgagataaaaggtttagatggcctrtaattctagcacctggggagaccaatgcaggcagactacttcagcccacgattttgaaacaagcctaagcaccttagggaaacccatctctaaaacaaatacaaacaaataagtagctgagc

SEQ ID NO: 628176 - DNA, 524 bp, Homo sapiens
gtttgcagtctcaggctgcttggtttatacatttccgaatgctcaaatatacttcctaatgtttcaaagagcctaattgtatcttttaacagctctcatggttatgtcattgtttctggattttcaagttctacctccttcatgggactgattctcagtatgtgaacacgttctcttctaccattctaaagactctcctaatatgggcagtttcttacaaaactataacacactcttactatgtgatccagcagttgcactccctaggtctttatccaaatgaccagaaagcttatgtctacacgaaaacctgcacacagatgtttatagcagctattaaaatagctgccaaaagttaggaggaaccaagatgtccttaagtagcttaatgataaatacaaatgtgatatatttagaaaatgaagtattaatcacctctgaaaagaaatgagctattactaactgtgtattacacactaaatgcatattactaaytgaaagaagccaatctggaaagttatcta

SEQ ID NO: 628177 - DNA, 570 bp, Homo sapiens
aagaaaccatctcttctacttaacattaacargaatgtcctcaagcagtgtcctcattggcaggggtggagtgggggagtttcttaaaaagtgaggtctctgcccaccacctagagaacctggaaatgtccatcaatgccacaaagtccaaatcaatggatagtgctccaatgtatggcagattagaccatctctccattagatctgggtttctattccattaaatgaaatggcttttctattacagggtcaggataagggatcaaaagggtcttacaactgaactccagtgtacagtctgcacagacactaggcttgtgcaaatatgccacggcgaggccccaggacccttgagccagctgaatgcactgagtttcaggaaacaatgagatacattcagcaaaaaagtgggcttcatgctgaaagaaatcaagccaagaacacacacatcactctgacacacacacacaaagacacacacacacatgcaaacacatatgcagacaccctagtggccaataggtcctttcaccaggaacctgcagacaggagagcagaaagcctcccagg

SEQ ID NO: 628178 - DNA, 559 bp, Homo sapiens
gtaacccattaaaatggataaaaacacttggaagtgctgtgatttcaatgatgattgtgcttttaatctgtgttgtttgtctttgtatagtcagcagatgtagatcctgactcctgctagaagtagctcaccgtgacaaagctgcccttgcttttatcaatttgcaactcagagaagggggacatgttgggagcaggccccccaaaatctggccataaactggccccaaaactggccacaaacaaaatctctgcagcattgtaacatgttcataatggcctttaggcccacactggaaggtggtgggtttacaggaatgagggcaaggaatacctggcccgctgagggcagaaaaccgcttaaaggcattcttaagccactgacagtagcatgagtgatctgtgccttaaggacatgctcctgctgcagttaactagccyaacatattcctttaatttggcccatcccttcatttcccataagggatacttttagttaatttaatatctatagaaacaatgctaatgactggtttactgttaataaatacatgggtaat

SEQ ID NO: 628179 - DNA, 547 bp, Homo sapiens
ccttggcacacagactgagaggtgcaatttatgctaaatatccccttaggggatcaatcaataatgattccataggaatcattgtgcagcacctctgtctgttctgcaatgcaatcttcctaaacaagtacattcattttttctggccaggttcaattttgtttacaaataggttttttagggcggtatacctcaattataggagcagatttattatggtaaatccagagatcagaaagcatgtgtaactgtgtcatagagtgattatatccaggcattattgccagccaagattgataaatatgcccaataagtatgattgttccctgtgtcagcccttactgaaggaatactcatggcagtggtgatcatcactatcatagctaccattaaattactcattgtgactggttgttccactttcctcaggttttcttttatcatcagygacagcttcttgatctgtccccaggtgggtggctgtgtttgacgggtattgctcatgacagttgaagtcctcctcagcatcagtatcaacctggctgca

SEQ ID NO: 628180 - DNA, 439 bp, Homo sapiens
ccacctccaatgctggggatgacaatttaacatgagatttgggaagggacacatatccaaactatattattccaccccttgccactcccaaatctcatgtccttctcacatttcagaatacagttatgccttcccaacagtctcccaaagtcttagcccattccagcattgtcttaaaagtctgaagtccaaagtctcatctgagacaaggtaaatctcttccacctgtaaaataaaaaacaagttagagttacttccaaaatacaatgggagtacaagcattgggttacaaaccccattccaaaagggataaataggccaaaaaaagggggctacgggctccacacatattcaaaactcarcagtgcaatcattaaatcttaaagctcaataataattttctttgactccatgtcccacatccaggccattggtgcaa

SEQ ID NO: 628181 - DNA, 637 bp, Homo sapiens
atgatgaaaccccacctctactaaaaatacaaaaattagccaggcatggtggcaggtgcttgtattcccagctactcaggagactgaggcaagagaatcgcttgaacctgggaggcagaagttgcagtgacacaagatcgtgccattgcattccagcctgggtgacaagagtgaaactccatctcaaaacaaaacaaaacaaaacaaaacaaaacaaaacaaaaacaattcacaagatttaactatttggaatggagaggaggctttatttcttataaggggttacagcctgcarcaggctgagaagaatgcctctggctaagaccagggactagggacaggcactttgaaggaatataggttggggtaggagcattatgctggacaagttagctaaacatacatcttcaacaggttataggaggagctatgaatatgcatgaaggtggtcctgaggcacatgtattgaaccaacatgcatgtaatacatgacccatgttcactttggggtggagtcctaacacttgaatgtattataattaggccctatcagtcaaaaggtctttacaggacacgaaggcactcaagtgtgcaatctctgtaaaaccagccagaaccagttcatggtgggtggtct

SEQ ID NO: 628182 - DNA, 593 bp, Homo sapiens
tcacactctggggactgttgtggggtgggggtaggggggagggatagcattgggagatatacctaatgctagatgacaagttagtgggtgcagcgcaccagcatggcacatgtatacatatgtaacaaacctgcacgttgtgcacatgtaccctaaaacttaaagtataattaaaaaaaaaaaagaattctgtttctgtgatgtatcacatttattgacttgcatatgttaaacaatccctgcatccctggtatgaaacccacttgatcatggtggattatctttttgatatgccactgggaactacaaaacattactgaatgaaattatggatgacacaaacaaatggaaagatattccatgctcatgaatgggtagartcaatattgtgaaaatgaccatactgccaaaagcaatctacaaattcaatgcaattcctatcaaaataccatcatcatttttcacagaactagaaaaaacaattctaaaatatggtaccaaacaagaccccacatagccaaaacaaaactaagcaaaaacaacaaaactggagccatcacattatctgacttcaaactatacagtgaggccat

SEQ ID NO: 628183 - DNA, 513 bp, Homo sapiens
aagccagtttgtcttgtagaactaaaggcaggctgtgaatttacaggcaaatggaactttggaaagtagggtaaaacataaaacaaaagccagcaaggtcagaaaatctgtggttagaactccaaggccacctgtcgacccatctgataagaaacttagatgtgtgttctctggatataccaaacctgagaatttctaggttcagaaataccacggcgtaaaactgagatataaagaaaactgtacaccaaaaatagaactccaacttgcttccctaattctgcttttggaaagcaagtagccattcttttacttcccaggaagaaaattgggagatcctttctcagaagaaactgaactggctcgaataaagatccccagataatacactgaagtcccacaaatgaaaagctagtttggcttycaaaacctcacactgagtgccaccagttaacagaagtcctgcttccaaataaagccagggaccaccacacattggagggaagcctccaa

SEQ ID NO: 628184 - DNA, 545 bp, Homo sapiens
gaagaaaattgggagatcctttctcagaagaaactgaactggctcgaataaagatccccagataatacactgaagtcccacaaatgaaaagctagtttggcttccaaaacctcacactgagtgccaccagttaacagaagtcctgcttccaaataaagccagggaccaccacacattggagggaagcctccaacaagagacatcaaaacaacagaaaaaagggattcatgggaccagtcaaaatcaggagcaaaacttacaaaaaaaatctgaaaacactctgaaaaagatataaaattcaatagaaatgttagagtaaaaagtcacagaaactgaaaaatcgaaggggaaaaattaaaaaccactgcaggtatactggtctaagcagctgagtgtctgaataacaagactatcagaaaaaaaagaacagagaaaataaaaaaattctcaagaagagatagtcttcagacttagtagcctcaataaaatgaaaagattcccaccaagctgttaygaaatttcagaatctcagtgagaaagaagct

SEQ ID NO: 628185 - DNA, 567 bp, Homo sapiens
caagctcagtctgttcttgagaactcaggcctgttcatgaccccacagtgggtctcctgtgctagggctgtgcctcagtagccgggtctgtggagtgggtggcttttttctgccctgctccagggtcatgaagcctgagtaacctctgactcacctcaggctcggcaggctccctgctggccatggggccatttctgctgctgcagcgccccctgctgkcccagaccacgtctgccttgtgcctgtcccctggagttcgttcccctccctccagatctggctctccaagccctgccccttccgtgccatccctcaggttctgcagggcactggccacttctgcacagccaggccttcccaccctacccccgagattcacacagcagggtccactccctcccaggcttggcttccccaggctgagggctgggcattggcacccttccacagaccacatgagtcagctccctccccacccaacaaggccagtgctggctctgtctgaggtccctttgttcaggtctcttctgaagaaaggcaccagaggctccagctctggccataatg

SEQ ID NO: 628186 - DNA, 570 bp, Homo sapiens
ctttgaagtacaggaaaggccctgcagacctctctttccttctcaggccacagaaagcatggggcccaggcatctgcatggctacattcaggtcgacccctgggctggcagtagttgggtttgggggaggatccaagctctggactgggtcctgctccatccctgccaccctggccttgatgcagagcccagaaccactctttggcatccaaagggcagggtatttggagaacatgctggcattagtacttcatgatgggagagatggcttctccagacatgttcaaggatagcagttaggagtttgggcaggaacagaatggaagaataggtgggctcctctaatgaaagacaggtttatgcccccctgggagatcccccactcatacygcccaaagcctgccaggaatggtggtggccaaaggccctgcagtgagcatggggggactctgatcctgggtcatttgggcataagaataaatgtaaatatgaccttacttgtcctcatcagttctgcagctctgtgtcacctcatgccaaggacatgagctcatttaattcccacataaa

SEQ ID NO: 628187 - DNA, 575 bp, Homo sapiens
  misc_feature 50: n = A,T,C or G
ccctagtccccagacccacagccccagaagattccatcctcacacactcntgctgcctccttccttgactgcccactggactggtgcaggagcctgttggcggttcccacattcgtctagctcctttccaaccctttccccacactgcagctaatgactttatcaggctcacatgtggttccttgctgaaaatcctgcaggggcttctcagtgcttytaggaggaagaacacatgtctctgctggaggtcctgcattatctgggccctatgacgaccccgttagatttcagggcgccttcccctcacttggaggtccagccatcctggacttcctttgttgacctttccctctgtctggagtgttctttcccatcccacctcattgcctggttgccacctactcactctccaaatctcagcccaggcacagcatctctagagaggcttgtcctgagcccccggcagggttgaatgcctctgctgcaagctcctggcagtctgcggcctcttctttgggccctttcttggttattactaaacaaacctttgggtgaccctatggcagtcttctctg

SEQ ID NO: 628188 - DNA, 575 bp, Homo sapiens
  misc_feature 50: n = A,T,C or G
ccctagtccccagacccacagccccagaagattccatcctcacacactcntgctgcctccttccttgactgcccactggactggtgcaggagcctgttggcggttcccacattcgtctagctcctttccaaccctttccccacactgcagctaatgactttatcaggctcacatgtggttccttgctgaaaatcctgcaggggcttctcagtgcttttaggaggaagaacacatgtctctgctggaggtcctgcattatctgggccctatgacgacccygttagatttcagggcgccttcccctcacttggaggtccagccatcctggacttcctttgttgacctttccctctgtctggagtgttctttcccatcccacctcattgcctggttgccacctactcactctccaaatctcagcccaggcacagcatctctagagaggcttgtcctgagcccccggcagggttgaatgcctctgctgcaagctcctggcagtctgcggcctcttctttgggccctttcttggttattactaaacaaacctttgggtgaccctatggcagtcttctctg

SEQ ID NO: 628189 - DNA, 555 bp, Homo sapiens
tcagcccacacagtgtcccctagagccggctcctgtggggttttgggttaaaagcctgccaagattggtttcttggtgcctcgwtgggccaggtctggagctctggcttctgggggtgaggctgggtgccggcatcctggctgagggatgggttgagaggcagcagttcatgtgcaggatactgcaggctggattagcaggctaagattgggatgggtgggaacttttcctgccagaaagagcccgggtccctgaaacagtggggactacgggatgggaagcagggatttcatcctgaacaatcagcccacccagtgggcccagcatcgaagcagtggggagagactgggtgggtgagatcagccaagtgtttgcagcaggtgctgagtcctggggtaaggtttgccccttgtggtcacctaaaatgaagtgcccatcaaaggcaagacttcaaaggccactggtgccagagaacagaattaagggcagaaggaattcaaggactgtttttaatggtaccagacagcttaaagaaaggaaatgcgatgaaaaatc

SEQ ID NO: 628190 - DNA, 606 bp, Homo sapiens
agatctaatgctttaattatgttgtgacatgacctgacatgggggtggcatttgatggattctctggtgtcatcagcatggccctgacataggaaagtggcagaaggcagggggtggggaagaggaagggctctcagtgggagacgtgtccttccagggccccctaccttcccctgctctctgtcttccaaggcagtcctgcagtagtggagactcaggagaggagggggagcagcccctgtgcaggggagggtggctgcrcccttccgggatggactggatcctgggggccccgtaggagtgcatgtgtgtgtgtacctgtgtgcatgtgcctagatacacagggacatgtcggagcgggtgagagggattcagacccatgtggtagaagtaacagctgcactgctgtctggcctgcagaggactaggaggtggaggccagggcaggacacctggctggtctgcatgtcctgggctgtcgtgagcagaaggagcagatgtactcaggcagcctgggagcaggcttagctcagcagagagagggctccctggccagggaatgcacagctttaaaaggcactgagcaaatgtctctgggaaggactg

SEQ ID NO: 628191 - DNA, 570 bp, Homo sapiens
agatctaatgctttaattatgttgtgacatgacctgacatgggggtggcatttgatggattctctggtgtcatcagcatggccctgacataggaaagtggcagaaggcagggggtggggaagaggaagggctctcagtgggagacgtgtccttccagggccccctaccttcccctgctctctgtcttccaaggcagtcctgcagtagtggagactcaggagaggagggggagcagcccctgtgcaggggagggtggctgcgcccttccgggatggactggatcctgggggccccgtaggagtgcatgtgtgtgtgtacctgtgtgcatgtgcctagatacacagggacatgtcggagcgggtgagagggattcagacccatgtggtagaagtaacagctgcactgctrtctggcctgcagaggactaggaggtggaggccagggcaggacacctggctggtctgcatgtcctgggctgtcgtgagcagaaggagcagatgtactcaggcagcctgggagcaggcttagctcagcagagagagggctccctggccagggaatgcacagctt

SEQ ID NO: 628192 - DNA, 495 bp, Homo sapiens
caaaagcttgtacatgactgttcatagcagcattattcataatagcaaaaaataaaaataatccagatgtcatcaactgatgaatggataaacgtggcatattcatatgatgaaatatgatttggcaataaaaagaaatgaagtactgatacaggctacaacacagatgaaccttaaaaacattatgctaagtgaaagaagccagttgtgaaggatcacgtaygattccatttatataaaatgttcagaataggcaaaactatatacagagaaagtagattagtggtggcctagggctggagaaattggtagaaaatggaagtgactccttaatgggtatgaaatgttaggggagagatgaaaatgttttaaaataaattgtggtaaaggttgcacaactctgaaaacaaactaaaatttgttgacttatacactttaaatgggtgaattgtgtggtatgggaattagatcttagaagagctgttaaagaaaaaa

SEQ ID NO: 628193 - DNA, 475 bp, Homo sapiens
ttgaggcccatctccatcatttggaagttctatgaactctttaatcttcagtttccttctctgaaatggatataayactccgcacctagaaggctgatacaagaaataagtgcgaccatggacttagtacttggtgctcaagccttcagtaaacagctacttagctgcctgttactattaatcatggttatttggatattcacaattttacttactgtggcaagcttgtaggaggtttttgttctgtttgggaagcggggtggcttttgctgctgttaattcagtgcaggatcgggcaggagtatcatctggaagggaagggaaatgggtggggtactaaattcaacaccctcagccctttcaacactgccaacaccaacctcagccctttctatgttttcaaggctgagcactgtctacatctgagaatctgcttccttggaaatgacagcatatccttccagggctaagctca

SEQ ID NO: 628194 - DNA, 578 bp, Homo sapiens
ttttgctacacaacaatattctgggtttattgaatcccctctaatttcctctattgtctgaatttggaaaagaactgaaaagcacattagacatttgtcctcttttcttacaaaaagcaaaaatgcattagagggcaagcmcgcccgctcctgcaggacaggtccatcccactcagcatcctcagtgggggtcctctgcaccttgggatattagccaattgagccaccaggtcaaaagacaagcaacactactcagggctacctcacaagaaacagctgctggacacagtctagacttgggttaacccaggggggtttgtttacttccgcagagtaagtgaggcagagatagcagacagctgtgccatgcccagacctgcccctaaaatatgtattcctgggtgggaaacaccaattaaagtctgacccacagttcttccctttccacctgggttctgtgccccagcatgaacatcctcctttaaacgtcggtggaaacaccagtgcaaacatcaatctactcagtgcacaccccttgcaaacaactgtcccttgggcctaaggttgtgcaaactggc

SEQ ID NO: 628195 - DNA, 345 bp, Homo sapiens
tgtcgaatgggaagaatcaagagcagaagtctagtgattatttttgctaaagcagagagattgtgaggcaggaagcaggggacaagagagaagccagctagatgattttggattttctatgaakgaaaatggagtgagctcacttcggaagcatttagaaaagttttactgcagagtgctagagtgtgggtgctctggagactactggaatcatgaggattactagaattggactaaacctcagtgactcattaataatctttattaatatgaagcatcaatatatagatatatatatatagatgtatgtatgtatgtatgtttttgacgttcacaatttgaata

SEQ ID NO: 628196 - DNA, 345 bp, Homo sapiens
tgtcgaatgggaagaatcaagagcagaagtctagtgattatttttgctaaagcagagagattgtgaggcaggaagcaggggacaagagagaagccagctagatgattttggattttctatgaaggaaaatggagtgagctcacttcggaagcatttagaaaagttttactgcagagtgctagagtgtgggtgctctggagactactggaatcatgaggattactagaattggactaaacctcagtgactcattaatwatctttattaatatgaagcatcaatatatagatatatatatatagatgtatgtatgtatgtatgtttttgacgttcacaatttgaata

SEQ ID NO: 628197 - DNA, 345 bp, Homo sapiens
tgtcgaatgggaagaatcaagagcagaagtctagtgattatttttgctaaagcagagagattgtgaggcaggaagcaggggacaagagagaagccagctagatgattttggattttctatgaaggaaaatggagtgagctcacttcggaagcatttagaaaagttttactgcagagtgctagagtgtgggtgctctggagactactggaatcatgaggattactagaattggactaaacctcagtgactcattaatawtctttattaatatgaagcatcaatatatagatatatatatatagatgtatgtatgtatgtatgtttttgacgttcacaatttgaata

SEQ ID NO: 628198 - DNA, 657 bp, Homo sapiens
tatatccattctgacaatctgcttttgagcagaggtttttagaccactttaatttataatgtaattattgatatgataaaagtttgctgtcatcatgctgtttgatttctattagttccagatcttctttgctttgcttttgttctttttctgcttccttcagactagtttagtaatttttatgatttagttttataggtatatatatatatatatatatgtataacttttttagttattgatctagttttatatttctttatgatttagtcatatctttttgtggtataagtttatttggttattaggtataactctttgctttgctgtcttagtggtttttttaggatttatagtgtatggatttacctcatcacaacccatcttcaagtaatattatatcatatcatagatggtataagaaattacaattgtgtattttcatttcttctcttccagccagatcccagcctggatctrtgggattgtagctttcattaagtttagaatgtatttagccaatttttcctcaaatgtttttttctgtctctcctcctacctgtttggagacttatatattacctgctgggagtttgctcatagttctctagtgtctcaaatttgtgaatcttttctttcctgatggcaaatcaatct

SEQ ID NO: 628199 - DNA, 689 bp, Homo sapiens
accaatatggcacatgtatacatatgtaaaaacctgcacgttgtgcagatgtactctagaacttaatgtataataacaacaaaaaaaatttccacccgtacttacacgcttgtggaagacattggagatggaattacctgactatgtgaagctgtgttttatctattattggtgaatataagcatatatgagcarccacacatgtatatattttttcagtattgtctagaaggtttcaaactttaagaaatgagctataaaacttgttaacagtgcacattctgattcagcagacttgaggtcatgcaattttaataaattctctgatgatgctgatgctggtggttcttggactgtacactgagtagcgaaggtatagagttttcattgaaataatttggaagaagagcaattggatagaatgtcaagacataacagagtcaagggaaagcattattttgattttatatctgagtatgtttttagccagaagaggagaagaaagaggttaaaaagaaaaaacagaatttatagatgcacgatattacttctgaacaagagaaagaaactggtaggaaaatttattttaaaaagtgttgaagggaaagaatcaagaccacagatccagatccggagattattttgctaaagaatagcaattgtgaggcatgaagtgggaggggggaaga

SEQ ID NO: 628200 - DNA, 689 bp, Homo sapiens
accaatatggcacatgtatacatatgtaaaaacctgcacgttgtgcagatgtactctagaacttaatgtataataacaacaaaaaaaatttccacccgtacttacacgcttgtggaagacattggagatggaattacctgactatgtgaagctgtgttttatctattattggtgaatataagcatatatgagcaaccacacatgtatatattttttcagtattgtctagaaggtttcaaactttaagaaatgagctataaaacttgttaacagtgcacattctgattcagcagacttgaggtcatgcaattttaataaattctctgatgatgctgatgctggtggttcttggactgtacactgagtagcgaaggtatagagttttcattgaaataatttggaagaagagcaattggatagaatgtcaagacataacagagtcaagggaaagcattattttgattttatatctgagtatgtttttagccagaagaggagaagaaagaggttaaaaagmaaaaacagaatttatagatgcacgatattacttctgaacaagagaaagaaactggtaggaaaatttattttaaaaagtgttgaagggaaagaatcaagaccacagatccagatccggagattattttgctaaagaatagcaattgtgaggcatgaagtgggaggggggaaga

SEQ ID NO: 628201 - DNA, 574 bp, Homo sapiens
gtacttcataacacatctgtgactataatgttacagacatgcctggtaaatttaataatgtgacaatacacattactagagaggtcttgtaaaggaaataactcaatatcagataaaggaaggaggctttactggaagaatattatattacctttaataaacactatgaaaatatacattttcacgtgacttcaactaaaaaactactaaggtaatgctattatcttttccccaaaagctcttgttctaaatatttaattcctacatgtaatagattacattacttctttatagcctgtttatgaatatttttagataacacaaaaatttgattaggtaaatatcaaacacgtttctcaacagatagtctaattttgtactgaagaaatatgaactctgtagagaatactttcttttaacaagtttaagtgacgccattttttaccctcctaactctcaaaaaataaatggtaggagagatatacctaatgctaaatgctgagttaatgggtgcagcrcaccaacatggcacatgtatacatatgtaacaaacctgcacattgtgcacatgtac

SEQ ID NO: 628202 - DNA, 601 bp, Homo sapiens
  misc_feature 1, 2, 3, 4, 5, 6, 7, 8, 9, 10, 11, 12, 13, 14, 15, 16, 17,18, 19, 20, 21, 22, 23, 24, 25, 26, 27, 28, 29, 30, 31,32, 33, 34, 35, 36, 37, 38: n = A,T,C or G
nnnnnnnnnnnnnnnnnnnnnnnnnnnnnnnnnnnnnnagatacttcatgagaagatcatcatccaagatacaagattattagaatctcctagggtaaaatgaagaaaaaaatgttaaagcatctaaacggaaaggagaggccacctaaaaagaaaagcccaacagtgaacctatcagcagaaacccaacaagacagaagacactagggactatattcaacattcttacagaaaaagaatatcatatccagccaaactaagctacaaaatcaagggagaaataaggttcttttcagataagcaaatgctgtgggtattgattactaycaaaattgtctcacaagtgttcctggaaaaaacactaaatatggaaaaaagaacattaccagccactggaaatacacatttaagtatacacaagagtgacactataaagtaaccacacaaacaagtctgcttaataacgagctaagaacacaatgacagaatcaaatccacacatatcaatactaacattgaatgtaaaccagctaaatgacatgaataaaaaggcacagtggtaggctggataaagaagcaagacccattggtatgctgtctt

SEQ ID NO: 628203 - DNA, 601 bp, Homo sapiens
  misc_feature 1, 2, 3, 4, 5, 6, 7, 8, 9, 10, 11, 12, 13, 14, 15, 16, 17,18, 19, 20, 21, 22, 23, 24, 25, 26, 27, 28, 29, 30, 31,32, 33, 34, 35, 36, 37, 38: n = A,T,C or G
nnnnnnnnnnnnnnnnnnnnnnnnnnnnnnnnnnnnnnagatacttcatgagaagatcatcatccaagatacaagattattagaatctcctagggtaaaatgaagaaaaaaatgttaaagcatctaaacggaaaggagaggccacctaaaaagaaaagcccaacagtgaacctatcagcagaaacccaacaagacagaagacactagggactatattcaacattcttacagaaaaagaatatcatatccagccaaactaagctacaaaatcaagggagaaataaggttcttttcagataagcaaatgctgtgggtattgattactaccaaaattgtctcacaagtgttcctggaaaaaacactaaatatggaaaaaagaacattaccagccactggaaatacacatttaagtatacacaagagtgacactataaagtaaccacacaaacaagtctgcttaataacgagctaagaacacaatgacagaatcaaatccacacatatcaatactaacattgaatrtaaaccagctaaatgacatgaataaaaaggcacagtggtaggctggataaagaagcaagacccattggtatgctgtctt

SEQ ID NO: 628204 - DNA, 619 bp, Homo sapiens
ttccacatggctggggaggcctcagaatcatggtggaggcaaaaggcatttmttatatggtggcggcaagaagaaatgaggaagaagcaaaattggaataaaataaaaaaataaaataaaaaaaaaggaaacccctgacgaacccatcagatctcatgagacttgttcactatcatgagaatagcatgggaaagacaggctcccatgattcaattaccttccccttggtcctcccacacacatgggaattctggcagatataattcaagttgagatttgggtggggacatggccaaaccatatcagaaccggtggtcgtgttagcatggggatgcgtaactggtgggcagaggactgtgtgcaccctctgtgcactttcacagtggctgctcagggcagaggtgggtccactattatttgtatccagttttgtgctggtggtagttgtggcacaggggaggggcactggtgcgagcagggctcacggactctgtgcccaccaacacttcaacagtgatggtaatgaggtgatgggaggggttatggggcacactcacacttgccacactgaatggcagggttcatgtgcacacacgtgctggtgggaaaagggaggtag

SEQ ID NO: 628205 - DNA, 561 bp, Homo sapiens
ttggggctgttgttgattggtgggagttcacttcaggcactattcatctggttcactcctgtgcctgccactgttactcaaggaaggtgtagaacagcaaagatgggttcctgctctttcctctcacatctctgacctcaaggagyacccacctgatgtcactaggaatgctcctgtataggatgtctgacgatctctgttggaggttctcacttagttggatgacacaggcagcaggacccatttaacaaagcaccttggcactcccttggtggagggtgtgtactgcactaggggaaacccacttatctgggctgtccagattcgtcagaagtagcaggaggaaagactaagtctgctggtccacagagactacagccacccctccccctagaagctcagacccaaggaaatcagatttctatccctgagcctctggctggagttattggagttcctgccaggaggccctgcccagtgaggagggacaggtcagcttcaggcctgaagaggcactctggccacagactaccacagtcagtgcgttgggctgtggggaat

SEQ ID NO: 628206 - DNA, 594 bp, Homo sapiens
tcatttgcagactctgtgggccatcaatgtccaccaagtattgaagttttggccatgttggggcttgcagaataggtattggttagatatggattcatcatcctgtatatattccatccagaattccctttaacctatgatttggatccttcctagggagacaacacggagaatataatcactttcagttcctgagtcctaggagtgccctctttcagggatgagtggttagaaaatcttttcctgccccttctctacatcagcttcatacacacacaagccatccagaaataaacatacaaacmaagcaaaagctgagctagactggcatatgtggatttcaaggaaattccccctgccccaaggattgctgcccctaaatcctccaatactgacaatctagaccaactcataagtgtctttcatgttcagacaagacccctgcagtctccttcttctttcttagaggggatctccagacagtaagatttctcgttgaacagggtttgtcttccatctcaatgagtgctcaacaatatctttaggaattctctgcaggcaggatttgaagatagttgccaaaaaaagttgcaa

SEQ ID NO: 628207 - DNA, 584 bp, Homo sapiens
agctctcaaaaactaatcaataaaatttgagaaatatctaacaagagtgacaaacataaaaagaaggcacacaaaacaccaatatcataaataaagccaaagatgtcttagcagtcctctaactgttaaaaagataataagaaaaagatatcaacaagtttacacccatacatcggaaaacttagaagaactaaagcaattcctcaaaacacacaaaataccaaaactcaaccaagataaacagataagtggaatagtcttataactattaaattaattgaatttgtaattaagcaactcctgcaaaagaaaaccccaggcttagatggcttcaataaagaattttaccaacatttacagatgaattaatacaaattttacacaagttcttctggcaaaattgaatagaaaggagcaattgctaactcattttttgaagttgtctttgtgttgttatgaagaaatatctgtgactgagtaatttataagtaaaaactgtttagttgactcatagatctacaggcagtaggagaagcatagtgacagcatttkcttctgttgaaggcttttatggcataagttaa

SEQ ID NO: 628208 - DNA, 497 bp, Homo sapiens
gaattctacagtgtataaagcagtatgctgacaagattaaatccggcatatggaatacagccacgcttctcaaagaattrctttcttggaaagttttgagcacagaggactatacaacctgtttttcaagcagaaattttctaaatgaagcagtggactatgttattcgtcacttgattcaagaaaagaacagagtaaagacaagaatatttctgcatgttttgagtgagcttaaagaagtggagcccaaattagccgcctggatccgaaaacttaatagctttggcttagatgccacaggacctttcttttctcggtatgaagcatctcttaaacagcttgattttagcatcatgactttcctctggaatgagaaatatggtcacaaactagactctatagaaggaaagcaacttgattatttctttgagccaacatcatcgaaggaagcccgctgtttaatatggctgctagaagaacacagagacaagttccca

SEQ ID NO: 628209 - DNA, 602 bp, Homo sapiens
cagtccctagggaaggggtgagttaagtaggcatgaagtagcacattcttactacagatctctagaatcctagcttcaggaggcctcatgacccccatggacatatgtgctggagggctgcttggagaattgactccaacctggactccaacctrtgtggagcccagagggtttggtatgaaaattgctgcagtggagcatggccaaagatgcccattccccaaggcttgccatgcttccctaggaggctttggcctttgttgactgtcaaacctgtacagaacatggctatgtggcctgtgggatggggccagtatgatctgaacactgccctgtctgaaagcctctcccatagccctgcctggccacacctgtttgagatgcagcctcagatgccaagctgggacatttctcagtggtccctgccatagtttctttgccatcagacccttcctaaccatcagaaagctactgtacaccagcccacagcctaccactaactgctttactgacaaacacttgcacacagtctcctctcactgattgaccagcacttactaacccatggcctctccccacttattgactggtgcacatgtgca

SEQ ID NO: 628210 - DNA, 602 bp, Homo sapiens
cagtccctagggaaggggtgagttaagtaggcatgaagtagcacattcttactacagatctctagaatcctagcttcaggaggcctcatgacccccatggacatatgtgctggagggctgcttggagaattgactccaacctggactccaacctgtgtggagcccagagggtttggtatgaaaattgctgcagtggagcatggccaaagatgcccattccccaaggcttgccatgcttccctaggaggctttggcctttgttgactgtcaaacctgtacagaacatggctatgtggccygtgggatggggccagtatgatctgaacactgccctgtctgaaagcctctcccatagccctgcctggccacacctgtttgagatgcagcctcagatgccaagctgggacatttctcagtggtccctgccatagtttctttgccatcagacccttcctaaccatcagaaagctactgtacaccagcccacagcctaccactaactgctttactgacaaacacttgcacacagtctcctctcactgattgaccagcacttactaacccatggcctctccccacttattgactggtgcacatgtgca

SEQ ID NO: 628211 - DNA, 606 bp, Homo sapiens
gttaattatttaaaatttttctctcttctgtcaagtgttgatagtattacatttcttaatttgtaaaacttgtttttttctggattttctaattacctttattttttcttgcatcgtctgctacattcataagtttctctaatttcttaaagatggataggcctggcgtggtggctcacgcctataatcccagcactttgggaggccgaggcgggcagatcatgaggtcaggagttcgagaccagcctggccaacatggtgaaacaccgtctctactaaaaatacaaaaaattagctgggtatggtggtgcctgtaatcccagatactcaggaggctgaggcaggagaatcgcttgaacccgggaggcagaggttgcagtgagctgaaatcgtaccactgcactccagcccagctgacagtgagagagaccatctcaaaaaaaaaaaatggataaaatggtgaatccttttccctgtctttttcttgatgcctctctcttggagccccccttccttccattcagackaagtgttccttaggcctctactgtatggctgggacttacttttattagtctttgcaatattaaaatgtcatgtttttgt

SEQ ID NO: 628212 - DNA, 575 bp, Homo sapiens
ccctgcccaggagctagctcaacattttgttatgccccacagaatgcattgctagttaactcaaagctattacacccagaacagggatggtttccattgatacatcactgcctagctgaaggggcagtcaacatcatcracttacataacaatcaccaacaatgttccagatagtaggctagattctaggcttatacaaagagaaatgaaatctctgcccacaagaaacttataaactagttctagaaggtctagttcagatttgggcatggtagtggataccaacattgataaaattatcattggaattaacacatcatgtaagtgctagcagggtacaacactgtcaattccaagaatagaaccaaatcctcctgttgaccttaataggtgtgggacatctccgggagagatgaggcccttatagagggtgattttgagagatacaaatgctatcatggctctcagacatactgagaaaggactgaaggtatctggagttggaggagggaggatccttgtatagttagttctatgttaaaggactgattggtaggttaggctgcagaaatagt

SEQ ID NO: 628213 - DNA, 575 bp, Homo sapiens
ccctgcccaggagctagctcaacattttgttatgccccacagaatgcattgctagttaactcaaagctattacacccagaacagggatggtttccattgatacatcactgcctagctgaaggggcagtcaacatcatcgacttacataacaatcaccaacaatgttccagatagtaggctagattctaggcttatacaaagagaaatgaaatctctgcccacaagaaacttayaaactagttctagaaggtctagttcagatttgggcatggtagtggataccaacattgataaaattatcattggaattaacacatcatgtaagtgctagcagggtacaacactgtcaattccaagaatagaaccaaatcctcctgttgaccttaataggtgtgggacatctccgggagagatgaggcccttatagagggtgattttgagagatacaaatgctatcatggctctcagacatactgagaaaggactgaaggtatctggagttggaggagggaggatccttgtatagttagttctatgttaaaggactgattggtaggttaggctgcagaaatagt

SEQ ID NO: 628214 - DNA, 575 bp, Homo sapiens
ccctgcccaggagctagctcaacattttgttatgccccacagaatgcattgctagttaactcaaagctattacacccagaacagggatggtttccattgatacatcactgcctagctgaaggggcagtcaacatcatcgacttacataacaatcaccaacaatgttccagatagtaggctagattctaggcttatacaaagagaaatgaaatctctgcccacaagaaacttataaactagttctagaaggtctagttcagatttgggcmtggtagtggataccaacattgataaaattatcattggaattaacacatcatgtaagtgctagcagggtacaacactgtcaattccaagaatagaaccaaatcctcctgttgaccttaataggtgtgggacatctccgggagagatgaggcccttatagagggtgattttgagagatacaaatgctatcatggctctcagacatactgagaaaggactgaaggtatctggagttggaggagggaggatccttgtatagttagttctatgttaaaggactgattggtaggttaggctgcagaaatagt

SEQ ID NO: 628215 - DNA, 607 bp, Homo sapiens
aatctttgtaggcttcatgatttgtgtaaactttggaatgtggttcttcaraaaacaaattattagtctgtgggtaactgcaggctaagttatttggctaattcctattgtgctatcatgacattccagagcattgctatttaactttgccagataagattttgcatgtcactgcagtgagagcagcttcttttgtacgcatacttttctccttcttttcctttgtgttgggaatcttcatagggtgatcccagtctagaaataccattttttcccttcaccattgcattgacaagttcttctggttttatgttaaattttatacttccttgtcaacatttctcttaaataatatattaatgcaatattttaaataaaatttttatataaacgtttaatgttataatagttttacatttacagaaaagttgtggagataatacagagtccccatatactctatccccagtgtgcccctattacattagtatggtacatttgtcatatcaaatgacctaatactgatacattattattaattaaaattcatactttattcactgtttttagtttttacctaatgtcctctttctgttccaagattcca

SEQ ID NO: 628216 - DNA, 536 bp, Homo sapiens
acaatatgtttcatatgtgaatgggtctggcttcactaataatcatagcttaaatatatatttgctgaattgaatcataatcttttagcatgagtgctttactgtggtaaaaccatgtgcttgaggtaaacagtaaacacggtagtaggactgagtgattctaatgccaactctgccacttactagctgtataacctggaacaagttacttaaactttagtttcctcatcagtaagtagggataataatagtactttgcagataaaacagttgcagagttagaacagtacttagcatgtagcatgcacttaataaatgtttgctattactattattattaaacttaatcttcaaaatagaatggttaatttggggcctaaaatagaacaaatgaatctgcattttcattctattatcagttcaaaaaataaaaaattccagagtcctcatgtctgctccatctctgattaagtggaaaaaaaatgggttggacccaagaaagccccaatattcyacacaaattttcttcaaaattc

SEQ ID NO: 628217 - DNA, 583 bp, Homo sapiens
ggaatttagacttagatcctgcagcagggggatcttctgaaggattttttcccttttgaaatttttgtactttataaaaatttgatatataatttagatgcaataaaatgcacaaattttaagcatacgggttgaagagatttgataaatatacacgcttttgtaactaccaccaaactcaagacaaatcaagatttccatcaccccctaaaattttctcttgtgcccttcagtcattctccagtacccctgaccctgagacaactactgttctgatttctatcacaatagctaatttttcctgttctagattacaatcatccattacaatttttcatatgtaygaatgaatatgaattttcactcaacatactgtcagtgagattcattcatgttgttgcatgtatcactagttcattcctttttagtgctgagtagcagtatttcactgtatggctctatcacattttttctatgaattctcccattgatagacatttgggtttttcctagtttggggctattataaataaagctaatattaacattcatgtacaagtctttgtgtagacctatattttca

SEQ ID NO: 628218 - DNA, 555 bp, Homo sapiens
agatcttacccatgaccaccaggtggtacctctatgagtctgcaagagccacagcattattgggcttggggtggccctaaagctgcagtgaccaaagacttagatcacaacactcaagtcccttcaaatacctggaaagccctcccaagaaggatgggttcaaataaacctagactgyggagactagtcaatacgtaactgttcaatgcccagacatcgatgaatatccacaagcatcaagaccttaccaaatgaactaaataaggcattggtgaccaatcctggagaaaatgagatatgtgacttctcagagaattcaacatagctgttttgaggaagctcaatgaaatccaagctaacacagagaagaaattcagaatcctatcagataaatttaacaaagagattgaaacaaaagaataaagaagaaattctggagctgaaaaatgcaattggcatactgaagaatgcatcagagtctcttactagcagaattgatcaagcagaagcaaaaattagtaagcctgaagacaggctatttgaaaatacacagtc

SEQ ID NO: 628219 - DNA, 526 bp, Homo sapiens
gtttctgtacataatgtttaatcttccaagcacatctagtgtctgtcagtttttaattggcatgtgtaggctgctctgtgactgaagacttttcaaaccagtcttacccccttcaggaaaaattccttgtgattgaatacttagtatctgccaggaaactggtactcaagatgttgaagctacagttactttatgatagcacacttcccttgatctgcttatttttattccatcactgtttacccttgtttttttaatttygtagccatacttatgatgctcttgatttgttggttatacaaattgattttttttaaaatccaaagataacaagtctttaggtatattttgtaccaaattaaattagaagtcaaaaattgtgctttcctagttgctacaaaggtaaataatggagagatttggtacaaaacaaaatccatatataaatgtatatatataatatatatataatgtactcatatatatatgagtacataaataaaggataaaatattttctcccccca

SEQ ID NO: 628220 - DNA, 621 bp, Homo sapiens
attgcctttgccaggccactgccaccattaccaccattgactcaaggtgggcagatgaattctagaaatccttagggagccaggataactgggtacccaatttggattgaccacgtgggcaacaggaatttgtctctaagattcttgcctttattgactycccggtgctgtgggaaagtcctatctatacgttgatggccagtgactcccaatcttccccatgatgggttggcagaaatctaattgggatttctttggttttgtttccttagacttttttaatgggaggtttattttgtttctgaataagaaaaagaaaagaataccatggcccttatgaaggtttatagagttttgagcagtatttcagccataaataagcaatcttagaagtctttgatcaactaagtagtcttaaaaatatgctttttagggggccaggtgtggtggctcatgcctgtaatcccagcattttgggaggcaaaggtgggaggatcacttgagcccgggagtttgagatcagccagggtaacatagcaagacattgtctctacaaaaaataaagaagagaaaaattagccaggcgtggtgggaggattgcttgagcctgagaggtcaagg

SEQ ID NO: 628221 - DNA, 621 bp, Homo sapiens
attgcctttgccaggccactgccaccattaccaccattgactcaaggtgggcagatgaattctagaaatccttagggagccaggataactgggtacccaatttggattgaccacgtgggcaacaggaatttgtctctaagattcttgcctttattgacttcccggtgctgtgggaaagtcctakctatacgttgatggccagtgactcccaatcttccccatgatgggttggcagaaatctaattgggatttctttggttttgtttccttagacttttttaatgggaggtttattttgtttctgaataagaaaaagaaaagaataccatggcccttatgaaggtttatagagttttgagcagtatttcagccataaataagcaatcttagaagtctttgatcaactaagtagtcttaaaaatatgctttttagggggccaggtgtggtggctcatgcctgtaatcccagcattttgggaggcaaaggtgggaggatcacttgagcccgggagtttgagatcagccagggtaacatagcaagacattgtctctacaaaaaataaagaagagaaaaattagccaggcgtggtgggaggattgcttgagcctgagaggtcaagg

SEQ ID NO: 628222 - DNA, 543 bp, Homo sapiens
tgcctatcatcactatctcaccaagcagttctttcttccttttcagaattatgaccagagtagcaattccttgcttgaattattctacagcctgagaaatgaaactgtcatcaagrcaacaattttaacttttccacatacttattgaatatcttttatgttctcaggtatgcatggaaatacagagaagaaaagacattacgtttagctaaaagtattcttttttcttttacataaatactgtagaacttgtactctaacaacctgtaggggtgtgtatgtgtgtgcgtgcgtgtatgtgtgtgtgcgtgcacgcgtgccaataaacctgactttatggtgctgctgtcaatttgcgctgatgattgagaatacagacagcaccaccataatatatcccatcatcctagctctcaggagggaacaatacaaagacattctgaaagccacagcattctgtgtcactcacaattcaaaagcttcacaaaatccaattcgaatggcagatgtgtcagtgtgatacccagaggagagaagaaggca

SEQ ID NO: 628223 - DNA, 595 bp, Homo sapiens
ccttcattattacaaactctagtatgacacactcactttctcccaaggtgcctatcatcactatctcaccaagcagttctttcttccttttcagaattatgaccagagtagcaattccttgcttgaattattctacagcctgagaaatgaaactgtcatcaaggcaacaattttaacttttccacatacttattgaatatcttttatgttctcaggtatgcatggaaatacagagaagaaaagacattacgtttagctaaaagtattcttttttcttttacataaatactgtagaacttgtactctaacaacctgtaggggtgtgtrtgtgtgtgcgtgcgtgtatgtgtgtgtgcgtgcacgcgtgccaataaacctgactttatggtgctgctgtcaatttgcgctgatgattgagaatacagacagcaccaccataatatatcccatcatcctagctctcaggagggaacaatacaaagacattctgaaagccacagcattctgtgtcactcacaattcaaaagcttcacaaaatccaattcgaatggcagatgtgtcagtgtgatacccagaggagagaagaaggcagaca

SEQ ID NO: 628224 - DNA, 309 bp, Homo sapiens
ctttggcatttgctgaggagtgctttgcttacaattatgcaatcgattttagagtatgtgccatgtagtgatgagaagaatgcatattctgtwgtttttgggtggagagttctgtggatatctatcaggttcatatgatccattgctgagttcatgtcttgagtatctttgttaattttgtctcaatgatctgtctaatattgtcagtgaggtgttaaagtctctcactattattgtgtgggtgtctaagtctctttgaaggtctctaagaacttgctttatgaatctgggtacttctgtgttgggtgc

SEQ ID NO: 628225 - DNA, 601 bp, Homo sapiens
ggaagcaggtcaaaatatcaacattaatacaaggttagaagaagttgcgtctaaccctcattgatgactttgaggggttcaagacttcagtggaggaagtaactgcaaatgtggtggaaacagcaagagatctagaattataactgaagcccaaagatgtgactsaattgctgcaatctcatgataaaacttgaacacataagaagttgcttcttatggattagcaaaggaagtcgtttcttgagataggatctaatcctggtgaagatgctgtgaacactgttggaatgacaatgagaggatttaacacaattttgaaagaagttctactatagttaaaatgctatcaaacagcatcacgttacagtgaaatcttttgtgaaaacaatagtcaattgatgcagcgaactttattgttgtcttattttaagaaagtgccacagccacctcaaccttcagcaaccactgccccgagcagtcagctgccatcaacatcaaggcacgactcttcaccagcaaaaagattatgactgaaggctcagctgattggtagcattttttagcaacaaactatttttgagttaaggtatgtagtttgttt

SEQ ID NO: 628226 - DNA, 571 bp, Homo sapiens
gtaaaattttaagaaaggccatcaaaatcagatacaactaacagttgtgaaagaaatcatttatccgctagtcacattggaataggaaaaaagaaagtcactctggttatctggtcctaaagcaagaaaaagtcatgctgcatatatattctgattacattttagtcctccttactgctgtttccatgtttaggtggggaggacagaaaggtgtgtgtgtgtggtgatggtaatgagagagggaagaatraaaaagaataaaatgaagtcccggatacatccagaaaaacaataatcttataggcatcttgcttaccaacaaaactccctctactttgtgcacaacaatccaataaggttcttgtgattcactgtctgccactggtgacttagcattcactttagtggatgcttcctttgcctacgttgtagctaattagtacagaagcacaaatcgacacatttataaaaaggtagcagcctgaattttaaacctttttctaatataaataaaaagcctaacactttgaaagcattgttccctcaattctaacaaagagagaattagtaa

SEQ ID NO: 628227 - DNA, 478 bp, Homo sapiens
gctgcatatatattctgattacattttagtcctccttactgctgtttccatgtttaggtggggaggacagaaaggtgtgtgtgtgtggtgatggtaatgagagagggaagaatgaaaaagaataaaatgaagtcccggatacatccagaaaaacaataatcttataggcatcttgcttaccaacaaaacyccctctactttgtgcacaacaatccaataaggttcttgtgattcactgtctgccactggtgacttagcattcactttagtggatgcttcctttgcctacgttgtagctaattagtacagaagcacaaatcgacacatttataaaaaggtagcagcctgaattttaaacctttttctaatataaataaaaagcctaacactttgaaagcattgttccctcaattctaacaaagagagaattagtaaaactaaaactattgtttaaaaattcatagtttataaccactca

SEQ ID NO: 628228 - DNA, 460 bp, Homo sapiens
tatgcccctgtgctagatttctccttttttgttgctgtttcttttagaaggcagaggaatatatgggattttattgtgggctgtacctgtcttcatgacaatctcttggagagcatgagctctgtagtttactgctgggtttttactctgcctttctagccatgggaacatgggaaagttacttaacttactataaatgaagatacaataatatttacctcctagggttagttgtgaggatggtttatataaaatgcttagaacagttcctggcacatagttaacactcacgtgttagctgctgttgctgttattattgtcattaattctgcagataccyaaaggtattccttgcctgcattgctcgcgtattgagggcttcaccttaaaaaataactgtacaaattatgattgagagtagtaagggtgacatattagaaagttttaattattcagtgac

SEQ ID NO: 628229 - DNA, 487 bp, Homo sapiens
gatggctctaatccttatgcccctgtgctagatttctccttttttgttgctgtttcttttagaaggcagaggaatatatgggattttattgtgggctgtacctgtcttcatgacaatctcttggagagcatgagctctgtagtttactgctgggtttttactctgcctttctagccatgggaacatgggaaagttacttaacttactataaatgaagatacaataatatttacctcctagggttagttgtgaggatggtttatataaaatgcttagaacagttcctggcacatagttaacactcacgtgttagctgctgttgctgttattattgtcattaattctgcagatacctaaaggtattccttgcctgcattgctcgcrtattgagggcttcaccttaaaaaataactgtacaaattatgattgagagtagtaagggtgacatattagaaagttttaattattcagtgaccctctttccttt

SEQ ID NO: 628230 - DNA, 600 bp, Homo sapiens
ctaaagccttgtacataatttaaaaactcaaacatggagcgagggcgttcaggacacctggcttaacagcagcagcactgtgaaatatccagcattttatcattgtgagcttcatatggggcaaacatatggcttgaccactaaagaacaattatcagaatgtgaaayggaacaatgtagcatgctcaggtaggatgaactggggttacacaggctcaaaacaaattatttcattcaataacagtttctgagcacttatgatgtgatggacattatacatggaaccggagatacagagataagagaccaaagtctagtatggagtgagagaacccagagttgttaatacagagggcagggggatgatgacagaggggcaaatgaaagttacaggaacaaagggaaaggaaaggctggagagggtgctccaggaaatacaactcttgcagacagatgagctaattaagaaggtgttataaaagtgaaaccaagaactcagcactgtgccaggcacaaagcaagtcataataacaatgttgggtaccattataattataatcaacattattgtggttatcattattactaaaaatgaatgca

SEQ ID NO: 628231 - DNA, 577 bp, Homo sapiens
tctgactatacaattgcctctccacctctttgctctagtttctttttgagagtcttaatttctccacataattatatactcttcaaagtgaaaatagttaaaaaattaaaaccacttaaactgaaagttaaaacattgttcataaatatgttcttccatttcctgagaaacaacaggaaagattgctttctcaaaataaactaagtagcctgagtatgaagtcagaccaatagagatcaaagattcacgcatcatcacacaatgggaaatttttagtcatttttctaaccacaaaaataagtctaatgctagttctgggggtttgttttgttgcctgtggcatcaagatatgtatgtataattcagaatgtacctttggcatatttgaaattgtcttagcctaatgtgactatctagtgtgtctgaaagagcctattttcaagatatatttgatgagtgtgaacatactacatatacagcaatggaaaatagccttcttgggcattaaatttaggaagaatgtagaaaaccagctgactttttktatctgtttagcatctagaattaaaattaaact

SEQ ID NO: 628232 - DNA, 372 bp, Homo sapiens
tccctggtaagcaggggtcaggtctcagctacctttgaagaccctactgcaggtgttgaggtaagaggacacttactcactctcttcatgttacatcgccaagagagaattccttacaatacaccgggccttccttgctgccccctcactaattcctcctcttcgtcctctttgagatttgcctgtctgcaaaggtcacgaattctggactcctctcctgctgggggaaagcagctttcccctgcagggtaccagcttccattattctggcatgccaagaaaaggtgggtagttttatctaattcagggataaaatttmtggaggcctacttggctgcagacccaaagccatattctccaaagtgcatcatc

SEQ ID NO: 628233 - DNA, 417 bp, Homo sapiens
gccctgaaattaagattcaagaggtataggctatgtgtgaaaagagagactttgaaaaagctccccargagattccaacaatcaccctcagatgagaaccagttataactaaaattaagagaaaaaataaaagtcatattagatctttttgcaacactgtatactaattaataaataaacatctggccctgcatgagtctgcatttcaagtcctatgtttagacattaaatccaactatccagtaaatcctagatggccttttatcattacaaactctctccctctccccctccctcttcccctccccctctcccttgtaaaagcactagtcatacattccagtttaaaatcctggattcatttttattcaaccctctcaattttctacccattactagtcagcctgcaagttctgc

SEQ ID NO: 628234 - DNA, 594 bp, Homo sapiens
attacattatattaagatgacaatgtctaataaaggttctaacgcttrcctgtcaggaggagacatatattatgtaatatgtttaataaacatgtgctgtcatacctttccttttctgatgtttcctatggaaaagttttccctgtagagctgagtatgctactctggagtatcagactcagagacattctatcctgggcctcacaaattatacatagatgtaaactgctttaagaaacatgataaagagattactaaaatcatgaaaaaaattggtatgattattcatcttcttagagttctttcaagacatctaaaaataatttagcttacagaagttcaacgtctcatcaacttttcagaagttcaattgttgcctaaaatgaaatattatatatgaatagaaacttgaagatattttaatttttaaaagtacatgtcaaatttgttcacatagaaaattaaaagtaaaaaaacaaacagtacatctttaaaagcaacattatgctacttagaagatacatgtggtacgtagaaaaaaaattattacacatatatttacacacagtgttttgagtttgcacagggctaact

SEQ ID NO: 628235 - DNA, 576 bp, Homo sapiens
atatattaatcttttaaagccagaatgctagaatttcactcatgagtaagaaaaccccacaagctggcttctctcttcctgttcctacattcctctctccagcgcaggcactgctcagcctcatcttgacatttaaggtttctggctgtgctcatcttctcttcccacagacaagagctatgaggagacatactaacaaagtaatttccatgtagatttctaaacattcaactcaccatttagaaacagcaattactcttcctyttttcaagtgaccatacaaatcagtttgctttgggagctttttaattttttaagaattgctcaattcttttcttatggtgattttcttgaggatttttttttttttttgccatttcaactttctattagaaaaacttagattcccacttgctattttgtgtcatatctgtgttcctttattctcacttaaaccttttattttagccaattagaatacacagcagccttacctcacatgacatttttaaaataaataatatgttacaggaaaatgaatgtttaatctgctcttattcttttcactattgtgtt

SEQ ID NO: 628236 - DNA, 594 bp, Homo sapiens
acatatcttttatggaaaagaataaaactggatccttatattacactgtatgcaaatattaattcaaaatgaattgaagacttaaatgtaagacctgaaatcctaaaacttctagaagaaaacatagggtaaactctccctgacatcagtcytggcaatgattttttttttttttgaaacaaaaaaaatgattttttttgtttgtttttataaaaacaaaggaatgggcaacaaaagcaaaaataaacaatgagactataccaaactaatatgtttctgaacaacaaaggaaacaataaaaaaatgaaatgacaacctatggaatggtagaaaatatttgcacaccatgtatctgataaggggttaatattcaaaatttataagggactcacataactcaatagaaaatataaacaacctgattacaaaattagcaaacgacctcaatagatacttttccaaagatgctcaacatcactaatcattagggaaatgcaaatcaaaaccacaatgtgctatcacttcatacttgttaggatgactattatctaaaagtcaaagataacaggaggtggcaaggatgtggagaaaaag

SEQ ID NO: 628237 - DNA, 594 bp, Homo sapiens
acatatcttttatggaaaagaataaaactggatccttatattacactgtatgcaaatattaattcaaaatgaattgaagacttaaatgtaagacctgaaatcctaaaacttctagaagaaaacatagggtaaactctccctgacatcagtcttggcaatgattttttttttttttgaaacaaaaaaaatgattttttttgtttgtttttatraaaacaaaggaatgggcaacaaaagcaaaaataaacaatgagactataccaaactaatatgtttctgaacaacaaaggaaacaataaaaaaatgaaatgacaacctatggaatggtagaaaatatttgcacaccatgtatctgataaggggttaatattcaaaatttataagggactcacataactcaatagaaaatataaacaacctgattacaaaattagcaaacgacctcaatagatacttttccaaagatgctcaacatcactaatcattagggaaatgcaaatcaaaaccacaatgtgctatcacttcatacttgttaggatgactattatctaaaagtcaaagataacaggaggtggcaaggatgtggagaaaaag

SEQ ID NO: 628238 - DNA, 548 bp, Homo sapiens
tttcaatttcactgcttgttattgatctgttcagggtctaattcttcatgatttaagctaggaggttgtatttttccaggaatttatccatctcttcaaggttttctagtttatgtgtgtaaagatgttcatagtagccttggatgttcttttgtatttcagtggtgtcagttgtatatcttctatttcatttcttcctgagcttacttggattttctctcttcttttcttggttaatcttgctaatggtctctcaattttatttatcttttcaaagggctagctttcttttcatctatcttttgtatttttttatttggctgtttgtttcaatttcatttagttctgctctgatcttggctatttcccttcttctgstgggtttgggtttggtttattcttctttctctagttccttgaggtgtgactttagattgtctgtttgtgctctttcagactttttgatgtgggcatttagggcaggaactttcctgttagttctgcctttgctgtatcccagaggttttgataggttgtgtcattattgt

SEQ ID NO: 628239 - DNA, 522 bp, Homo sapiens
ggtgagtctcctgaaggcagcagatagttcgttgctgagtttttattgattctgcagttctgtatcttttaagtggagcatttaggccatttacattcaatgttagtattgaaatgtgaggtatcattgctttcatcatgctctttgttgcctgtgtactttggtttttttgttttagccttttaagttgtatttttgttttatagatcctgtgatttatgctttaaagaggttctgctctgatgtgtttccacgatttgtttcaagatttagagctcctttwagcagttcttgtagtgctggtttggtaatggcgaattctctcagcatttgtttgtctgaaaacgactgtatctttccttcatatataatgcttagttttgctggatacaaaattcttagctgataattgttttgtttgagcaggctgaagataggtccccaatcccttgaagcctgtagggtttctgctgagaaatctgctgttaatctggtaggttttcctttataggttacctggtg

SEQ ID NO: 628240 - DNA, 604 bp, Homo sapiens
ttcctatgaatgtggcttcctctgagctaaactgtaatgactattgtctctcttctgggcctagccacccagctagtctaccaggctccaggctggtactggggttgtctgcatagagtcctgtgatatgaactgtctaygggtctctcagtcacaaataccagcggctgttccagtagaggtggtaaaggagtgcaatggactccatgagggtccttagctttggtggttgaatactctatttccctgctggaaggtggcgctttccagaaagcatcagctgtagtattgtggagagggacaggtgttgggcggggccctagaactcccaaatttatacaccctttgtctgccactaccaggatgggtagggaaggaactatcaggtggaggtagagctaggcatgtctgagctcagactctccttgggcaggtcttgctgtggctgctgtgggggatggggtgagattcccaggtcactggagttgtgtacctacaaggattatggcagggaagtggaaagccagcagtcacaggcctcacccagctcccacccaaactgaagggccagtttcacttccaccgtgccaccaccaacagcctg

SEQ ID NO: 628241 - DNA, 581 bp, Homo sapiens
gaaataatgtgtacaacaaactcccatgacacaagtttacctatgtaacaaacctgcatttgtatatctgaacttaaaagaacattttaaacaaaacaaaaaagataaacacacacaaaaactaataaaaataaacatattttcatgttcacagtaatgcaggatgctttctacttagttgaaatttcaaggttggtttattgtggcaacttcttccttgagttaattgtagcattgaataaattttgaatcagctagaggaaagtgctacgtgtaaatagaaatcctgctgtgtttgattgcttgtgtctctggagataaggcaccatggatatgctcatctttggcatgaatggagagaagcaaaggtgtaatcagctaaatccattagtaagttagagtaggagcaaagtaagaarcaatgaaggattatgggggaaagcaatgtgaaaagaaaagtggatacattctagataatttctgaagatactgtccaaagaattttctattttttttctatgtgggtcttgaaggcaaaggagtcagaattgactgctcaacagctaaactgaagctactgt

SEQ ID NO: 628242 - DNA, 563 bp, Homo sapiens
ttaacgaggaagctcatttagacatgatgggcaaaaatctctcaaagaactggtgttatggctcttctaaaagattagatgccatgaatcagggaacagtaggaatgaaggctttgagttagaaaagaggaaattttattgtaagggactgtctaaatccaatatgactgtggtgtagtgaaagaggggaacagttgaatgagaagaggtgtgagaggtaggcaggaattaattataacaggcttttcagccattgaacgggttttgcatttaatcttcatgcagtagcaagggttttatattggctgcatggataatagattagataagcgaaaagtagaaggcagaaaacaaatttggagtccatctctgtaaagcagggaggagatgatgattgtttgaatgaaggaatagcattgaggatgcagaagagcaggtgaattcaaagcatgttctgaggactgaacattcaggacttgctgatagattagatgtatggtataaggaaaagggaagcatcaggatagactccaaaacttttwgcctgagcaactggtagatgg

SEQ ID NO: 628243 - DNA, 596 bp, Homo sapiens
ttcttagaacttagggcaatactgtagagaactttgccacaattgcttcctgttccctactattatgttgcatttgaccttcaataaaagttctactatagtaggctgaaattgcatataaacacactagagacatgttttaaaatagtggataccttcaaaatgaaggtattctgaggtattcctgcctcagcctcctcagtagctagcaccacaggtgcacatcaccatgcccagctaagttttatatttttagcagagatggagttttgccatgttggccattctggtctcaacctcctgacctccagtgatccactcatctcagcctcccaaactgctgggattataggcatgagycaccgtgcctggccaacctagtttctaatatatatatctaatatatatatatatatatatatatatatatatatatatatatatataatgcataaatatttttaagtatattagaaattatttcagatctagcaaataacaaaaactgttctgttgtttatggaataaatgagtttctatagtgagtttcactacctgacataaaatcaagaactatttttttagaaagctgggaa

SEQ ID NO: 628244 - DNA, 596 bp, Homo sapiens
ttcttagaacttagggcaatactgtagagaactttgccacaattgcttcctgttccctactattatgttgcatttgaccttcaataaaagttctactatagtaggctgaaattgcatataaacacactagagacatgttttaaaatagtggataccttcaaaatgaaggtattctgaggtattcctgcctcagcctcctcagtagctagcaccacaggtgcacatcaccatgcccagctaagttttatatttttagcagagatggagttttgccatgttggccattctggtctcaacctcctgacctccagtgatccactcatctcagcctcccaaactgctgggattataggcatgagtcaccgtgcctggccaacctagtttctaatatatatatctaatatatatatatatatatatatatatatatatatatatatatatawaatgcataaatatttttaagtatattagaaattatttcagatctagcaaataacaaaaactgttctgttgtttatggaataaatgagtttctatagtgagtttcactacctgacataaaatcaagaactatttttttagaaagctgggaa

SEQ ID NO: 628245 - DNA, 622 bp, Homo sapiens
ttgaagtagaatgtttctggatattctgaaatatttttgcacagctcttctctatccctggcaaacagtaacctagaggagttctacaaactgaatgacttttttttgtataagtctgcagtttgatgatgaaccattattatgtcttcaaagggcatgccagctgtaaaggcaattggtatttaagatgttttcacatcagaaagaaagtattgcatatgcattgcctgaaataatatcagaaacacagtgaatgctctgtacacattgatgatggcaatgaaatgacaagactgagctgctttagctgtagtcttctcttatgcatatgtaacatgattttaacagatacccrcatagcaataattaacacttacagaacatgttatatttgacaaagctttgctaacatatatttgtcgggataggctatgttttactatacttacaaaaaactccaaaatatttttggtttgacacaacaaaagttatattgtattcatgcaaggccagctgcaaattttagaacatcagttggagcctcttttgcttcaaacacttccacatcaaggtgagctatcagagtcatggcagcaggggaaagagagcaggaaaaccatgc

SEQ ID NO: 628246 - DNA, 587 bp, Homo sapiens
cattgcctctgaaagatgccccacaggaggctctgccacaggcttctgagagcaaataaaaggtagggagatggattatagtttgcacccatagctagaaagagcccattctttaatggaaaaagagaggagttgaggactatatcattcactaaacagtagtatcattaccaccatccccaatgactttaaaccattgaaaaacaaatgttaaccattcccccaaaagtccaagactgagatgactttggtagggaagtgtgtgcacacaagcactgtcttagtccatttgtgctgttataagaaaatacctgagaaatagcctgagacaaggtaatttataaagaacagaaatgtattttctcacagttctggaggcttggaagtccaagatcaaggtgctggtaggttgagtgactggtgagggcccctgtctctgattccacratggccatcttgttgctggttcctcacatgttggaggatggaaaagcaaaagggcccagctaattctctccagccccttaataaaagattaatcatatccatgagggcagagcggatgggctaatcacttttaaaggaaa

SEQ ID NO: 628247 - DNA, 592 bp, Homo sapiens
aagaagactggactaaatcaaagtaaaaatatcaaactgtattttacctagtaggtgtaagaattgttttatgagactttatcgtgtgtggcatttgttttacacacacaaacacacacatacacattcccatatgtctctcagtcaaaaacattagactgtggtcctctgagctttctagtgctctggctatggaccgcatgatacctttcattcaaagattctgtgcagcatcaggagataagttgttgaccacaagatttgagggcagtgctcattttatatatttaaactgctccaatggggaaaagagctgacagagttacggtcaattaaaaagttgcagttacagagttaaggtctggatatagaatactttctctctctctttccctcgacttatatttcttctcttctaatccagaaacagatttgaagattcaagtcagaygcacaaaaagatgctccaacttcattagcaatcagaaaaatgcaaattaaaaccacaatgagatactatttcacacccaccagattggcaggcattaaaaattctgacaatatcaagtactgacaatgatgtgagacaaca

SEQ ID NO: 628248 - DNA, 603 bp, Homo sapiens
atttatgcctatggtatgctaggccttgttctagagtagaccctgaaaatacaacagtaaagaaaacaaaaaacaatctgagccctcatggagattatgttctactagagagaaacagacaataaacaagtaagtaaaatatacagtttttcagatagtgataaaccgtctctaatgtcatcccaaagccatccccaccccatcccttttcatagttttgagcccagggtcagtcccctcccagcttctaaccctaacccatttttacctatacatctccaacttgaaattcatcaatgcatgaatgcatgcatgcatgaacaatataattattttgtatattatttgagataaagccagtaaacccctagagyaggcccggcccaattttcgtgctcaatacgtgtttttttttcccctcccgtatccctgtctgtgattgagtcgtttatgtgtttaaaacctcagtggattagaaatgatgagattacattccaagggaaaaaaataaaaaaaaaatgatgtgattgaaagctaacaccatgaaaacatagaagacatgttcaaaatttgccaagatttagcatttgaactttttttgta

SEQ ID NO: 628249 - DNA, 402 bp, Homo sapiens
tagggcagagaaaggtgcaagactggcaggaaggcagggccgatgaccagacccaggaggaaagtttgggcagagaggaatacctttgtagaattgcctgtgggaagttcaaagccagctcrtagacagtatctgctttctctgtcaaggagaaggtcctatcattggttaatatgggggaagggagaagcacaagatttaggaggtggaaattcttttaaaaaccgtgttataatggcagggaaagaatacctagggcaatgcttaagaatgtcagaatgccaaggatgggcttttaggtactttcttggctgccagttatcaatattctatctgtcactttaaaatattcagcctccggttgcataaaccacagtccaggttaaaactgtcagattgtct

SEQ ID NO: 628250 - DNA, 570 bp, Homo sapiens
ctggctaatatggtgaagccctgtctttaataaaaatacaaaaattagctggatgtggtggcgtgtgcctgtaattccagctacacgggaggctgaggcaggagaatcacttgaaacagggagttggaggttgcagtgagctgagatcgtgccattgcactccagctaggtgacagagtgagattctcccaaaaaaaaaaaaaaaaaaaaggtttgtcttagttttctttctatctttcctccctttcatttcctttcctttccctccttttttcttcttatagaatataatatacacatatcagttggactacgccaacattttcgtgttttaacatattttattatgctcccacttcattttagtgygttaatgacactctgggggctatcatgacccaaattaaacaagaaatggtagaggaaaactgagataaagacagcattgcacgcagacctccactgagtccatattcagaatggaagtcttgctgaattgcaatttccaaaaccatggtccctcactcagaaggaaccactctcatttcagtccagagagcttctagggca

SEQ ID NO: 628251 - DNA, 598 bp, Homo sapiens
agatttcccaaaaaaagaggaatgcttatacactatcagtgggaatataaattagttcagccgttgtggaaatcagctccgagatttcccaaagaacttaaaacagaactaccatctgacccagcaaycccatcactgggtatatatccaaaggaaaataaattattccaccaaaaagacacctacattcatacgtttattgcagcactactgacaatagcaaagagatgtaagcaacttaggtgcccatccactgtggattgaataaagaaaatatacctcatggatactacgcagccacaaaaaaaagaatgaaatcacgtcctttgcagcaacatggacgcagctggaggccattatcttaagcaaattaacacaggaacagaaaaccaaatactacatgttctcacttacaagtgggagctgaacactgggtacacgtggacttaaagatgggaaaataaacactggggactccaaaagtgaggaaggagggaagtgagcaagtattgaaaaactacctattgggtactatgctcactattgggttcagcagaagcccaaacttcagcatcacacaatatctccatgcagcaaa

SEQ ID NO: 628252 - DNA, 598 bp, Homo sapiens
agatttcccaaaaaaagaggaatgcttatacactatcagtgggaatataaattagttcagccgttgtggaaatcagctccgagatttcccaaagaacttaaaacagaactaccatctgacccagcaaccccatcactgggtatatatccaaaggaaaataaattrttccaccaaaaagacacctacattcatacgtttattgcagcactactgacaatagcaaagagatgtaagcaacttaggtgcccatccactgtggattgaataaagaaaatatacctcatggatactacgcagccacaaaaaaaagaatgaaatcacgtcctttgcagcaacatggacgcagctggaggccattatcttaagcaaattaacacaggaacagaaaaccaaatactacatgttctcacttacaagtgggagctgaacactgggtacacgtggacttaaagatgggaaaataaacactggggactccaaaagtgaggaaggagggaagtgagcaagtattgaaaaactacctattgggtactatgctcactattgggttcagcagaagcccaaacttcagcatcacacaatatctccatgcagcaaa

SEQ ID NO: 628253 - DNA, 598 bp, Homo sapiens
agatttcccaaaaaaagaggaatgcttatacactatcagtgggaatataaattagttcagccgttgtggaaatcagctccgagatttcccaaagaacttaaaacagaactaccatctgacccagcaaccccatcactgggtatatatccaaaggaaaataaattattccaccaaaaagacacctacattcatacgtttattgcagcactactgacaatagcaaagagatgtaagcaacytaggtgcccatccactgtggattgaataaagaaaatatacctcatggatactacgcagccacaaaaaaaagaatgaaatcacgtcctttgcagcaacatggacgcagctggaggccattatcttaagcaaattaacacaggaacagaaaaccaaatactacatgttctcacttacaagtgggagctgaacactgggtacacgtggacttaaagatgggaaaataaacactggggactccaaaagtgaggaaggagggaagtgagcaagtattgaaaaactacctattgggtactatgctcactattgggttcagcagaagcccaaacttcagcatcacacaatatctccatgcagcaaa

SEQ ID NO: 628254 - DNA, 598 bp, Homo sapiens
agatttcccaaaaaaagaggaatgcttatacactatcagtgggaatataaattagttcagccgttgtggaaatcagctccgagatttcccaaagaacttaaaacagaactaccatctgacccagcaaccccatcactgggtatatatccaaaggaaaataaattattccaccaaaaagacacctacattcatacgtttattgcagcactactgacaatagcaaagagatgtaagcaacttaggtgcccatccactgtggattgaataaagaaaatatacctcatggatactacgcagccacaaaaaaaagaatgaaatcacgtcctttgcagcaacatggaygcagctggaggccattatcttaagcaaattaacacaggaacagaaaaccaaatactacatgttctcacttacaagtgggagctgaacactgggtacacgtggacttaaagatgggaaaataaacactggggactccaaaagtgaggaaggagggaagtgagcaagtattgaaaaactacctattgggtactatgctcactattgggttcagcagaagcccaaacttcagcatcacacaatatctccatgcagcaaa

SEQ ID NO: 628255 - DNA, 449 bp, Homo sapiens
tcccacgtcttgcgtgagctctgaggaaagttctgcgtgaccttttgagtggttcattctccaaccttaagaagtttcccaacatatagatgctggttatactaagcagaagatgggaggggccttctttgtttctccagtgctctctttgttttcacttctttctttactaataccatgccctgtgaactctcgacacttggcctgccctgaactctcaacttcatcttcttagctcagcaattcctctcagttttgactgggttccctctccctgtgctaaagtctggaaaccsattcctggaaataaactgggacaatcccagggttcatctcatttgtttcccctctctcaggcatccctgtcctacattgcttgctccccaatgtctgaaaatcattatttcttatattttcaccaggttattagttgtttttattgggaaggt

SEQ ID NO: 628256 - DNA, 530 bp, Homo sapiens
tattagcccctttttctcatatctgtggtcagaaatatgaaggttgtagattttgcaatgaattcgctttttctgtttgcctcaattgagtcttgctttatgagggaaatcagaatcatacacaatgtttatgtcccccaacagattctaaccattctacccaagaatattacatatgttgatatatgaatagaagaataggaatataaatgatgatatatgtgaagagaatacaaaacaaagaaagaaaagagagaagttgaatgttagaaataaaaatccaaaggaggctcttaaggtatgtccttcatctcaataataaagaactagcattaaaataattaaatgaaaatttagtatactcttaattgatttgcaaaccaatgcattgattttacttctctctgtttatwtattaattatcacttgattacttcttttattcatatctactcaataattagccataaaattcctaagatttgcatttggtaattttatgagataaagaagtaactttggtatgatga

SEQ ID NO: 628257 - DNA, 665 bp, Homo sapiens
tatgatagtcaatgatgttgagcactttcttatacacttgtttgccatctgtatgtcttcttttgagaagtggctattcagatcatttgcccatttttaaagcagattattggatactttcctatagaattgtttgagctcctcatatattttggatattaatcccttgtccaatgtatagtttgcaaatattttctcccattttgtgggttgtttcttctctttgctgaatgatttctttgctgtgcagaagctttttaacttgatgtgatcccatttgtccattttgctttggttgtctgtgtttgtggggtattatcaataaattgttgcccaatccaatgtcctgaagagcttccccaatgttttcttgtagtactttcatagtttgaggtcttatacttaagtttttaatccattttgrtttgatttttgtatatggcgagaggtaggggactaacttcatttttctgcatatggatatccagttttcccagcactgtttattgaaaagactgcatttccgcagtatatgttgggggacctttgttgaaaatgtgttcactgtagatgtatggatttgcttctgggttctatattctatttcattggtccatgtgtctgtttttatggcagcaccatgctatttggtgaagaaagtcatt

SEQ ID NO: 628258 - DNA, 665 bp, Homo sapiens
tatgatagtcaatgatgttgagcactttcttatacacttgtttgccatctgtatgtcttcttttgagaagtggctattcagatcatttgcccatttttaaagcagattattggatactttcctatagaattgtttgagctcctcatatattttggatattaatcccttgtccaatgtatagtttgcaaatattttctcccattttgtgggttgtttcttctctttgctgaatgatttctttgctgtgcagaagctttttaacttgatgtgatcccatttgtccattttgctttggttgtctgtgtttgtggggtattatcaataaattgttgcccaatccaatgtcctgaagagcttccccaatgttttcttgtagtactttcatagtttgaggtcttatacttaagtttttaatccattttgatttgayttttgtatatggcgagaggtaggggactaacttcatttttctgcatatggatatccagttttcccagcactgtttattgaaaagactgcatttccgcagtatatgttgggggacctttgttgaaaatgtgttcactgtagatgtatggatttgcttctgggttctatattctatttcattggtccatgtgtctgtttttatggcagcaccatgctatttggtgaagaaagtcatt

SEQ ID NO: 628259 - DNA, 665 bp, Homo sapiens
tatgatagtcaatgatgttgagcactttcttatacacttgtttgccatctgtatgtcttcttttgagaagtggctattcagatcatttgcccatttttaaagcagattattggatactttcctatagaattgtttgagctcctcatatattttggatattaatcccttgtccaatgtatagtttgcaaatattttctcccattttgtgggttgtttcttctctttgctgaatgatttctttgctgtgcagaagctttttaacttgatgtgatcccatttgtccattttgctttggttgtctgtgtttgtggggtattatcaataaattgttgcccaatccaatgtcctgaagagcttccccaatgttttcttgtagtactttcatagtttgaggtcttatacttaagtttttaatccattttgatttgatttttgtatatggcgagaggtaggggactaacttcatttttctgcatatggatawccagttttcccagcactgtttattgaaaagactgcatttccgcagtatatgttgggggacctttgttgaaaatgtgttcactgtagatgtatggatttgcttctgggttctatattctatttcattggtccatgtgtctgtttttatggcagcaccatgctatttggtgaagaaagtcatt

SEQ ID NO: 628260 - DNA, 642 bp, Homo sapiens
atattaatcccttgtccaatgtatagtttgcaaatattttctcccattttgtgggttgtttcttctctttgctgaatgatttctttgctgtgcagaagctttttaacttgatgtgatcccatttgtccattttgctttggttgtctgtgtttgtggggtattatcaataaattgttgcccaatccaatgtcctgaagagcttccccaatgttttcttgtagtactttcatagtttgaggtcttatacttaagtttttaatccattttgatttgatttttgtatatggcgagaggtaggggactaacttcatttttctgcatatggatatccagttttcccagcactgtttattgaaaagactgcatttccgcagtatatgttgggggacctttgttgaaaatgtgttcactgtagatgtatggatttgcttctgggttctatattctatttcattggtccatgtgtctgtttttatggcagcaccatgctatttggtgaagaaagtcattgataccaagtttttaaatagcaacaagatctrgccttttacttcctaaccttgcctcactcatctcatcataatgctcgttctaaattaaactattaaacacactacaaataaaatatagataataatagag

SEQ ID NO: 628261 - DNA, 593 bp, Homo sapiens
aagatcagcatcacctgtgataacacatattgacatcatgtgtcctccatatgtgatgaggatggcatttcacctctctgatatctttcctccaaatccttatcttctgtgtaatcatgagaaattcaaagaaactcaatttaagcaacaatctaaaaaccacctgaacattattgaaaaatgtttcctcatgaaatgtaaggtaagactgagtaactcttacctactgaaggaaactaaggagccatgacaactaaatgcagtgcagaatcctggcttgaatcctgraaatatccattagtgaaaaactggtaaatctgaataaactctgcagttcagttgatagaattgtaccaatgttactttcttcattttgcttattatagttatatatattattatagttatgtaaaattttaacattaaggaaagctgagtgaaacatatttgaaactctcttaccatttctagtattctgtaactttaacattattttaaaataaagaagttttaaaaagaatattcagaatcattgttttattaaacattcttaaaagtttaaattctgtagtatcactacaattcttgtatca

SEQ ID NO: 628262 - DNA, 488 bp, Homo sapiens
atcttaattcatctgttctccagttgaaggcatgaagttgttgccagtttctgtattacaacactgtagtggaacattcttctgcattgggctcactacattagttacttaagatgtgtatcacagaataaacacatttagccttatagacattgccaaatttatcttcaaagtaaatgtgagtttttgtgaattacgtragtgtagaatggtgttttattatgagtttagtttgcattttccacaattactcattaaatccttcattctaatgtacattttattgtgaagaacctgttcatatcctgtgcccaactttgtattgaattatttctttttctctgagtaatttttaggagttcttttattctagacatcaatcatttgtcagttttatatgttgcaaatatcttctagtctatctagtgacttttctttttactttatggtattttgttgaataaagttttaatgtagtcaaataaaga

SEQ ID NO: 628263 - DNA, 488 bp, Homo sapiens
atcttaattcatctgttctccagttgaaggcatgaagttgttgccagtttctgtattacaacactgtagtggaacattcttctgcattgggctcactacattagttacttaagatgtgtatcacagaataaacacatttagccttatagacattgccaaatttatcttcaaagtaaatgtgagtttttgtgaattacgtgagtgtagaatggtgttttattatgagtttagtttgcattttccacaattactcattaaatccttcattctaatgkacattttattgtgaagaacctgttcatatcctgtgcccaactttgtattgaattatttctttttctctgagtaatttttaggagttcttttattctagacatcaatcatttgtcagttttatatgttgcaaatatcttctagtctatctagtgacttttctttttactttatggtattttgttgaataaagttttaatgtagtcaaataaaga

SEQ ID NO: 628264 - DNA, 529 bp, Homo sapiens
tttttggttacctagataaattatatcgtgtgaagtctgggcttttagtgtacctatcattttaatagtgtacattatacacaatggataatttttcatcccttaccactctcataccctcttctgagtcttcaatgtccattacaccaatccgtgtgcccctgtgttacaggaaaagggtctggatccagaacccaacagcgggttcttggytctcttgcaagaaagaattcagggcgagtccacagtgcaaagtgaacgcaagtttattaaaaaagtcaaggaattaaaaaaaaaatggcttctccatagcctcccttggggctgctggttgccgatgtttatggttatttcttcatgatatgctaaataaggggtggattatccatgccccctctttttagaccataaaggataacttcctgatgttgccatggcatttgtaaactgtcatggcgctggtgggagtgtagcaatgaggaccaccagaggtcactctcatttccattttcgttttggtgggttttgg

SEQ ID NO: 628265 - DNA, 583 bp, Homo sapiens
gctaatagagtcagagctccctcattaccatgagagagaatggcactaagccattcatgaaggatgcagtcccataacccaaacccctctcattagtccccatctcagataccagggaccaaatttcagcatgatatctggaggggacaaatatgcaaactatatctaattggatatataaaatatgtatgcaaatacttcgaagataataagggggaattaatctaaatgtcaaaagtaaaatcgcctttatcattaagakttgcagttagttcaaagtacatggctcctgtcctgtcttctgctttgcctttttgtgagcatttatccatttatttttatctcttatcagactatcagtattttgtgtagcagtaagatgcctttctaatttccccttacaaacttggggggtgtcacgtgcgtccctgtgaagagaccaccaaacaggctttgtgtgagcaacaaggctgtttatttcacctgggtgcaggcgggctgagtccgaaaagagagtcagcaaagggtggtgggattatcattagtctttataggttttgggataggcggtggagtcaagacc

SEQ ID NO: 628266 - DNA, 586 bp, Homo sapiens
agagtcagagctccctcattaccatgagagagaatggcactaagccattcatgaaggatgcagtcccataacccaaacccctctcattagtccccatctcagataccagggaccaaatttcagcatgatatctggaggggacaaatatgcaaactatatctaattggatatataaaatatgtatgcaaatacttcgaagataataagggggaattaatctaaatgtcaaaagtaaaatcgcctttatcattaagatttgcagttagttcaaagtacatggctcctgtcctgtcttctgctttgcctttttgtgagcatttatccatttayttttatctcttatcagactatcagtattttgtgtagcagtaagatgcctttctaatttccccttacaaacttggggggtgtcacgtgcgtccctgtgaagagaccaccaaacaggctttgtgtgagcaacaaggctgtttatttcacctgggtgcaggcgggctgagtccgaaaagagagtcagcaaagggtggtgggattatcattagtctttataggttttgggataggcggtggagtcaagaccaatgttttg

SEQ ID NO: 628267 - DNA, 599 bp, Homo sapiens
gaggccagtttaaattttagaccaacagaatcataggctaatgaaatggatgttttaaatcactaaacattgtgatagttttattttcagcaatattgactgatactgataatgactgacggattgaaatagtttcagattaggtgtgctctcaggaaagggcacaggaatgaataaagaaactcaccatgagaataagtaatgactttgcgggtgacccaggtacaataactgagccaattattttaamgtaaagttagctgcagtggcacaatgtggctgagttcagcatagttttccctctggctatcctgacattactgagcatgctatagacatgtgaataaaaagctgaaaaataaaatatgacattatttaaagtatcatctaatgatggcacaaggcttaaatgttaccctaaagagaaagacctcctcctcttaccacttccccatgaggaaatatgctaacctcactaacttggtcattactagaataaataataaagtagggacttgtgaaaactttctatttatggcaacaatagcatatggccacaacagcagtaaaatgacaaatgttaggggaaattattagac

SEQ ID NO: 628268 - DNA, 599 bp, Homo sapiens
gaggccagtttaaattttagaccaacagaatcataggctaatgaaatggatgttttaaatcactaaacattgtgatagttttattttcagcaatattgactgatactgataatgactgacggattgaaatagtttcagattaggtgtgctctcaggaaagggcacaggaatgaataaagaaactcaccatgagaataagtaatgactttgcgggtgacccaggtacaataactgagccaattattttaaagtaaagttagctgcagtggcacaatgtggctgagttcagcatagttttccctctggctatcctgacattactgagcatgctatagacatgtgaataaaaagctgaaaaataaaatatgacattatttaaagtatcatctaatgatggcacaaggcttaaatgttaccctaaagagaaagacctcctcctcttmccacttccccatgaggaaatatgctaacctcactaacttggtcattactagaataaataataaagtagggacttgtgaaaactttctatttatggcaacaatagcatatggccacaacagcagtaaaatgacaaatgttaggggaaattattagac

SEQ ID NO: 628269 - DNA, 599 bp, Homo sapiens
gaggccagtttaaattttagaccaacagaatcataggctaatgaaatggatgttttaaatcactaaacattgtgatagttttattttcagcaatattgactgatactgataatgactgacggattgaaatagtttcagattaggtgtgctctcaggaaagggcacaggaatgaataaagaaactcaccatgagaataagtaatgactttgcgggtgacccaggtacaataactgagccaattattttaaagtaaagttagctgcagtggcacaatgtggctgagttcagcatagttttccctctggctatcctgacattactgagcatgctatagacatgtgaataaaaagctgaaaaataaaatatgacattatttaaagtatcatctaatgatggcacaaggcttaaatgttaccctaaagagaaagacctcctcctcttaccacttccccatgaggaaatatgctaacctcactaacttggtcattactagaataaataataaagtagggacttgtgaaaactttctatttatggcaacaatagcatatggccacarcagcagtaaaatgacaaatgttaggggaaattattagac

SEQ ID NO: 628270 - DNA, 551 bp, Homo sapiens
tcattgctagtctcacctcagctccttgaactgaatctggctattagcatatattccaaaaatatttgttgaatgaatgttcataatatatgatataatgaatgttcataaatatatgaacattaaaaagtgatatgatcttcctttgaattttatactggtgagataaaaacattaatcataataacaatatgcaagttatgtaaggctataaaaataatcattttcctaaaacaataaaaatatacagttttttatacttggtacttcaaaaagtaccaaaatatacrttgctaatccaattataaatgaaactgtattaagtatccaacactgtgtcaagaaatagatatcattttccctattttaaaaacaacaaaaattagaagagattaagtggtttactcaagggcaaataattagtcaatcatggattttgaactcagatcctgatatggttttgttctgtgtccccacccaaatctcatctcaaattgtaatccccatgtatcaagggaggaacctggtggaaggtgatggaatcatgggag

SEQ ID NO: 628271 - DNA, 551 bp, Homo sapiens
tcattgctagtctcacctcagctccttgaactgaatctggctattagcatatattccaaaaatatttgttgaatgaatgttcataatatatgatataatgaatgttcataaatatatgaacattaaaaagtgatatgatcttcctttgaattttatactggtgagataaaaacattaatcataataacaatatgcaagttatgtaaggctataaaaataatcattttcctaaaacaataaaaatatacagttttttatacttggtacttcaaaaagtaccaaaatatacattgctaatccaattataaatgaaactgtattaagtatccaacactgtgtcaagaaatagatatcattttccctattttaaaaacaacamaaattagaagagattaagtggtttactcaagggcaaataattagtcaatcatggattttgaactcagatcctgatatggttttgttctgtgtccccacccaaatctcatctcaaattgtaatccccatgtatcaagggaggaacctggtggaaggtgatggaatcatgggag

SEQ ID NO: 628272 - DNA, 618 bp, Homo sapiens
ttcttaacgtcaaaagtaacgtctatcaggaaataagactcaacttcatattaaatgatagattatttctttaaagaaatgtcccactctctgaagtcaactattctagaattattaaagatgtattctgaatttacttattatcaaaagttacagtagcataatgaaaatgccagaatataaatttctaattttataataraagctgggtaaaattaataaatgtactcttttgaagatataccagtgcttgtgtcaaaataactcttgaaaataaaaaaataattcacgaggtttgagtaaacatgttgagatagaattaagaaatattttctttaaactccagatcacttttatttctttcagaataaaaatatagtgaaaccagaaattatctgagtcccttgaagaaaaaatcatattttgtttccaaagtagtccatagtgaggacagttaactcagataataaccaacataagacctgttctggttcctactctactcctctgtcaaagacaggttaaatctccctctttcttctgtcaaagaaaaattgcattgaacatgttaaacagtcaaggaatactttgttcaagactacttcaattggtgagaaa

SEQ ID NO: 628273 - DNA, 618 bp, Homo sapiens
ttcttaacgtcaaaagtaacgtctatcaggaaataagactcaacttcatattaaatgatagattatttctttaaagaaatgtcccactctctgaagtcaactattctagaattattaaagatgtattctgaatttacttattatcaaaagttacagtagcataatgaaaatgccagaatataaatttctaattttataataaaagctgggtaaaattaataaatgtactcttttgaagatataccagtgcttgtgtcaaaataactcttgaaaataaaaaaataattcacraggtttgagtaaacatgttgagatagaattaagaaatattttctttaaactccagatcacttttatttctttcagaataaaaatatagtgaaaccagaaattatctgagtcccttgaagaaaaaatcatattttgtttccaaagtagtccatagtgaggacagttaactcagataataaccaacataagacctgttctggttcctactctactcctctgtcaaagacaggttaaatctccctctttcttctgtcaaagaaaaattgcattgaacatgttaaacagtcaaggaatactttgttcaagactacttcaattggtgagaaa

SEQ ID NO: 628274 - DNA, 618 bp, Homo sapiens
ttcttaacgtcaaaagtaacgtctatcaggaaataagactcaacttcatattaaatgatagattatttctttaaagaaatgtcccactctctgaagtcaactattctagaattattaaagatgtattctgaatttacttattatcaaaagttacagtagcataatgaaaatgccagaatataaatttctaattttataataaaagctgggtaaaattaataaatgtactcttttgaagatataccagtgcttgtgtcaaaataactcttgaaaataaaaaaataattcacgaggtttgagtaaacatgttgagatagaattaagaaatattttctttaaactccagatcacttttatttctttcagaataaaaatatagtgaaaccagaaattatctgagtcccttgaagaaaaaatcatattttgtttccaaagtagyccatagtgaggacagttaactcagataataaccaacataagacctgttctggttcctactctactcctctgtcaaagacaggttaaatctccctctttcttctgtcaaagaaaaattgcattgaacatgttaaacagtcaaggaatactttgttcaagactacttcaattggtgagaaa

SEQ ID NO: 628275 - DNA, 618 bp, Homo sapiens
ttcttaacgtcaaaagtaacgtctatcaggaaataagactcaacttcatattaaatgatagattatttctttaaagaaatgtcccactctctgaagtcaactattctagaattattaaagatgtattctgaatttacttattatcaaaagttacagtagcataatgaaaatgccagaatataaatttctaattttataataaaagctgggtaaaattaataaatgtactcttttgaagatataccagtgcttgtgtcaaaataactcttgaaaataaaaaaataattcacgaggtttgagtaaacatgttgagatagaattaagaaatattttctttaaactccagatcacttttatttctttcagaataaaaatatagtgaaaccagaaattatctgagtcccttgaagaaaaaatcatattttgtttccaaagtagtccatagtgaggacagttaactcagataataaccaacataagacctgttctggttcctastctactcctctgtcaaagacaggttaaatctccctctttcttctgtcaaagaaaaattgcattgaacatgttaaacagtcaaggaatactttgttcaagactacttcaattggtgagaaa

SEQ ID NO: 628276 - DNA, 516 bp, Homo sapiens
ttttcctttaatacttcaagatccacataacttctgcccctttttgtatgtcacctggagccttccacttctcaygcaatctagttaaagagttagggtcttgtgacaataggaatttaaatgacatttgttggtccaaggatagacagtttactgtatgagcaagaatagccatgtgctggattctgtggggttttattaagggcttgcttattcacacctgtcttattttaactgtaaacatttaggaaacagaagtatcttcacaaacagatattgatctccataggccaagtttacactcagttataatgcatcagtgcttcagtatgtttgtcctaatatagttgaaaacacagttctccacacatttgagtttgcattatatgaggagtgcttcctatttttttgttagtttgtgttctataaataaaaaggcattggaagtacacaattcttcattcctttaggtttctttttgctgaatgtcagttggtctccatgcctcacaaaagg

SEQ ID NO: 628277 - DNA, 516 bp, Homo sapiens
ttttcctttaatacttcaagatccacataacttctgcccctttttgtatgtcacctggagccttccacttctcatgcaatctagttaaagagttagggtcttgtgacaataggaatttaaatgacatttgttggtccaaggatagacastttactgtatgagcaagaatagccatgtgctggattctgtggggttttattaagggcttgcttattcacacctgtcttattttaactgtaaacatttaggaaacagaagtatcttcacaaacagatattgatctccataggccaagtttacactcagttataatgcatcagtgcttcagtatgtttgtcctaatatagttgaaaacacagttctccacacatttgagtttgcattatatgaggagtgcttcctatttttttgttagtttgtgttctataaataaaaaggcattggaagtacacaattcttcattcctttaggtttctttttgctgaatgtcagttggtctccatgcctcacaaaagg

SEQ ID NO: 628278 - DNA, 521 bp, Homo sapiens
gttctcaacaatcatacagggtgatgttcacatttgaataataacataagttaaaggattgattcacttatgagtttactcacttggaattttagtactggaatggtccatagtaaatttgaaaccctgacattttttaaaagtaaaagctactttcctttctttcatgttatctacatttctcttttatgttataaatgtawttgcagatagcataagccataagaaaattcatgtaaaattaaatacatttaaaactaggttaaaataataaaacaaaaaaaatgcaggaaagcaagatataacaaccaatattaggttacatatatacatattttcaatcttttatacacttcatactgggtaaaaaaattttattatgttttccgttagccaatatgaagacagaaatagttacagatttcacaagtttcataagacaacaaaacagatactcaggagaacaattattataagcattgaggccaggtcaatgtttcattgaaacgttttcaacatga

SEQ ID NO: 628279 - DNA, 592 bp, Homo sapiens
atgttgttatgtggcacatgactgtatgttttaaataaagctgggcttctctttgtgtcactcagaaggatagtgtaaaatgcaaatacagctggcttccaaaaatctstttgggatttcttttgcatttaagaaaatatagaaaatctataacctgttttccaaggttctgcatcatttgcttttaatcttcatttctaagcttgtttcttgtctctttcattagttattgaacactctttccctctttctttgtctgcctaagtctatgaaaccaaatgtaattttttgcagtgagatcttctctaacctttcccttttattatatttatctgaaaattcaatttttaatataaaatttactaaacattaataattatgaatttgattttctatttttaaaattaaatatcattttccccactaggttataagccatacatggacaggaacgatatttaattcattgaacaccttatatctgtagtctattcagaaattagaaaaaaaatttagaataaatgagcaacaacttttaagttttattttgtttttgtattgtataactgcaatcaagataaagaaagctgtg

SEQ ID NO: 628280 - DNA, 653 bp, Homo sapiens
gataaagaaagctgtgcatccaatctatgactttatacctacgttttcttttcttttyttttttttctttttctgagatggagtttcactctattgcccaggctggagtgcaatggcatgatctgggctcactgcaacctctgcctcctgggttcaagtcattgtcatgcctcagcctcctgagtagctgggattacaggagtgtgccaccacacatggctaatttttgtttttttagtggagacggggtttcaccatgttggccaggctggtctcgaactgctgacctcaggtgatctgcctacctcagcctcccaaagtgctgggaatacaggcgtgaggcaccatgctcggctatacctgcgttttttattaatatttatccttgagttacaaacctatttaagttcagtatcccctttacttaatgaacagactttcatgatcactttattcaatcaaagaaatcgctatagttgtttggtcagaagccatttatttatttttaatgtttttgatagataattcatttacatagcttcaaagtttttattttgcacaatgaaaattctccctctcatgcttggctcccagacagttttcttccagttgacaactcgtcttactggtttgtggtagttgtattgcagata

SEQ ID NO: 628281 - DNA, 653 bp, Homo sapiens
gataaagaaagctgtgcatccaatctatgactttatacctacgttttcttttcttttcttttttttctttttctgagatggagtttcactctattgcccaggctggagtgcaatggcatgatctgggctcactgcaacctctgcctcctgggttcaagtcattgtcatgcctcagcctcctgagtagctgggattacaggagtgtgccaccacacayggctaatttttgtttttttagtggagacggggtttcaccatgttggccaggctggtctcgaactgctgacctcaggtgatctgcctacctcagcctcccaaagtgctgggaatacaggcgtgaggcaccatgctcggctatacctgcgttttttattaatatttatccttgagttacaaacctatttaagttcagtatcccctttacttaatgaacagactttcatgatcactttattcaatcaaagaaatcgctatagttgtttggtcagaagccatttatttatttttaatgtttttgatagataattcatttacatagcttcaaagtttttattttgcacaatgaaaattctccctctcatgcttggctcccagacagttttcttccagttgacaactcgtcttactggtttgtggtagttgtattgcagata

SEQ ID NO: 628282 - DNA, 557 bp, Homo sapiens
tataatattttcaatctataccattgaagctatataagataatcacaaagagttctgtattttatacttyaagattaaaaaagtaatcatatatttgattacctaagagttgtgcttatgttattggtcataagtgaccattattaaatgatgatattttttcataagtatatttaaattgtatgtctaatttaaattaccatgaataagttcagtcatgattttcatatgctgatatatatgattaaaacaaaaacatgatttatacaatgaaaacttagcatactcagtaaatgtagaaataaggtgtttattagttattttctatagcaaaataatattttgcaataaatatttatattcctgtggttgtatcactttatctgtccttattcaaacataaaggtctagtgtaacaggtgtcaacttccacaaaatatataaaaagcttgtaactttataaccttggcaatttatttcagtaattgcaataaaataaagttatgttaaatttttatttagtttctaattgtgttccgtagctatttctcagtcaa

SEQ ID NO: 628283 - DNA, 557 bp, Homo sapiens
tataatattttcaatctataccattgaagctatataagataatcacaaagagttctgtattttatactttaagattaaaaaagtaatcatatatttgattacctaagagttgtgcttatgttattggtcataagtgaccattattaaatgatgatattttttcataagtatatttaaattgtatgtctaatttaaattaccatgaataagttcagtcatgattttcatatgctgatatatatgattaaarcaaaaacatgatttatacaatgaaaacttagcatactcagtaaatgtagaaataaggtgtttattagttattttctatagcaaaataatattttgcaataaatatttatattcctgtggttgtatcactttatctgtccttattcaaacataaaggtctagtgtaacaggtgtcaacttccacaaaatatataaaaagcttgtaactttataaccttggcaatttatttcagtaattgcaataaaataaagttatgttaaatttttatttagtttctaattgtgttccgtagctatttctcagtcaa

SEQ ID NO: 628284 - DNA, 557 bp, Homo sapiens
tataatattttcaatctataccattgaagctatataagataatcacaaagagttctgtattttatactttaagattaaaaaagtaatcatatatttgattacctaagagttgtgcttatgttattggtcataagtgaccattattaaatgatgatattttttcataagtatatttaaattgtatgtctaatttaaattaccatgaataagttcagtcatgattttcatatgctgatatatatgattaaaacaaaaacatgatttatacaatgaaaacttagcatactcagtaaatgtagaaataaggtgtttattagttattttctatagyaaaataatattttgcaataaatatttatattcctgtggttgtatcactttatctgtccttattcaaacataaaggtctagtgtaacaggtgtcaacttccacaaaatatataaaaagcttgtaactttataaccttggcaatttatttcagtaattgcaataaaataaagttatgttaaatttttatttagtttctaattgtgttccgtagctatttctcagtcaa

SEQ ID NO: 628285 - DNA, 557 bp, Homo sapiens
tataatattttcaatctataccattgaagctatataagataatcacaaagagttctgtattttatactttaagattaaaaaagtaatcatatatttgattacctaagagttgtgcttatgttattggtcataagtgaccattattaaatgatgatattttttcataagtatatttaaattgtatgtctaatttaaattaccatgaataagttcagtcatgattttcatatgctgatatatatgattaaaacaaaaacatgatttatacaatgaaaacttagcatactcagtaaatgtagaaataaggtgtttattagttattttctatagcaaaataatattttgcaataaatatttatattcctgtggttgtatcactttatctgtccttattcaaacataaaggtctagtgtaacaggtgtcaacttccacaaaatatataaaaagcttgtaacyttataaccttggcaatttatttcagtaattgcaataaaataaagttatgttaaatttttatttagtttctaattgtgttccgtagctatttctcagtcaa

SEQ ID NO: 628286 - DNA, 579 bp, Homo sapiens
tcctgaacttggcagtgcatttccaaattgttcttggtgaaattgtgtcagttagagagatgtatacatgaattaaaacatgaagaaagctctgtttggcggagagactaataagactttaagagaactrcagtaggtaaaaatggtgtttctaaaatcaagtgtcttcagaatctggtcaaagaccaaccatcaccaactgtagtgcagagaaacctccagcactgaacagaggcaaccaagtaaattcatagccatacacataaaagaaaggtgtgacttacaggccataattcggcaattcctgatctagacaagtataaaacaaataaacaactacaagacataggaaactcttcattaagtttgaaacattaaggaagacaaaatttacctagtaaggattaacacatgatacgacttttttatcttacgagcactggggccatcttaagggacagacttcttggatctatgcccactctactctataaactccttcttaaaaagactcaaaacaaaagtgacaaggacaaacagagagaaaagttagagtgttgctactgacgtgtttttacc

SEQ ID NO: 628287 - DNA, 546 bp, Homo sapiens
tagaaaataccataaaatgaaaactaaaaaattaaatgaaaatgctacaaaaattgtaagaaaaatgtatttggaaaaatgccactgtcacaaacttcagaatagacccaaaatacctagggaaataattaatgaatttcaatatgaartcattaaaaattatccatacagaaacgtaaagagaaaaaaggagaaagaataaaaaccataagaccaccaaaagctatgaatcaatgttaaacattgtaatatacgcataattgtgtctcaaaaaaggagaaaaaatatttcaatacctaatggatgaggattttccaaaattataataaagagccaccacagattcaagaatctcatagaaaaccaaactggataagtaagggcactccaccaaaaatatcacctagacatatcatatttaaacttatacaaacaaaaggtaaagaagaaaatcttgaagaaagctgtagggggaaggggatcattatataaaggagaaaactgtgagaaatactgaattctctttgagactatgtaagtcagagg

SEQ ID NO: 628288 - DNA, 440 bp, Homo sapiens
agatgaaatcaagctatctttcttcacatacataatgattttatacctaaaaaaaaaaacagggtttctgcctaaaagcttctagagctgataaacaatttcaccaatgcctcaggatacaaaatcaatgtgcaaaatttactagcatatctattcaccaaaaacatccaagctggaagccaagtcaagaacaaaataccrttcacaatagccacaacaatattaaaataccgaggaatacagctaacaagggaggtgaaaaacctctagaatgagaatttaaaaaccctgaattaagaaatcagaaacaacacaaacaaatggaaaaatattccatactcatggataggaagagtcaatattgttaaaatggctatatggtccaaaccaatgtacagatttaacactcttcttatcaaactaccaatggcatttttcac

SEQ ID NO: 628289 - DNA, 575 bp, Homo sapiens
atgtagaaaatgccttggaggttttttcaactgagcagtgaaaacacctagtgttttaattatgtatgactgtgtaataacccattaaaaatgtagaagtagagacttaaaacaactttattttcttctgtgatatttttcagtcaactggactcrattggatgattcctcagctttatataatttcccctattggttagggaaattttcaaagccaggctagatttaaggacaggacctcataagtgtgagtattctgggagatctgcattattggcggtggggccagggcagggcaaggtatcaatgtagcacaccaaacagatttgataacagattggattatcttttaatcaaatttccattcatccaatttgatagctgtttctgaggaaattaaccttaggaactcagattttcctggacaatggaataactttgtcctaagatcagtaaagaataacaaacgcccctcagaaaagagttaaaggtttttgcagtatacccatttagtgtgtagagaaaaatgctgtgtgaatatgggcaacctactgatacaatctacaataaagctt

SEQ ID NO: 628290 - DNA, 575 bp, Homo sapiens
atgtagaaaatgccttggaggttttttcaactgagcagtgaaaacacctagtgttttaattatgtatgactgtgtaataacccattaaaaatgtagaagtagagacttaaaacaactttattttcttctgtgatatttttcagtcaactggactcgattggatgattcctcagctttatataatttcccctattggttagggaaattttcaaagccaggctagatttaaggacaggacctcataagtgtgagtattctgggagatctgcattattggcggtggggccagggcagggcaaggtatcaatgtagcacaccaaacagatttgataacagattggattatcttttaatcaaatttccattcatccaatttgatagctgtttctgargaaattaaccttaggaactcagattttcctggacaatggaataactttgtcctaagatcagtaaagaataacaaacgcccctcagaaaagagttaaaggtttttgcagtatacccatttagtgtgtagagaaaaatgctgtgtgaatatgggcaacctactgatacaatctacaataaagctt

SEQ ID NO: 628291 - DNA, 541 bp, Homo sapiens
ggatgcagaagcccaatttctagtgttcttagagtctaattggagaaataattaatattattatgccacttaataaatagacttttatttaatccatctttaatatagtacctatgcttccttctgctgaacctagattttctgagtcccaaattaatctgttacattaggttgaaagagagaaaattgtccaaattttcaggctgggaagaggatcaggttgtctaactgttttgtatagagaaatttaactaaggcacctgttttctaccttaactgaactactactctcagagaaaatttctgaccctttctgaagtatattgtttaaatccgtttggaatttctctcaactgttagtttaaattttatgtttttgatttctgtttagtctagtactacacttctatctttatagttttacaacacattttccttttgctgcattctttctccccatggttttatttttaacttaacaatagtaaaagttcagtgtgtgaaaaaaawatatatatatatatttcaaaatatttcacgc

SEQ ID NO: 628292 - DNA, 541 bp, Homo sapiens
ggatgcagaagcccaatttctagtgttcttagagtctaattggagaaataattaatattattatgccacttaataaatagacttttatttaatccatctttaatatagtacctatgcttccttctgctgaacctagattttctgagtcccaaattaatctgttacattaggttgaaagagagaaaattgtccaaattttcaggctgggaagaggatcaggttgtctaactgttttgtatagagaaatttaactaaggcacctgttttctaccttaactgaactactactctcagagaaaatttctgaccctttctgaagtatattgtttaaatccgtttggaatttctctcaactgttagtttaaattttatgtttttgatttctgtttagtctagtactacacttctatctttatagttttacaacacattttccttttgctgcattctttctccccatggttttatttttaacttaacaatagtaaaagttcagtgtgtgaaaaaaatawatatatatatatttcaaaatatttcacgc

SEQ ID NO: 628293 - DNA, 505 bp, Homo sapiens
catccaggatacaggtaaatttaggttttaaatatgggcaaattggctaatgcaagttgataaccatcatctttaaaatcctgagctttggcctccatggcattatttacctatcttaaattcccagctttcttgagcccagtgccttatattcatggaagctttgagacaaagtttgctgatttctacgacataggaaacatttgaaattttaatggtgatggcagaatatctgtcacttaccttggacatatgtgatatattaagttttccagatactcattctaggggagaaaaaaagatactcatcaaaattgtcataaaatagtagacagcctacaawcttaaggctgtcatggtctattaagtacagcaaacatgcatgggaaatactgcattagtttcccacaaatgaaatattttattaacccctcttttcttctcctggctaaaaaagtcaaaattgttcttacttacctccttatttattcttactcaaacttca

SEQ ID NO: 628294 - DNA, 561 bp, Homo sapiens
gaaaatgcagtactgttttctaccattcatttaggatcagtatttctatgcctaatataacaattgctaaaaatatttataaattgctaccaaaccatagtagttgtttaaccaaggaataaactccaattttataaacttcaaaggactaaaatctcccttgtgtcttccctgaatcatttacccactagagcatggacatattccactgttgtatcaatataactagcagtggaataaaagcaaaatgaattacaycattgatttcaactcaaataattcttgaaaatgctaatcagtcatacctaatcaaaatttcattttcataattttagaaatgaatactccttttcatgttgagaaaatatattttatatttacacttctatttaaaaatcagcagtactaaaagctcagaaatgtattattataaacacataatttttctttttgaatagaagacaattatcttcccatcatttccttacacttacttatgacagagttatacagtggcatttcctgaatacatagtgctgggaatacaatgccacctattca

SEQ ID NO: 628295 - DNA, 561 bp, Homo sapiens
gaaaatgcagtactgttttctaccattcatttaggatcagtatttctatgcctaatataacaattgctaaaaatatttataaattgctaccaaaccatagtagttgtttaaccaaggaataaactccaattttataaacttcaaaggactaaaatctcccttgtgtcttccctgaatcatttacccactagagcatggacatattccactgttgtatcaatataactagcagtggaataaaagcaaaatgaattacaccattgatttcaactcaaataattcttgaaaatgctaatcagtcatacctaatcaaaatktcattttcataattttagaaatgaatactccttttcatgttgagaaaatatattttatatttacacttctatttaaaaatcagcagtactaaaagctcagaaatgtattattataaacacataatttttctttttgaatagaagacaattatcttcccatcatttccttacacttacttatgacagagttatacagtggcatttcctgaatacatagtgctgggaatacaatgccacctattca

SEQ ID NO: 628296 - DNA, 573 bp, Homo sapiens
atgcatagatatgaaaatgcagtactgttttctaccattcatttaggatcagtatttctatgcctaatataacaattgctaaaaatatttataaattgctaccaaaccatagtagttgtttaaccaaggaataaactccaattttataaacttcaaaggactaaaatctcccttgtgtcttccctgaatcatttacccactagagcatggacatattccactgttgtatcaatataactagcagtggaataaaagcaaaatgaattacaccattgatttcaactcaaataattcttgaaaatgctaatcagtcatacctaatcaaaatttcattttcataattttagaaatgaatactccttttcatgttgagaaaatatattttatatttacacttctatttaaaaatcagcagtamtaaaagctcagaaatgtattattataaacacataatttttctttttgaatagaagacaattatcttcccatcatttccttacacttacttatgacagagttatacagtggcatttcctgaatacatagtgctgggaatacaatgccacctattca

SEQ ID NO: 628297 - DNA, 561 bp, Homo sapiens
gaaaatgcagtactgttttctaccattcatttaggatcagtatttctatgcctaatataacaattgctaaaaatatttataaattgctaccaaaccatagtagttgtttaaccaaggaataaactccaattttataaacttcaaaggactaaaatctcccttgtgtcttccctgaatcatttacccactagagcatggacatattccactgttgtatcaatataactagcagtggaataaaagcaaaatgaattacaccattgatttcaactcaaataattcttgaaaatgctaatcagtcatacctaatcaaaatttcattttcataattttagaaatgaatactccttttcatgttgagaaaatatattttatatttacacttctatttaaaaatcagcagtacwaaaagctcagaaatgtattattataaacacataatttttctttttgaatagaagacaattatcttcccatcatttccttacacttacttatgacagagttatacagtggcatttcctgaatacatagtgctgggaatacaatgccacctattca

SEQ ID NO: 628298 - DNA, 634 bp, Homo sapiens
ttgtagtagcaaaataatgataccagaagaaagtgtgccagggacaaatgaagcatagttatctatgcttcatcagggaaatccctgagggcaacatcactgattgcccagagtagtttctaatgtggctgactgaattcttcttcagacatatctctaatataggcttttagtggctgccttgaattcattcaagttaccacttaagatgaagtataatctacatccacattcaatgcacattttttcctcaatcaaaagcattaagaaacacaatgatattgtaattttgatttcagttatcaatttggaacactgttaactggaatttccattaaggaaattctagtatttcatgtaatttttgttctgaaacatacttagagaccaacatatgttagaccaaattacagttaatttttatgatagatttcttcaaatccaaatgttaacttagaaggcagtcttcatctccaatacaagagaagatgcacatttgtaataaaaagtataattaattctatgttcacagttattgcaaattaatcaagatatttataaagaaamagtagatatacatttctttatgggatattgtttcagaatttattagttaatgtagaatagcaaaaat

SEQ ID NO: 628299 - DNA, 609 bp, Homo sapiens
caccctctgacaggcctcagtgtgtgtcatgccctctgtgtgtctacgcgttctcatcacttagctccttcttataagtgakaacatgcaatatttggtcttctactcctgcattagtttgctaaggataatggccttgagctccatccatgtctctgtaaaggacataatatctgttatatggttgtatagtattccatggtgtataaggtttaagtattttttcaggatcctagaaatctcgtggatgtttttaagcaccagtatgttataaaaacaagacagttgacaaagtttgaagaatatcaatttcctttataagatagttatcaaagagtctgatgaagatgagcatatttcattccaaatgaaacagttgaaatgctgactagaaaaaaacatcccaatggaagtaaaatagaataaaaaaggatatgagggatacatgttagaattaatcagtatgactttcagttctagttaagggtgtatttaaatatatttgtgaataaaaaactcattttaatctcaatgaactggaagaaaatatatcaatatttagcttttagaacaatttttaagtgaaaattcctctcaattattattaca

SEQ ID NO: 628300 - DNA, 609 bp, Homo sapiens
caccctctgacaggcctcagtgtgtgtcatgccctctgtgtgtctacgcgttctcatcacttagctccttcttataagtgataacatgcaatatttggtcttctactcctgcattagtttgctaaggataatggccttgagctccatccatgtctctgtaaaggacataatatctgttatatggttgtatagtattccatggtgtataaggtttaagtattttttcaggatcctagaaatctcgtggatgtttttaagcaccagtatgttataaaaacaagacagttgacaaagtttgaagaatatcaatttcctttataagatagttatcaaagagtctgatgaagatgagcatatttcattccaaatgaaacagttgaaatrctgactagaaaaaaacatcccaatggaagtaaaatagaataaaaaaggatatgagggatacatgttagaattaatcagtatgactttcagttctagttaagggtgtatttaaatatatttgtgaataaaaaactcattttaatctcaatgaactggaagaaaatatatcaatatttagcttttagaacaatttttaagtgaaaattcctctcaattattattaca

SEQ ID NO: 628301 - DNA, 609 bp, Homo sapiens
caccctctgacaggcctcagtgtgtgtcatgccctctgtgtgtctacgcgttctcatcacttagctccttcttataagtgataacatgcaatatttggtcttctactcctgcattagtttgctaaggataatggccttgagctccatccatgtctctgtaaaggacataatatctgttatatggttgtatagtattccatggtgtataaggtttaagtattttttcaggatcctagaaatctcgtggatgtttttaagcaccagtatgttataaaaacaagacagttgacaaagtttgaagaatatcaatttcctttataagatagttatcaaagagtctgatgaagatgagcatatttcattccaaatgaaacagttgaaatgctgactagaaaaaaacatcccaatggaagtaaaatagaataaaaaaggakatgagggatacatgttagaattaatcagtatgactttcagttctagttaagggtgtatttaaatatatttgtgaataaaaaactcattttaatctcaatgaactggaagaaaatatatcaatatttagcttttagaacaatttttaagtgaaaattcctctcaattattattaca

SEQ ID NO: 628302 - DNA, 412 bp, Homo sapiens
ataaaaaaggatatgagggatacatgttagaattaatcagtatgactttcagttctagttaagggtgtatttaaatatatttgtgaataaaaaactcattttaatctcaatgaactggaagaaaatatatcaatatttagcttttagaacaatttttaagtgaaaattcctctcaattatkattacattttctctatgtagattgatcagtataaatatttctatataaattttacattaatatattaatgtaatacatcaataaaattaatacattaattttcaactcattacatttaactaaaatatagttaaaattgggaacaaattttatttttttgtcaatttataatgatcagattgagtgatcagattgagtaatcatcattgacaaaaattctatagataataa

SEQ ID NO: 628303 - DNA, 412 bp, Homo sapiens
ataaaaaaggatatgagggatacatgttagaattaatcagtatgactttcagttctagttaagggtgtatttaaatatatttgtgaataaaaaactcattttaatctcaatgaactggaagaaaatatatcaatatttagcttttagaacaatttttaagtgaaaattcctctcaattattattacattttctctatgtagattgatcagtataaatatttctatataaattttacattaatatattaatgtaatacatcaataaaattaatacattaattttcaactcattamatttaactaaaatatagttaaaattgggaacaaattttatttttttgtcaatttataatgatcagattgagtgatcagattgagtaatcatcattgacaaaaattctatagataataa

SEQ ID NO: 628304 - DNA, 533 bp, Homo sapiens
ataacttcattttgtgaatggcttattttcttggcagttattttactaatactttatgtattttgaaacattttctgccatatttaatgctttaaatttattttcattagtgtatttctgtaagttgagcttstagaattgcgagttaactgcaaataataaaattattggaagttttgtttttcttttcaaccacatttcatgtccatggttcacttagtatggaaaatgagagacaaatataaaacagaataacattgaatttttcagtgttaactttgaaatcattttattgtctgaaatgtcaataatattcactttccaactatttcaattacatatataatataaaataggagtaaatatttgaaaataaaatattctttcctcttactagatatctattaaaattgaactcctgaattttaattatacttaaaatatataataaaatgattttaattattatagagtatattaccataagtgattttcataatattgatttagctgctctatttaatgacaatatt

SEQ ID NO: 628305 - DNA, 533 bp, Homo sapiens
ataacttcattttgtgaatggcttattttcttggcagttattttactaatactttatgtattttgaaacattttctgccatatttaatgctttaaatttattttcattagtgtatttctgtaagttgagcttctagaattgcgagttaactgcaaataatawaattattggaagttttgtttttcttttcaaccacatttcatgtccatggttcacttagtatggaaaatgagagacaaatataaaacagaataacattgaatttttcagtgttaactttgaaatcattttattgtctgaaatgtcaataatattcactttccaactatttcaattacatatataatataaaataggagtaaatatttgaaaataaaatattctttcctcttactagatatctattaaaattgaactcctgaattttaattatacttaaaatatataataaaatgattttaattattatagagtatattaccataagtgattttcataatattgatttagctgctctatttaatgacaatatt

SEQ ID NO: 628306 - DNA, 588 bp, Homo sapiens
ataatatattttaattgcccattcatcatccaccctgttactccacctccacataaccccagtaattatgtgtctaacctcctgacctcttgcaaacactggtcacaggggaagattattccttttagagctccagcacacagacagcatgtagttgagtactaggttaatacaccaaggtgtctgaatgaaaagtctgtactgttaaccagtattttgtttctaacaggccagacatctatcaataacaataaatgaaagaactcctccttaacttgaatattttgaaatgtaaaaaaaaagaaactatgtgtttaaagctaataataactttgaaaacttataaagtgatattaattttcattaaggacatatgacacttatttttctgtatttttcatatggtatgttgatacatttttgtccctttatagttctgtagtggagatcatttccttgtattaggcctgmattaatattttaaaataatattatctctatattgctttacatattttattaaaattatctataatttgtgacacatagaaacaggccacagtttattaaaatttattctactaacaa

SEQ ID NO: 628307 - DNA, 554 bp, Homo sapiens
cttgcatgtttcttcttgccatcttgtgactctgccatcaccatgagaagatcatgtctaagctagaaggaggatgacagatgtgtggagcagagctgagctgactagaccagatgagctatcctttggacttgtgagcttaataaatgytggtgtattgagatgttatggttggttctttatgcagcattatttggtttacagttaagtgatacacatcccatatacctagtctcgattataagttaaatatgaacaatgcaacagaagtaggctaatctgagtccttccctagcattttatataccaaaacgtagaaaaataatccttcatcatctaggatcactatggtatatggatcttgaatatttttatggaccctgtaataaagagaaaagaacccacagtagtggaaaatgatgttgaccaaaagggataggcagagttagagacagaaaaagagagatttccaacatttgtgtccctggagtctgttattcttaataccatttccattctctttttcagtggtgaaaaagcctgagcaatattgc

SEQ ID NO: 628308 - DNA, 554 bp, Homo sapiens
cttgcatgtttcttcttgccatcttgtgactctgccatcaccatgagaagatcatgtctaagctagaaggaggatgacagatgtgtggagcagagctgagctgactagaccagatgagctatcctttggacttgtgagcttaataaatgctggtgtattgagatgttatggttggttctttatgcagcattatttggtttacagttaagtgatacacatcccatatacctagtctcgattataagttaaatatgaacaatgcaacagaagtaggctaatctgagtccttccctagcattttatataccaaaacgtagaaaaataatccttcatcatctaggatcactatggtatatggatcttgmatatttttatggaccctgtaataaagagaaaagaacccacagtagtggaaaatgatgttgaccaaaagggataggcagagttagagacagaaaaagagagatttccaacatttgtgtccctggagtctgttattcttaataccatttccattctctttttcagtggtgaaaaagcctgagcaatattgc

SEQ ID NO: 628309 - DNA, 554 bp, Homo sapiens
cttgcatgtttcttcttgccatcttgtgactctgccatcaccatgagaagatcatgtctaagctagaaggaggatgacagatgtgtggagcagagctgagctgactagaccagatgagctatcctttggacttgtgagcttaataaatgctggtgtattgagatgttatggttggttctttatgcagcattatttggtttacagttaagtgatacacatcccatatacctagtctcgattataagttaaatatgaacaatgcaacagaagtaggctaatctgagtccttccctagcattttatataccaaaacgtagaaaaataatccttcatcatctaggatcactatggtatatggatcttgaatatttttatggwccctgtaataaagagaaaagaacccacagtagtggaaaatgatgttgaccaaaagggataggcagagttagagacagaaaaagagagatttccaacatttgtgtccctggagtctgttattcttaataccatttccattctctttttcagtggtgaaaaagcctgagcaatattgc

SEQ ID NO: 628310 - DNA, 506 bp, Homo sapiens
aatattttagagtaattttaaagaatggttttgaatgaaagatgggtgttaggtttatttcaaaaagccacctattttgcttatagtgacattaaacccaccactacatcataaaaatttaactacaaattatatcagaaatccactgattcctctttgtctccacagtcactatatttacgggcatcaacttcacttctcatcttcacaacttcaggaacactcactggtctccrgcattccactctttcctcatttaatttattcttcacacagcagccaagctgtatgttttaaaatacaaatcaatcattccatgacatttattaagtcattccaatgaattcctattacacagtaataaaaaatctttttaaaattatgaaatgaaactcacttccagggaaatgtacgatatataaatgtataatgtaactaataattatacgttaataccagctgtcttagttttggggttaaccaagcttaggaaaagcttaagacaa

SEQ ID NO: 628311 - DNA, 535 bp, Homo sapiens
ctgacagtggacctccacagaaagcctacaaycagaagatattgggggcctatattcagcatttttaaagacaagaatttccaaccaagaattttatatactgccaaactaagcttcatacaataagaaatagtaagatccttttcagacacacaaatctgagagaatttgttactactagatttgccttacaagaggccctgaaggaagtgctacataaggaaagatctttaccatgcactacaacaacacacttaagtacacagaccagtaacattaaaaagcaaccacacaaacaagtctgcataataaccagctaataagacaatggcagaattaaatccatacatatcaatactaaccttgaatgtaaataggttaaaaaccccaattaaataagacagagtagcaagttggataagaagcaaggtccagtagtatgctgccttcatgagatccatctcacatgccatgacacacatagattcaaaataaaaggatggagaaacatctaccaagtatattagtctgtttt

SEQ ID NO: 628312 - DNA, 430 bp, Homo sapiens
taaattaaaattgctgcatactataaaaatgtaaggtaacatgattactaatctcatccttcaacataatcattatttcatattgtgtttactaagttaaatgcaaacaacaaacaactgatatactttaactgcatagattttatttctgcattaacctcaatttcatatttatctagaaaaaaaaagcagggcactaacaagtgcttctttgattagctgtcctcactcaaatgattatttacattatatttgtaacatatgtaaatgaatataatgtaaaatatatattttaatataatataaacatatataayatatacatacatatacatgtttatatataaaaatatgatttagatagatacaattctgaaagtaaaatttataaatttaatataaatattagaatttttatattttatataaa

SEQ ID NO: 628313 - DNA, 532 bp, Homo sapiens
cctgcacacctgcaagctcaacactacatagaagytgccaaagcttggggcttactccctctgaagccatggcccaagttgtaccttggtcccttttagtcatggctagagcagctgggactcaggacaccaagtccctaggctgcacacagtagaggaccctgggactggcccatgagaccattttttcttcctagatctcctggcctgtgatgggaggggttgccacaaaggtctctgacatgccctggagatattttctgcattgtcttggcaattaacatttggttgctcgttatttatgcaattttctgcagccagcttgaatttctacccacaaaatgggtttttcttttctattgcatcatcaggctccaaattttccaaaatttttaggctctgcttcctcttgagcaacttgctgcttagaaatttcttccaacagatatcctaaatcatttctctccagttcaaagttccacagatctctagggcagggccaaagtgccacaagtctttctgctaaaatata

SEQ ID NO: 628314 - DNA, 532 bp, Homo sapiens
cctgcacacctgcaagctcaacactacatagaagctgccaaagcttggggcttactccctctgaagccatggcccaagttgtaccttggtcccttttagtcatggctagagcagctgggactcaggacaccaagtccctaggctgcacacagtagaggaccctgggactggcccatgagaccattttttcttcctagrtctcctggcctgtgatgggaggggttgccacaaaggtctctgacatgccctggagatattttctgcattgtcttggcaattaacatttggttgctcgttatttatgcaattttctgcagccagcttgaatttctacccacaaaatgggtttttcttttctattgcatcatcaggctccaaattttccaaaatttttaggctctgcttcctcttgagcaacttgctgcttagaaatttcttccaacagatatcctaaatcatttctctccagttcaaagttccacagatctctagggcagggccaaagtgccacaagtctttctgctaaaatata

SEQ ID NO: 628315 - DNA, 613 bp, Homo sapiens
gattacttaccaatacatatctataggtattaatacaaaaataaatgtatgaacttgtatctattgctacacttttattagtagtacagaatgtcttttttactacaatagtagtcaaagagctaagattaaattgtaatcaaattctacttattgtgcatgctaataatcttaaatatttcatttttaaatgaacatttaagcataaagtttcaaatattgagactaatacaacttgaaactaatacaatgttattatcagaaactagcacagtgctaggaattcatagatttattaaatactgaattccaagttgttgaacttgggaatgaatctggatatactactttattattatttttaaatgggattttgaagtatgggtactttatatkctgagacagccaaataaacatgcattttaaattggtaagctaaggtttacaacacttacaataaaactcatttttcatgggatgacagtggaggaaattgaaatctgctgctcattttatagctgaacaaacttctaaggggtacatgtatttgtatattttatgtgattccctttgtaaataacttgtttaagacttttgagatttagcaatatgt

SEQ ID NO: 628316 - DNA, 613 bp, Homo sapiens
gattacttaccaatacatatctataggtattaatacaaaaataaatgtatgaacttgtatctattgctacacttttattagtagtacagaatgtcttttttactacaatagtagtcaaagagctaagattaaattgtaatcaaattctacttattgtgcatgctaataatcttaaatatttcatttttaaatgaacatttaagcataaagtttcaaatattgagactaatacaacttgaaactaatacaatgttattatcagaaactagcacagtgctaggaattcatagatttattaaatactgaattccaagttgttgaacttgggaatgaatctggatatactactttattattatttttaaatgggattttgaagtatgggtactttatattctgagacagccaaataaacatgcattttaaattggtaagctaaggtttacaacacttacaataaaactcatttttcatgggatgacagtggaggaaattgaaatctgctgctcattttatagctgaacaaacttctaagrggtacatgtatttgtatattttatgtgattccctttgtaaataacttgtttaagacttttgagatttagcaatatgt

SEQ ID NO: 628317 - DNA, 524 bp, Homo sapiens
gattacaggcataagccattgcacttggctctcaatcatatatgtgtgctattccaaagttaagatttagttctcttagtttgaaccagttgtgaggagcaaagtatgctttccttggtttgccctccaaactttcaaacccatagatcacagattgaaagagctgaaattaaacagctaaagcagctttttctayactagcattcttccatctaagttatgatttaagagatttttcccaaagacagaggaatctagatgaacttttcaaatccaaagagctcatatagcacatattttatacatgcagagaatcatttgtgctattttagttaaacttagaatgttgggaatattgacatggatcttaccagataaaagtataaatgcagtgaatactctgcttggtgtatcagtcaaagtaatgaaaatcagtctgacacaaattactaatctctccatatgtgatatgagggtcagaaagctcatgttttatggctgaattgatacgttttgccaatata

SEQ ID NO: 628318 - DNA, 550 bp, Homo sapiens
ttgtgctattttagttaaacttagaatgttgggaatattgacatggatcttaccagataaaagtataaatgcagtgaatactctgcttggtgtatcagtcaaagtaatgaaaatcagtctgacacaaattactaatctctccatatgtgatatgagggtcagaaagctcatgttttatggctgaattgatrcgttttgccaatataaatgtctctcagtaaatgtctcacatatttttcaaggaccagtaggtttgacaccttgaacaaatgtaagatgaagtataacatgttgaaatgataccaacttaatctcatcctatcagcacacaatccatcacccagtagactatgagcctgaataaaatatttttaaataaatctatatctcacaagcaagctgtctcaacttatagctatatatcaaagtctaacaaatacagttttccactaacttgataaatactgagaaaggcaagaataattattttataatactaaaattaaactctaagaaagtttacttaaataatattatattatatggaaaa

SEQ ID NO: 628319 - DNA, 550 bp, Homo sapiens
ttgtgctattttagttaaacttagaatgttgggaatattgacatggatcttaccagataaaagtataaatgcagtgaatactctgcttggtgtatcagtcaaagtaatgaaaatcagtctgacacaaattactaatctctccatatgtgatatgagggtcagaaagctcatgttttatggctgaattgatacrttttgccaatataaatgtctctcagtaaatgtctcacatatttttcaaggaccagtaggtttgacaccttgaacaaatgtaagatgaagtataacatgttgaaatgataccaacttaatctcatcctatcagcacacaatccatcacccagtagactatgagcctgaataaaatatttttaaataaatctatatctcacaagcaagctgtctcaacttatagctatatatcaaagtctaacaaatacagttttccactaacttgataaatactgagaaaggcaagaataattattttataatactaaaattaaactctaagaaagtttacttaaataatattatattatatggaaaa

SEQ ID NO: 628320 - DNA, 633 bp, Homo sapiens
ttgtgggagcagagccaagacatctacattgatacctgagacttctgtgtggagtctttctcctgcatcaatccactctctgtaaaaatgtttactgtttatgattagattaattttaagcagccacctcactttcccaatgcaataatttagaaaactcagtggaattttgattatgttacctacatcctatgggccattttaccaggaaatgagtcacaagcaaattgatatcttgagacctcttttggaagagcttacagagagaaaaaagtttcaaaacattgataaagcaggagctgctttattatatagattattattattatttttgagataggatctcactctgtcacacaagcaggaatgcaatggtgccatctkggttcactgcaacctctgcctcctgggctcaagaaattctcccgtctcagcctcagaagtatctgggactacaggcatgagacaccatacactgctaaattttgtatttttagtagaggtcggttttgccatgttggccaggctggtctccaactcctgggctcaagcaattcacccaccttggcctctcagatcactgggattacaggtgtgagccacaatgcccagcctataggtgaatttttatca

SEQ ID NO: 628321 - DNA, 633 bp, Homo sapiens
ttgtgggagcagagccaagacatctacattgatacctgagacttctgtgtggagtctttctcctgcatcaatccactctctgtaaaaatgtttactgtttatgattagattaattttaagcagccacctcactttcccaatgcaataatttagaaaactcagtggaattttgattatgttacctacatcctatgggccattttaccaggaaatgagtcacaagcaaattgatatcttgagacctcttttggaagagcttacagagagaaaaaagtttcaaaacattgataaagcaggagctgctttattatatagattattattattatttttgagataggatctcactctgtcacacaagcaggaatgcaatggtgccatctgggttcactgcaacctctgcmtcctgggctcaagaaattctcccgtctcagcctcagaagtatctgggactacaggcatgagacaccatacactgctaaattttgtatttttagtagaggtcggttttgccatgttggccaggctggtctccaactcctgggctcaagcaattcacccaccttggcctctcagatcactgggattacaggtgtgagccacaatgcccagcctataggtgaatttttatca

SEQ ID NO: 628322 - DNA, 633 bp, Homo sapiens
ttgtgggagcagagccaagacatctacattgatacctgagacttctgtgtggagtctttctcctgcatcaatccactctctgtaaaaatgtttactgtttatgattagattaattttaagcagccacctcactttcccaatgcaataatttagaaaactcagtggaattttgattatgttacctacatcctatgggccattttaccaggaaatgagtcacaagcaaattgatatcttgagacctcttttggaagagcttacagagagaaaaaagtttcaaaacattgataaagcaggagctgctttattatatagattattattattatttttgagataggatctcactctgtcacacaagcaggaatgcaatggtgccatctgggttcactgcaacctctgcctcctgggctcaagaaattctccygtctcagcctcagaagtatctgggactacaggcatgagacaccatacactgctaaattttgtatttttagtagaggtcggttttgccatgttggccaggctggtctccaactcctgggctcaagcaattcacccaccttggcctctcagatcactgggattacaggtgtgagccacaatgcccagcctataggtgaatttttatca

SEQ ID NO: 628323 - DNA, 553 bp, Homo sapiens
tcattgttcccccaattcaactttttttagtggcatcacctaaattttcatgtatactcaaatgacagtgatcaatttttatcattttactgagactgaatgactttgaaaaacaacattaattcacaaatacattgaggagaatagttttgaggatcaagcaatgaaatcacagattgaaacgacagttttaaaacacttaaagctggacrtggtgtatcatatctgtaatcccagcactttggaaggccaaggtgaaaggatcactagagcccaggagtttgaggtcagcatgggcaaaataacaagaccatgttactactaaaacaatagcaattaaaaaaaaattagccaggcatagtggtgcctgcctattgtcccagctattcatgaggctgaggtgggaggatcacttgagcccaggagtttgaagtacatatcacattgggaaattattatgagtattttgaaaaaaatacagtgtcagaaagtttggaaagctaaaaaaagaagagaaaatgttcaatccaaaattctacaaacttaacacaac

SEQ ID NO: 628324 - DNA, 553 bp, Homo sapiens
tcattgttcccccaattcaactttttttagtggcatcacctaaattttcatgtatactcaaatgacagtgatcaatttttatcattttactgagactgaatgactttgaaaaacaacattaattcacaaatacattgaggagaatagttttgaggatcaagcaatgaaatcacagattgaaacgacagttttaaaacacttaaagctggacatggtgtatcatatctgtaatcccagcactttggaaggccaaggtgaaaggatcactagagcccaggagtttgaggtcagcatgggcaaaataacaagaccatgttactactaaaacaatagcaattaaaaaaaarttagccaggcatagtggtgcctgcctattgtcccagctattcatgaggctgaggtgggaggatcacttgagcccaggagtttgaagtacatatcacattgggaaattattatgagtattttgaaaaaaatacagtgtcagaaagtttggaaagctaaaaaaagaagagaaaatgttcaatccaaaattctacaaacttaacacaac

SEQ ID NO: 628325 - DNA, 553 bp, Homo sapiens
tcattgttcccccaattcaactttttttagtggcatcacctaaattttcatgtatactcaaatgacagtgatcaatttttatcattttactgagactgaatgactttgaaaaacaacattaattcacaaatacattgaggagaatagttttgaggatcaagcaatgaaatcacagattgaaacgacagttttaaaacacttaaagctggacatggtgtatcatatctgtaatcccagcactttggaaggccaaggtgaaaggatcactagagcccaggagtttgaggtcagcatgggcaaaataacaagaccatgttactactaaaacaatagcaattaaaaaaaaattagccaggcatagtggtgcctgcctattgtcccagctattcatgaggctgaggtgggaggatcacttgagcccaggagtttgaagtacatatcacattgggaaattattatgagtattttgaaaaaaatacagtgtcagaaagtttggaaagctaaaaaaagaagagaaaatgwtcaatccaaaattctacaaacttaacacaac

SEQ ID NO: 628326 - DNA, 447 bp, Homo sapiens
tagcagatactgggaagggtactgggggggggtgaaggggtaggtggggatggttaatggatacaacaaagttgttagaatgaataagtactagcataatagactgacattgtcaataacaatcgtacatttaaaaataactaaaaggatatagtaatattgtaacacaaaagataaatgcttgagaggatactccatttttcatcatgcatttattatrcattgcattcctgtatcaaaacatctcatgtaccccgtaaatgtatacacctatgtcacaacaaaaataaaatttagaaaagtctgtaccaatgtgaccatgataagcctaattatattttcaatccatgattggttaagtccatgattggttgaatcttcagatgcagaatccaactcataagcccaactgcagaagcagatactgacaccaggagacagaatgag

SEQ ID NO: 628327 - DNA, 600 bp, Homo sapiens
tgatttctacatacatttataaataattgatggtgtctacttcattctttactcgttttctttccacattttgtagatataatttgagatttttttattctatcttcttgaaataggagattagtcaatatttaacctttcttcttaatgatctacagggataaatttttctgtaaccactgcgttagctgcatcctacacgttttatgtcatgtttatattattgttctgtcaaaggcccacctgtgtttgattttggtgagaatcccacgtgaactagaaaagaacttgacttttcttattgttgtgagcattgttccatatgtacaaagttttgttaccattaagtatgttgtataaatcttctataactttagtaatttggaggtttmtgtgctctatcacatattggcatgttaacatatatactattaaattgagcaatgactgggcaaaaggaaaaatcaaaagagaattaaaatctcaagacagacaaaaaatacactatactaaaacttatgagatgcaccaaacccagtactaagagaaaagttgattgcaatgaatagctacatgaaaaaaagaattcaaattaaccaa

SEQ ID NO: 628328 - DNA, 426 bp, Homo sapiens
ctaactttatatatcaagaaactagaaatagagagcctaagtccaaagttataatacagaagaaaayattaaagtagaaatgagactagaaaaactaaagaaaaatcagcaaatctaaattgttttttaaaaatttaaaggtgataaaccttagctagactaagaaaaagagtatcctcaactaaaatgagaaataggaggagtcattagaacaaatgcctcaaaatgaaaaggatcataaaagactattatgaaaactatgcacttataaattagataatctataagaaatcaaacttgatttatgcaacctaccaaaactaaatcaagaggaaataggaagcctgaacagaggaagaagatcaaattagtaaacaaaaacttcccaaagaaaagaccgaaccaaatggcttcgtggatgaattc

SEQ ID NO: 628329 - DNA, 426 bp, Homo sapiens
ctaactttatatatcaagaaactagaaatagagagcctaagtccaaagttataatacagaagaaaacattaaagtagaaatgagactagaaaaactaaagaaaaatcagcaaatctaaattgttttttaaaaatttaaaggtgataaaccttagctagactaagaaaaagagtatcctcaactaaaatgagaaataggaggagtcattagaacaaatgcctcaaaatgaaaaggatcataaaagactattatgaaaaytatgcacttataaattagataatctataagaaatcaaacttgatttatgcaacctaccaaaactaaatcaagaggaaataggaagcctgaacagaggaagaagatcaaattagtaaacaaaaacttcccaaagaaaagaccgaaccaaatggcttcgtggatgaattc

SEQ ID NO: 628330 - DNA, 567 bp, Homo sapiens
cccactagggcccattgctctcacgctgcaactgaagattatgggtaaatttcctcttggattcaaactctgcaaatttatgttttgagctctaactttgtttgagcaatttgttgactggactgggttcagaattggaatggatctggtaaagaaaccagactgggtccagtaggaggcctcyggtaggtaaggttcctggaagacagcatatcatgtgttttttgaatccaagggctctagaactcttccatgtgggactgcagcatattttatgtataagaaccatggacccagaacatgtgtttttctagaaaaatgagtgaacctgaccaaaggtaattttaagttacaaaggccacagtggggagactttttacaaaggacaaagaggtgcatgcctttataatacgccagctatggggactgagaagacctccttgtagctattttgaaccccagaggagttgcctcaaaagtaaaggaccgcgtgtcccaagaagtttacctgtattttaaatagtcaggcctttgcataagaaatttttcatttctataccagtcatc

SEQ ID NO: 628331 - DNA, 567 bp, Homo sapiens
cccactagggcccattgctctcacgctgcaactgaagattatgggtaaatttcctcttggattcaaactctgcaaatttatgttttgagctctaactttgtttgagcaatttgttgactggactgggttcagaattggaatggatctggtaaagaaaccagactgggtccagtaggaggcctctggtaggtaaggttcctggaagacagcatatcatgtgttttttgaatccaagggctctagaactcttccatgtgggamtgcagcatattttatgtataagaaccatggacccagaacatgtgtttttctagaaaaatgagtgaacctgaccaaaggtaattttaagttacaaaggccacagtggggagactttttacaaaggacaaagaggtgcatgcctttataatacgccagctatggggactgagaagacctccttgtagctattttgaaccccagaggagttgcctcaaaagtaaaggaccgcgtgtcccaagaagtttacctgtattttaaatagtcaggcctttgcataagaaatttttcatttctataccagtcatc

SEQ ID NO: 628332 - DNA, 605 bp, Homo sapiens
gtacaagctaaaaggataacgcaaaaaaacaataccacagctaaactraccattttgacttttattaattggagaaatttattgtaaatcatttaagttttataaaactatatacttttaaaaatatatattaaccactacaaaaaatttattcagtaaaatatttcacctacattttaaaacatgtattttggtaaacacatgtttgcatttctgttgcatatataaccaggagtgggatatctgggtcatagatgggcacatattcagctctatcagatactatcaaactgttttccagaggttttatcaatttatagtctcattagcagttattttaatcatcataaccacactgacagatgtgctatttcattgtggttttaaagtgtcattttttgacaactagccaagttgaaaaccttttcatacatttattggaatgtacattttgtacatttattggaataatttattggaatcatggctatcatatttgtaaattcccattctagtcttttgccatttttaagtggattttctgcttctttattgatttgtaggaatttcttctatgtgttctatatgaatccttcatacatata

SEQ ID NO: 628333 - DNA, 605 bp, Homo sapiens
gtacaagctaaaaggataacgcaaaaaaacaataccacagctaaactgaccattttgacttttattaattggagaaatttattgtaaatcatttaagttttataaaactatatacttttaaaaatatatattaaccactacaaaaaatttattcagtaaaatrtttcacctacattttaaaacatgtattttggtaaacacatgtttgcatttctgttgcatatataaccaggagtgggatatctgggtcatagatgggcacatattcagctctatcagatactatcaaactgttttccagaggttttatcaatttatagtctcattagcagttattttaatcatcataaccacactgacagatgtgctatttcattgtggttttaaagtgtcattttttgacaactagccaagttgaaaaccttttcatacatttattggaatgtacattttgtacatttattggaataatttattggaatcatggctatcatatttgtaaattcccattctagtcttttgccatttttaagtggattttctgcttctttattgatttgtaggaatttcttctatgtgttctatatgaatccttcatacatata

SEQ ID NO: 628334 - DNA, 605 bp, Homo sapiens
gtacaagctaaaaggataacgcaaaaaaacaataccacagctaaactgaccattttgacttttattaattggagaaatttattgtaaatcatttaagttttataaaactatatacttttaaaaatatatattaaccactacaaaaaatttattcagtaaaatatttcacctacattttaaaacatgtattttggtaaacacaygtttgcatttctgttgcatatataaccaggagtgggatatctgggtcatagatgggcacatattcagctctatcagatactatcaaactgttttccagaggttttatcaatttatagtctcattagcagttattttaatcatcataaccacactgacagatgtgctatttcattgtggttttaaagtgtcattttttgacaactagccaagttgaaaaccttttcatacatttattggaatgtacattttgtacatttattggaataatttattggaatcatggctatcatatttgtaaattcccattctagtcttttgccatttttaagtggattttctgcttctttattgatttgtaggaatttcttctatgtgttctatatgaatccttcatacatata

SEQ ID NO: 628335 - DNA, 519 bp, Homo sapiens
caacattcctgaggaatatagacacacaatcctccacgaaataccagcaaaccaaatccagcagcacatcaaaaagtgaattcaccacgatcaagtaggctttatttctgggatgcaaggttggttcaacaagtgcaaatcagtaaatgtgattcaccacataaacataattaaatacaaaaaycacatgatcatctcaatagaagcaaaatgatttttcataacattcagcatcctttcttgttaaaaaccctcaatatactgggcaccaaatgaacttatctcaaaaaaataagagccatctatgacacacccacagccaccatcatactaaacaagtaaaatctggaagcattcctcttgagaactggaacaatttgaacaattcagttttcaatttctcatcaaaaattgtgttgacatgattgattgaagtattttatccccctttctcccaaataccaggccacagacagcatgaaatattttaaataaacattaaaataaataagtccagat

SEQ ID NO: 628336 - DNA, 519 bp, Homo sapiens
caacattcctgaggaatatagacacacaatcctccacgaaataccagcaaaccaaatccagcagcacatcaaaaagtgaattcaccacgatcaagtaggctttatttctgggatgcaaggttggttcaacaagtgcaaatcagtaaatgtgattcaccacataaacataattaaatacaaaaaccacatgatcatctcaatagaagcaaaatgatttttcataacattcagcatcctttcttsttaaaaaccctcaatatactgggcaccaaatgaacttatctcaaaaaaataagagccatctatgacacacccacagccaccatcatactaaacaagtaaaatctggaagcattcctcttgagaactggaacaatttgaacaattcagttttcaatttctcatcaaaaattgtgttgacatgattgattgaagtattttatccccctttctcccaaataccaggccacagacagcatgaaatattttaaataaacattaaaataaataagtccagat

SEQ ID NO: 628337 - DNA, 573 bp, Homo sapiens
aagcttaagaactttttatctagtttctaaccattgtttcaaaatggctgaactcaactgtgtttctccttgaagctagatgataagcatagacaaagttccagtcttctctctttttacctgctttagcyatttctcagtatcctttgaagctcaactctgtccaggtattgctaatctccattgttgtaagcatcagcttcctaggaaagacaaaagtgtgatttctcaggggcaataataacacaatagattttcttttctcttgattgctctggaaatcccaacatgttggttctattctcttatcctgtctcgggtggaaacttctggtgattctcagataagcaataactcagctgatatataatacaagaagattttctcttctataataaatacagcaagccttgagtaatagtacgtaatctgtgggtgagcaaggaacaataggcttctctcttgactttgtaagttcctcccattctcactagctctagatgcttactcttccttgagtcagtgcaggtggaactcaggggatagagtggaagtaggggctagaaaagccct

SEQ ID NO: 628338 - DNA, 573 bp, Homo sapiens
aagcttaagaactttttatctagtttctaaccattgtttcaaaatggctgaactcaactgtgtttctccttgaagctagatgataagcatagacaaagttccagtcttctctctttttacctgctttagctatttctcagtatcctttgaagctcaactctgtccaggtattgctaatctccattgttgtaagcatcagcttcctaggaaagacaaaagtgtgatttctcaggggcaataataacacaatagattttcttttctcttgattgctctggaaatcccaacatgttggytctattctcttatcctgtctcgggtggaaacttctggtgattctcagataagcaataactcagctgatatataatacaagaagattttctcttctataataaatacagcaagccttgagtaatagtacgtaatctgtgggtgagcaaggaacaataggcttctctcttgactttgtaagttcctcccattctcactagctctagatgcttactcttccttgagtcagtgcaggtggaactcaggggatagagtggaagtaggggctagaaaagccct

SEQ ID NO: 628339 - DNA, 573 bp, Homo sapiens
aagcttaagaactttttatctagtttctaaccattgtttcaaaatggctgaactcaactgtgtttctccttgaagctagatgataagcatagacaaagttccagtcttctctctttttacctgctttagctatttctcagtatcctttgaagctcaactctgtccaggtattgctaatctccattgttgtaagcatcagcttcctaggaaagacaaaagtgtgatttctcaggggcaataataacacaatagattttcttttctcttgattgctctggaaatcccaacatgttggttctattctcttatcctgtctcgggtggaaacttctggtgattctcagataagcaataactcagctgatatataatacaagaagattttctcttctataataaatacagcaagccttgagtaatagtacgtaatctgtgggtgagcaaggaacaataggcttctctcttgactttgtaagttcctcccattctcactagctctagatgcttactcttcctygagtcagtgcaggtggaactcaggggatagagtggaagtaggggctagaaaagccct

SEQ ID NO: 628340 - DNA, 483 bp, Homo sapiens
tgcatgggctgcaggtttctgcctagtgttggtgtagatctggaggctcggtctttgtgtactggcctggagtcagtggttgtgggggctgcctggttttcagttcttctgtggtgggcctagtgttgggcaccaagaccaagtcccacacttacttccgtttttattctccaagtgtttggtatytctccctgcactgtgctgtctgaggttggggataaaaaatgcaggtaatcaaaactctccttcctgccctcttcaatgcttctaatcttattattttataacaagatgaaaattgtatcaccaggttctatgatctctcacatgcctttactagcttttgtgaaggtatgttgtgtaagaatagttattaaaattgatgtttctatggggatacaattgttaaagaattccgttctgccagctttcccactctcctctcttttcacttttttgattgagacctttgaagcacaaaaa

SEQ ID NO: 628341 - DNA, 426 bp, Homo sapiens
aacaagatcttgttttttgtggcaatgttgatggagctagaggccactatactaagtaaactaacacaaacagaaaaccaaataccacatattttcacttatgagtgggagctaaacagagtacctatggacacaaagaataacagacccccccaccgggcctacttgagggtgtagggaggaaagtgaggactgaaaacctacctatcaggaactatgcttatcacttgggtggtgaaataatcagtgacatgcaacttacctatataacaaacctgcacatgtacccctcaacctgaaataaaagttggaaaaaaaactttaaaaaagagagaaygtctcaaggacaaatgctgttagaataaaactaccaatcccgaattgtaaacccagctatactatcattcaaaagtaagggtagttaga

SEQ ID NO: 628342 - DNA, 592 bp, Homo sapiens
aaaaatttcctcccacgtactttgtttataaacctgttgaaagacatgctccacaatggggaggttttaaagtagaagacgtggtacacagacaatcaagaatccagagggtcatggggaagaggcagcatctcaggaggagccccgtgcagcgcagcccatctctggggcaagcagcctggatggaagcggcagagcaggggctgcagaagagggagggctgtgaagacggcaccgrgaattcctgagggagtcacagtttcaacaggatatttatcagaaggagattctatatacatatatatatatacacacacacatacacatatatatagagattagtcagttttctttcatgtatacatatatatgtatatatacacacacacccatatatatgtatatacaaatacatatatctcctagctactggggaggctgaggtgggaggattgctagagaccaggagctcaatctctttcttgacccagctggtcaagaatgattaccaaccctcaaaacctgtcctgtccccactcagtcaccaaagtgattgtgactctgacttctgacatggtattctatcagtgtc

SEQ ID NO: 628343 - DNA, 592 bp, Homo sapiens
aaaaatttcctcccacgtactttgtttataaacctgttgaaagacatgctccacaatggggaggttttaaagtagaagacgtggtacacagacaatcaagaatccagagggtcatggggaagaggcagcatctcaggaggagccccgtgcagcgcagcccatctctggggcaagcagcctggatggaagcggcagagcaggggctgcagaagagggagggctgtgaagacggcaccgagaattcctgagggagtcacagtttcaacaggatatttatcagaaggagattctatatacatatatatatatacacacacacatacacatatatatagagattagtcagttttctttcatgtatacatatatatgtatatatacacacacacccatatatatgtatatacaaatacatatatctcctagctactggggaggctgaggtgggaggattgctagagaccaggagctcaatctctttcttgacccagmtggtcaagaatgattaccaaccctcaaaacctgtcctgtccccactcagtcaccaaagtgattgtgactctgacttctgacatggtattctatcagtgtc

SEQ ID NO: 628344 - DNA, 592 bp, Homo sapiens
aaaaatttcctcccacgtactttgtttataaacctgttgaaagacatgctccacaatggggaggttttaaagtagaagacgtggtacacagacaatcaagaatccagagggtcatggggaagaggcagcatctcaggaggagccccgtgcagcgcagcccatctctggggcaagcagcctggatggaagcggcagagcaggggctgcagaagagggagggctgtgaagacggcaccgagaattcctgagggagtcacagtttcaacaggatatttatcagaaggagattctatatacatatatatatatacacacacacatacacatatatatagagattagtcagttttctttcatgtatacatatatatgtatatatacacacacacccatatatatgtatatacaaatacatatatctcctagctactggggaggctgaggtgggaggattgctagagaccaggagctcaatctctttcttgacccagctggtcaagaatgattaccaaccctcaaaaccygtcctgtccccactcagtcaccaaagtgattgtgactctgacttctgacatggtattctatcagtgtc

SEQ ID NO: 628345 - DNA, 569 bp, Homo sapiens
aaggctaataaggaatctgttttctttttaaaaattcttttaatcttcccatttttgtgtcttttctctttactggtatttgaaatgcacatctttgtaaccaggtcacaagaatgattttgcttggattgtttggtggcytcagacatagggttcagaagcatctttcaatgtcattatctttttatcagatcttgaattgcttatttgttgtttgtgtatgtttatgtccatgggcactaatatgggttcttctcactacaaaaatcagggtccccttcctaaaattccggctaaatactaaagggttttaaaccaaaagtaaaattctaagcctccctcaaccatctgaatagggccctcgtctcagcaaaggcattccaaagttaacctgataaactagttcaggccatgataggaaggaagagcttgacatgcctcaggataccctccctcccttttggaattactgatagaacagattctttaagacttaagtctaattaaaaaacatttacaatcttctctctgaagcctgcttgttggaggcctcatctacaagatcaagt

SEQ ID NO: 628346 - DNA, 569 bp, Homo sapiens
aaggctaataaggaatctgttttctttttaaaaattcttttaatcttcccatttttgtgtcttttctctttactggtatttgaaatgcacatctttgtaaccaggtcacaagaatgattttgcttggattgtttggtggcctcagacatagggttcagaagcatctttcaatgtcattatctttttatcagatcttgaattgcttatttgttgtttgtgtatgtttatgtccatgggcactaatatgggttcttctcactacaaaaatcagggtccccttcctaaaattccggctaaatactaaagggttttaaaccaaaagtaaaattctaagsctccctcaaccatctgaatagggccctcgtctcagcaaaggcattccaaagttaacctgataaactagttcaggccatgataggaaggaagagcttgacatgcctcaggataccctccctcccttttggaattactgatagaacagattctttaagacttaagtctaattaaaaaacatttacaatcttctctctgaagcctgcttgttggaggcctcatctacaagatcaagt

SEQ ID NO: 628347 - DNA, 569 bp, Homo sapiens
aaggctaataaggaatctgttttctttttaaaaattcttttaatcttcccatttttgtgtcttttctctttactggtatttgaaatgcacatctttgtaaccaggtcacaagaatgattttgcttggattgtttggtggcctcagacatagggttcagaagcatctttcaatgtcattatctttttatcagatcttgaattgcttatttgttgtttgtgtatgtttatgtccatgggcactaatatgggttcttctcactacaaaaatcagggtccccttcctaaaattccggctaaatactaaagggttttaaaccaaaagtaaaattctaagcctccctcaaccatctgaatagggccctcgtctcagcaaaggcattccaaagttaacctgataaactagttcaggccatgataggaaggaagagcttgacatgcctcaggataccctccctcccttttggaattactgatagaacagattctttaagacttaagtctrattaaaaaacatttacaatcttctctctgaagcctgcttgttggaggcctcatctacaagatcaagt

SEQ ID NO: 628348 - DNA, 543 bp, Homo sapiens
agaagatacaaaccatcggaagggatcttagttataacacacgctctgcctgacctcctgctattgtcactgagttggccatgctcttacaaaagttcaaactctccacttctaaactggtttctgtgctttcggccactctcaaaggccatctttctgaaastttcctccatttctcatatatcgattttctttttgtactgaattattcctttgaacttcatactcaatatcacatgacagcaccattaacatcaaacacattggtatcacgtttttctagttatactccatttcctttacaaaaaaatctaaaaattcatactcaacttaccttatccacttcctcccccttgattttaccctgaatcatctctaagcatatctccattaaaaatggtcactaaggttacaagtaacctttcatgttgctaaatacagtaaccaaatctcacttatttcaaccatagactgcacttgttgcagttgcttttactttctttaaacactttgtcttagatttcttctaacctcataaaaccc

SEQ ID NO: 628349 - DNA, 579 bp, Homo sapiens
aggaaatggtcttgtccttggacaggaggtcctggagcatcttggggacagtgatacagatgtagatggtatccatgatggagagctggctgagcaagaagtacatgggtgtgtggaggcgggagtccatgtggatgagcagaatcatgaccaagttggctgttatagccaccacaaagatggagaagactaytgcaaagagaagcccggggaaggcaggatgggtgatgaggcctgtgaggacgaagttagtggagttctggagaagaccctccatgcccatggtccatgacaagctccttgggctgtaaaggcagaaatctggcagcttatttaacgacctgatatgtaggaagagcccaccaggaatagtatgtcagaagcagcgtgagatcaagaaaagatcacctacttcaggatcatttgaaatcctgggtttcagtattaatgatctgtatgatattggacagaaaattaatctctcaactcaatttcatcatctgtgaaaggtcatcatagttctgtactctacaggctggatgtgagatgtaaatgtaattcatacagtacctggtttag

SEQ ID NO: 628350 - DNA, 579 bp, Homo sapiens
aggaaatggtcttgtccttggacaggaggtcctggagcatcttggggacagtgatacagatgtagatggtatccatgatggagagctggctgagcaagaagtacatgggtgtgtggaggcgggagtccatgtggatgagcagaatcatgaccaagttggctgttatagccaccacaaagatggagaagactactgcaaagagaagcccggggaaggcaggatgggtgatgaggcctgtgaggacgaagttagtggagttctggagaagaccctccatgcccatggtccatgacaagctccttgggctgtaaaggcagaaatctggcagcttatttaacgacctgatatgtaggaagagcccaccaggaatagtatgtcagaagcagcgtgagatcaagaaaagatcacctacttcaggatcatttgaaatcctgggtttcagtattaatgatctgtatgatattggacagaaaattaatctctcaaytcaatttcatcatctgtgaaaggtcatcatagttctgtactctacaggctggatgtgagatgtaaatgtaattcatacagtacctggtttag

SEQ ID NO: 628351 - DNA, 531 bp, Homo sapiens
agtgcagattagaacataacccagaacccctgacccccaggaccagttataacatcacccagtgttgcaacataatcatctggcaggaatgggagggtgggaagatcaagccgagaggtggaggacaccaagcacaggagctccacatctgttatctgcacacttggggctgatggatgagggatgagtgagctcgccaagaggcatttattctacctgtggtctgccacatggagaagagggaaaggagaatctctgcagggtgccaggtgatcaaagctgtatgtttcaggacaacagccctggagttgttctgggagaagccatagaaatcaagaacaattggtgactcaccgaaaattgaagagatctccaagagaagtcacaggttcttctaccagggagaagagcttagagcaattcattctgacacccctttcygggaattcagcatgactagagctatgagaagtatctgccagtgtcctttctgtggcaataaagctgctaaccagaactgatcttctccac

SEQ ID NO: 628352 - DNA, 579 bp, Homo sapiens
tttggtattccccaaaccataaaccaatagggctttacrtgtgccaggtactttagaagttttacatacatgaagtcatagcaaaccagaagatgctatgcatcagtttgagtagtggacaaaggtacagtttccccttatcagtgggagacagttttcaagacccccactggatatctggaactgcagacagtactgagccctatatatataccatattttatcccatgcatacatacctatgatcaagttgaatttataagttaggcacagtaagagattaacaataataaaatagaatacctaagacaatatactgtggctataactttttcagtttgatgtgacagcaaaacttgcataattttttccttcatgatttcaaagataaagtttttcttaatatagatcttggcaaagtcagcttatgagggtttctctctccttaagtcaagaactttcacctttttagttaaagcaagcaccttacagcctctctttggcacatctaaatcgccagcttcactaactccatctctttggggccattaagaaaaactgagttacttgaacacaagc

SEQ ID NO: 628353 - DNA, 579 bp, Homo sapiens
tttggtattccccaaaccataaaccaatagggctttacgtgtgccaggtactttagaagttttacatacatgaagtcatagcaaaccagaagatgctatgcatcagtttgagtagtggacaaaggtacagtttccccttatcagtgggagacagttttcaagacccccactggatatctggaactgcagacagtactgagccctatatatayaccatattttatcccatgcatacatacctatgatcaagttgaatttataagttaggcacagtaagagattaacaataataaaatagaatacctaagacaatatactgtggctataactttttcagtttgatgtgacagcaaaacttgcataattttttccttcatgatttcaaagataaagtttttcttaatatagatcttggcaaagtcagcttatgagggtttctctctccttaagtcaagaactttcacctttttagttaaagcaagcaccttacagcctctctttggcacatctaaatcgccagcttcactaactccatctctttggggccattaagaaaaactgagttacttgaacacaagc

SEQ ID NO: 628354 - DNA, 579 bp, Homo sapiens
tttggtattccccaaaccataaaccaatagggctttacgtgtgccaggtactttagaagttttacatacatgaagtcatagcaaaccagaagatgctatgcatcagtttgagtagtggacaaaggtacagtttccccttatcagtgggagacagttttcaagacccccactggatatctggaactgcagacagtactgagccctatatatataccatattttatcccatgcatacatacctatgatcaagttgaatttataagttaggcacagtaagagattaacaataataaaatagaatacctaagacaatatactgtggctataactttttcagtttgatgtgacagcaaaacttgcataattttttccttcatgatttcaaagataaagtttttcttaatatagatcttggcaaagtcagcttwtgagggtttctctctccttaagtcaagaactttcacctttttagttaaagcaagcaccttacagcctctctttggcacatctaaatcgccagcttcactaactccatctctttggggccattaagaaaaactgagttacttgaacacaagc

SEQ ID NO: 628355 - DNA, 189 bp, Homo sapiens
tgcagctataaacacaatgcactcattattatacccctacagtctgagcttccaacatgtccacatctccccctrggctccagttactcagctcaacaggcttttatatgccatgctaagatggcttctacgagacctctaatagttttattaaaaaaaaaaagattatcttaaggcacacgtggatgc

SEQ ID NO: 628356 - DNA, 452 bp, Homo sapiens
attgtgtaggggtgaggctaggtcaaaaagtcttttcactaagagtcccacatcccccaggaagaattcctgggttagcaattaatccaagttgactgggtttaccatgaactttagaagcagcctgtcctttcttgcagagggtgcattgttttcccaagtgaaggactggaatcgtttcttggtatttcatcatgaaaatgtcttactgaatcttggcatctctccagagagattttaaaggcagtgatgtggggataagagcctcgctctaaattgaaaattagattttaaatttctttagaaatagaggctatgacaaactaaaaaagctctttctcaaaagtcactrgcctcttttgtttggggagaaatctttaaagttataaataagtgtgaatcaaaaagcattggagccaagtctcaatcaatgtagatgtttctggtgccaa

SEQ ID NO: 628357 - DNA, 554 bp, Homo sapiens
ttgactgggtttaccatgaactttagaagcagcctgtcctttcttgcagagggtgcattgttttcccaagtgaaggactggaatcgtttcttggtatttcatcatgaaaatgtcttactgaatcttggcatctctccagagagattttaaaggcagtgatgtggggataagagcctcgctctaaattgaaaattagattttaaatttctttagaaatagaggctatgacaaactaaaaaagctctttctcaaaagtcactagcctcttttgtttggggagaaatctttaaagttataaataagtgtgaaycaaaaagcattggagccaagtctcaatcaatgtagatgtttctggtgccaaggttgaggatgcacctgggaaaaaggaacacaagatgacaggagcatctgagatttgtgcttcttccaaagacggttgggagacttcaatatttaaaagggaaacagtgggcattagaggaaaaaagaaaaaggaagtgtgaataaatgaagtagtttccttctttccaggctttaatcagtgttgactgaat

SEQ ID NO: 628358 - DNA, 554 bp, Homo sapiens
ttgactgggtttaccatgaactttagaagcagcctgtcctttcttgcagagggtgcattgttttcccaagtgaaggactggaatcgtttcttggtatttcatcatgaaaatgtcttactgaatcttggcatctctccagagagattttaaaggcagtgatgtggggataagagcctcgctctaaattgaaaattagattttaaatttctttagaaatagaggctatgacaaactaaaaaagctctttctcaaaagtcactagcctcttttgtttggggagaaatctttaaagttataaataagtgtgaatcaaaaagcattggagccaagtctcaatcaatgtagatgtttctggtgccaaggttgaggatgcacctgggaaaaaggaacacaakatgacaggagcatctgagatttgtgcttcttccaaagacggttgggagacttcaatatttaaaagggaaacagtgggcattagaggaaaaaagaaaaaggaagtgtgaataaatgaagtagtttccttctttccaggctttaatcagtgttgactgaat

SEQ ID NO: 628359 - DNA, 554 bp, Homo sapiens
ttgactgggtttaccatgaactttagaagcagcctgtcctttcttgcagagggtgcattgttttcccaagtgaaggactggaatcgtttcttggtatttcatcatgaaaatgtcttactgaatcttggcatctctccagagagattttaaaggcagtgatgtggggataagagcctcgctctaaattgaaaattagattttaaatttctttagaaatagaggctatgacaaactaaaaaagctctttctcaaaagtcactagcctcttttgtttggggagaaatctttaaagttataaataagtgtgaatcaaaaagcattggagccaagtctcaatcaatgtagatgtttctggtgccaaggttgaggatgcacctgggaaaaaggaacacaagatgacaggagcatctgagatttgtgcttcttccaaagacggttgggagacttcaatatttaaaagggaaacagtgggcattagaggaaaaaagaaaaaggaagtgtgaataaatgaagtagtttccttctttscaggctttaatcagtgttgactgaat

SEQ ID NO: 628360 - DNA, 549 bp, Homo sapiens
cttcatttcaagtctctagcagcatatgaaatttctttagaaagtggttacctttcctgaggacacacacctccccacaaccttctgtagggcccctgtgacatccttgttcctaaggctgtaaatgagtggattgagcatgggagtraggatggtgtagaaggcagatacagctttgtcctgctcaggggtgtggtaagaatgaggcagcacgtatgtgtacatggcagccccatagaagaggctgacaaccaccatgtgtgaggagcaggtggccacagcctttcccctcccctctgcctcgctcatcctataaacagtaatgagaattcttgtgtaagagcccgagatgacagagaaagggatgaggagcatcataatacagcagacatacatggctgtctcgtaggctgatgtgtccgtgcaggagagcttcagaagggcaggcacctcgcagaagaagtggttgatctcccgagaggcacagaaggggaactgcatggtgacgggggtgagcaagaaaccatcgatagaccctcccagccaggc

SEQ ID NO: 628361 - DNA, 549 bp, Homo sapiens
cttcatttcaagtctctagcagcatatgaaatttctttagaaagtggttacctttcctgaggacacacacctccccacaaccttctgtagggcccctgtgacatccttgttcctaaggctgtaaatgagtggattgagcatgggagtaaggatggtgtagaaggcagatacagctttgtcctgctcaggggtgtggtaagaatgaggcagcacgtatgtgtacatggcagccccatagaagaggctgacaaccaccatgtgtgaggagcaggtggccacagcctttcscctcccctctgcctcgctcatcctataaacagtaatgagaattcttgtgtaagagcccgagatgacagagaaagggatgaggagcatcataatacagcagacatacatggctgtctcgtaggctgatgtgtccgtgcaggagagcttcagaagggcaggcacctcgcagaagaagtggttgatctcccgagaggcacagaaggggaactgcatggtgacgggggtgagcaagaaaccatcgatagaccctcccagccaggc

SEQ ID NO: 628362 - DNA, 549 bp, Homo sapiens
cttcatttcaagtctctagcagcatatgaaatttctttagaaagtggttacctttcctgaggacacacacctccccacaaccttctgtagggcccctgtgacatccttgttcctaaggctgtaaatgagtggattgagcatgggagtaaggatggtgtagaaggcagatacagctttgtcctgctcaggggtgtggtaagaatgaggcagcacgtatgtgtacatggcagccccatagaagaggctgacaaccaccatgtgtgaggagcaggtggccacagcctttcccctcccctctgcctcgctcatcctataaacagtaatgagaattcttgtgtaagagcccgagatsacagagaaagggatgaggagcatcataatacagcagacatacatggctgtctcgtaggctgatgtgtccgtgcaggagagcttcagaagggcaggcacctcgcagaagaagtggttgatctcccgagaggcacagaaggggaactgcatggtgacgggggtgagcaagaaaccatcgatagaccctcccagccaggc

SEQ ID NO: 628363 - DNA, 517 bp, Homo sapiens
aagcttatcaccaagttgttaaatgcttaacagtaagagaacacacttgcggcagcatcatgcttgccccagcatttagcactagtatcraaactcacaatatggatttgattatgaaaaaaattgaacatagtgtatattttggctattttgatttttcatgaccttttctatatataggtgatttgtcgagattagtctatagatttttattttttattaatattcttttgttctatttagtgcagctattttgccccccgagttacatacatgtaattgtaactttgatgtttaggccaaaaagttttgaaatatttcagacattttcattctgtgtgctggatttttgaaaaaaatattttccatcgaggtatgtgattaatatacaatttaaaatttttaatgtaatttctatgcacttaaaatctttggtctagacattaaaactatgcaaccattggtttatgagatcaacaatgataaatttgtactttaagatcatgccagtgaattc

SEQ ID NO: 628364 - DNA, 517 bp, Homo sapiens
aagcttatcaccaagttgttaaatgcttaacagtaagagaacacacttgcggcagcatcatgcttgccccagcatttagcactagtatcaaaactcacaatatggatttgattatgaaaaaaattgaacatagtgtatattttggctattttgatttttcatgaccttttctatatataggtgatttgtcragattagtctatagatttttattttttattaatattcttttgttctatttagtgcagctattttgccccccgagttacatacatgtaattgtaactttgatgtttaggccaaaaagttttgaaatatttcagacattttcattctgtgtgctggatttttgaaaaaaatattttccatcgaggtatgtgattaatatacaatttaaaatttttaatgtaatttctatgcacttaaaatctttggtctagacattaaaactatgcaaccattggtttatgagatcaacaatgataaatttgtactttaagatcatgccagtgaattc

SEQ ID NO: 628365 - DNA, 541 bp, Homo sapiens
ggacaacggtttactatgctttagaagcttatcaccaagttgttaaatgcttaacagtaagagaacacacttgcggcagcatcatgcttgccccagcatttagcactagtatcaaaactcacaatatggatttgattatgaaaaaaattgaacatagtgtatattttggctattttgatttttcatgaccttttctatatataggtgatttgtcgagattagtctatagatttttattttttattaatattcttttgttcwatttagtgcagctattttgccccccgagttacatacatgtaattgtaactttgatgtttaggccaaaaagttttgaaatatttcagacattttcattctgtgtgctggatttttgaaaaaaatattttccatcgaggtatgtgattaatatacaatttaaaatttttaatgtaatttctatgcacttaaaatctttggtctagacattaaaactatgcaaccattggtttatgagatcaacaatgataaatttgtactttaagatcatgccagtgaattc

SEQ ID NO: 628366 - DNA, 622 bp, Homo sapiens
agcatttagcactagtatcaaaactcacaatatggatttgattatgaaaaaaattgaacatagtgtatattttggctattttgatttttcatgaccttttctatatataggtgatttgtcgagattagtctatagatttttattttttattaatattcttttgttctatttagtgcagctattttgccccccgagttacatacatgtaattgtaactttgatgtttaggccaaaaagttttgaaatatttcagacattttcattctgtgtgctggatttttgaaaaaaatattttccatcgaggtatgtgattaatatacaatttaaaatttttaatgtaatttctatgcacttaaaatctttggtctagacattaaaactatgcaaccattggtttatgagatcaacmatgataaatttgtactttaagatcatgccagtgaattctatctaattggagttcttcaaataagcaggagttcaagtgtgaatgatgagcaggaatgacctaagtaacaaggagaactgttggaaatgtgggaacactgtcatgggtaaaattagttttcacccttgttgcatgtacaaattctggtataaaaagcgagtactaaaaatgagt

SEQ ID NO: 628367 - DNA, 587 bp, Homo sapiens
tgagatcaacaatgataaatttgtactttaagatcatgccagtgaattctatctaattggagttcttcaaataagcaggagttcaagtgtgaatgatgagcaggaatgacctaagtaacaaggagaactgttggaaatgtgggaacactgtcatgggtaaaattagttttcacccttgttgcatgtacaaattctggtataaaaagcgagtactaaaaatgagtgccaggttaaccttaagactgtgatagcgacagttagctttgggaatctcaccctttgctgtccattatgtttttctcttcaatagcaggtccagcagcaggtagccaagttttctactttttcatttttgttgtcgttctgtcagaccctgctctgcatcaaagattggcacaattcttggtgaccatctaactcagaatacgtttgagtgctaaaaggctaagctagacaggacatgaggacaacaggcataagaaagggaatatcttgagaaracagggctaaatggtgaccctgactataagacatttaattctctgtacaatcagattcattatgtttcctccccagcagtattttca

SEQ ID NO: 628368 - DNA, 507 bp, Homo sapiens
atctagaaatagaacagcctgaatctgtaaatgcctaaygtcagttgacagcagctgcattatgcaggctgttaagaagatagagatccagtgacaaatagagcttgcatcatggtgatggctagtactcccattcaggagatacattgacatcactgtctctggggtccttgtccctagcctgcaattacagttcatataaaatgtgacagactccttaagaaaaatgtaacctctcaatttacaaagtaaacacccaagataagtcaggttgctggcagctgcaacttaaattgcttttttctcttttactttgttcacgacattgttttgaaagtttctctttttacacttccaactttcgggcatctctcttgaaatagaaatcaatgtttctaaggaagtattgtcttgcaaaagatacattttgggccattccccatcactcaagtattagtatgtaatcatcctgtctttcttgtaacttgtaatacataaaactttcag

SEQ ID NO: 628369 - DNA, 548 bp, Homo sapiens
agaacagcctgaatctgtaaatgcctaacgtcagttgacagcagctgcattaygcaggctgttaagaagatagagatccagtgacaaatagagcttgcatcatggtgatggctagtactcccattcaggagatacattgacatcactgtctctggggtccttgtccctagcctgcaattacagttcatataaaatgtgacagactccttaagaaaaatgtaacctctcaatttacaaagtaaacacccaagataagtcaggttgctggcagctgcaacttaaattgcttttttctcttttactttgttcacgacattgttttgaaagtttctctttttacacttccaactttcgggcatctctcttgaaatagaaatcaatgtttctaaggaagtattgtcttgcaaaagatacattttgggccattccccatcactcaagtattagtatgtaatcatcctgtctttcttgtaacttgtaatacataaaactttcagcattgcaagcatttaaaaatattcattttactgatctcagtgtatataaga

SEQ ID NO: 628370 - DNA, 548 bp, Homo sapiens
agaacagcctgaatctgtaaatgcctaacgtcagttgacagcagctgcattatgcaggctgttaagaagatagagatccagtgacaaatagagcttgcatcatggtgatggctagtactcccattcaggagatacattgacatcactgtctctggggtccttgtccctagcctgcaattacagttcatataaaatgtgacagactccttaagaaaaatgtaacctctcaatttacaaagtaaacacccaagataagtcaggttgctggcagctgcaacttaaattgcttttttctcttttactttgttcacgacattgttttgaaagtttctctttttacacttccaactttcrggcatctctcttgaaatagaaatcaatgtttctaaggaagtattgtcttgcaaaagatacattttgggccattccccatcactcaagtattagtatgtaatcatcctgtctttcttgtaacttgtaatacataaaactttcagcattgcaagcatttaaaaatattcattttactgatctcagtgtatataaga

SEQ ID NO: 628371 - DNA, 481 bp, Homo sapiens
attcaggttttctgaggctgaagcttatgcaatctggggcatcttaagaaaacaggctacaaatcatgattgcacaggtataatattctcttcagtgaaactccaacaaaattacacctttagaaagctgacaaaataccacaaagaaatacataaacaccycaacttaaatcttaactggttgaacttaccacttaccattttttccaacaactggctacattactatgtactctaatattttctataagcaagaagagatgattcaatcctagtacggttggttgaaatttttaaattttttggtagtttagaaaattctttgggtctttcccctttgttcaggattgaggtccaatctgagaaagccactgttaaattactttcatatatgacctgccttagcttccccaaaaattgaccttagaaaatatttgaaactgagaaaaatgattcagagcagtctgaagaatgtgagctt

SEQ ID NO: 628372 - DNA, 481 bp, Homo sapiens
attcaggttttctgaggctgaagcttatgcaatctggggcatcttaagaaaacaggctacaaatcatgattgcacaggtataatattctcttcagtgaaactccaacaaaattacacctttagaaagctgacaaaataccacaaagaaatacataaacaccccaacttaaatcttaactggttgaacttaccacttaccattttttccaacaactggctacattactatgtactctaatattttctataagcaagaagagatgattcaatcctagtacggttggttgaaatttttaaattttttggtagtttagaaaattctttgggtctttcccctttgttcaggattgaggtccaatctgagaaarccactgttaaattactttcatatatgacctgccttagcttccccaaaaattgaccttagaaaatatttgaaactgagaaaaatgattcagagcagtctgaagaatgtgagctt

SEQ ID NO: 628373 - DNA, 295 bp, Homo sapiens
gaggagggggagtcaaagcacctccagaaacccccctgaaacggagttgtggcctggactggggaagtccttgttcgaggtgcccaggtccaggcccgcttctggtttccccacagggagtgccgttctggtcaaatatagagtagcaktgattagcctagtgatttcccttatttcaacgacggcaaagtcctggcactttttctgttgagaactgttttaagaccccttctgcccagaggtctgacggcattctcttttgcaacgtccaattctctacacttacaacttttcc

SEQ ID NO: 628374 - DNA, 295 bp, Homo sapiens
gaggagggggagtcaaagcacctccagaaacccccctgaaacggagttgtggcctggactggggaagtccttgttcgaggtgcccaggtccaggcccgcttctggtttccccacagggagtgccgttctggtcaaatatagagtagcattgattagcctagtgatttcccttatttcaaygacggcaaagtcctggcactttttctgttgagaactgttttaagaccccttctgcccagaggtctgacggcattctcttttgcaacgtccaattctctacacttacaacttttcc

SEQ ID NO: 628375 - DNA, 543 bp, Homo sapiens
tgtctactatctgtcatgtgatgctatatgggagtcaggttggaatttggtatcttattgttttgtcagtcctgtgatctctattttaatgttaattccacaatggagggagtgcaacaaggtgtgcccaatcccccttccctcatggcctgaaatttactttttcagattgctctcagctccactggccaagaagggggatccattcagttgattgggcggcttaggattttacttttagatttcatcaagaagccatatttggaaggatcatgttctgaaccctgacagaggagtttaaaatttttcacatctgtctattaactcatcatagactaaactagtttaygcagttaaataaaataatgaactatttcaaaacaaaatttgactctagtagacagtgtctgcacaatcatagcaatccagttgtgaaaaatgttataaaagaaccaagaaataaccatgtgactacaaaacaatgagggattaggcatcagaagactgaaaataagcaacatagttgagtgtactctattttcc

SEQ ID NO: 628376 - DNA, 500 bp, Homo sapiens
aggctattatacaaatccaaagatgtatttatttttaaaaatgggtaaaaagtataattttgtatgagaaagagacttgtatagtaaatgtagttctaaaataaaacaactcattatttaagagggaaattttggacaaaacagaaagtccaagtatgtcataaatagtctgtgtaagatatgataaggtttataaagagaatttatgaaagaaaagtttttggagactaaagctactctttcttagatgggaggctcaagtaactccatcttgaatggtgatctgccctattggcttctgattaactccaggggrgaaggcctttaagatttccagtttatttattgctcctcgtgtaagaacaggtacttattataaatcctgcccttaggtcaaacaacttttatgttatcatacttcaattgtcctacacatgccttctgaatcattccttccctatggcatataagtcctgggttttggggttaatggcacagga

SEQ ID NO: 628377 - DNA, 511 bp, Homo sapiens
taatccaatttgagtttaaaatagtgaaataagtgtctagtttcattctgtatttggatatgcattttttgcatcaccatttattgaggaagtagtgcttttcttggtgtatgttcttttcaacttggtcaaacatcagttgactataaatgagtgaatttatatctggrctctcaggggttctcttctgtttgtgtgtctgcttttatgccagtaccattctcttttgatgtttaatagcttgtagtatatcgggtagtatgatgcctacatattcattcattttgctcagaattgcattggctatttggagtcttttttgcttccatatgaactttaggattgtttttttctatctctgaagaatatcttttgtattcggatagtgattgctttaattctgtagctctcttttggtagatggacattttaatgatatcaattcttctaatccacgaacatggggaatctttccatttatttgtgatctcttcaatttctttcattagag

SEQ ID NO: 628378 - DNA, 587 bp, Homo sapiens
gcaatgagtccatattgtcctgggcttttttttttttctggtgggagacttttattactacttcactgcattattcattattggtttgctaagatttactatcgtaggatttatgtatcagtcaattcatgtcttccagcttatctaatttttgacatgcaattattcattatactttcataatcttttgtatttctgtggcctcagttgtaatatwtcctttgtaaatttctgatttgaaccttcttagtctagtttattttgttttttcacaaaacaactcatctgatgttttgcattgtttttatcatttttttatttctcctctaatcaatattaatgtatctactaattttgagtttagcttattcttgtttttctagttaattaaggtacaatattacctttccttatttgaagtctttcttctttattgatgtagccattcattgctataaactataaacttcctctttgaactgcttttgctgtgtcctgtaggttttggtatgttgagttttccatttttatttgtctcaaacaaccttttattttcccttttaattttttcattgacccatctattg

SEQ ID NO: 628379 - DNA, 410 bp, Homo sapiens
aactaacacatatcctcctctgattttttcaaaacattgaagggcaaaaacacttccaaattcatttactgaagccaacattacctttaaaccaaagccagataagaacactaactcccaaaatattataggtcaatattcctgamaaacagctttcataatttttggtaaaaattaacaaaatactaacaaaccaaagcagtgcattaaaaggatacttcaccttaatcaagtgggattattcctaggatgtataaaccaaaagtatgtcagacaggtctcaatcagattgaaagtttatttcaccaaggtaaaggacatgcttggaaaaaagaacacaattacagaaacagtctgtggtctgtgcttttctttaaagataattttgaggactttaatatttaaagggg

SEQ ID NO: 628380 - DNA, 410 bp, Homo sapiens
aactaacacatatcctcctctgattttttcaaaacattgaagggcaaaaacacttccaaattcatttactgaagccaacattacctttaaaccaaagccagataagaacactaactcccaaaatattataggtcaatattcctgacaaacagctttcataatttttggtaaaaaytaacaaaatactaacaaaccaaagcagtgcattaaaaggatacttcaccttaatcaagtgggattattcctaggatgtataaaccaaaagtatgtcagacaggtctcaatcagattgaaagtttatttcaccaaggtaaaggacatgcttggaaaaaagaacacaattacagaaacagtctgtggtctgtgcttttctttaaagataattttgaggactttaatatttaaagggg

SEQ ID NO: 628381 - DNA, 410 bp, Homo sapiens
aactaacacatatcctcctctgattttttcaaaacattgaagggcaaaaacacttccaaattcatttactgaagccaacattacctttaaaccaaagccagataagaacactaactcccaaaatattataggtcaatattcctgacaaacagctttcataatttttggtaaaaattaacaaaatactaacaaaccaaagcagtgcattaaaaggatacttcaccwtaatcaagtgggattattcctaggatgtataaaccaaaagtatgtcagacaggtctcaatcagattgaaagtttatttcaccaaggtaaaggacatgcttggaaaaaagaacacaattacagaaacagtctgtggtctgtgcttttctttaaagataattttgaggactttaatatttaaagggg

SEQ ID NO: 628382 - DNA, 410 bp, Homo sapiens
aactaacacatatcctcctctgattttttcaaaacattgaagggcaaaaacacttccaaattcatttactgaagccaacattacctttaaaccaaagccagataagaacactaactcccaaaatattataggtcaatattcctgacaaacagctttcataatttttggtaaaaattaacaaaatactaacaaaccaaagcagtgcattaaaaggatacttcaccttaatcaagtgggattattcctaggatgtataaaccaaaagtatgtsagacaggtctcaatcagattgaaagtttatttcaccaaggtaaaggacatgcttggaaaaaagaacacaattacagaaacagtctgtggtctgtgcttttctttaaagataattttgaggactttaatatttaaagggg

SEQ ID NO: 628383 - DNA, 565 bp, Homo sapiens
gaaggaatgtgcctttacataataaatctcacagctaaatcatactcgatggagagaaacagattttccgctaagatcaggaagaagacaagagtgctcactctcactgcttctattcaacataataccrgaaactagccagagcaattaggcaataaaaagaaagaaaaggctttcaaatcagaggaagttaaattatcttgccatctgtttgcagatgacatgattttacatataaaaaactctaaagactccaccaaaatcccatcagagttaaagaattcaagaaacttgcaggatacaaaataaacatatataaatgagttgtatttctatacaccaaaaaggaaccatccaaatatgtaattaagaaaagaataccattcccaataccatccaatagaataaaatacataggaataaatacagctgagggagtgaaagatctgttcactaaagaggagataaataagtgggaggatatctcatgttaatgggttagaataactaatattctttaaatgtccatattactccagaaaatgtctgattcagtataacccca

SEQ ID NO: 628384 - DNA, 565 bp, Homo sapiens
gaaggaatgtgcctttacataataaatctcacagctaaatcatactcgatggagagaaacagattttccgctaagatcaggaagaagacaagagtgctcactctcactgcttctattcaacataataccggaaactagccagagcaattaggcaataaaaagaaagaaaaggctttcaaatcagaggamgttaaattatcttgccatctgtttgcagatgacatgattttacatataaaaaactctaaagactccaccaaaatcccatcagagttaaagaattcaagaaacttgcaggatacaaaataaacatatataaatgagttgtatttctatacaccaaaaaggaaccatccaaatatgtaattaagaaaagaataccattcccaataccatccaatagaataaaatacataggaataaatacagctgagggagtgaaagatctgttcactaaagaggagataaataagtgggaggatatctcatgttaatgggttagaataactaatattctttaaatgtccatattactccagaaaatgtctgattcagtataacccca

SEQ ID NO: 628385 - DNA, 565 bp, Homo sapiens
gaaggaatgtgcctttacataataaatctcacagctaaatcatactcgatggagagaaacagattttccgctaagatcaggaagaagacaagagtgctcactctcactgcttctattcaacataataccggaaactagccagagcaattaggcaataaaaagaaagaaaaggctttcaaatcagaggaagttaaattatcttgccatctgtttgcagatgacatgattttacatataaaaaactctaaagactccascaaaatcccatcagagttaaagaattcaagaaacttgcaggatacaaaataaacatatataaatgagttgtatttctatacaccaaaaaggaaccatccaaatatgtaattaagaaaagaataccattcccaataccatccaatagaataaaatacataggaataaatacagctgagggagtgaaagatctgttcactaaagaggagataaataagtgggaggatatctcatgttaatgggttagaataactaatattctttaaatgtccatattactccagaaaatgtctgattcagtataacccca

SEQ ID NO: 628386 - DNA, 565 bp, Homo sapiens
gaaggaatgtgcctttacataataaatctcacagctaaatcatactcgatggagagaaacagattttccgctaagatcaggaagaagacaagagtgctcactctcactgcttctattcaacataataccggaaactagccagagcaattaggcaataaaaagaaagaaaaggctttcaaatcagaggaagttaaattatcttgccatctgtttgcagatgacatgattttacatataaaaaactctaaagactccaccaaaatcccatcagagttaaagaattcaagaaacttgcaggatacaaaataaacatatataaatgagttgtatttctatacaccaaaaaggaaccatccaaatatgtaattaagaaaagaataccattcccaataccatccaatagaataaaatacataggaataaatacagctgagggagtgaaagatctgttcactaaagaggagataaataagtgggargatatctcatgttaatgggttagaataactaatattctttaaatgtccatattactccagaaaatgtctgattcagtataacccca

SEQ ID NO: 628387 - DNA, 548 bp, Homo sapiens
tcctttgggcagacagtccttctgtggcttccagaagccatacacaaagatggagttcctggaacatgagtgacctcaaagataacttctggggacctctctttagacctgcagccttggctgggcatgatggctcatgcttgtaaccccagcactttgggaggccaaggcaggaggatctcttgagcctaggagtttgcaaccagcctgggcaacatagcgagatcctgtctctgaagaaaataaaaaaaaaaatagacctccaatcttccataatggacttctttgcttccaagaaacagagaatttcctgacaaggctcacccaagcttccatctggaagtggatatttactagtaaggaatgggctgctccatatttgtgtacagaaagttacctggaaatrtgcaaagcttcagtccatgtttgctattttagagcttgcctttgtgtgctaaggaattatgctggcttaaggtaattttattttcagtcttccaaggggaaactgtcagtaatttatgttgtacagctttaggttatcatta

SEQ ID NO: 628388 - DNA, 602 bp, Homo sapiens
tctaaaataaaaaagaaagttgcacacagcatacctgctgacttttcactggcccagacttagtcctaaygccacacctagaagtaaagcaaaggcaatattctgagagatctcatgcatagctgaaaattgccagaatggtaaaatagaatattgagacgaattggcagcttatggcacagctgccagggttgggagcgcctgagggggcactgcagagtgtgcccagtgtgtgctcccatttcaaatgggcatgagcaggatgggagggggaggaaggagagtggagataagggaatggcggtgtggaagaggttcaggggaagacagagatgcaaaagaagaagggagagggaggagacaggcagtgagaaacgagggtgaggcagaaagagggacaagaggattgccccacctgcagatgggactcgttttgtttctgtggaaaccatggagtttttagtgggcaacagatgaggatgaggatgagggtgggttcttgccggcagcagcacctctgtccagccagggctgatgtcgtgctagccttggcctgtaccctaccctcctcctgccccttgccctaaaacccagccaggcag

SEQ ID NO: 628389 - DNA, 602 bp, Homo sapiens
tctaaaataaaaaagaaagttgcacacagcatacctgctgacttttcactggcccagacttagtcctaatgccacacctagaagtaaagcaaaggcaatattctgagagatctcatgcatagctgaaaattgccagaatggtaaaatagaatattgagacsaattggcagcttatggcacagctgccagggttgggagcgcctgagggggcactgcagagtgtgcccagtgtgtgctcccatttcaaatgggcatgagcaggatgggagggggaggaaggagagtggagataagggaatggcggtgtggaagaggttcaggggaagacagagatgcaaaagaagaagggagagggaggagacaggcagtgagaaacgagggtgaggcagaaagagggacaagaggattgccccacctgcagatgggactcgttttgtttctgtggaaaccatggagtttttagtgggcaacagatgaggatgaggatgagggtgggttcttgccggcagcagcacctctgtccagccagggctgatgtcgtgctagccttggcctgtaccctaccctcctcctgccccttgccctaaaacccagccaggcag

SEQ ID NO: 628390 - DNA, 492 bp, Homo sapiens
atacactgctgccattttctgcccatgaagggaaatacccaaggtactctggcagaacagatttttgaaaacttgagtccctgatgatgtaagtcagccacaatgttaatcaaccccagagccaccttatttctagacttattatgcaagataaaaaaaatcaacttgcagtatgaaccacttttagttgggttttatttcrgcaaacatatgccaaggcacagcataaaattccacaagggacaaatcaatgagcccagaacttccaatgagggggacaactaagtcatatacacaataactagaatgtaaatggtattgaacttcaagcacaacattggatgctagaaaaaaagaatgccttcaaagttttaaaagaaaacacttttctaccttgaattctgcaatcaaccataccattgatcaagaacaaaagtagatagaattatccttagacatgcaaggacgaaaatttaccttccatatgccttc

SEQ ID NO: 628391 - DNA, 383 bp, Homo sapiens
gccaccattttcacacttcctcttcgtccacgtcaccatcacttgcatggacttctatactcctacgttgcctttttgcttccattctcatctccacccctataatctgttctctccacggcagatagaataaccattttaaaacttaaatccaaaatctttctgtggcactcaggataaatcccagcctctatgggctcacagggtctggcctctgccggcttctcatttctcctgcaaatacttcaacctgcaatgaaaactttgcctatgtgagttccattcccaagttctcttgcatctgccaattcactccaaagagaaatcaagctccctttcaggctaagrtgcaaaatagagtttggcgtatctcctaaggccaa

SEQ ID NO: 628392 - DNA, 551 bp, Homo sapiens
aagcttgggcctggtggatgaatggccacaggtgggaagtaggcaatagttaggtctccttagagagacaggtrtggcagagctacaagttgaaaacaagattaagaccacctgcatggcgagacttaacacacaaaactgatgagccatgaggaatgcatgtttttaaacagactgcaccagtacaaaccagtctatcctacaggggctaatggctggaaagccacaaaaggtcactcccctagcaccagtaacatcagctaagatggaacactggcagatctactactagcaggattagagagaatagtagttaggctaagcatcacatgatcagtctgccggccccaggccttctaccctagcttgattctctaggctatcctacccacagcacgggccatgcagaacagggctgaaggattatgggttttctttacaatcctccccagctgtcagaaactgcccttatgcccgacaataatcctacattaaatcaccccagcaaaccaaacccttatctaggctggaccaccccaaacttaccctgt

SEQ ID NO: 628393 - DNA, 551 bp, Homo sapiens
aagcttgggcctggtggatgaatggccacaggtgggaagtaggcaatagttaggtctccttagagagacaggtgtggcagagctacaagttgaaaacaagattaagaccacctgcatggcgagacttaacacacaaaactgatgagccatgaggaatgcatgtttttaaacagactgcaccagtacaaaccagtctatcctacaggggctaatggctggaaagccacaaaaggtcactcccctagcaccagtaacatcagctaagatggaacactggcagatctactactagcaggattagagagaatagtagttaggctaagcatcacatgatcagtctgccggccccaggccttctaccctagyttgattctctaggctatcctacccacagcacgggccatgcagaacagggctgaaggattatgggttttctttacaatcctccccagctgtcagaaactgcccttatgcccgacaataatcctacattaaatcaccccagcaaaccaaacccttatctaggctggaccaccccaaacttaccctgt

SEQ ID NO: 628394 - DNA, 551 bp, Homo sapiens
aagcttgggcctggtggatgaatggccacaggtgggaagtaggcaatagttaggtctccttagagagacaggtgtggcagagctacaagttgaaaacaagattaagaccacctgcatggcgagacttaacacacaaaactgatgagccatgaggaatgcatgtttttaaacagactgcaccagtacaaaccagtctatcctacaggggctaatggctggaaagccacaaaaggtcactcccctagcaccagtaacatcagctaagatggaacactggcagatctactactagcaggattagagagaatagtagttaggctaagcatcacatgatcagtctgccggccccaggccttctaccctagcttgattctctaggctatcctacccacagcacgggccaygcagaacagggctgaaggattatgggttttctttacaatcctccccagctgtcagaaactgcccttatgcccgacaataatcctacattaaatcaccccagcaaaccaaacccttatctaggctggaccaccccaaacttaccctgt

SEQ ID NO: 628395 - DNA, 559 bp, Homo sapiens
agcattcacaactagcttggttctctaccaatggtcaaaatggttgattttgctactgaatgagagacatcaattttcttgagattcaactatcttttgtgccacttctgtgtaatgccaactagtcatttggtgagtttatttagataaagaatcrgattttgaagcaaacttgtttcctctgtgaccaaaaaaagggcattttaagcctgcaaataaaacttaaaatgctttatttctataaataaataaataaactgagcaaataaaaaaatacaacacatggaacataaaaactccagtaacaattggaccaggtcacccttagtgtaaatgtcaacattctttttcaaattgttatttaattatttgttattctatattttatttatttgacagccaaagcttccctcccagaggaggatgttcctttgcctttgtccagagcccttcaggagaagcagaggaattgctcagagatgagctgggattgcttggggggcacaaggagatagcgatgcccatcatcattgtaatagttaggattggctctcaggca

SEQ ID NO: 628396 - DNA, 559 bp, Homo sapiens
agcattcacaactagcttggttctctaccaatggtcaaaatggttgattttgctactgaatgagagacatcaattttcttgagattcaactatcttttgtgccacttctgtgtaatgccaactagtcatttggtgagtttatttagataaagaatcagattttgaagcaaacttgtttcytctgtgaccaaaaaaagggcattttaagcctgcaaataaaacttaaaatgctttatttctataaataaataaataaactgagcaaataaaaaaatacaacacatggaacataaaaactccagtaacaattggaccaggtcacccttagtgtaaatgtcaacattctttttcaaattgttatttaattatttgttattctatattttatttatttgacagccaaagcttccctcccagaggaggatgttcctttgcctttgtccagagcccttcaggagaagcagaggaattgctcagagatgagctgggattgcttggggggcacaaggagatagcgatgcccatcatcattgtaatagttaggattggctctcaggca

SEQ ID NO: 628397 - DNA, 559 bp, Homo sapiens
agcattcacaactagcttggttctctaccaatggtcaaaatggttgattttgctactgaatgagagacatcaattttcttgagattcaactatcttttgtgccacttctgtgtaatgccaactagtcatttggtgagtttatttagataaagaatcagattttgaagcaaacttgtttcctctgtgaccaaaaaaagggcattttaagcctgcaaataraacttaaaatgctttatttctataaataaataaataaactgagcaaataaaaaaatacaacacatggaacataaaaactccagtaacaattggaccaggtcacccttagtgtaaatgtcaacattctttttcaaattgttatttaattatttgttattctatattttatttatttgacagccaaagcttccctcccagaggaggatgttcctttgcctttgtccagagcccttcaggagaagcagaggaattgctcagagatgagctgggattgcttggggggcacaaggagatagcgatgcccatcatcattgtaatagttaggattggctctcaggca

SEQ ID NO: 628398 - DNA, 559 bp, Homo sapiens
agcattcacaactagcttggttctctaccaatggtcaaaatggttgattttgctactgaatgagagacatcaattttcttgagattcaactatcttttgtgccacttctgtgtaatgccaactagtcatttggtgagtttatttagataaagaatcagattttgaagcaaacttgtttcctctgtgaccaaaaaaagggcattttaagcctgcaaataaaacttaaaatgctttatttctataaataaataaataaactgagcaaataaaaaaatacaacacatggaacataaaaactccagtaacaattggaccaggtcacccttagtgtaaatgtcaacattctttttcaaattgttatttaattatttgttattctatattttatttatttgacagccaaagcttccctcccagaggaggatgttcctttgcctttgtccagagcccttcaggagaagcagaggaattgctcagagatgagctgggattgcttggggggcacaaggagatagcratgcccatcatcattgtaatagttaggattggctctcaggca

SEQ ID NO: 628399 - DNA, 630 bp, Homo sapiens
cttgcccataagcacactaacactacctctatttctgtattgctgccatctgctgagaatttagccgcaggtccaaaaacactcaaaaaaagggaactggctgggtgtggtggctcacgcctgtaattccagcactttgggaggccaaggcagacagatcacctgaggtcaggagtttaagaccaggcctggtcaacatggtgaaaccccgtctctactaaaaatacaaaaaattagccaggtgtggtggtgtgcacctgtagttccagctactggggaggctgaggcaggagaattgcttgaaccgggaaggcggaggttcccgtgagctgagatcgygccattatactccatcctgggcaacaagagagaaactccgtctcaaaaaaaaaaaaaaaaaaagtggaagggggggtgcggggaactgttaagtacttggaggattggatgtattttcaaactgttcctaggactccacatattcagggaaattgagctcttgagaatgatgataagacaagaggaatctcaggctgttgtttaagcacatgctacctgcttagtaattggtatgataactatttcttataaagagtatttgtgagtaaattttcttattattcctagtat

SEQ ID NO: 628400 - DNA, 630 bp, Homo sapiens
cttgcccataagcacactaacactacctctatttctgtattgctgccatctgctgagaatttagccgcaggtccaaaaacactcaaaaaaagggaactggctgggtgtggtggctcacgcctgtaattccagcactttgggaggccaaggcagacagatcacctgaggtcaggagtttaagaccaggcctggtcaacatggtgaaaccccgtctctactaaaaatacaaaaaattagccaggtgtggtggtgtgcacctgtagttccagctactggggaggctgaggcaggagaattgcttgaaccgggaaggcggaggttcccgtgagctgagatcgcgccattatactccatcctgggcaacaagagagaaactccgtctcaaaaaaaaaaaaaaaaaaagtggaagggggggtgcggggaaytgttaagtacttggaggattggatgtattttcaaactgttcctaggactccacatattcagggaaattgagctcttgagaatgatgataagacaagaggaatctcaggctgttgtttaagcacatgctacctgcttagtaattggtatgataactatttcttataaagagtatttgtgagtaaattttcttattattcctagtat

SEQ ID NO: 628401 - DNA, 564 bp, Homo sapiens
ttggaatgccttgccttaccagatgtcaataattattatgaaactatactaattaagactgtggtatttgtggtatctgcacagggatagataacctgactataggaaccagatagagtgcccagaaaaaaagtcatgcatatgttgtagtaaacagtattattcctccctcaaattccttctcttgctataagattatatatttccactcgtggccatataacttgctgtgcctccctgggagaggagtgaactcctccctactccccccataccctgmcattgatgttgggcttcgcctaccttgctttggccaataaaatgctagcagaggtgacatcacacctgacagaaactttaatcatggtgagtatataactataatgacagaaatctcattgcgaggtttgacaattcttttccttctgccaaaaaaaaatgtcatatgcctaataaggactgctctttcagttttaatcctgaaataaagaaaaaagaactgtagatggaacccagtgctgacatgctgtcagtatgtagtgtgagcaagaaataagctgcata

SEQ ID NO: 628402 - DNA, 556 bp, Homo sapiens
catggaagtacctctatgagcctgcaataaccaaagtcttattgagtttggggcccaaattcaaactttgaatacctggaaagccatcccagaaagggtaggcacaaataagcccacactgcaaagactgaaataaacatctaactcttcaatatccagacactgaaacacatctaaaagtatcaaaatcattcaggaaaacatgacactaccaaatgaactaaataaggcaccagggaycaatcctggagaaagagagatatgtgacctttcagacagagaattcaaaatagctgtgttgaggaaactaaaagaaattcaagagaacacagggaatgtattcagaattccctcagataaatttaacaaagagaatgaaataattgaaaagaagcagaaattcaggagctgaaaaatgcaattggcatattgaagaatgcatcatagtccattaacagcagaattgattaagcaaaagaaagaattagtgagcttgaaaaaaaagctttttgaaattgcacagtcagaggagaaaaaataagggagcacacctaca

SEQ ID NO: 628403 - DNA, 510 bp, Homo sapiens
tagtcaataataattttgcatttaaaaagaactatatttggattgtttgtaacaaacaattgtttgtaacacaatggataaattcttgagagaagggatactctattttccatgagttcattattacgtattgcatgcctgtttcaaaacatctcttgtaccccataaacaaatgcacctactatttacccacaaaattaaaaaagaaggcactgtaaaaatgacttttcagaatctatcctatttagctatatgaatgcagtgttattttctgagactgagaacccttggagagatggctttgagcagaaagctcatgattcggctgggagatatttttattatgagatgccttggagacatccaagtagaaatgtcaagtagatagttagttagatgtgtgtgttggaacctagagcacagaagggggctggcagattcaaattkgtgagtcatctttttctcttcagggatgtaagttaagtgtgtgggtgaaataccctggggaaa

SEQ ID NO: 628404 - DNA, 165 bp, Homo sapiens
cagcatgtgtgtttgagcaatatgaaatgtgggcaccctgaaaaaagaacaggayaacagcaattgttcagggaataagagagataaccttaaactctgaccgcaggtgagccgggcagaacagagccatatttctcttctttcaaaagcaaatgggagaaatat

SEQ ID NO: 628405 - DNA, 165 bp, Homo sapiens
cagcatgtgtgtttgagcaatatgaaatgtgggcaccctgaaaaaagaacaggacaacagcaattgttcagggaataagagagataaccttaaactctgaccgcmggtgagccgggcagaacagagccatatttctcttctttcaaaagcaaatgggagaaatat

SEQ ID NO: 628406 - DNA, 279 bp, Homo sapiens
caattaacatttgtcaaatggagaataaaagagtcaatccattagtaaggctaagaatcttayggcttaggcaaaagacatgatcatgcatccattcagttattcacaaatatttttcgttattactctgtgctaaatactggcacacaacggtcagcagaatagttatagattttactagtctggtagggaagacagacattactcaaattatacacaaactattaattacagaccgtgaagtgctatgattgactcttaaatttgtggcacactttt

SEQ ID NO: 628407 - DNA, 541 bp, Homo sapiens
tgcccggctaattttgtatttttagtagagacagagtttcactatgttggtcaggctcatctcaaactcccaacctcaggtgatctgtctgcctctgcctcccaaagtgttgggattataggtgtgagccactgcacccgaccttttttttttttttggagatggagtctcactctgtcacccaggctggagtgtagtggcacratcttggctcactgcaacctctgcctccctggttcaagcgattctctggcctcagcctcccaagtagctgggactacaggcatgtgccatcacacccagctaatttttgtatttttagtagagacaggatttcaccatgttagtcagactggtctcaaactcctcatctcaggtgatccgctcacctcagcctcccgcattgctgggattacaggtgtgagtgccactgcgcctggcccacccaattcatttctctttcctaaaataaaaaattagtagatggagtgctcactttggcagcacatatactaaaaaaattagcagatggaaaagaatg

SEQ ID NO: 628408 - DNA, 612 bp, Homo sapiens
ataaatatataagtatatgtattttaattttacatataatataaatatatatattgttaattttatatttaaatatatacttatctattaattatgtaaatattattaaaaatattaaataacaaatttaaatttmatgctgttgcaagtagtttcaaaactttaaggaaactggatccaaagccatactgcaaaaaattttgcatgagtaatcttcatcctttggggtcaccaaaattaaataaatagccccaagaagatgaatatctagttgcttaaattgctgaggtcataaaacaataatgatattaaactgagaaatatgtcttcattaatataaaagtttaggaaacttttgagacctgagtctcagttccatggcttcttaactattttcgcgtgtttcattcatatcttttgatataactttgtttttttttactcaattgatggtgtattacactgacaaattttcaaattttacaaaattttgcattcctgggatagaaccgaaagctaggttttaatttcatttgttttctctactctttgttttctctattattgatttccctggtatctttattatttcttttcttctacttacattag

SEQ ID NO: 628409 - DNA, 582 bp, Homo sapiens
tttagtggaaatgttacaggaaaggggtcccgatccagaccacaggaaagagttcttggatcttgcccaagaaagaatttagggtgagttcacagtgcaaagcaaaagcaartttatgaagagagtaaagtagtgaaagaacagctaatccacagacagagtagggcattgctgaaagtaagaggaggaacatgtccactagaggtatagtacttgtatatatatataggattaataaaaaagatcttggggagatgtactacaagggcttgtgacaaaggattgattttcttcattactatattttgcaagaatcaatatttttatctttaaagcaaaattcagaatgcctttgttctgatattgggatatctggatgctcccaagtctggatctgtttagtaaacattattaatttttccccttaactgtaagcatctagatgctagaaatgcctgactttttgggaatgccacccagcaagtctcagactcattttcctagtcctcactcaaaatggagtcactctggtttgaatgcctctgatggaaagacaggttaagagagagagaaaggaagaag

SEQ ID NO: 628410 - DNA, 568 bp, Homo sapiens
ctagtcctcactcaaaatggagtcactctggtttgaatgcctctgatggaaagacaggttaagagagagagaaaggaagaagcttggcttcaaaaatggccttgttgtatagatgaagactctcagagagaatagatggtaaaagtttcttttcaaacttttaaagttgtcagattctcaaactctgtgggaktgagggaaaagcatagaaaggaaagggggccatggctgcattgatggagattatctacagaaacaaattttccccatttaggacagctttgcgaggccacttctgcatgctggccaagtggcagccattgacaaatgtgtcaaataaatatattttgggataaaatattttaattctttcacctagttcagctttggttaagatataaccttgggtaaggctaattggctttgatgagttacttgaaaagatacctttggtttaaaaaacaaaaagttggataaagtgtttatcaaagataagctctcagataaagttgagcttgcttctttttcagtgtaccatactgagtccagatatagaaaatgctttcct

SEQ ID NO: 628411 - DNA, 574 bp, Homo sapiens
tggatataaaattcttcgttgcaatttttttcttcaagaatgctgaatatgggcttctaatttcttctgtcttgtagggtttctgtagaaargactgctcttagcctaatgggtttcaccttgtaggtgccctgccccttctctgtaactgcttttaacatttcctctttcattgagactttggagaatctgatgattatgtgttgtggggatggtcttcttttgaagtatcttgctggtgttctctgcatttcctgaacttaaaatttggtctctctagcaaagttggggagattttcatggataatattctgtaatatgttttccatgatgcttgttttctccctgtctctttcagggacaccaatgtgtcatagattgagtctctctacatgatctcatatttctcagaggttttgttctttctttttcatgcttttttcttttttttttctgactgagtaatttcagagttggtcttcaagctgtgaggtttttttcctcagcttggtctattctgctattgatactttcaattgcattattcaattattgtggtgtgttttttagctct

SEQ ID NO: 628412 - DNA, 565 bp, Homo sapiens
cggcccctctgtatttcctcatgattgcaaccctgctccctctcacttctctgaaagtaygagctcctatccctcttgagtgctcgctgcagatgttggcttggcactcccaggctggatatcacagctctggggtgagctcaggctttatgtcccctccccagcttggaggcagcaggggaaagaaccttagcagttgttgttgcagagggcctttcactttcctcttggggctccactccagagaaatgcagagcaaccgtcaattagtgcaattggcctggcatgcagcatctgcaatgtgagtctaagggcaggggggttgggttgcctgttaatgagcatggggtggggagggtatttcaaagaagagacagactagcctcttttctttagagcatttgcagcttcctggagttgtagtttaaagcactcaagatctttgctccttccccagtcttatggcagcaaggacagccccactacagtggcagtgggagaggggcttttggttgcctctgggagctcctcctcagggaaactagaaatgttcaactagcagatg

SEQ ID NO: 628413 - DNA, 565 bp, Homo sapiens
cggcccctctgtatttcctcatgattgcaaccctgctccctctcacttctctgaaagtatgagctcctatccctcttgagtgctcgctgcagatgttggcttggcactcccaggctggatatcacagctctggggtgagctcaggctttatgtcccctccccagcttggaggcagcaggggaaagaaccttagcagttgttgttgcagagggcctttcactttcctcttggggctccactccwgagaaatgcagagcaaccgtcaattagtgcaattggcctggcatgcagcatctgcaatgtgagtctaagggcaggggggttgggttgcctgttaatgagcatggggtggggagggtatttcaaagaagagacagactagcctcttttctttagagcatttgcagcttcctggagttgtagtttaaagcactcaagatctttgctccttccccagtcttatggcagcaaggacagccccactacagtggcagtgggagaggggcttttggttgcctctgggagctcctcctcagggaaactagaaatgttcaactagcagatg

SEQ ID NO: 628414 - DNA, 592 bp, Homo sapiens
tcccttttctttgtcaaccatgtgtacagtaaaggaacaggcaacatggctctggccaggtaaagaaccatctgcataatgaaagattagggtggggaggccaacttcttcaygagctatgtaaatgggtaacctggtccaaccaatcctttgggctctatgtaaatcagacattgcctcctctagctcctctacaaaccctttgcatttcatgacagaactggaagacccactcaggagcccctctctctgcaggagacagcagcattctatttcttttgcctattaagcctctgctcttaaactcactccttgtgtgtgtgtgcatcctcaatttccttgacatgaggcaaggaaacttaggtattactccagatgaacaataccactccacacagatgaacaacaccacttcacaactaccagtgggtgtgctcagccatgggttgggtggctgttctacattcctgtgctaagaatactgcctggtgaagagtaggcggtgggggttcccagggtagagggactaaatttatttccatatagtggctgctgggtgcgtgaggtgccagcctagaactattaaataggc

SEQ ID NO: 628415 - DNA, 554 bp, Homo sapiens
ttcaaaatctttgctccagttagaatcagaatgtgtcatgactacaaataattgctaaatttaccctgttatttaagaaacgacaaaagaatgattcagcgttaataagtcattttttcccagaggcctccatgagctataactgagaagctctgactcagacatcataagccattttattgcacagcaccacaaggtacagctgacactctatcagatcttgtagtttataaagaaagcatcttattccttatattcttttatcctrataggaatactctccagcaaatcaagaacctaagagatgaggaaatggaatttcagggtgtaaagaattcttaaaattgtatgttgcctgggcattcattttgaatacacgttttactttctcataccagggctcagtcaccatcgacacagtttctagttctatgccacacccaaatgactcaagccacagataagaactttaagtcagtgcaggcaaatgccttgatggttcctcacaggaaggataggcaaaaagggagcccattctgccagggaggagagat

SEQ ID NO: 628416 - DNA, 623 bp, Homo sapiens
ctcccttgcccatttttaatgggttatttgattttgcttgatttgtttaagttcctcttaaattcaggatattagacctttgtgagatgcacagtttgcaaatgtcttctcccattctgtaggttgtctgtttactttgttgatagtttcttttgctgtgcacaaaatctttagtttatttaggccctatttgtcaattttattcttttttcaattgctttttgggacttagtcaaaaattctttgccacagctgatgttgagaaggctatttactaagttttcttctaggagttttatagttttagatcttacatttaaatttttaattcatcttgagttaattttttatataatgaaaggtaggggttcagtttcattcttctgcatgtgcctagccagttatcttacctccgtttactgattacggagtscttattgcttgttttttattgttttgttgaagattcgatggttataggagtgtggttttatttctgggttacctattctgttccatttttcaatgtgtctgttattgtactagtaccatgctgttttagttactgtagcctgataatgtaatttgaagttgggtagcatgatgtctccagcttcaaaaat

SEQ ID NO: 628417 - DNA, 571 bp, Homo sapiens
taacacaacagttttttattgctcttcatatatgccagataaaggctggtgtacacacatgtgtgtgtgtgtgtcttaggggatgttccactctacagtcccatggtcactgtttgatgaagagaccctgtttgatgatgatcccagcatttagaatgycaatggtatcggtgctatagcaagagaaaaaacagttgaagagtggcattctatttcatctatgttttggaatggaagtgatacctaacacttcttcccacagcccattactcagaactatttttgttgtttcacttaatagggggtgggtagagtggagaaatgtgggaaaatagatggaatatttgatgaactctctagtgtctgcaacaaaactctccctccaattgtcaaccaacaggatttttacagcctcttattatgggcaagtcaccgttataagatttgtgataggtaaaatacatgtcttttgtgtaaagtagaagaaaattattgtaaatataggtgaaccacacatgcagttcaatcttagcagatgttatctatagcactgaggtcttggaaattgact

SEQ ID NO: 628418 - DNA, 574 bp, Homo sapiens
ctttgaaacaattaacacatagtactcttctagtataacactaatatggtcttggaaagtatacacagtaacaagactatacttcaacaacaactgcagatctcagtggcttaacacaacagttttttattgctcttcatatatgccagataaaggctggtgtacacacatgtgtgtgtgtgtgtcttaggggatgttccactctacagtcccatggtcactgtttgatgaagagaccctgtttgatgatgatcccagcatttagaatgccartggtatcggtgctatagcaagagaaaaaacagttgaagagtggcattctatttcatctatgttttggaatggaagtgatacctaacacttcttcccacagcccattactcagaactatttttgttgtttcacttaatagggggtgggtagagtggagaaatgtgggaaaatagatggaatatttgatgaactctctagtgtctgcaacaaaactctccctccaattgtcaaccaacaggatttttacagcctcttattatgggcaagtcaccgttataagatttgtgataggtaaaataca

SEQ ID NO: 628419 - DNA, 554 bp, Homo sapiens
ttcaaaatctttgctccagttagaatcagaatgtgtcatgactacaaataattgctaaatttaccctgttatttaagaaacgacaaaagaatgattcagcgttaataagtcattttttcccagaggcctccatgagctataactgagaagctctgactcagacatcataagccattttattgcacagcaccacaaggtacagctgacactctatcagatcttgtagtttataaagaaagcatcttattccttatattcttttatcctaataggaatactctccagcaaatcaagaacctaagagatgaggaaatggaatttcagggtgtaaagaattcttaaaattgtatgttgcctgggcattcattttgaatacacgttttactttctcataccagggctcagtcaccatcgacacagtttctagttctaygccacacccaaatgactcaagccacagataagaactttaagtcagtgcaggcaaatgccttgatggttcctcacaggaaggataggcaaaaagggagcccattctgccagggaggagagat

SEQ ID NO: 628420 - DNA, 554 bp, Homo sapiens
ttcaaaatctttgctccagttagaatcagaatgtgtcatgactacaaataattgctaaatttaccctgttatttaagaaacgacaaaagaatgattcagcgttaataagtcattttttcccagaggcctccatgagctataactgagaagctctgactcagacatcataagccattttattgcacagcaccacaaggtacagctgacactctatcagatcttgtagtttataaagaaagcatcttattccttatattcttttatcctaataggaatactctccagcaaatcaagaacctaagagatgaggaaatggaatttcagggtgtaaagaattcttaaaattgtatgttgcctgggcattcattttgaatacacgttttactttctcataccagggctcagtcaccatcgacacagtttctagttctatgccacacccaaatgactcaagccacagataagaactttaagtcagtgcaggcaaatgccttgatggttcctcacaggaaggatrggcaaaaagggagcccattctgccagggaggagagat

SEQ ID NO: 628421 - DNA, 623 bp, Homo sapiens
ctatttgtagagcagactaggacccacctcatggtcagacactcttgtaaaagagacactctgagctaaaggtagctgtatttcagaacaattgatgcaatggctccacattccttagcctgcttctttacttaaataacactctgcatttgaaaatcatagctcatgtattattgcattattcctttatctattgattcaagcaattgttacatttttaaaaatgtatgtactgagcactgaactagaggctgtaacgacaacaaaaagtttatgcatggaagaatcacaatatctggactgtgttctcaataattgttsactatcaattaaaataaatatgaggtagacacaaatcaggaaaaacataatacatggtatgaataacaatcatggagtaaaagccttgctctctatgtacagaggaaggagtgtccatcatttaccagaaaataagggcatgtttcccaaagatagtaatatttgaagatccacaaactcctggatcattgaatgaggacaagttaagacattccagcctccttaattttaaaatcagtgcaaaggttattttattacatgttgtatatgctctatgaatccacagcttttatcggacagat

SEQ ID NO: 628422 - DNA, 514 bp, Homo sapiens
ccactatgagtctgcaagaaccacagcattactgaatttgatgtgtcccctaaagcatatacagtttcgatcacaacacctaattcctttcaaatatctggaaagccttcccaagaaggacaagtacaaacraacccagacagtaaagactacaataaatacctaactcttcgatgtccagacactgaagaacatctgctagcatcaacaccttccaggaaagcattaccttaccaaatgtaataaacaaggtaccagggaccagtcctggagaaatagagatatgtgacttttcatatagagaattcaaaatagatatgttgaggaaactcaaagaaattcaagatgacacatagaaatttagaattctatcagataagtttaacaaagagattgaaattattaaaaggaatcaaacagaaattctggacctaaaataattggcatgctaaagattgcatgagtcttttaatagcagaattgattaagcagaagaaagaatcagtgaccttga

SEQ ID NO: 628423 - DNA, 630 bp, Homo sapiens
agcagcatcaaactcctaggctcaaatgatcttctcacatctgtctcctgagtagttgagactacagttgcatgccaccatgcctggctaattttttttattattattttttattttttagagacagtgtctcactatgttacctaggctgatctaaaactcctggacttgagcaatcctcctgcctcaacctcctgagttgcagagattacaggcatgtgccactgcacctacctcttttaaaatttatttttagaggcagggtcttactctgttcctcaggctggaatacagtggcaggatcataattcactgcatccttgagttcctgggcttgagtgatcctcctgcctcagcatcccaaggagctaggactayaggcacaggccaccatgcccaaacagatatatttttaattttttgtagagatatggtctcactgtgtttcctaggctggtgtcaaactcctagcctcaagtaatcctcccaccacagcctctcaatgagttaggattacatacatgagccactgcacctggctcagtattcttaattcatggcaacatgtttatttgcataagctcaataatctgttttcttttgtaatagaacacatttggtatattagtt

SEQ ID NO: 628424 - DNA, 590 bp, Homo sapiens
ccaggtaataaagcaagatcctgttaaaaaaaccaaaagcaaacaacaacaacaaccacaaaaataccttggaaacatgggtttgcatagttcccttgcaaggtcccttataaataatgtcacgttctgacaagcctaggagcctaaagatatttacaaatatgggcacagtctgatggcaaatccttgtctcaactgcctagcttcaagagggttttaaaagtctaatctgagacttcttataaaaaatttccacaaaccacctttaaaaagtctatatgggctggacatggtggatcatggtggatcaccccagaagtttyggaggccaagggaggaagatcacttgtggccagtaatttgatactagcctgggcaacatagagaaaccccatatctaaaaaatacaataaactatcttaaaagcctatatggccaatcaatctttttgttgcaacagtaagagtgattgcccatataggcttttaaacaataatcatgtcaagtaagataccaaaacttattttataaataaattgatcctattaaaatgtatctttaatagaaatggggagctagagagagaaaaa

SEQ ID NO: 628425 - DNA, 603 bp, Homo sapiens
aaagcctatatggccaatcaatctttttgttgcaacagtaagagtgattgcccatataggcttttaarcaataatcatgtcaagtaagataccaaaacttattttataaataaattgatcctattaaaatgtatctttaatagaaatggggagctagagagagaaaaattttatttcagcagaaaactgctgtgtgtcttttattagattctagccgttaccattgtttttgagattttattattttcctacagttgagactagatcctaaattatttcctggctacaatacatctctataggactatattttaattttttaatgatgtttttagttgacttccaaatggaagagaatttttttcattctgtcatacaaattctcttttgattagaattgttctgtgcattatatctctaccatgtacctcttgttttttacttcatccaagaaaattaactcgtggtattccaaagactggagatgattcaacaaatgacagcagctgtatgaattagtaacttttctgagttctcatttttgccaccttgttatgtcatcccaattcaaattttggtgttcttaaaatttctaactgagat

SEQ ID NO: 628426 - DNA, 603 bp, Homo sapiens
aaagcctatatggccaatcaatctttttgttgcaacagtaagagtgattgcccatataggcttttaaacaataatcatgtcaagtaagataccaaaacttattttataaataaattgatcctattaaaatgtatctttaatagaaatggggagctagagagagaaaaattttatttcagcagaaaactgctgtgtgtcttttattagattctagccgttaccattgtttttgagattttattattttcctacagttgagactagatcctaaattatttcctggctacaatacatctctataggactatattttaattttttaatgatgtttttagttgacttccaaatggaagagaatttttttcattctgtcatacaaattctcttttgattagaattgttctgtgcattatatctctaccatgtacctcttgttttttacttcatccaagaaaattaactcgtggtattccaaagactggagatgattcaacaaatgacagcagctgtatgaattagtaacttttctgagttctcatttttgccaccttgttatgtcaycccaattcaaattttggtgttcttaaaatttctaactgagat

SEQ ID NO: 628427 - DNA, 530 bp, Homo sapiens
tggatgctttgccttttcccatgtggcagctgctctccactagtgagtgcgaaaggccaatgtgacagccttttgtagccacaatcgtggctcccaagctcttgtctagcatccaggaaaaatgaggacacatgaataattgaatgatggtaaatgcagggaattttattgccagtgaatgtggctctcagtgggaaggggagctgaaaaggggagggggtagtaggtaatcttcccccraagtcctgccgtctccagccagattctcctccaaagtttcactgtcatcctgtccctctgaagttaagctgcttctctccaatgtccagctgtagttccaatgttcagctgcttctctcttctctgccagctgcgtctggaatgtttataggtacagtaagaggtggggcaggccatgggtagtttgggaaaaggcaatattccagtagggaaacagagatagatgttctgactttgggctgtaggtttcaggattttcagcttgagggttgggttttgtcagggaccca

SEQ ID NO: 628428 - DNA, 605 bp, Homo sapiens
atgggtagtttgggaaaaggcaatattccagtagggaaacagagatagatgttctgactttgggctgtaggtttcaggattttcagcttgagggttgggttttgtcagggacccacctttttctgcctagaatttcactgcttcctgtctctttcactaccaagattgaaccagaaagaaatccaatacctgaacagacctataataagtaacaagatcaaagccataataaaaatttttcccaataaagaaaagcccatgacccaatggcttcactgctgacttctaccaagcatttaaagaataactaatatcaaccctactcaaactatcctgaaaaatccaggagaagggaatacttccaaaccyattctgcaaggtcattattacccttataccaaaaccatggtataccaaagttaccaagacaagatatttccttgcagttgtctgcaagttgtcttgtatatattgtcttgtagatatgatattgttgttttatgtgtctctgtctataccagatgtctcagaataaacaaagacacatgataaaaagaaaactacaggccaatatctctgataagtattgatgcaaacagtctcaa

SEQ ID NO: 628429 - DNA, 543 bp, Homo sapiens
aatataaatcaaaagtaagatgagatatcatctcatcctacttaaaatggcttatatccaaaagacaagcaataataaatactggcaagaatgtgaagaaaaagggatgtgagaatgtaaattagtacaaccaccatagagagtaatgtgcatgttcctcaaaaactraaaattgagctcacatatgatccagcaattccactgctgggtatgtatgccaaagataggaaatcagtatattgaagtgcagtatatttgcactcccatgtttgttgcagcactgttcacaatagctaagatttgggagcaacctcagtgtccataaacaaatgaatgtataaagaaactgtggcacatatacacaatggagtattattctgccataaaacagaatgggaccctgtcatttctaacagcatggatgaaacttgagattttcatgttaagtgaaataagccaggtacagtaatacaaatatcactgttgtcactttttttgtggggtctgaaaatcaaaacaatcgaactcatggagatagtagaa

SEQ ID NO: 628430 - DNA, 559 bp, Homo sapiens
taccaaaatctgcacatattcaaatccctcagttggccttccagagcctaaggatgtaaaaaacttgcccctatatgtgcagatttcacatccttttcatactgtatttccaacctgcgtttggttgcaatatacggggatgcagcgggacaactgttcttcctgaaaaaaacccacttgtatgtggacctgggcagttcaaacccatgttgttcaagggtcatttgtaacttacaagatctatttttaataatagaaaaccatttacattgatatataaatgttttcataggctaatatttgagtatgattgcagagaaaacttttgactttggaatcacttggaagtatcaatcaaattatgaataaaaagaacataaaattaatatttattacattttgaaaaatggaaagrttaaaaatgttcaatgtaatcataaatgaaatgctagaaaggactgatggtatggaaatttaaaacttcttactctacaaatttactgaggaacattcttatttataattgttactcaaaggaatgagtaatgcttacagttac

SEQ ID NO: 628431 - DNA, 584 bp, Homo sapiens
ctttcttaatttaatccattgtacaattgacatcctattttattgtgactttttaaaccaaaagtatcatcatctaaaatgttggcatttagagtcatcagagattaatgtcattttgcaatgtcatggggcaattattttgtaaattgcatccttccagagatttctgattaaatctcaagatgaaaatggcttcctcaatgttatcaacagagtaaattgtcttcctgccaatgtttgtcattccaaatattatttcatcaacactgaaagtcaattttcctaaggcccttggagcaagcaaaattaccaagtgctttcactctaattccatgagggaaatgaagtaaattccaagcagtcattttgagtgctttaatttcaygttttattttggaatttatggatcacttggcaatcaattcataggaaacaaaaatagttttctttgaacatgcaaatttctgtatgcggtaaggttgtaagagttagtcctatttaaaaatgcataaaaaattccagcatgtcattattactttttgcaaggctttcatgaaatttaatgtaattttgctaaaactgca

SEQ ID NO: 628432 - DNA, 522 bp, Homo sapiens
agtgagaacaataacaaatagatataaagatggaagacaaaaattcttaaacatgaattaagtagtccttaatacttccccaaaatagttggtcacgagtcatgatgagacatttgacagatgaaaatttattctcagaggcttgatagagctccatctgagtttctaaagctttttactttttgtttatattttgtgtaccaatttggagacattgtcatcttcctagaggaaatattaatgttgcatacacaacctgataaaataagcttttcttgttatagatgaaaagatttaagaaactgatagctgcaaaatacggcaatgcaaaatcagatgagctttyaatgacataaaatttatcaagtagctgcaaactttgattatgcccttgcattcattcttttattccacaaatattttctcaactagtatgcaaaatgtatgcaaaacactgtgctaaatatgtgggcaattaaataactaaggagacccaatccttgccttgaaataattcaatca

SEQ ID NO: 628433 - DNA, 596 bp, Homo sapiens
tttcaatgacataaaatttatcaagtagctgcaaactttgattatgcccttgcattcattcttttattccacaaatattttctcaactagtatgcaaaatgtatgcaaaacactgtgctaaatatgtgggcaattaaataactaaggagacccaatccttgccttgaaataattcaatcacatttacttaaagttttctgtagcaagttctgtctccrtacaaattttaaaatgtgtccctcagaacgccatggtacggcagacgcactgtatcggcaaagtggatgcaaagtggatggaattctccgtattcttactttttactgtcctatttcagccaaaagcattctacttttctctttttgtgtaccgagtcaacaaaagtttttgcttgataaacctttgcaacttccaataaaattattgactgtacttaaccttagcatgctagcaacagaatcttggtatagtattttcttttaaaaagaaagtttagtcaggcttattcaaacatcatgtatttattttttgtttcaacaggtaattattgagcctatataaatgggaggtaattattaatattttatatgttcagc

SEQ ID NO: 628434 - DNA, 547 bp, Homo sapiens
atccaatattttaaataaacccgcatggatatgtgtgtgcatggatgcttatatatatatatgaatggaacaactcagtactttaacaactgaacaatttatagcttattgcaaaacctgaaatttagaactaggtgctaccattaacttcatcatgttatagtaattgatgtgacctaattttaaatggtcagacaactatctcacaaaactttcttaggaactaatttcacatataaagaaatcatattgtcacgatcccatattttttcaaaattgaaatggatcttaatataatcttgacatttacaatatttttacattttttaaattgttctttttattatttgaaaaaaagaagwagatatggctgagaatagaaaaaaaaaacttggaaaaataaagtcaacttagtgtcatgtttcccatgatagagggtaggagagcagtgagtatcacactgatattttattccactttgaccttccaccacttatcagtcacatccatatttatgtctgtttgctttgcttcctcaggggcatct

SEQ ID NO: 628435 - DNA, 349 bp, Homo sapiens
ggtaaggcaggttatgggagggaggagaagaggaagtctattgaggggcaataaataattgctagggagaatgattagatcagagaacagagattaacttggaaacagtwgtctttgaaatttaaatagtccttaaagacagttattgtacttgtgaaaagttctgatgaggtgtgctcacatcttggtcttctatctgcagtagatagtgaactaacagggagaggaaataaaatataattgttttccttagtgggtctgaatcttagcagattaaaaaaacaaaacaaaaaaacaaacaaacgaacaaaaaaaaaaaccttttagcttctctaggggaaatggtgaa

SEQ ID NO: 628436 - DNA, 569 bp, Homo sapiens
acagaatccgctttggagatgcatattaagaaaatagcttcagagtcattytttgctagtgccctaacaccagaaaagaacttaattatttgttctaattacggtgcaagaaaaaaaaaatggcagaaaaaatttttgtagggaggtaagcaatgcgtttgagaaagaaaggcatgcaggtacccacaagccatctcaggaagaagcagattttaaagcaggaaggaaacagaaaacgtgcagggacttccataatcagaatggaccatggacacccagagaaagatggatacttaattctaacctgaggacattgacacaaccaatgcctatgaggattttgagaaccactgtggcagagtctaaagctgggcagtggcacatatttattaaaactctgatgaggcatagagggcagaaggagggcaaagttaacaaggacaagcacattagtgtagtggggtgatgaagggcctcattaaatcttaattgtctgagaaattttctatttatttgctctaattcctaatcaattccaagaactcaacctgctcaaatattgtttcatt

SEQ ID NO: 628437 - DNA, 572 bp, Homo sapiens
ctacaaagataaagaagccatggagaatggaagaaaaaaaagagagaatagtccagccagcttccaaccattccagacgtccaaaytgaggtgtcagacaggtgagggcagccatcttgagttctccagcgtcaaataagccctcagccaagaagacatggagcaaagatgagctgtctctgctgagtcctgaagaaactgaaaatcatgagcaaataaatatttaactattgattggttttaggcactatattttaagaaagtttgttatgcagcaataaataattgaaacaaaactctttacagattttcatctgaagacaattattcttcatcctgctcattgctttctctttcctttgcttttctctccttttccttccctccttcctttcttctttccttttcttatttctttcttctctgcacctcagtgctagctgctctgtctcaggggctataaaaatatagatggtaaaacctggattctactcaaactgactttataaaacaataatgaaaaacatgcttataaatgcataactacaatataacaacaatataacaagaat

SEQ ID NO: 628438 - DNA, 601 bp, Homo sapiens
gtcttgctgtattgctcaactggagtgcaatggaacaatcataggtcactgtagcctcaaaacctgagtctcaagcaatacttttgcatcagtttctcaagtagctgggacaacccacacacactaccatgtccagataactgttcatttttattttttatagagaaagggtctcactatgttgttcaggctggccttaaactcctggcttcaaacaattctcccactttagcttcccaaagccctgggattatagatgtgagccactatgcctggctggctttttaatatatatatatttttaattttgttctcaattttagattaaggttaaaaatatagtactgataatttccttgaatactgaggactatttttaaactaggatatttaaatgataacctaatgatgatttttttctcctttggttaaggattctcgattgatagttaattaatttgtggttgaactaactgaaacatcataacagatctgagcagaytaaactgtaaaaggaagtgataactatgtgaatatggggttgtactatgtcacagatatgcagacccaaggacatctgaaagaaatgttcttaatgtat

SEQ ID NO: 628439 - DNA, 574 bp, Homo sapiens
tttatgcagtacatatagaatcttatctgtatcacgagcaatcatctcatttgatttttgataggaataccagatcacattaatggaagtataacaattataaattacacatattaaagttattcgttcttttcatgttagatatgcttgaaatctgtcatgcatgtataaaaagagaaatctcatttcttaaaaaacagtattcacgaatcatgctgacaaagagtaataagytcttgtttggtttgagaaaatgtaacatatatgtatgcatgagatttttcaagaatgaatatgggcagggtgtggtggctcacgcctgtaatcccagtactttgggaggccgaggccagcagatcacgaggtcaggaaatcgagaccatcctggctaacatggtgaaaccccgtctctactaaaaatacaaaaaagttagccaggtgtggtggtgggcgctgtagtcccagctactcgggaggctgaggcaggagaatggcatgaacccgggaggcggagcttgcagtgagccaagatcacaccactgcactccagcctgggcgacagagtgagacactg

SEQ ID NO: 628440 - DNA, 542 bp, Homo sapiens
gggcaaaattcagaggacacacaggtagaataaagtgttcttgaacaggactggggtgagataaccagctatttctaatcttctttggtggtgagagaagtagtctagactgtgtcgggggctgcttggtgtaacaagcagtagtgcctttcttatagtggaaatctgttaggtccctgattcccaggcttccagtcttttgaaagaatgaaaaatgatggaaaataatagattaggtctaagtgaaacgaattcaagcgacaggatgagcatccctgccttagaaaaaggcatggtctgaatacctgactactggggttttgcaatttattgcaaggcaacwactgggattttgaaatttatagcaaggtaaaaagtagtaaaaccaaaataatgtattcatttgattgtttggtaatgctttttattctgttaaaacaggttttacattagcaaactaaaaactgaaaccttgtgttaacaaaaaaaaatactgaatttattgattaactgaatttctattaatcaagaatattataaaa

SEQ ID NO: 628441 - DNA, 643 bp, Homo sapiens
gtgaaaacattgatgtttaatgaaaagtttatggggacaatgtcccaaagaaatcagcagtttacaaatgaataacttgttttaagaaggaatgagatgttgctgaagacgaagtctgcagtggcagaccacccacactgatttgtaagaaaaaaaaaatcttatttgtgccctaattgaggaggaccaatgattaatagcacaaacaatagccagcaccaatgacatctctttggttcagcttacacaattcttactgaaaaatctaagttgagcaaagtttccactcaatgtgtgccaaaactgttgcaactagatcagctgcaaataaaaacagagctttcaatggaaattttaaacaagtgaggtcaagatcctaaagcatttcttcgaataattgtaacatgactttatagatatgattctgaagacaagayacaatccaagcaatggctactgagagcggccagaagcagcgaaagcagtccagttaaagcaaaagcagaccagtcaagagcaaaggtcatagcaacagttttttttggggggtgctcaaggcattatgcttgttgactgtaaggagggccaaagaacagtaacatctgctcattatgagagtgttctgagaaagttagccaaagct

SEQ ID NO: 628442 - DNA, 541 bp, Homo sapiens
tgtgatgaagctgatactgaatgtgaaaaaaatattcaacaaaacagtatacatgttctttgatctccattattaatcagattctagaaaggcttgaggcttttaataattaccttgtaagtcactgagcgttatgcacttgctttgcatctattgtaatggtatatcttaaaattacttcgaaagtgttgaaagttttcacttgaaaacatttcttagaatgcctctataatttttggcaacaaaaattgcaaaaaggagaatttttaagtttatttttatttcaaaagaaagaacagaaaaataataagtagtgggagctcaagtggtatacaaaaacaaaatttaatatttaattttgttacttgtacttgggcatttcttgaagttagtaataatatttgattgagttcatagttttstttatataaattttcaatttcaacttcaatggaataaaattaattggtctataattttgcagcatctaaatgaagcaaataattgcaaaaaacttcaataggagcaagtaatttaacaa

SEQ ID NO: 628443 - DNA, 604 bp, Homo sapiens
aataatatttgattgagttcatagttttgtttatataaattttcaatttcaacttcaatggaataaaattaattggtctataattttgcagcatctaaatgaagcaaataattgcaaaaaacttcaataggagcaastaatttaacaagtttcggttataaaagtattttcataaataaatgccacacgtagataggagaaaatggtatctataaaaatacctgagttgaaatattggcacatttcagtgagaaaacatagaattgagaatattttccacttagatatttctgtgtacttattaagtacctctgcacttgtagataaagcattttctcaattaaaaataaatatcatagttgaagaaaaaagctaaataagggttttaactatttcaaatacttaaagcatagactggaaattttgaaaataatttaataaattcaagagatctattgtacacatgctgactgttgttattaacaatgcattgtattcttgaaaatctctgggaatagactatgtgttctcaccacaaaaaatcagtatgtgaggtaatgtgtgtgctaattatttcaattaagacatttcagaatgtacacat

SEQ ID NO: 628444 - DNA, 642 bp, Homo sapiens
atttctgtgtacttattaagtacctctgcacttgtagataaagcattttctcaattaaaaataaatatcatagttgaagaaaaaagctaaataagggttttaactatttcaaatacttaaagcatagactggaaattttgaaaataatttaataaattcaagagatctattgtacacatgctgactgttgttattaacaatgcattgtattcttgaaaatctctgrgaatagactatgtgttctcaccacaaaaaatcagtatgtgaggtaatgtgtgtgctaattatttcaattaagacatttcagaatgtacacatttcaaaacatcatgctgtacataaccatatatacttttttgtcaattaaaataaatacattaattagaagaataatttccattaatgatttaaaatattgtacattcaaaagtatatttttaaaaactacctttattataaaaatgctagtgaaaggatattgttaagaatctgattaatagacctaactctgatacaaagtctgtatattatttaacatttaaataataaatataaggaattatttttcctttgatgcatatgaatatattttgatttttatgaaaaaaatttattcttaaaattatatttaaatggaaatat

SEQ ID NO: 628445 - DNA, 620 bp, Homo sapiens
ctaaaaaagttgaacttataaaggcagaaagtagaatagtggctgtcagaggagacatggggagatgttcaaagagcataaactttcagttataagttgaatatgttttgggaacctaaagtacaacatggttactacagttgatatactgcattgtttacttgaaatttgataacagaatagattataagtgtcctcactctcttacacatgcaaataattgcaactacaggtggtgttggatgtgttaaattatttgcctttgataatacactgtatatacacacacacatatatatatacatacacacacacatatatatatatacacakcaatgagtatgtatcaaattatcatgttgtacacattgggcatatacattttgtcaattaagtacgtttttttttttcagagatgggttctcagtatattaccgaggctggtttcaaattcctgggctcaagtgatcctcctaccctggcctctcaaattgcttggaccacaagtgtgagctactttgctcagtctatcaagactttctactttaatatgttgatataattatataaattttttcatgtattatgttaatgtggtaaactatatagtttgattttca

SEQ ID NO: 628446 - DNA, 620 bp, Homo sapiens
ctaaaaaagttgaacttataaaggcagaaagtagaatagtggctgtcagaggagacatggggagatgttcaaagagcataaactttcagttataagttgaatatgttttgggaacctaaagtacaacatggttactacagttgatatactgcattgtttacttgaaatttgataacagaatagattataagtgtcctcactctcttacacatgcaaataattgcaactacaggtggtgttggatgtgttaaattatttgcctttgataatacactgtatatacacacacacatatatatatacatacacacacacatatatatatatacacatcaatgagtrtgtatcaaattatcatgttgtacacattgggcatatacattttgtcaattaagtacgtttttttttttcagagatgggttctcagtatattaccgaggctggtttcaaattcctgggctcaagtgatcctcctaccctggcctctcaaattgcttggaccacaagtgtgagctactttgctcagtctatcaagactttctactttaatatgttgatataattatataaattttttcatgtattatgttaatgtggtaaactatatagtttgattttca

SEQ ID NO: 628447 - DNA, 620 bp, Homo sapiens
ctaaaaaagttgaacttataaaggcagaaagtagaatagtggctgtcagaggagacatggggagatgttcaaagagcataaactttcagttataagttgaatatgttttgggaacctaaagtacaacatggttactacagttgatatactgcattgtttacttgaaatttgataacagaatagattataagtgtcctcactctcttacacatgcaaataattgcaactacaggtggtgttggatgtgttaaattatttgcctttgataatacactgtatatacacacacacatatatatatacatacacacacacatatatatatatacacatcaatgagtatgtatcaaattatcatgttgtacacattgggcatatacattttgtcaattaagtacgtttttttttttcagagatgggttctcagtatattaccsaggctggtttcaaattcctgggctcaagtgatcctcctaccctggcctctcaaattgcttggaccacaagtgtgagctactttgctcagtctatcaagactttctactttaatatgttgatataattatataaattttttcatgtattatgttaatgtggtaaactatatagtttgattttca

SEQ ID NO: 628448 - DNA, 654 bp, Homo sapiens
tcttctttcccaaacatcatttgtaatattgagtawaatgttatttaatacactcaacacattctgagagtaatacaaatgcaatccagaatgtttcattaatgtaagtcatgatttctaaatactcctcctcatccaatttcattttaattacaaattaatttttaacttaacataaagtcatatattaagtacatctgctccttaggatttgttactaactttatagttataatttcctaattataattttccaataatagtttcctaatttcataatagttcttctacaacctaatggtgatccctcaaatgtaaagtttgttatcaggaataattttcaacaagaaataaaactttaaaagaaggtgattctatagttattaaaatattgctagaaacatattaaagcaagaaaatcaatcaagagataaagaacatcactacatcaagtgttaaatcttccacaaactatgagtggatgatttacaaaacaaaataaaatctcaaagacactggaacaaaaagtttcccatgtattgttatatatttttctctatattagtttgttcttgaagagaaattgatgtagaaaaatcttaatctcatacatgcttcctcaaaatggaaaatttgaagttataaatattgtat

SEQ ID NO: 628449 - DNA, 568 bp, Homo sapiens
atctggtttacccatgatttctaaatatgctgctactgcctagaacatgccactcttatcattaccygtttaaattccactcattctacaatgtctgtcaacccatagcatcttcactaaatggcatagcccacagaagtttctctcatctctaaacttatttgctacttataactgctttatatttcagaggaattattatttctctaaggatgaggactgtgcatgacactgtttacagtttctaacacatagtagatacttgataagtgcaggatattttggcagatgttattagtattagtgttagaataatcaatcaaggaaatgagtaaagcacatttaataacatgtataattaaaaacagctttgaatcatatttgtattcagaggacttctttctgcatagaatcacaacagtacagttagaattgtattccttgttcaagcttaatcattgaaaactttcattctcacatgtgtgaatgttgggtatttgggtagctgtgtgaattaagttaaagaatatgcactaagcaagttgtggaatgtaataatgctaaatag

SEQ ID NO: 628450 - DNA, 561 bp, Homo sapiens
tcattgagaaacttctataatcttcttaaagagattgtttatttattaagcaaacacatattaagcacttactagaaaaggtacactttgaagcactgaagaaaaattacaaaacagatataaacacacacacaaaaaaaacgaaaaataattagcccctatgaagcttatgttgcagtggggtggttgtggaaggaatacatgaaatagataagtaaatayaaacatattagaaattgatccatattgtgagaaaaaaacaactgaaaaggagaaggaatgggagagggcttttgcaactttaaggagtatgggaaggcttcagagagaaggaatcatttgaacaatagcttagatgatgtgagtctcctatatatttagaaaggagtaatctaggcagagaggataaaaaaggcaaacaccatgaagtgggatttttgtctgaaatgttcaaaaacctcacggacctctatatttaggtaaaatttggatacagaggaatatgtaagtgggaaagtatttaatactggttgtctttcatggtatgtgatagctactata

SEQ ID NO: 628451 - DNA, 597 bp, Homo sapiens
ctgtggtgcaaatattcccaccaaggccaatttcaagctatcaagagttaaacaaactgttggcaaaatatctaagcatttaacaattaggtccagcaagccatgcaagctagcttcagcacgctgtgtgtgtccgtgtgtgtgtgattaggtcagagaacttgatgtaattttggtagaatatttaccatttttaagaatcgttattgtcatttttatgtttctttcttgcatttatgagtacactgaaaataactatcagtatctcaacaatctttgttttatcccttgtttttaacctcttagagataatggtggtccttctctgctcccaagtcaagaggatggactttgacggctaaagtttatgtttctttccttcccaaaacacatgaaaatagatcctctaaattttttatttcccagtaaagctacagtatgctcttatttatcctctgttttaggctcaatcagggcatttgtcattttgggtcaaatattttagtgtactttaagctaaaagaaatgtgtgtggtcccaaaccccagaattamccttgcaattcagaagtaaagatacaactaaaaaattaagaaa

SEQ ID NO: 628452 - DNA, 573 bp, Homo sapiens
agtttaaatatatatctttattgctagtttgttttgtgtgtgtgtctttctgtttgtctatgtgaatacacaactttcagttttctgaaatcatttaccttttctaaataatcagaataatcttaacctctgtttggtttggtaaataggaaggtaatatgatatactctgaaagtctcattatgcaacacttctgaatgtcttgaacttcatgtcaaaaagctaaggaattaagattcttgtctttcataaatgttcttagatttggcacaatatgacaaatgayagatttgttattaagaaatgtgtgccattgacacaacccatctctttttaaatagtgagatattacttgaattgcttggaaatttattaaacacattactgaccaactaagaatagccatgatgcatttgttaaatattacgtaaagacaaggcaaataaagttgaaattacctagtgggaaaacaggatacctttaagcagccagagtttctcaccaatatttgctttgaataatttattttcctgctatcatccataatataaaattgtattcaaattctgcaaa

SEQ ID NO: 628453 - DNA, 622 bp, Homo sapiens
atgttttagaattacagaacatttatttacataactacctgggttagagaaatattaatagctctaaaaggaaaagacattttctcaacccagtcaacattatactctctggattaatgatagactgactattgattgggacaatcaatttattggaagacaacttcaagatgattaacatccatgtaaatctttattgttctgggcttctgaacgtgaagttacatcagtggattgttctaacctaactatccatctctcactcccatgtccatctgtctcttcccagtgtgtaccttgtgcatttacattagttatgttttaggtgcatctcattccagttartaggtcatccagatgtttatatttcagaagttaaatagttgaggccacacaaccagccgttgtcatggaacacttactgagccacaccattagactcattttctatatggatgatttcctatactggttctgattagtaccacttattttggccacagcttttctgttttccaatttttaatcttttttggactctttaatagttatatatatatatatatatatatatatatatatatatatacagttacagacatagagacaaatatgtatctat

SEQ ID NO: 628454 - DNA, 592 bp, Homo sapiens
gaaggtacctgcttctcctttgccttccaccatgattgtgagtttcctgaggcttccccaggcatgcagaactgtgagtcaattaaacccttttcctttataatttacccagtcttgggtattcttcatagcagtgtgagaatggacaaatacacacaaactactacttcaatcttccttttttatcagtaacttttgaaataatttataataactcatgcttcttttctctatcattakgttttagaattcttgcagactttactggcaatggagatgtttattgcacatttagacatcaggtaaaaaatgttcataaacaaaagaaataatatttaatatggtaaatggtcaataggaaacatgttatttaaaaaaaaacctcagaggaggagtaaaataaataaacagtcttcaaaaattattgaaaacaaaacaaatatttcatgttacaatatttccgtatatggaaaaatcagttctcatgaacctggcagattactgcatggccagaatgggttcccacttgtagtactccggcatcattttcaagttgactcatttctcaatcatagttacattgataagttta

SEQ ID NO: 628455 - DNA, 592 bp, Homo sapiens
gaaggtacctgcttctcctttgccttccaccatgattgtgagtttcctgaggcttccccaggcatgcagaactgtgagtcaattaaacccttttcctttataatttacccagtcttgggtattcttcatagcagtgtgagaatggacaaatacacacaaactactacttcaatcttccttttttatcagtaacttttgaaataatttataataactcatgcttcttttctctatcattaggttttagaattcttgcagactttactggcaatggagatgtttattgcacatttagacatcaggtaaaaaatgttcataaacaaaagaaataatatttaatatggtaaatggtcaataggaaacatgttatttaaaaaaaaacctcagaggaggagtaaaataaataaacagtcttcaaaaattattgaaaacaaaacaaatatttcatgttamaatatttccgtatatggaaaaatcagttctcatgaacctggcagattactgcatggccagaatgggttcccacttgtagtactccggcatcattttcaagttgactcatttctcaatcatagttacattgataagttta

SEQ ID NO: 628456 - DNA, 592 bp, Homo sapiens
gaaggtacctgcttctcctttgccttccaccatgattgtgagtttcctgaggcttccccaggcatgcagaactgtgagtcaattaaacccttttcctttataatttacccagtcttgggtattcttcatagcagtgtgagaatggacaaatacacacaaactactacttcaatcttccttttttatcagtaacttttgaaataatttataataactcatgcttcttttctctatcattaggttttagaattcttgcagactttactggcaatggagatgtttattgcacatttagacatcaggtaaaaaatgttcataaacaaaagaaataatatttaatatggtaaatggtcaataggaaacatgttatttaaaaaaaaacctcagaggaggagtaaaataaataaacagtcttcaaaaattattgaaaacaaaacaaatatttcatgttacaatatttccgtatatggaaaaatcagttctcatgaacctggcagattactgcatggccagaatgggttcccacttgtagtactccrgcatcattttcaagttgactcatttctcaatcatagttacattgataagttta

SEQ ID NO: 628457 - DNA, 592 bp, Homo sapiens
gaaggtacctgcttctcctttgccttccaccatgattgtgagtttcctgaggcttccccaggcatgcagaactgtgagtcaattaaacccttttcctttataatttacccagtcttgggtattcttcatagcagtgtgagaatggacaaatacacacaaactactacttcaatcttccttttttatcagtaacttttgaaataatttataataactcatgcttcttttctctatcattaggttttagaattcttgcagactttactggcaatggagatgtttattgcacatttagacatcaggtaaaaaatgttcataaacaaaagaaataatatttaatatggtaaatggtcaataggaaacatgttatttaaaaaaaaacctcagaggaggagtaaaataaataaacagtcttcaaaaattattgaaaacaaaacaaatatttcatgttacaatatttccgtatatggaaaaatcagttctcatgaacctggcagattactgcatggccagaatgggttcccacttgtagtactccggcatcattttcaagtygactcatttctcaatcatagttacattgataagttta

SEQ ID NO: 628458 - DNA, 613 bp, Homo sapiens
ttatgaatatttgagcttttcaaaataaactgagtctgtttgctgtgatgaattaatgtagttaaaaaacaacaaaatatattcagtgaatctgagaaattcaatgtggaagtatattaagctaattttactgcatcggaatactttaaaatgcaggacagccakgttcacattaggtggcaaggtgaccttcaatggagccctaggcaaatcgttaaacaaatgaaatattgtatatgtgttgatatggtttggatttgtgtctccacccaaatctcatgttaaactgtaatccccagtgtcagaggtggagcctggtgggaggtgattggatcagagggatggatttcccccttgctgttctcatgatagtgagtaagctttcatgagatctgattgtttaaaagtgtatggcacctctcccttcactctcttcctcctgttcctgccatgtaagatgtgcctgcttcccctttgccttttgccatgatcataagtttcctgaggcctccccagccatacttcctgtacaccctgtggaactatgagccaattaaacaagactgagctgtgctgtaaggataaagtagatgacagagttcaaggatctcat

SEQ ID NO: 628459 - DNA, 613 bp, Homo sapiens
ttatgaatatttgagcttttcaaaataaactgagtctgtttgctgtgatgaattaatgtagttaaaaaacaacaaaatatattcagtgaatctgagaaattcaatgtggaagtatattaagctaattttactgcatcggaatactttaaaatgcaggacagccaggttcacattaggtggcaaggtgaccttcaatggagccctaggcaaatcgttaaacaaatgaaatattgtatatgtgttgatatgktttggatttgtgtctccacccaaatctcatgttaaactgtaatccccagtgtcagaggtggagcctggtgggaggtgattggatcagagggatggatttcccccttgctgttctcatgatagtgagtaagctttcatgagatctgattgtttaaaagtgtatggcacctctcccttcactctcttcctcctgttcctgccatgtaagatgtgcctgcttcccctttgccttttgccatgatcataagtttcctgaggcctccccagccatacttcctgtacaccctgtggaactatgagccaattaaacaagactgagctgtgctgtaaggataaagtagatgacagagttcaaggatctcat

SEQ ID NO: 628460 - DNA, 572 bp, Homo sapiens
tgttcttcccttctatgtgtccatgtgttttcatcacttagctcccacttgtgagaacatgcagaatttggttttttgttcctgtgttagtttgctaaggaaagtctrtcagacagcactggcacagaggctgtgtgtaaaacagtgcttatctgcctctgctggaagtttgcttaggatctgttctgtgcagtgtctctgaagatagatagaattgctacttgcattcccttccctgcccagagcgaaaatactgtctcatcagttttaaagagagttgcttttccttctatgtatacactacacacttttttccaacatttttttgcatgcattattttatttcgtttttagaataatcttaagatacaggcacagagtgtttcaagaatcctgaggaagaaccctgaggataaattccctggatagttaggcaaaatgttatgtaataaatgacatttaaactgcatcatggaaaataggtaggaatctgagaggctaaagaaaggaaggatattcacatagaggaagacttcattattgtgaatttgaaatatatctttcatagcagg

SEQ ID NO: 628461 - DNA, 572 bp, Homo sapiens
tgttcttcccttctatgtgtccatgtgttttcatcacttagctcccacttgtgagaacatgcagaatttggttttttgttcctgtgttagtttgctaaggaaagtctgtcagacagcactggcmcagaggctgtgtgtaaaacagtgcttatctgcctctgctggaagtttgcttaggatctgttctgtgcagtgtctctgaagatagatagaattgctacttgcattcccttccctgcccagagcgaaaatactgtctcatcagttttaaagagagttgcttttccttctatgtatacactacacacttttttccaacatttttttgcatgcattattttatttcgtttttagaataatcttaagatacaggcacagagtgtttcaagaatcctgaggaagaaccctgaggataaattccctggatagttaggcaaaatgttatgtaataaatgacatttaaactgcatcatggaaaataggtaggaatctgagaggctaaagaaaggaaggatattcacatagaggaagacttcattattgtgaatttgaaatatatctttcatagcagg

SEQ ID NO: 628462 - DNA, 572 bp, Homo sapiens
tgttcttcccttctatgtgtccatgtgttttcatcacttagctcccacttgtgagaacatgcagaatttggttttttgttcctgtgttagtttgctaaggaaagtctgtcagacagcactggcacagaggctgtgtgtaaaacagtgcttatctgcctctgctggaagtttgcttaggatctgttctgtgcagtgtctctgaagatagatagaattgctacttgcattcccttccctgcccagagcgaaaatactgtctcatcagttttaaagagagttgcttttccttctatgtatacactacacacttttttccaacatttttttgcatgcattattttatttcgtttttagaataatcttaagatacaggcacagagtgtttcaagaatcctgaggaagaaccctgaggataaattccctggatagttaggcaaaatgttatgtaataaatgacmtttaaactgcatcatggaaaataggtaggaatctgagaggctaaagaaaggaaggatattcacatagaggaagacttcattattgtgaatttgaaatatatctttcatagcagg

SEQ ID NO: 628463 - DNA, 402 bp, Homo sapiens
tctttatctttttcaattgtttccaactattaagacatctgcatgwttttccttaaatagttttcaaaatatttatttgtattgttcttgtagaatcaagaatataatatgttgcctaatagagtatataattaagttaatatgaagaaagtgcttgattttttttttcactgactatgactaaggtcaaaaataaaatcagatcaagttagaaaaaattaaaagtttattgtcatacacaaagtacaaattgcaattgggaagactttaacccacgtgataagaagctcaccttacaagagttacagcacagtttacaaagcataaagaaggaagattttgacttttattgcgattggctgttatacattagccttttttcaaagataagcagagctattt

SEQ ID NO: 628464 - DNA, 402 bp, Homo sapiens
tctttatctttttcaattgtttccaactattaagacatctgcatgattttccttaaatagttttcaaaatatttatttgtattgttcttgtagaatcaagaatataatatgttgcctaatagagtatataattaagttaatatgaagaaagtgcttgattttttttttcactgactatgactarggtcaaaaataaaatcagatcaagttagaaaaaattaaaagtttattgtcatacacaaagtacaaattgcaattgggaagactttaacccacgtgataagaagctcaccttacaagagttacagcacagtttacaaagcataaagaaggaagattttgacttttattgcgattggctgttatacattagccttttttcaaagataagcagagctattt

SEQ ID NO: 628465 - DNA, 590 bp, Homo sapiens
cgcttaattaccaagtaaattcacttgmataccattaccttaattcaaaggagaagccagaatgtttatcattggtgggagtaaaatatacacagattctttaccatggtgaaatagaataatactgaattcccaatacagaaatactaatttcataagctaatattcctatcttttagctgacttctttctctcttcaggatatatttactatttattatttacctttgaatttttgatttgggggatttttacctattgccatcctactatcttaagtatcctgtacaatgaaatatcttagcaaggaaacacttttaaaacttcacaaatatccaatttcattcttaacatatgggggaagcagtaaaagaaaaagcacttcaccacgtagaagagaaagtgatcattttaattaagataatttcaattcattatcaacatttaatcctctgcaaacaagggaacacttactagcagtacttgaagacttgtgagttggaattgcatgttacttgaaagatctaattaagctaaattttggtgcacagcaggttgtacatgatttcatgtttatgtagcaaaatgca

SEQ ID NO: 628466 - DNA, 590 bp, Homo sapiens
tatacctatacatatgtgtgttagatgatagataaatatgtacacattcagaattcaaaatgagtcacctattctttatggagcraaataatttgaaaacttacatttcagtataaaattgcaatctgagagttcacgtcatcaaatatgataattttaacttgtcatcaaagataaatgattactacttcacccgcagttcatcactcaacattagcctaaagacataagtatagcttggaacttccggggtagtatttgtgtcttactgttacagatccgaagtctagcacaatctgaggagcagagagagaaattgctgaataaaggcatatttaagtgatcagaaattcaaagcaaacatatttctacattgctaggccattttaagcagattggtttttatgcagttaaatcagtcaatcttttggaataagttgcagattttaagaagaggagatagatttacatttaaagtcaagttgcaagagtctattattatcccagttttgtatagagtaaatgttagaatatgtatagaaaaatatcagaggcaatcctgtcgtgacatcaaactgttaaccatagtt

SEQ ID NO: 628467 - DNA, 610 bp, Homo sapiens
tgaatccacttaccaagaaactggaggcaactctgtctaaactgtaatttgtttgatacaaacatgccatctacatttaccttgtccataatgataatgggaaggttagctgaaatcaggaaatactgtattatgagtttagtgactatttacaagtggaaatgaatttaatctggtatgatttattttactaaattgtagttgcttccttttcttttctcactagtcacaaatgatttatttcagtatcttctccagaacattgccagaggccagtctcaaacttaaccattgtatacataccagaatattttcattaaaaattaataacttttgtctttctctgaaaactacataatcactacttgtccattcttttggtccttgcctgttctttatggatcaatattatcaaagctactcctgttyccacaggcaaataacaattctatgtaatgggaaagatattaaatccgaattcatgttcctcttactagctatataatggacaattaaattattcctttaaattcctttctcctttagtacacaaggataaaatactcatttgattgttttaaagattaaagaagtatctgaaagtaactgt

SEQ ID NO: 628468 - DNA, 512 bp, Homo sapiens
ctaaatgttcccttagaaccactgtttacctaaccactccccacttctaaatggatactttgattgcaccaactttccaccacttcaaatagtgctgaaataaaaatgcacattgcctttatcatacttaatattatttcagtagtacaggccctcaaatgtagactttcacattgccaagttgttttttcaacagattgcaccatttatattcttgttgatcatgcatgagccaacccatttcactggaaatcgacagtcactgaaaatataaaaaatctgtcttatttgccaagtgaaaaggtagctcatgatggatttaatttgcatttctaagttgtagtgtttttgttttcctttagacattttcattactatttagtaaatgatcacatacattgatcactaatctatgaggtgcttactgatttcttagcagattaaatgayagcattatctactaaaaactttagtatatgtttcctatagtttgctataaatcatacttacag

SEQ ID NO: 628469 - DNA, 465 bp, Homo sapiens
agtcaacaaaacagcatcgtactggtataaaaataggcacatagaccaaaggaacagaatagagaacccagaaatgaacccaaacacttacagccaactgatctttgacaaagcaaacaaaaacttaaaytgggggaaaggacacccttttcaacaaatgctgctgggataattggctagccacatgtaggagaatgaaactggatcctcatctctggccttataaaaaatcaactcaaaatggattaagtacttaaatctaatacctgaaactataaaagttctagaagataacattagaaaaatccttctagacattggcttaggcaaggattttatggccaagaacccaaaagcaaattcaataaaaacaaaaaatatttgggacttaaactaaagagcttttgcacagcaaaagctttgtcagcagagtaaacagacaatccacagtgtgggagaaaatct

SEQ ID NO: 628470 - DNA, 563 bp, Homo sapiens
tgatgttgagcatattttcatgtgcctatttgtcacatacatatatatgacatatatatatatctctctcaggatttctcccttctatcactgtatccagaatattctggggtagaataaagaagtcctgatagagaattcyttagagaagaagggcatgtggtcaaaggaatagacagtgcaattggttaaatggagctcgcataattgtccttcacaaccagaggagagaaggcaaagataagcgtggatatagaaacataaatggccgagcagaactcacacgaagtaagcgacataacatctcgctattctcattccattcaagtactgcctttgtttactccctggctcacctgggagaaactttgttgcaggttggaagagctctctgccagagaaattgagttacatagtttaaggcatggtgctcctctaagacagatagtcttaatgcgtccacaggaggaaactacagactaaaatttttttagagaaccagacaaaagcagtttggggacagtagacgtaatgataagtgggaatttggataagtttttgga

SEQ ID NO: 628471 - DNA, 429 bp, Homo sapiens
aattccttagagaagaagggcatgtggtcaaaggaatagacagtgcaattggtyaaatggagctcgcataattgtccttcacaaccagaggagagaaggcaaagataagcgtggatatagaaacataaatggccgagcagaactcacacgaagtaagcgacataacatctcgctattctcattccattcaagtactgcctttgtttactccctggctcacctgggagaaactttgttgcaggttggaagagctctctgccagagaaattgagttacatagtttaaggcatggtgctcctctaagacagatagtcttaatgcgtccacaggaggaaactacagactaaaatttttttagagaaccagacaaaagcagtttggggacagtagacgtaatgataagtgggaatttggataagtttttggaag

SEQ ID NO: 628472 - DNA, 429 bp, Homo sapiens
aattccttagagaagaagggcatgtggtcaaaggaatagacagtgcaattggttaaatggagctcgcataattgtccttcacaaccagaggagagaagrcaaagataagcgtggatatagaaacataaatggccgagcagaactcacacgaagtaagcgacataacatctcgctattctcattccattcaagtactgcctttgtttactccctggctcacctgggagaaactttgttgcaggttggaagagctctctgccagagaaattgagttacatagtttaaggcatggtgctcctctaagacagatagtcttaatgcgtccacaggaggaaactacagactaaaatttttttagagaaccagacaaaagcagtttggggacagtagacgtaatgataagtgggaatttggataagtttttggaag

SEQ ID NO: 628473 - DNA, 508 bp, Homo sapiens
gcacccaccatcacgcccagctaatttttgtacttttagtagagaggtggtttcaccatgttggccagggyggtcccaagttcctgacctcaggtgattcgcccgccttggcctctcaaagtgctgggattacaggcatgagccaccgcactctgacagtcttgagcactttgtcagattccttggacagcctccttttcaaaaccaccatgcatttccctgacttactgcctagccccttaataaactggctggagtctcaggtgaaggcttaagtttgtgtcacgttcacatcctacccactgagccttgtctgtgccattcgccctgtagtgaatgtgaccttatttggaagtaggggttttgtagatggaattaaagatgttgagatgagatcatcctggatttaggatgggaccttaaatccaaagacagtgttattataaaagaaaggagaggaagatttgagacccagaggagaacacagaggagaaggtgatgtgaagat

SEQ ID NO: 628474 - DNA, 508 bp, Homo sapiens
gcacccaccatcacgcccagctaatttttgtacttttagtagagaggtggtttcaccatgttggccagggtggtcccaagttcctgacctcaggtgattcgcccgccttggcctctcaaagtgctgggattacaggcatgagccaccgcactctgacagtcttgagcactttgtcagattccttggacagcctccttttcaaaaccaccatgcatttccctgacttactgcctagccccttaataaactggctggagtctcaggtgaaggcttaagtttgtgtcacgttcacatcctacccactgagccttgtctgtgccattcgccctgtagtgaatgtgaccttatttggaagtaggggttttgtagatggaattaaagatgtwgagatgagatcatcctggatttaggatgggaccttaaatccaaagacagtgttattataaaagaaaggagaggaagatttgagacccagaggagaacacagaggagaaggtgatgtgaagat

SEQ ID NO: 628475 - DNA, 585 bp, Homo sapiens
acacatttaatatatgtgaataacaagttctatctgcttctaaagaatattacgaagtaaaccatgttaacaggaaattgactaagaaagacaagcccacaaattccatgctagccctgcgttcttcccaccttcttatacaaccctcttaggtaacacacatgaatgtaagcgaccttctctacaccagtcacctgacttgtattgttcctcaagggtgaggaagtgtctagacgaaagggaggggagacccagtggtaggtggaactttgtgctccacctttcacataacaggttgccaattcagctgtactgaggacaggcaatgrgagaaggcattaaaagggaaaactgaaatagttcctttgttctgactgtagaaatgctgaaaggaaattcctgtttgcggcaggtgattaaacacattttattagaggctgttacacagagagagttactcacgctgcattcttgcaataaaatggttcattttctcagttttctcataatttacttttcaaatagtactaactagatttatcaacgatttgataacttccagactgcctgtcagagtccatttag

SEQ ID NO: 628476 - DNA, 515 bp, Homo sapiens
gccaaggttcaagaaatgacagagctggaggatttaaacctagcattgcttaattcccagagcctgagctgttgaccatgttttatgaaaactagatttcttaaaaaaaaaataattgaggcccttacaaagtctattcctgacctccatttatatcccctttgttcccactcactgccatttttacctacctttcctcaagcactgctgaccaactgattgttcctggatctgtgacaactgcatgacttgccatgtgctgtttctcaggtctgagakttttgctctctccttcaaggtgagctcccactcataattttcaatttagttcaaatgtcaaacagttctatgtgaagctctgagcccccacatcagtcaattgtgcttttctctgtgttcttacggtgcttggtaaataccttgatcacagtgttcatcacttaccagctaataactttcaacggtttaagctctgtaagcctcagtttcctcatctacaaaaataaagataatca

SEQ ID NO: 628477 - DNA, 588 bp, Homo sapiens
aaggttgcatttaaagggagtaaaacacttgcatatcagtagtttcttatgcagagatgayggcaagtcacagtagtccatgtctgcgagctcatagacagacctctttgtgtgatgagatatgacaagtctttagattttttcctattagtaccctgcagcaccaattcctgctgttgtgcaaggagtacctgaagtgttgatcagcaagagacttggcaaatcttgctgacatgtctcttctgacaagaggataaatgctttccatggatcctttctgtcctgcactggccccttggctgaccatctgtttgaaagtgcagggcatgatggtgacaataaataaggtgctcttctgtaaatttcagtaatccaactacagtacattccaaagcatgactgaacagcgtacctggtaatctttgttacaaatagaacctgcagatcctggagcagcagaggttagagatggaaataaaagggcattaatttaatttgggcaggctgggctcagtggttcatgcctgtaatcccagcactttgggaggccaaggcaggtggatcacctgagtttaggagtttgatacc

SEQ ID NO: 628478 - DNA, 588 bp, Homo sapiens
aaggttgcatttaaagggagtaaaacacttgcatatcagtagtttcttatgcagagatgatggcaagtcacagtagtccatgtctgcgagctcatagacagacctctttgtgtgatgagatatgacaagtctttagattttttcctattagtaccctgcagcaccaattcctgctgttgtgcaaggagtacctgaagtgttgatcagcaagagacttggcaaatcttgctgacatgtctcttctgacaagaggataaatgctttccatggatcctttctgtcctgcactggccccttggctgaccatctgtttgaaagtgcagggcatgatggtgacaataaataaggtgcycttctgtaaatttcagtaatccaactacagtacattccaaagcatgactgaacagcgtacctggtaatctttgttacaaatagaacctgcagatcctggagcagcagaggttagagatggaaataaaagggcattaatttaatttgggcaggctgggctcagtggttcatgcctgtaatcccagcactttgggaggccaaggcaggtggatcacctgagtttaggagtttgatacc

SEQ ID NO: 628479 - DNA, 570 bp, Homo sapiens
aagctttccttcttcccctctaccttccatgagcaaaatttggtgaaggacagatgaccgcggctgggatgggaagtgggggagcagaggctctcagagcattacgaaggaggcagataagtcagtagactaatagagagggcatcatcacaggcaataaggtgttatctgtagtgcactctcctgactagggtaaaggatgcaagctgggaacctgtagcaataaggaatagaacaggaaatgagggtcctgaaagccaggcaggagttagctgctygctctcttatatgaaggatgtgccagcccagtgtcagtcccttgaatcaccttccttcatttcattcccagccatcttgctgagatagacattttcctcccatttcacagatgagtaaagtggcccagagaagtgatgccacccaacaagccggtagtagcactgactccaaagcccaggttcattccattgtccgcctgcgtctctccggtggagactcgatagggcagaactatggagctgcaaatccatctgttgtcggcagccatacttatttcaatacacaaagatt

SEQ ID NO: 628480 - DNA, 608 bp, Homo sapiens
ttggtaatcttattcttcttcccagttttattttaaaagtaatgcccacatgtgatggaagttacactcaaataggacaraacactatgcaaagtctccttctccttgtcctcactccctcccactcccaacggcaatccactttaaccagttctggtttcagttcgttaggtggttgccacaaaatactgagtaatatgcttatacctctcttttttgatttatcaactttcaacagtatttattgactcctgccacatgagggtgtgtgttatcctccactgcctctgtgtctttccatcttcataattttagactgtattccacttgattccttacaagaaaaatgaggaactcattaccccattttcccctccacccttcctacttccttcaccttctaacttctgcctttcctggattctcttttgtatttactgggtttgtaataattatattctactctgaaaccatagttaagtcttccctgctttgtttaaaatttgattctaaatattgaaaaccaatatacagtttcttccccaatgtcaatcctgtgaatatataaaaattatttactgaagaatgaagtaagaaataaataatcc

SEQ ID NO: 628481 - DNA, 608 bp, Homo sapiens
ttggtaatcttattcttcttcccagttttattttaaaagtaatgcccacatgtgatggaagttacactcaaataggacaaaacactatgcaaagtctccttctccttgtcctcactccctcccactcccaacggcaatcmactttaaccagttctggtttcagttcgttaggtggttgccacaaaatactgagtaatatgcttatacctctcttttttgatttatcaactttcaacagtatttattgactcctgccacatgagggtgtgtgttatcctccactgcctctgtgtctttccatcttcataattttagactgtattccacttgattccttacaagaaaaatgaggaactcattaccccattttcccctccacccttcctacttccttcaccttctaacttctgcctttcctggattctcttttgtatttactgggtttgtaataattatattctactctgaaaccatagttaagtcttccctgctttgtttaaaatttgattctaaatattgaaaaccaatatacagtttcttccccaatgtcaatcctgtgaatatataaaaattatttactgaagaatgaagtaagaaataaataatcc

SEQ ID NO: 628482 - DNA, 369 bp, Homo sapiens
tttctttttgagtaaactctatgtgggatattagaaactgtgactgcctcagagccaccacctgcctgtattgatctccatagcccagtggcttgcagctcctggtgtgccaatggtctgggtggaygcctgcaccacctgaggctgccccagggtaccagcatcaagctgcaaactggttccaaaatgagtttccctttcctccaacccaccaccatgagttcctggacacccctggcctaaaagtcccagaaaatagtgaggacagtgccttgttttggtagccctcccccacccactcccaagatccagtgtttctctgtccaggctgtctgccgcctgtatccagaactgaccagttatagacct

SEQ ID NO: 628483 - DNA, 369 bp, Homo sapiens
tttctttttgagtaaactctatgtgggatattagaaactgtgactgcctcagagccaccacctgcctgtattgatctccatagcccagtggcttgcagctcctggtgtgccaatggtctgggtggacgcctgcaccacctgaggctgccccagggtaccagcatcaagctgcaaactggttccaaaatgagtttccctttyctccaacccaccaccatgagttcctggacacccctggcctaaaagtcccagaaaatagtgaggacagtgccttgttttggtagccctcccccacccactcccaagatccagtgtttctctgtccaggctgtctgccgcctgtatccagaactgaccagttatagacct

SEQ ID NO: 628484 - DNA, 517 bp, Homo sapiens
gcacacagtgataaagatggcaagaaggtcctgagagaaacgcaatatttttgtgcagaatgggatgttctgcctttgtcccatgctttgaaatttaccacatgaaaaataaaattaaatactgatcatcatatasgtttctgttatattaggattagagacaagttctgtttagaaataactccaagaacagtttttatattttgttttcacattgaaaaatcagtcagatttgctttagcttcaaggaacgtgtttatgtaaaattaaatgagcgctggcagtgagctagctgcagattttttttttctaaatgggatataggacagaaagatgcgttcgcggccatgaccaggctctgggtactttacaaatgcccagtggctgggcatggaaggaatacattgctgggggaagttaaaacctagggctttctcgcctgttgtcttcctgttcccgtaagtccagcaatggctcaaaccaatagtgtagccaaaaaacaaaaggccctgataag

SEQ ID NO: 628485 - DNA, 517 bp, Homo sapiens
gcacacagtgataaagatggcaagaaggtcctgagagaaacgcaatatttttgtgcagaatgggatgttctgcctttgtcccatgctttgaaatttaccacatgaaaaataaaattaaatactgatcatcatatacgtttctgttatattaggattagagacaagttctgtttagaaataactccaagaacagtttttatattttgttttcacattgaaaaatcagtcagatttgctttagcttcaaggaacgtgtttatgtaaaattaaatgagcgctggcagtgagctagctgcagattttttttttctaaatgggatataggacagaaagatgcgttcgcggccatgaccaggctctgggtactttacaaatgcccagtggctgggcatggaaggaatacattgctgggggaagttaaaacctagggctttctcgcctgttgtcttcctgttccygtaagtccagcaatggctcaaaccaatagtgtagccaaaaaacaaaaggccctgataag

SEQ ID NO: 628486 - DNA, 510 bp, Homo sapiens
  misc_feature 46: n = A,T,C or G
ctccatctcagggtcacagatactttctggtgctaatttgtatatngctcactggggtgagcatttccatgccgatgagccacagcccaagtagtaggtagattgtgattrgaaaaggtaattcctcatggggggtgccatctgaactccatagaaaccgaggaacacacttcgttggtcaggtaattggatccatttgtaacatttttgcctaagtcccaacatttccattgtgcctgtcacccctaatcctctgggccgatggaatgcactaatgatacaataaaaactcaattggcaaagctaacagaagtttttaacctttcttggacaaggatctcccactggttgtggaaaatgtccacactctccctctttgaaataataacaggaagacccttgcagtggttagatgaaggcgcttatgaatctgcacttcttaaaggtgacattctccattactgctaagatctcacagaacttactaagaactctacattaacaaagaat

SEQ ID NO: 628487 - DNA, 510 bp, Homo sapiens
  misc_feature 46: n = A,T,C or G
ctccatctcagggtcacagatactttctggtgctaatttgtatatngctcactggggtgagcatttccatgccgatgagccacagcccaagtagtaggtagattgtgattggaaaaggtaattcctcatggggggtgccatctgaactccatagaaaccgaggaacacacttcgttggtcaggtaattkgatccatttgtaacatttttgcctaagtcccaacatttccattgtgcctgtcacccctaatcctctgggccgatggaatgcactaatgatacaataaaaactcaattggcaaagctaacagaagtttttaacctttcttggacaaggatctcccactggttgtggaaaatgtccacactctccctctttgaaataataacaggaagacccttgcagtggttagatgaaggcgcttatgaatctgcacttcttaaaggtgacattctccattactgctaagatctcacagaacttactaagaactctacattaacaaagaat

SEQ ID NO: 628488 - DNA, 539 bp, Homo sapiens
aagctaacagaagtttttaacctttcttggacaaggatctcccactggttgtggaaaatgtccacactctccctctttgaaataataacaggaagacccttgcagtggttagatgaaggcgcttatgaatctgcacttcttaaaggtgacattctccattactgctaagatctcacagaacttactaagaactctacattaacaaagaattccattcataatgaactcctgggagatgaaaatatcaaaaatcttggcctataacctggagatgttgttgtttactggaaacaacatcaaataaaatattctccccaagactgttggaagggaccacatcagctattattattactttatatatttttttttgagatgggatctcattctattccccaagccagaatgcagtggcacaatcatgactcattgtagccttgaactcctgggctcaagccacccttctgcctcawccttccaaatatttgggaccacaggcataggccactgcacctaactgacgacaggtattactgacc

SEQ ID NO: 628489 - DNA, 639 bp, Homo sapiens
ttcctgtttctaacccagtcatctctttttctagttattcccaacctatataactcacatacactggaggaaatatcttcatggaattaaaaccacatggagtaacatttcacgtaagcagaattcaggaaggatttcagtaattccatcccaaacacacacaggcaaagggagtgaagatttcttcagcaacatggtggcagaaagatcatgaaaagatctaggccaggcaagtatgcaaacaagactgactcttcctttccactggagctttgggtaattgctctgacaattctatgatttgctgaagccacagaaaatcagttttaaaacaggatttctacccctggctcactacatgacaaataattttatcctgtaatcttctgatgttaaacaaagatggccctcaatgtaattgttacagtgcctcctccccacttctgttagctgttgcttctctgcctcccacgagtttagtgtaatcccagaactttgggagaccaaggagggcagatcacttgaggtcwggagtcagagaccagcctggccaacacggcgaaaccccatctctactgaaaatacaaaaattagccaggcatggtggcttgcgtctgtaatcccagctacttgagaggc

SEQ ID NO: 628490 - DNA, 561 bp, Homo sapiens
caaatgtgctaataatgaatcagctcagtatttgttctgaaaagtctttttctttttggaagacatttttgctggttaaagacttctaggttggcaaaaatgtttttaagtactttaaagaacagctctatagttcctggccatttttttcttacttacatagattccgatgaggagtctgcagtattcttgattgtatgtagtgggttttcccctcatgagctgttctgcccctctctctcggttctcttcttctggcactccaattacatatacagtcaactccttgacgctttcccaagtgcagtgctggagactgaagatttaactgcagtgagcttggactgtgaggattgaagaagagccaaaaactgacagacagttagtaatcattgcagatgtttgctgaacaattgcaaggtagcaagcactattctacttttcacctgtakaattctgacttatcctcaagatttatcttgaaattttccagaaagccttcctataccatcctttctcactctaacctctacctcacctctcacactaggttaggtagcc

SEQ ID NO: 628491 - DNA, 599 bp, Homo sapiens
gcctcggcctcccaaagtgctgggattataggtgtgagccaacgtgcccagccaactatgtaatattttaattgtgtagtgataaccctcatcaaaagaagtattcattatggtcagtgtactctgcttatttaccactgaagcttaacacaaaattgttgaaataaacatgcatattgaagtacttagctagctattgaggcaatacaggtttctagatttactcatttttttcactgtacacacatgtcatgtgtgtcatgataaacccatgtgtgtgcatatattgattaaatattatatttctttttacttttattattattattgagaaaaggtctcactctgtcgcccaggctggagtgcagcggcacaatctcggctgcctgcagccttgtcctyccaaagccctagaccctgtaacataatggaatatgtatgtttctaatttgtgcaatatggaagcaggaatactacatagaactgtcatcttttcctattgcatttattttggtgtggaaaaatataataattggcttcagtcagtaagtctatttcattcaagaatatttaaatataatccaaaccatcttaggtac

SEQ ID NO: 628492 - DNA, 553 bp, Homo sapiens
tgtattactgagaaaaaagttgaatgaaaataagaaagattaaattgaaataaataatgaatcagtaaggtatgcactgttaaacacttgatgagatttcccaagtatcgacatgctgataacttgaaataagaatgggagraaaggtcaatctgaattcttaaaatgttgaaggctgggaataagaagtaatatatcacagaatctgatagaaaaatttttatttattttatgggagaaaatgggagactaacatacaataggaataggaaagaattaatagaaatagcaaaaagaagtgtatctgcaattattaatataatacaagaggacattgtgtagagatatttaaagaaagattgatgaaatttagatttatggtgaaatatcctaataaagacattatttataatcaactgttcatcattattatataattctgacagttttaggatataaatgtaaggcagaatgatctaatataaaatgtataaatgggacaacatataattttgcttaggaagttgaataaataaagtagtgatttacaatt

SEQ ID NO: 628493 - DNA, 553 bp, Homo sapiens
tgtattactgagaaaaaagttgaatgaaaataagaaagattaaattgaaataaataatgaatcagtaaggtatgcactgttaaacacttgatgagatttcccaagtatcgacatgctgataacttgaaataagaatgggaggaaaggtcaatctgaattcttaaaatgttgaaggctgggaataagaagtaatatatcacagaatctgatagaaaaatttttatttattttatgggagaaaatgggagactaacatacaataggaataggaaagaattaatagaaatagcaaaaagaagtgtatctgcaattattaatataatacaagaggacattgtgtagagatatttaaagaaagattgatgaaatttagatttatggtgaaatatcctaataaagacattatttataatcaactgttcatmattattatataattctgacagttttaggatataaatgtaaggcagaatgatctaatataaaatgtataaatgggacaacatataattttgcttaggaagttgaataaataaagtagtgatttacaatt

SEQ ID NO: 628494 - DNA, 559 bp, Homo sapiens
atgtatcttatattaagcagattgaaactgaatttaagagatcttttagaaawtataatgaaaattaaaaactaaatggacaggttaaacacaatattggatagaaccaaaaagaaaataagtgagttggaagttagactaaacaaattatgctgaagacagtacagaggaggaaaggaaaatggatatgtgaaatagaggttgaaaaattagagtatctaatcatatctgcaaaagaaaaattgaatcgggggaaggttatatttaaggttatatttaatatctgagggcttttcgtcattggaatttattaatgttcaaggaaacctggaaagttttctaacacattaaaggagctttaattataagttccaaattcttcttagaagaagagaaccagcaggcccagacatttttactggtgagttctatcaaatgttttcaagaaatggattatttccattttataaaaacaactccagaataaaaaaaggtccatttgttcgttcatttcatgaggccagtacaaccttgataccaatattatatgagaaatgtg

SEQ ID NO: 628495 - DNA, 559 bp, Homo sapiens
atgtatcttatattaagcagattgaaactgaatttaagagatcttttagaaattataatgaaaattaaaaactaaatggacaggttaaacacaatattggatagaaccaaaaagaaaataagtgagttggaagttagactaaacaaattatgctgaagacagtacagaggaggaaaggaaaatggatatgtgaaatagaggttgaaaaattagagtatctaatcatatctgcaaaagaaaaattgaatygggggaaggttatatttaaggttatatttaatatctgagggcttttcgtcattggaatttattaatgttcaaggaaacctggaaagttttctaacacattaaaggagctttaattataagttccaaattcttcttagaagaagagaaccagcaggcccagacatttttactggtgagttctatcaaatgttttcaagaaatggattatttccattttataaaaacaactccagaataaaaaaaggtccatttgttcgttcatttcatgaggccagtacaaccttgataccaatattatatgagaaatgtg

SEQ ID NO: 628496 - DNA, 559 bp, Homo sapiens
atgtatcttatattaagcagattgaaactgaatttaagagatcttttagaaattataatgaaaattaaaaactaaatggacaggttaaacacaatattggatagaaccaaaaagaaaataagtgagttggaagttagactaaacaaattatgctgaagacagtacagaggaggaaaggaaaatggatatgtgaaatagaggttgaaaaattagagtatctaatcatatctgcaaaagaaaaattgaatcgggggaaggttatatttaaggttatatttaatatctgagggcttttcgtcattggaatttattaatgttcaaggaaacctggaaagttttctaacacattaaaggagctttaattataagttccaaattcttcttagaagaagagaaccagcaggcccagacatttttactggtgagttctatcaaatgttttcaagaaatggattatttccattttataaaaacaactccagaataaaaaaaggtccatttgttcgttcatttyatgaggccagtacaaccttgataccaatattatatgagaaatgtg

SEQ ID NO: 628497 - DNA, 605 bp, Homo sapiens
ttctggatgggggatttttgttgctaaaatcgggacagtaggggacatrttgggactgtggaaaaaccctacagggatttatttcctaactatgaatttctatcttggtctagagacgactgttctcataaataggtagagtagatgtggtatttctggaatgagatttaacatctttacatagcttgccctattaaaagtagacaaatgcttgtgagagaatatcatatacttttgaaagctaatgtcttaactaattcgctgtgagcaaagctcttgaagactgtgatgtaacagagattcctaggtatcagtgaagatacggagatgaaaaaagggaagttgaaaaaagaagctgagagataagcatggaaatcattttccaacctcatttttccaatctccattttcctgtattgagaagtgaaaatatgttttctagagataaagttctagaaatgaactctgacatagatattttaaaacccatttcagaaacaaaataatatgtgaacctagagtagttgtaatttatgtccttttgtctgtctttatcctgtagttaagtttcccttgggatctctttgggaaaatggagtactgca

SEQ ID NO: 628498 - DNA, 605 bp, Homo sapiens
ttctggatgggggatttttgttgctaaaatcgggacagtaggggacatgttgggactgtggaaaaaccctacagggatttatttcctaactatgaatttctatcttggtctagagacgactgttctcataaataggtagartagatgtggtatttctggaatgagatttaacatctttacatagcttgccctattaaaagtagacaaatgcttgtgagagaatatcatatacttttgaaagctaatgtcttaactaattcgctgtgagcaaagctcttgaagactgtgatgtaacagagattcctaggtatcagtgaagatacggagatgaaaaaagggaagttgaaaaaagaagctgagagataagcatggaaatcattttccaacctcatttttccaatctccattttcctgtattgagaagtgaaaatatgttttctagagataaagttctagaaatgaactctgacatagatattttaaaacccatttcagaaacaaaataatatgtgaacctagagtagttgtaatttatgtccttttgtctgtctttatcctgtagttaagtttcccttgggatctctttgggaaaatggagtactgca

SEQ ID NO: 628499 - DNA, 605 bp, Homo sapiens
ttctggatgggggatttttgttgctaaaatcgggacagtaggggacatgttgggactgtggaaaaaccctacagggatttatttcctaactatgaatttctatcttggtctagagacgactgttctcataaataggtagagtagatgtggtatttctggaatgagatttaacatctttacrtagcttgccctattaaaagtagacaaatgcttgtgagagaatatcatatacttttgaaagctaatgtcttaactaattcgctgtgagcaaagctcttgaagactgtgatgtaacagagattcctaggtatcagtgaagatacggagatgaaaaaagggaagttgaaaaaagaagctgagagataagcatggaaatcattttccaacctcatttttccaatctccattttcctgtattgagaagtgaaaatatgttttctagagataaagttctagaaatgaactctgacatagatattttaaaacccatttcagaaacaaaataatatgtgaacctagagtagttgtaatttatgtccttttgtctgtctttatcctgtagttaagtttcccttgggatctctttgggaaaatggagtactgca

SEQ ID NO: 628500 - DNA, 519 bp, Homo sapiens
agacgactgttctcataaataggtagagtagatgtggtatttctggaatgagatttaacatctttacatagcttgccctattaaaagtagacaaatgcttgtgagagaatatcatatacttttgaaagctaatgtcttaactaattcgctgtgagcaaagctcttgaagactgtgatgtaacagagattcctaggtatcagtgaagatacggagatgaaaaaagggaagttgaaaaaagaagctgagagataagcatggaaatcattttccaamctcatttttccaatctccattttcctgtattgagaagtgaaaatatgttttctagagataaagttctagaaatgaactctgacatagatattttaaaacccatttcagaaacaaaataatatgtgaacctagagtagttgtaatttatgtccttttgtctgtctttatcctgtagttaagtttcccttgggatctctttgggaaaatggagtactgcattttacaaggcaggacttgaattttct

SEQ ID NO: 628501 - DNA, 389 bp, Homo sapiens
tgaattaactttgtggagagagatatatttttgaaaaattgtgtgtacccaaaaaatttcatatcaaataatattttcctgtagtgcattcaaggatctggttccacagcaaaaaattgttttggtctcagttcctcaaaatcacatttaaggagcttgagatttatattttctacttaataagtcttacaaaagcaagttaagaaggaaaatggacaatcatttctgcacatrtagggtttaataaaacatgtataataaaatatctcatattttaaatttccaccttattggtagctttcatgacaaagggctagggtgctggtggccatacaattaaggtttttggttagttagttagcagaactgactgactcctacctggtggg

SEQ ID NO: 628502 - DNA, 389 bp, Homo sapiens
tgaattaactttgtggagagagatatatttttgaaaaattgtgtgtacccaaaaaatttcatatcaaataatattttcctgtagtgcattcaaggatctggttccacagcaaaaaattgttttggtctcagttcctcaaaatcacatttaaggagcttgagatttatattttctacttaataagtcttacaaaagcaagttaagaaggaaaatggacaatcatttctgcacatatagggtttaataaaacatgtataatraaatatctcatattttaaatttccaccttattggtagctttcatgacaaagggctagggtgctggtggccatacaattaaggtttttggttagttagttagcagaactgactgactcctacctggtggg

SEQ ID NO: 628503 - DNA, 389 bp, Homo sapiens
tgaattaactttgtggagagagatatatttttgaaaaattgtgtgtacccaaaaaatttcatatcaaataatattttcctgtagtgcattcaaggatctggttccacagcaaaaaattgttttggtctcagttcctcaaaatcacatttaaggagcttgagatttatattttctacttaataagtcttacaaaagcaagttaagaaggaaaatggacaatcatttctgcacatatagggtttaataaaacatgtataataaaatatytcatattttaaatttccaccttattggtagctttcatgacaaagggctagggtgctggtggccatacaattaaggtttttggttagttagttagcagaactgactgactcctacctggtggg

SEQ ID NO: 628504 - DNA, 608 bp, Homo sapiens
tttttattattccgtactttttaaatttacttcattatcacgtcttcctttattctttttaaatagtttttgcttttgttattttgttttcccttttttactcttggtttgtaatacatctttccttatttgctcctttctcatttgatctcaatgttaatccaactgttttccacatctgattcactaaaattttagcccttaaaaaaaaattcctgtttttcctatctcctyttgcccattctcttctccttgcctcacttcttttatctttttccattttactttcattttttgtttctctagatgttgttttgacatatgagttaatgtactggtacaattttgcatctgtaaattagagcttcagaatcaactgagtgtatttattctttatttttaggcctaaatttatcttaccttttattgattttataatatactatactctttcattttagtctgcatatgttagccaaagaaagatatgcccctgttttaagaaatctctgtaaaaaatggtgcaagtgtgacaagaattgcttcaagaaacaagctcctctagtttgtcttctatatttagagcttcaacagttacctatattact

SEQ ID NO: 628505 - DNA, 572 bp, Homo sapiens
gttagccaaagaaagatatgcccctgttttaagaaatctctgtaaaaaatggtgcaagtgtgacaagaattgcttcaagaaacaagctcctctagtttgtcttctatatttagagcttcaacagttacctatattactggtaactcccaaatataccttcaaacttgttttttgggcccaagttttttgcttcatakatatctgttttgaatatcccataaataattgcatctaaagcatacctccactccattgttctcacagataaaaccaaacctgtgctgcttcttatatttctagtatttaagcgtcacctgccacccctttacctgagctacaagtcacgcattgcattagactcctctgctttcttctttcacctctaactagactattaaccaaaaatttttaaatataactttcaaaaggtggggttttattacatcatttccatcctttatgtttgggttcgagccctcattaactttaacatggattcttggagtaccctccttactgattttgttacacgtgtccctcttttagtcagtactaccatgataataccatgg

SEQ ID NO: 628506 - DNA, 572 bp, Homo sapiens
gttagccaaagaaagatatgcccctgttttaagaaatctctgtaaaaaatggtgcaagtgtgacaagaattgcttcaagaaacaagctcctctagtttgtcttctatatttagagcttcaacagttacctatattactggtaactcccaaatataccttcaaacttgttttttgggcccaagttttttgcttcatatatatctgttttgaatatcccataaataattgcatctaaagcatacctccactccattgttctcacagataaaaccaaacctgtgctgcttcttatatttctagtatttaagcgtcacctgccacccctttacctgagctacaagtcacgcattgcattagactcctctgctttcttctttcacctctaactagactattmaccaaaaatttttaaatataactttcaaaaggtggggttttattacatcatttccatcctttatgtttgggttcgagccctcattaactttaacatggattcttggagtaccctccttactgattttgttacacgtgtccctcttttagtcagtactaccatgataataccatgg

SEQ ID NO: 628507 - DNA, 572 bp, Homo sapiens
gttagccaaagaaagatatgcccctgttttaagaaatctctgtaaaaaatggtgcaagtgtgacaagaattgcttcaagaaacaagctcctctagtttgtcttctatatttagagcttcaacagttacctatattactggtaactcccaaatataccttcaaacttgttttttgggcccaagttttttgcttcatatatatctgttttgaatatcccataaataattgcatctaaagcatacctccactccattgttctcacagataaaaccaaacctgtgctgcttcttatatttctagtatttaagcgtcacctgccacccctttacctgagctacaagtcacgcattgcattagactcctctgctttcttctttcacctctaactagactattaaccaaaaatttttaaatataactttcaaaaggtggggttttattacatcatttccatcctttatgtttgggttcragccctcattaactttaacatggattcttggagtaccctccttactgattttgttacacgtgtccctcttttagtcagtactaccatgataataccatgg

SEQ ID NO: 628508 - DNA, 524 bp, Homo sapiens
cataaagacacatgcacgcatatgttcatcgcagcactattcacgatagcaaagacatggaatcaacctaaatgcccatcagtggtagtctggataaagaaaatgtggtacatgtacaccatggaatatacacagccataaaaaaataagattatgttctttgcarcaacatggatggagctggaggcaattatcccaagctaaattatgtaggaacagaaaaccaaataccgcatattctcacttataagtgggagcatgacaatgtttagcatgacaatgtctgtgagagaataagagatgggtggtgtcaccactatctttctctttctgttctccaaattataataataacagtctcttttcctcctctaaacattttttataaaggaggttgaactcagttgaaatatcttgaaattactgtggctggtttacaagccactctggaaagttatgctctggcataaatttagcagctatgttttactgtaaaaagaaacccagggacatagcttattaag

SEQ ID NO: 628509 - DNA, 298 bp, Homo sapiens
tcaggcagttgcacctgcaggatggtgccagttctttccacgaaggctggtcagatacccagaaagtatttctccactactacctggacgatgtgtctctctgtcagtctccagggaatggggyctggatcaagtatttagtattcagcagttactataccgtcacctaatccctcattttcaatattttgccatgccttccagtggcctaactggccaccatgccacagaatctttactttatgctctccagaggagacctctccattcaatgttttgtgatttgagcaatggaata

SEQ ID NO: 628510 - DNA, 298 bp, Homo sapiens
tcaggcagttgcacctgcaggatggtgccagttctttccacgaaggctggtcagatacccagaaagtatttctccactactacctggacgatgtgtctctctgtcagtctccagggaatggggcctgratcaagtatttagtattcagcagttactataccgtcacctaatccctcattttcaatattttgccatgccttccagtggcctaactggccaccatgccacagaatctttactttatgctctccagaggagacctctccattcaatgttttgtgatttgagcaatggaata

SEQ ID NO: 628511 - DNA, 431 bp, Homo sapiens
ttttttttttttttttttgagttgggagtctcactctgtcacccaggctggagggcagtggcgcaatcatagttcactgcagcctgcctcagtctcccaagtagctgagattatagtcatgcattatcatgcctggccaactttwaaaaattagctaatacttaaaaatttgtagagacaggggtttcactatattgccaggctggtatccaactcctaacctcaattgatcctccctcctcagcctcctaaagtgctgggattgcagatatgagccaccatacctggcttaattttcttattttaattttatataagtgattattattgttcctaagataattggggcagtgactcctttaaaattttagagacctaatttgtctattcacttcactgaaagagtatgccagtttgcttcatgagaaaat

SEQ ID NO: 628512 - DNA, 523 bp, Homo sapiens
ctgaagacattcacatgtgaggaaaacaggaaaaccactatgctagaaaaagcaaatgctgttgagattgtctcacaaacacaaattgcgtgccagcaggtaggtttgagcctcaggttgggcacattttaccttaagcgcactgttggtggaacttaaggtgactgtaggacttatatatacatacatacatataatatatatacatatttatgtgtatatatatacacacacatacacacacacacacacacacacacacacacacacacasggtcttgctatcttgccccgggtggtctccaactctgggtctcaagcgatcctctgcctccccttcccaaagtgctgggattacaggtgtgagccacctcgcccaggccattttaattttaatttaatacttttaatttgaatacacaatccaaaaatcatataacaagtacaggaaacccactttatgccaagtttacaaaaacagcaaagatatgtcaatgacaaagcgtcaaagtggcaacatcct

SEQ ID NO: 628513 - DNA, 523 bp, Homo sapiens
ctgaagacattcacatgtgaggaaaacaggaaaaccactatgctagaaaaagcaaatgctgttgagattgtctcacaaacacaaattgcgtgccagcaggtaggtttgagcctcaggttgggcacattttaccttaagcgcactgttggtggaacttaaggtgactgtaggacttatatatacatacatacatataatatatatacatatttatgtgtatatatatacacacacatacacacacacacacacacacacacacacacacacacacggtcttgctatcttgcccmgggtggtctccaactctgggtctcaagcgatcctctgcctccccttcccaaagtgctgggattacaggtgtgagccacctcgcccaggccattttaattttaatttaatacttttaatttgaatacacaatccaaaaatcatataacaagtacaggaaacccactttatgccaagtttacaaaaacagcaaagatatgtcaatgacaaagcgtcaaagtggcaacatcct

SEQ ID NO: 628514 - DNA, 501 bp, Homo sapiens
aaaacaggaaaaccactatgctagaaaaagcaaatgctgttgagattgtctcacaaacacaaattgcgtgccagcaggtaggtttgagcctcaggttgggcacattttaccttaagcgcactgttggtggaacttaaggtgactgtaggacttatatatacatacatacatataatatatatacatatttatgtgtatatatatacacacacatacacacacacacacacacacacacacacacacacacacggtcttgctatcttgccccgggtggtctccaactctgggtctcaagcgatcctctgcctccccttcccaaagtgctgggattacaggtgtgagccacctckcccaggccattttaattttaatttaatacttttaatttgaatacacaatccaaaaatcatataacaagtacaggaaacccactttatgccaagtttacaaaaacagcaaagatatgtcaatgacaaagcgtcaaagtggcaacatcct

SEQ ID NO: 628515 - DNA, 523 bp, Homo sapiens
ctgaagacattcacatgtgaggaaaacaggaaaaccactatgctagaaaaagcaaatgctgttgagattgtctcacaaacacaaattgcgtgccagcaggtaggtttgagcctcaggttgggcacattttaccttaagcgcactgttggtggaacttaaggtgactgtaggacttatatatacatacatacatataatatatatacatatttatgtgtatatatatacacacacatacacacacacacacacacacacacacacacacacacacggtcttgctatcttgccccgggtggtctccaactctgggtctcaagcgatcctctgcctccccttcccaaagtgctgggattacaggtgtgagccacctcgcccaggccattttaattttaatttaatacttttaatttgaatacacaatccaaaaatcatataacaagtacaggaaacccactttatgccaagtttacaaaaacagsaaagatatgtcaatgacaaagcgtcaaagtggcaacatcct

SEQ ID NO: 628516 - DNA, 501 bp, Homo sapiens
aaaacaggaaaaccactatgctagaaaaagcaaatgctgttgagattgtctcacaaacacaaattgcgtgccagcaggtaggtttgagcctcaggttgggcacattttaccttaagcgcactgttggtggaacttaaggtgactgtaggacttatatatacatacatacatataatatatatacatatttatgtgtatatatatacacacacatacacacacacacacacacacacacacacacacacacacggtcttgctatcttgccccgggtggtctccaactctgggtctcaagcgatcctctgcctccccttcccaaagtgctgggattacaggtgtgagccacctcgcccaggccattttaattttaatttaatacttttaatttgaatacacaatccaaaaatcatataacaagtacaggaaacccactttatgccaagtttacaaaaacagcaaakatatgtcaatgacaaagcgtcaaagtggcaacatcct

SEQ ID NO: 628517 - DNA, 596 bp, Homo sapiens
cattccccagtatactaggggtaataataatttaaagagtttaattactttttactactagaaaactaattttatgtttggcacaaatttctgaaatgatattccrctgcaaagaataatacctatatatggccagaattactttttttctataacattaagataatacttgtcagcctgagcaacaaagtgagacctcatctttacaaaaaataaataaattagacgggtgttgtggtgatgagggtctgtagtcccagatactcaagaggctgaggtgggaggatcccttgagcctaggaggtcgcggttgcagtgaactatgattgcaccactgcactccagcctgggtaacagagcaagatcctgtctcaaaaaaaaaaagataatattggtataattcagggtttttgcctcaatccccatgcttcttcatttgaccttccctgactccctgatgaattttagtttgaatttttgctatagtccagaagttaatttaaaagatcttaaaatttccacctgcctagatattacttatttgttacactttagtccatgatttctattgtcatttacattaccccaaaaatatg

SEQ ID NO: 628518 - DNA, 596 bp, Homo sapiens
cattccccagtatactaggggtaataataatttaaagagtttaattactttttactactagaaaactaattttatgtttggcacaaatttctgaaatgatattccactgcaaagaataatacctatatatggccagaattactttttttctataacattaagataatacttgtcagcctgagcaacaaagtgagacctcatctttacaaaaaataaataaattagaygggtgttgtggtgatgagggtctgtagtcccagatactcaagaggctgaggtgggaggatcccttgagcctaggaggtcgcggttgcagtgaactatgattgcaccactgcactccagcctgggtaacagagcaagatcctgtctcaaaaaaaaaaagataatattggtataattcagggtttttgcctcaatccccatgcttcttcatttgaccttccctgactccctgatgaattttagtttgaatttttgctatagtccagaagttaatttaaaagatcttaaaatttccacctgcctagatattacttatttgttacactttagtccatgatttctattgtcatttacattaccccaaaaatatg

SEQ ID NO: 628519 - DNA, 596 bp, Homo sapiens
cattccccagtatactaggggtaataataatttaaagagtttaattactttttactactagaaaactaattttatgtttggcacaaatttctgaaatgatattccactgcaaagaataatacctatatatggccagaattactttttttctataacattaagataatacttgtcagcctgagcaacaaagtgagacctcatctttacaaaaaataaataaattagacgggtgttktggtgatgagggtctgtagtcccagatactcaagaggctgaggtgggaggatcccttgagcctaggaggtcgcggttgcagtgaactatgattgcaccactgcactccagcctgggtaacagagcaagatcctgtctcaaaaaaaaaaagataatattggtataattcagggtttttgcctcaatccccatgcttcttcatttgaccttccctgactccctgatgaattttagtttgaatttttgctatagtccagaagttaatttaaaagatcttaaaatttccacctgcctagatattacttatttgttacactttagtccatgatttctattgtcatttacattaccccaaaaatatg

SEQ ID NO: 628520 - DNA, 596 bp, Homo sapiens
cattccccagtatactaggggtaataataatttaaagagtttaattactttttactactagaaaactaattttatgtttggcacaaatttctgaaatgatattccactgcaaagaataatacctatatatggccagaattactttttttctataacattaagataatacttgtcagcctgagcaacaaagtgagacctcatctttacaaaaaataaataaattagacgggtgttgtggtgatgagggtctgtagtcccagatactcaagaggctgaggtgggaggatcccttgagcctaggaggtygcggttgcagtgaactatgattgcaccactgcactccagcctgggtaacagagcaagatcctgtctcaaaaaaaaaaagataatattggtataattcagggtttttgcctcaatccccatgcttcttcatttgaccttccctgactccctgatgaattttagtttgaatttttgctatagtccagaagttaatttaaaagatcttaaaatttccacctgcctagatattacttatttgttacactttagtccatgatttctattgtcatttacattaccccaaaaatatg

SEQ ID NO: 628521 - DNA, 539 bp, Homo sapiens
ctcaatccccatgcttcttcatttgaccttccctgactccctgatgaattttagtttgaatttttgctatagtccagaagttaatttaaaagatcttaaaatttccacctgcctagatattacttatttgttacactttagtccatgatttctattgtcatttacattaccccaaaaatatgacctgctgaatttctgctgtcatgaattgactaacatattttgggcctaaaacctttacatttagaatctttttgtttcgtattggaaaatattgtaagtcctccatttattggtcaaaagcactgcctatttatttccatgcttaatcagagagactttcyaatagttatttaatattatttacgttccttcacttgttgactataatgacgttagttgctatgatatttttaggtcattaatataataaaaatatgtcaacttttctcttccaatgtgtctttgggttattaatttttaactcaggtatcaagcttgtaaaatgtttaatggcttataataatgtctaacacata

SEQ ID NO: 628522 - DNA, 539 bp, Homo sapiens
ctcaatccccatgcttcttcatttgaccttccctgactccctgatgaattttagtttgaatttttgctatagtccagaagttaatttaaaagatcttaaaatttccacctgcctagatattacttatttgttacactttagtccatgatttctattgtcatttacattaccccaaaaatatgacctgctgaatttctgctgtcatgaattgactaacatattttgggcctaaaacctttacatttagaatctttttgtttcgtattggaaaatattgtaagtcctccatttattggtcaaaagcactgcctatttatttccatgcttaatcagagagactttctaatagttatttaatattatttacgttcmttcacttgttgactataatgacgttagttgctatgatatttttaggtcattaatataataaaaatatgtcaacttttctcttccaatgtgtctttgggttattaatttttaactcaggtatcaagcttgtaaaatgtttaatggcttataataatgtctaacacata

SEQ ID NO: 628523 - DNA, 539 bp, Homo sapiens
ctcaatccccatgcttcttcatttgaccttccctgactccctgatgaattttagtttgaatttttgctatagtccagaagttaatttaaaagatcttaaaatttccacctgcctagatattacttatttgttacactttagtccatgatttctattgtcatttacattaccccaaaaatatgacctgctgaatttctgctgtcatgaattgactaacatattttgggcctaaaacctttacatttagaatctttttgtttcgtattggaaaatattgtaagtcctccatttattggtcaaaagcactgcctatttatttccatgcttaatcagagagactttctaatagttatttaatattatttacgttccttcacttgttgactataatgasgttagttgctatgatatttttaggtcattaatataataaaaatatgtcaacttttctcttccaatgtgtctttgggttattaatttttaactcaggtatcaagcttgtaaaatgtttaatggcttataataatgtctaacacata

SEQ ID NO: 628524 - DNA, 539 bp, Homo sapiens
ctcaatccccatgcttcttcatttgaccttccctgactccctgatgaattttagtttgaatttttgctatagtccagaagttaatttaaaagatcttaaaatttccacctgcctagatattacttatttgttacactttagtccatgatttctattgtcatttacattaccccaaaaatatgacctgctgaatttctgctgtcatgaattgactaacatattttgggcctaaaacctttacatttagaatctttttgtttcgtattggaaaatattgtaagtcctccatttattggtcaaaagcactgcctatttatttccatgcttaatcagagagactttctaatagttatttaatattatttacgttccttcacttgttgactataatgacgttagttgctatgatatytttaggtcattaatataataaaaatatgtcaacttttctcttccaatgtgtctttgggttattaatttttaactcaggtatcaagcttgtaaaatgtttaatggcttataataatgtctaacacata

SEQ ID NO: 628525 - DNA, 482 bp, Homo sapiens
aaccaggaaacaaatcctcattagaccctgaatctgttgacaccttgatcttggacttcctggcctctagaactgtaagaaataaatttatgttgttcataaaccatcyaggctgtgatattctggtatagcgacctgaaaggactgagacattaggtctcagttttattctatggcttaaaatatcatgtcatgagtagacaacttccaatcctagtacctcgtgcttcctctgctgcatttggaaagaaggcatttccctcttcaatcatggaatgaaaaagttgtacttcattctgatttgattagcagaaggcacaggttccttccatgcaccaattacaatgaccaagaattgggcatgggactcatgtcacttaaacattgtgaagctgagaaattcattatttggttaggagtgtgtgagagcagggaacactgaatgcttgagacaccaccacgatgtccactacatgtatttc

SEQ ID NO: 628526 - DNA, 482 bp, Homo sapiens
aaccaggaaacaaatcctcattagaccctgaatctgttgacaccttgatcttggacttcctggcctctagaactgtaagaaataaatttatgttgttcataaaccatctaggctgtgatattctggtatagcgacctgaaaggactragacattaggtctcagttttattctatggcttaaaatatcatgtcatgagtagacaacttccaatcctagtacctcgtgcttcctctgctgcatttggaaagaaggcatttccctcttcaatcatggaatgaaaaagttgtacttcattctgatttgattagcagaaggcacaggttccttccatgcaccaattacaatgaccaagaattgggcatgggactcatgtcacttaaacattgtgaagctgagaaattcattatttggttaggagtgtgtgagagcagggaacactgaatgcttgagacaccaccacgatgtccactacatgtatttc

SEQ ID NO: 628527 - DNA, 557 bp, Homo sapiens
cttgacatgctttaccctcaaattaacaagtttggcttattcaattgtggacctttaacccttaggccagatagtatatgaggcctagagtagtggaaaaaggtaactggatttacaaaatttgactcttcaaattctgtaagaattcaatatattgaggaamgtttaggtgcatagtaaaattataatttcatattgttgcacagactcaggcagatgaaagagactccaatagtggtcaggtagtacccacacagtcagttgattgtctctgtgctgaaaggatttaagaatgaagaagagtttgctccaatgtatgtttcaatatctcattgttttacaataatatttgaaataatacctaggaacccaacttacaagggatgtgaaggacctattcaaggagaactacaaaccactgctcaaggaaataaaagaggacacaaacaaatggaagaacattccatgctcatggataggaagaatcaatatcgtgaaaatggccatactgcccaaggtaatttatagattcaatgccatccccatcaagctaccaa

SEQ ID NO: 628528 - DNA, 557 bp, Homo sapiens
cttgacatgctttaccctcaaattaacaagtttggcttattcaattgtggacctttaacccttaggccagatagtatatgaggcctagagtagtggaaaaaggtaactggatttacaaaatttgactcttcaaattctgtaagaattcaatatattgaggaaagtttaggtgcatagtaaaattataatttcatattgttgcacagactcaggcagatgaaagagactccaatagtggtcaggtagtacccacacagtcagttgattgtctctgtgctgaaaggatttaaraatgaagaagagtttgctccaatgtatgtttcaatatctcattgttttacaataatatttgaaataatacctaggaacccaacttacaagggatgtgaaggacctattcaaggagaactacaaaccactgctcaaggaaataaaagaggacacaaacaaatggaagaacattccatgctcatggataggaagaatcaatatcgtgaaaatggccatactgcccaaggtaatttatagattcaatgccatccccatcaagctaccaa

SEQ ID NO: 628529 - DNA, 412 bp, Homo sapiens
gctgggattacaggcatgagccacaayacccagccctttatataattttaaaagtgtaggtaattaggtaaaattaggttaaaagtatatgtatatttacctgatatttaaatattacctaagtgtttaatgtggacatgtaagctctttaaagatagtgcttatgtattttatatctgtttcacatactccttatatatcccccacagaaatggtcacaaatagtttccttaataagtatttttgaattcagccatgctatatattcattagtaagtgagttttcttttattatgaactacaaactttaacctttttttgagtagtgagcagttattcatttaccttcacactctttaaataccaaattttgagtgagtgagtgtgtaaggttttgtcatacagacttgca

SEQ ID NO: 628530 - DNA, 412 bp, Homo sapiens
gctgggattacaggcatgagccacaatacccagccctttatataattttaaaagtgtaggtaattaggtaaaattaggttaaaagtatatgtatatttacctgatatttaaatattacctaagtgtttaatgtggacatgtaagctctttaaagatagtgcttatgtattttatatctgtttcacatactccttatatatcccccacagaaatggtcacaaatagkttccttaataagtatttttgaattcagccatgctatatattcattagtaagtgagttttcttttattatgaactacaaactttaacctttttttgagtagtgagcagttattcatttaccttcacactctttaaataccaaattttgagtgagtgagtgtgtaaggttttgtcatacagacttgca

SEQ ID NO: 628531 - DNA, 619 bp, Homo sapiens
gcctgtgttattaagtaacgccatgtttcccaatcaaaaccagtctctattaagcaactccaaatattccaaaagcattctttaaggaagaaacarccggattgcaaaatagttttttctgaaatttcaagaagtgaaaagtttgatcagaatttattatgtcaaatggagagtttgtgtttattattaaaatatgccctatattttaatatggtctagcttgtgtctatctggctatttctctaagtgtttagttaactgttataagaagataacaacattacaaatgtccttgggggtgaaaaaacttgccagaaaatactaaaaagcttaatttacttgcgtttttttttgtagtacttattgtattttagttacaactttactatgtcttttgaaatataaatcctgatagctttaacttcatagtagtctctactatgtggagaatcttagaaatgttagcagtcatcattgaagtatagcttaagactgtgtttggtaaattgaattttctggttatctgagtttgttttacatggattatcattatcgtttttcaaaatataagagaatatgattcagaccattagaagattatgaagataataattattaa

SEQ ID NO: 628532 - DNA, 659 bp, Homo sapiens
ttactcatgtgatcagttgctaattcagacgtggctgtcatgcctgtgttattaagtaacgccatgtttcccaatcaaaaccagtctctattaagcaactccaaatattccaaaagcattctttaaggaagaaacaaccggattgcaaaatagttttttctgaaatttcaagaagtgaaaagtttgatcagaatttattatgtcaaatggagagtttgtgtttattattaaaatatgccctatattttaatatggtctagcttgtgtctatctggctatttctctaagtgtttagttaactgttataagaagataacaacattacaaatgtccttgggggtgaaaaaacttgccagaaaatactaaaaagcttaatttacttgcgtttttttttgtagtacttattgtattttagttacaactttmctatgtcttttgaaatataaatcctgatagctttaacttcatagtagtctctactatgtggagaatcttagaaatgttagcagtcatcattgaagtatagcttaagactgtgtttggtaaattgaattttctggttatctgagtttgttttacatggattatcattatcgtttttcaaaatataagagaatatgattcagaccattagaagattatgaagataataattatta

SEQ ID NO: 628533 - DNA, 619 bp, Homo sapiens
gcctgtgttattaagtaacgccatgtttcccaatcaaaaccagtctctattaagcaactccaaatattccaaaagcattctttaaggaagaaacaaccggattgcaaaatagttttttctgaaatttcaagaagtgaaaagtttgatcagaatttattatgtcaaatggagagtttgtgtttattattaaaatatgccctatattttaatatggtctagcttgtgtctatctggctatttctctaagtgtttagttaactgttataagaagataacaacattacaaatgtccttgggggtgaaaaaacttgccagaaaatactaaaaagcttaatttacttgcgtttttttttgtagtacttattgtattttagttacaactttactatgtctwttgaaatataaatcctgatagctttaacttcatagtagtctctactatgtggagaatcttagaaatgttagcagtcatcattgaagtatagcttaagactgtgtttggtaaattgaattttctggttatctgagtttgttttacatggattatcattatcgtttttcaaaatataagagaatatgattcagaccattagaagattatgaagataataattattaa

SEQ ID NO: 628534 - DNA, 619 bp, Homo sapiens
gcctgtgttattaagtaacgccatgtttcccaatcaaaaccagtctctattaagcaactccaaatattccaaaagcattctttaaggaagaaacaaccggattgcaaaatagttttttctgaaatttcaagaagtgaaaagtttgatcagaatttattatgtcaaatggagagtttgtgtttattattaaaatatgccctatattttaatatggtctagcttgtgtctatctggctatttctctaagtgtttagttaactgttataagaagataacaacattacaaatgtccttgggggtgaaaaaacttgccagaaaatactaaaaagcttaatttacttgcgtttttttttgtagtacttattgtattttagttacaactttactatgtcttttgaaatataaatcctgatagctttaacttcatagtagtctctactatgtggagaatcttagaaatgttagcagtcatcattgaagtatagcttaagactgtgtttggtwaattgaattttctggttatctgagtttgttttacatggattatcattatcgtttttcaaaatataagagaatatgattcagaccattagaagattatgaagataataattattaa

SEQ ID NO: 628535 - DNA, 494 bp, Homo sapiens
gaaacaagaccagaggcagaggaaaagttagaaagtccgacaaaagggcaaaacacaggtaaaggacaaaaagcaacacagctctctctctctctctctctcacacacacacacacacacacacacacacacacacacacacacacagcctgcaaaatgaagatgtaaaagatttaaaggatgcatatccaaatctcaccttgcatccaccttgcccccaccacctactctggctcttgcttcctcacattaagcatgggccatgtcagtgtaggcttggcctggtttgcttgttcagcctgccttacaggcagaacccctccagcaattatcttggcctaacattttcacaccctgggcaygtttgctgtggtccttcggccacggccaattatgtttctggacaagtcatcaagaagtttgcgatgtctgcataatggtgctctctatagtctaataggaacacatgtttggagaaagagagtttcacaggg

SEQ ID NO: 628536 - DNA, 592 bp, Homo sapiens
atgtaagcaacatgaagcttaatgggtagtaggacttccctgaaattaaggtaaaagaccgcagcctgcccagagcgcatgtggtttggaatatttccactgaatattaaatcatacaagaattttcactcatcttcatcttggaggtcacaacatgactttcctctaatgaattctttatattggcagctcttctgttttcctcccttcctcccctggctcctcacttccacctctaccctcctccccstcttgctgggagcagccctctcttttagtctctgtgtgggaacatatggtaatactttcccttgatttaggccttgaatttggtctacacctgtgtagaccttcaagtaatggctcagcaggcatcgcaggagggtcatgctccagaagtgctctgtgcatacactcacttgctctcgctcccttgtgggcatgccagcacctctctttctctccccaggcttgcatgggccctccagatgttgctcccgatctgctggtttactattcaagttccagtgatgtattcttcacagtgtgataccccaccctagtgtgttcttcataaagcagagggttgact

SEQ ID NO: 628537 - DNA, 565 bp, Homo sapiens
gaactcacagcacaacagggaaattagaaaagaaagccagcagttcaagttcagctcactgttttgccccatcttggatcttatcacmattttttggtttgtttgttttctttacattttaaaattaggttctttattattgagaaattcaaatcaaaatcacaatgagataccatttcacacaagacagaatggctgttattaaaaagtcaaaaaataacagatgctcgtgtggttgttgacatattttaaaagttaagcataaaagtattatgtcacagatatcacaaatatattttccagtctgactttgtatagtctttgctcaaaaaatttgtttttcattttatgtaattgttattctattctttatatttttccagtttttattttaggttgagggagtacatgtgcaggtttgttacatggatagattttgtgttgcaggggtttggtagcacacattattttgtcatacaagtagtaagcatagcacccaataggtagtttttttatcctcactctcttcccattctccaccctcaagtaagtgctggtgtctatt

SEQ ID NO: 628538 - DNA, 597 bp, Homo sapiens
tcatagatggctgccttctcactgtaacctcacatggtagaaggggctggagagcaatctggtctatgaaagaactaatcccatttgtgagagctccaccgttattacctaatcacctcctaaaggccctacctcctcatagcatcacctggttagtgaggggatgttataattttaacatgtgaatttggaggagatataaacatttagtctattgcaacactacttaatagtmatactggaagtttggtatatatactatgtgctagatgcagtcctatataaattacctaagtaccggggaaaaattgtgacaacctcatccccacttccatcccacctatctaagacaagtggatgctaagaagagtcctttgcttgctgagtggagtcatgggttttgaactactgattagaggctgagagggtgcaacaatgctctgcataagaaaaagggtagagagaaattctgggatgatctgggttggagccagagcctcagcagagcatgggagccagggaagaaatgaagacctaaaggctggccctgaggagagctggagagggaggaaagatgaagtggcaaggacccagaga

SEQ ID NO: 628539 - DNA, 439 bp, Homo sapiens
atttgtatgtttgtctgtttggggtatccaaattataatactggctcatgtttagctaaatagtaactaaaaccccaggtcagcaaagcatgcatttgaaaatatttcacaaaaattttcacttttgtaaatgacaaaaacaattaatgagcaaagactgcccccagctaaatgtccccacttaggcaaatctgcaagtatcacataggcctcacttgggacaattcctgtctcccatttgcacaattatgaccgtcagtaaccagctggcagatgttaccagccctttctgaagggaatcatgaggayaccagttatggcctgggaaatggttatgtaagaggaactgcttttaatgaggctcccactgacttaatattagaagcagtgtgggagagaggatgaaagaaggaaattaataatttttaaaattattaat

SEQ ID NO: 628540 - DNA, 559 bp, Homo sapiens
gtcactttctcttacatcatcccatgtattttcttcttcacaactaaaccattatctaaaatgatatcattcatttacttgttttctgccttctccacgttagtgtatgctcccaaggagcaggaacaacctgctcagaacagtatctagcacagaggaggagcttaataaataaatcaataataggtgaattgaagggaaagagggaggaagggaggaagttcagaatggcttccctaattaataataaagctgagctgagcccaattcctatgccctggggatcttcagggagcagaaatcagggcaacagccaagagaaaaggaggttgctgcccatcargcgttaaaaacatcaacataaaagactgaggattttatatgagtaatgagcccttaatgttcccacatgcacccacacacaccacagactcctgcagggaaacatatcaccacagccaaacacaaagaccccaccgcagccaggcagtgtgcatggaccagccccttgcacctttgtctccggaaagcctttagtgcacacctgtcattattctga

SEQ ID NO: 628541 - DNA, 538 bp, Homo sapiens
tctaaaatgatatcattcatttacttgttttctgccttctccacgttagtgtatgctcccaaggagcaggaacaacctgctcagaacagtatctagcacagaggaggagcttaataaataaatcaataataggtgaattgaagggaaagagggaggaagggaggaagttcagaatggcttccctaattaataataaagctgagctgagcccaattcctatgccctggggatcttcagggagcagaaatcagggcaacagccaagagaaaaggaggttgctgcccatcaggcgttaaaaacatcaacataaaagactgaggattttatatgagtaatgagcccttaatgttcccacatgcacccacacacaccacagactcctgcagggaaacatatcaccacagccaamcacaaagaccccaccgcagccaggcagtgtgcatggaccagccccttgcacctttgtctccggaaagcctttagtgcacacctgtcattattctgaagttgcccttaaggcatcaatatgaggcaaaca

SEQ ID NO: 628542 - DNA, 533 bp, Homo sapiens
tgatagtttgcacaaagacagaaagtggggaaaagtctaaaacctggctttcttgcctcataaaccaactgtctcttccaaccttactgcttcctgcattttctctgatgcttattcttgaaacagctacatgctgtttgaggcttacttttgtaactggcaagaagggaggaggatgttagcgtcataccatgctcagtaacacacattaaatttaatcttcctgtgaaccttttttcctacttttatacaatcaggttgataatattgataatastatctaaggagatgactaaagcactcacaaacacaagctagtgctcacaaatacggtgtattaaaatgtagcacctttcttatatatacatataatgctttcttatactcctattctattaaatcagtttttcagatccccatccccttgtaataaacgtagccttctcctgatttgagtctcccataaatgggaggctcaagcatcaagggctctaggatctggcagggctctgaagaaccatacaagctaagtc

SEQ ID NO: 628543 - DNA, 619 bp, Homo sapiens
tgtgaccactaacttcaggtgagccctggtgctgcccagtaattccactccatttccttttattggtcacttcaccacatcccaggtgactattttacctttttttctttttcctgaaacctctaatgtctcttccaattttcttctcagctactgatcagactgtcttcagatatatgttcccactagcaaacctatgaagctacatatatctactctyatattcttaaagtcctaacctccaatacctcagaatatgaccatatttggagaaagcgtttttaaaaaggtaattaaagttaaatgaggtcattggggtggctcttaatccaatatgactggtgtctttataagaaaaggagattaggacacagacatgcagagaaaaaagattatgtgaagacagaagtgaaggaaataatgcgtacagtagtcattttccaagacaaagtgacttaaatcagcttaggtcagcaaactacagaaaaaataggatatactaggcacctgcttggatagccaacgcctgcttgtcaggcaccccctgcctcaaccccctgagttgccctcatccgaaccaaaaaagtttagtctaagatgaaaacttactagcctgaaa

SEQ ID NO: 628544 - DNA, 604 bp, Homo sapiens
cggtgctctcggggtctctgagtccattctttggtttggacaggtgaatttgtttctcacagaaggagacgtacatctgcaagccaagcagagaaatctcagaagacatgaaccctgttggcactttgatctcgaacttccaacctccaaaattgtgattaaataaatttctgttgttaagacatccagtctatggcactttattatggcaggcccagcaaaataatacagcatctctcctcaaatccttcacattttccccacatcatcattttttcttcactactgaactattcacattagcatacacatgagctatactgtattccattattagaaaaatgtgctgccttgacctcatgttgacckcccagctctgctccccttcacaggaaactgtgagtagtctctcctcattgctccttatattcccctctcagactccttggaaccaactccagtatggctttcaggcccacccctgcatcaaaacagccttttccaagttcagcagtgacctcacgtcgccaaattaagcgggctcctcttagttctcatcttcctcacttgtcagcatatttgacctggcttctgatgaaatact

SEQ ID NO: 628545 - DNA, 409 bp, Homo sapiens
cttggaaccaactccagtatggctttcaggcccayccctgcatcaaaacagccttttccaagttcagcagtgacctcacgtcgccaaattaagcgggctcctcttagttctcatcttcctcacttgtcagcatatttgacctggcttctgatgaaatacttgtcttggcttttgaaactcctttttaggttctggtcactctattctctgtctggttactctttcttttttgcttgtttcttctcattttcagcatctccttttatgttggggtttctggggctcagtccttaggtttcttccctgactaccgtcactctcaggtggtctcattctagtgtcatggctttaaaagccatctcttcactgaagactcacaaatgtatcccctgaactatatatagatttc

SEQ ID NO: 628546 - DNA, 604 bp, Homo sapiens
cggtgctctcggggtctctgagtccattctttggtttggacaggtgaatttgtttctcacagaaggagacgtacatctgcaagccaagcagagaaatctcagaagacatgaaccctgttggcactttgatctcgaacttccaacctccaaaattgtgattaaataaatttctgttgttaagacatccagtctatggcactttattatggcaggcccagcaaaataatacagcatctctcctcaaatccttcacattttccccacatcatcattttttcttcactactgaactattcacattagcatacacatgagctatactgtattccattattagaaaaatgtgctgccttgacctcatgttgaccgcccagctctgctccccttcacaggaaactgtgagtagtctctcctcattgctccttatattcccctctcagactccttggaaccaactccagtatggctttcaggcccacccctgcatcaaaacagccttttccaagttcagcagtgacctcacrtcgccaaattaagcgggctcctcttagttctcatcttcctcacttgtcagcatatttgacctggcttctgatgaaatact

SEQ ID NO: 628547 - DNA, 557 bp, Homo sapiens
attccattattagaaaaatgtgctgccttgacctcatgttgaccgcccagctctgctccccttcacaggaaactgtgagtagtctctcctcattgctccttatattcccctctcagactccttggaaccaactccagtatggctttcaggcccacccctgcatcaaaacagccttttccaagttcagcagtgacctcacgtcgccaaattaagygggctcctcttagttctcatcttcctcacttgtcagcatatttgacctggcttctgatgaaatacttgtcttggcttttgaaactcctttttaggttctggtcactctattctctgtctggttactctttcttttttgcttgtttcttctcattttcagcatctccttttatgttggggtttctggggctcagtccttaggtttcttccctgactaccgtcactctcaggtggtctcattctagtgtcatggctttaaaagccatctcttcactgaagactcacaaatgtatcccctgaactatatatagatttctctgtttaaacatcaataaacattttca

SEQ ID NO: 628548 - DNA, 409 bp, Homo sapiens
cttggaaccaactccagtatggctttcaggcccacccctgcatcaaaacagccttttccaagttcagcagtgacctcacgtcgccaaattaagcgggctcctcttagttctcatcttcctcacttgtcagcatatttgacctggcttctgwtgaaatacttgtcttggcttttgaaactcctttttaggttctggtcactctattctctgtctggttactctttcttttttgcttgtttcttctcattttcagcatctccttttatgttggggtttctggggctcagtccttaggtttcttccctgactaccgtcactctcaggtggtctcattctagtgtcatggctttaaaagccatctcttcactgaagactcacaaatgtatcccctgaactatatatagatttc

SEQ ID NO: 628549 - DNA, 539 bp, Homo sapiens
ggtctgtactggaaagtgttctgtgtgctgctgaaaagaacgtatattctgcagtatttgagtgaaatgttgtgtaaatatcagttaggcctatttggtatagtgtgtattttaactccaactttttttggtgattttttggtctggattatttgtccattaccgacaataggtcctctataatcattgtatcataatctatctctccctttacaactattaatgcttgctttatgtacttgggagctctgatattgaatgcatatttataatggctatattttcttgttgaattgacatctttatcattatttagtgaccttgtttgtctctttgtgcagtcatgatttgtaatgtattttacctgatataagtatagctattcgtgctctgtttttggtttcaggttgcatgaaatacctcttcactttcaggktatgtgtgtctttataggtgaggtgggtttcctgtaggcagcatagagttgggtcttttttctttattcattgagccattacaattagagaattgagtcaatt

SEQ ID NO: 628550 - DNA, 568 bp, Homo sapiens
tttaataccaaatgacagttccctgtcacccaagagcagtacccctttactttttgaaccaagattcctcttagtcctttcactagaatataggaacatgaagaaaggagaaatagcataaaaaacattggaattttcttcagtctatgactgtgtctgcatcaaaattttccacccatattccatgaccaaatcaactgtttttgagacttctttcttttcctcttgtaaatgacaagcaatccttgaataacaaatgacttatcccacatttgtaaactctctggcctttgaaatagctaaaatgacctaaggcytaacagaagagtggcatgtatggactttaccagaagttggacccatggggtaagatctagagagttattggcttaagtggtgttaagcagcctatgattggaaaatgaaatgaaatagaatcccctcatagaatcaagaatagacaggcctcatcctaaaataaacaggccaaagaagcatgggtggcaatggcctaatcctcaaacctgttcttccccctttatttcacttaggtttccaaacatttgtt

SEQ ID NO: 628551 - DNA, 579 bp, Homo sapiens
ggtttattttttgctgttgtcatttgtctgtgtgcgtggttttgtgtgtgcgtgaagatgatttataggaagggcttaacatggcacagaacacagagtaactgccttttaaccactagccaatatttttactgtactattctagttatttatttctagcaacaactctttttcttaactgtaaatggaagcaatagctggagcaagaagggagaagggaaaaaaggtaaccaagaacttgggctgttcccgaaaagagtttttagggtggggaaatatgtctttcttttattgggtagcctctgccctttgagccctaccttttcctttagaatttgcagcatttggggaaggccctccacctgccagcattgcttgggtttcactggtcttgtgagcgttcygcttttcgcccgcccttgttcgtaaggcggctctgctgaccttgagggtccaggacatagtgttgatcccaggaaagacagtaatagttttgttgacagatacttttcaacagctgtatggtatctgccaggctgaaagaagaagaggtgggaggagagtgactcagggttaacc

SEQ ID NO: 628552 - DNA, 536 bp, Homo sapiens
ccttcatccctcagaaaccaccaccataccattctatcaaagaacggcatttgctttttgttacacaaattatttcartgtttaaggacaaaatgaaacaaaacaggaaaaccaaattaacaagaaaaaattccctctacaaccttacccctgccccgccccccaccattttcaagggtcttatgtcaggagtgttttttgtttttgaaaagtcttttcctgccttacttgaaaatggcttatatctgcactacccaggttaatttttagattttgctggtcttttcaaagacatctaagagaaagaagctcatgggctgcgtgtgtaatgttaaataaggtcatgcttgctgttggtcatgatggctcccacatgacaggggactatttttaactgagacaattggtgaatgactcaggaagaccttccaaagccaagtggcagcttggaggaatcaaaattgctattaactgaggagaaaataactaatgcagtaggctgaaactgcccattttctgttttcagtatatctggc

SEQ ID NO: 628553 - DNA, 626 bp, Homo sapiens
aagcaaagtataaaaatcaatttaaggaaaaataaattcatgcaaacarattcacattaaaatatacatactttcttgggtgttataaatacacataagcctgcaaatattgaagcaaaattatcagactttcaccaattggtcataggaattcttcaatgtggggataattaatttaaaaggaaagcagttacattctgtttcatagttttattgtttcatttttaaagctgccttgtcaaggatagacaatttgaagaaagattataaaatttatgtttctgacagcatgatacactaaatacaatgaacaaccttcttcttacaaaatactttatgattctgaataaaataatttttaaaaatatataattgagctgacaagtatagaagggaattcatcaaaggccaaaagacaaagtgaaagcaggaaaccagaaagataaagaagcatcaaagtgaccatgagcttccattttggcaaccctgagaaaagtggagggactagagaaaatagccatagcctctacacataggcaatctatagcagactcccacatagagctgagacccaaaggagtatatatacccttagtaaaacggaaaactgaaatgcatacgtacat

SEQ ID NO: 628554 - DNA, 592 bp, Homo sapiens
cattctccaggaaagagaaccagggctccttggaaaactggctgcttctaggacagggtcaggtaatatgcaagatgaatgaggctgaagcatctgtagtgccagaaaataaagaaaaaaaatccaataaaggggtatattaaggagacgcagagccaattaaaagacctcgcaaatatcaaagctagggcaactgactgaacaataaagtaaataaataktatagtacattgggaatacaacccaaaggataaacattcatgagtcattactgaggtaagcaaatgactgaataaataaattaatgaggtagaaaatttcccatacagaaaaatttcaagttatttatgtaggaatagatactacccccctaaagcatgttggagtgtaacttcccatactttaagggtgagctgcacgtagtgacttccttcccaaaaacacagtaaggaaaggtacggggaggggagtaactttgtagagaaaaagcctaataaactacctcagccaggacatcaaggttaacatcatcgatgttaattcatgttaacagcatgtacccttgacatgatgtgatgagaatggcacttca

SEQ ID NO: 628555 - DNA, 629 bp, Homo sapiens
acctctgagtgtagggtaaagtgataggaactgggcatggcatggtgtaagacatagttctctggaaaaatcctacaactgagtgacacttaagaaggatacagaaaataaaataaaaatgattctgcttcatttcactgatttcagtgtgaaactttgtctccaccacctacgtgaacagggaaagaaatccagactgtaagagcagaggtccatgcccattcttggccctggtataattctttgggtgggagggagggaccttggtcagaaagaagcctcaaggtcacatttgccaatytgttcagattagttacgcgtacttagtgccaaaatttactggcaatgttttctgtataattatagcatcattgaatctcagtgtttttccactacataattatgacatgtctattgatataggttggatgttgtccctccaagtctcaagatgagacataatccccagtgttggaggtaaggcctgataggaggtgtttggatcatggtgtggatccctcatgaatggtttagtgccatccccttggtgctgcccttgtgatagtgagtgagttctcgagagatctaattgtttaaaagtatgtggtacctcctctcccactctctat

SEQ ID NO: 628556 - DNA, 629 bp, Homo sapiens
acctctgagtgtagggtaaagtgataggaactgggcatggcatggtgtaagacatagttctctggaaaaatcctacaactgagtgacacttaagaaggatacagaaaataaaataaaaatgattctgcttcatttcactgatttcagtgtgaaactttgtctccaccacctacgtgaacagggaaagaaatccagactgtaagagcagaggtccatgcccattcttggccctggtataattctttgggtgggagggagggaccttggtcagaaagaagcctcaaggtcacatttgccaatctgttcagattagttaygcgtacttagtgccaaaatttactggcaatgttttctgtataattatagcatcattgaatctcagtgtttttccactacataattatgacatgtctattgatataggttggatgttgtccctccaagtctcaagatgagacataatccccagtgttggaggtaaggcctgataggaggtgtttggatcatggtgtggatccctcatgaatggtttagtgccatccccttggtgctgcccttgtgatagtgagtgagttctcgagagatctaattgtttaaaagtatgtggtacctcctctcccactctctat

SEQ ID NO: 628557 - DNA, 536 bp, Homo sapiens
agacataatccccagtgttggaggtaaggcctgataggaggtgtttggatcatggtgtggatccctcatgaatggtttagtgccatccccttggtgctgcccttgtgatagtgagtgagttctcgagagatctaattgtttaaaagtatgtggtacctcctctcccactctctattgtccctgcttctgcygtgtgagatgcctgctgcctctttgccttccaccatgattgttaagcttccaaggcctcctcagaatctgagcaggtgcgagcaccatgcttcctataaagcctgcagaaccatgaaccaattaaaccttttttctttataaattaccaagtctcagatgtttctttatagtaacgcaagaacatcctcacacacctactatgtgccagttatggtgcaaagaacatttttaagattgccttaaacccttgttacagtgatcttacccaaactgtatttaataaaagaatagttcttaggaaaactgctaggtattctcaagaaagagcctcatgccatattccc

SEQ ID NO: 628558 - DNA, 610 bp, Homo sapiens
tcaatttaatttaatagcacatttgtatagtgttttacaatgaaaataaacagaatttttgaatgtatgattttgttctaataacatacaaattaaaaaaaatamgtatttttcacccatttttacctttaagaaatgtagtgtccataaaaattaagtgatttgtcagacttctcatcagtcagtcagacagagatatttttaaaaaatcctcacctatgttgaatgcataaaaatttctctctccccaaatatagcaaggataactaaatacagagccaagcttgacaatgaaaatacctaggaacccaaaaggatgagagaattccttggttttattaaatcaaagaagtaagtgatactaattctgaggggctcaccgggaagttggagagctacagttttaatgcccacacagaaggagagtcccaagagtctgtcccagacaagacagagggaggaggtgagcagcaagaaagttaagaatctgcctggagttgtaaatggaaaatgtatgagaactagaaattcagtctcgtgtagtatgtggatgtgagcttcatgtactcatatggttagagttcccacaattggaaaattaatttgaaaa

SEQ ID NO: 628559 - DNA, 536 bp, Homo sapiens
agacataatccccagtgttggaggtaaggcctgataggaggtgtttggatcatggtgtggatccctcatgaatggtttagtgccatccccttggtgctgcccttgtgatagtgagtgagttctcgagagatctaattgtttaaaagtatgtggtacctcctctcccactctctattgtccctgcttctgccgtgtgagatgcctgctgcctctttgccttccaccatgattgttaagcttccaaggcctcctcagaatctgagcaggtgcgagcaccatgcttcctataaagcctgcagaaccatgaaccaattaaaccttttttctttataaattaccaagtctcagatgtttctttatagtaackcaagaacatcctcacacacctactatgtgccagttatggtgcaaagaacatttttaagattgccttaaacccttgttacagtgatcttacccaaactgtatttaataaaagaatagttcttaggaaaactgctaggtattctcaagaaagagcctcatgccatattccc

SEQ ID NO: 628560 - DNA, 536 bp, Homo sapiens
agacataatccccagtgttggaggtaaggcctgataggaggtgtttggatcatggtgtggatccctcatgaatggtttagtgccatccccttggtgctgcccttgtgatagtgagtgagttctcgagagatctaattgtttaaaagtatgtggtacctcctctcccactctctattgtccctgcttctgccgtgtgagatgcctgctgcctctttgccttccaccatgattgttaagcttccaaggcctcctcagaatctgagcaggtgcgagcaccatgcttcctataaagcctgcagaaccatgaaccaattaaaccttttttctttataaattaccaagtctcagatgtttctttatagtaacgcaagaacatcctcacacacctactatgtgccagwtatggtgcaaagaacatttttaagattgccttaaacccttgttacagtgatcttacccaaactgtatttaataaaagaatagttcttaggaaaactgctaggtattctcaagaaagagcctcatgccatattccc

SEQ ID NO: 628561 - DNA, 326 bp, Homo sapiens
ggggtgttgcagggactgctgcattttcttactaagtcttgagcttttaaatttctaacaatatcctgtaatcctttatgagctccaggccttaagggatattgcctttgataaggaaaagtggtggggtcttttagcctgatttgtactggstgggcattttttgcctttccaaattgtccttccaatgctcagacttcagggttgattccctccttaagtagggaacaacaaatgggtaacttgttccccatattcatatagataaaagcttcagctttggctaatatgtccctccctaataagggtgttggactttcaggcat

SEQ ID NO: 628562 - DNA, 548 bp, Homo sapiens
tagcatccaacttcctcctccaaaaaaaggaaaacaatacagttatgtatttatttattatgtttacttatttgagacagggtcctgctctgtcacccaggatggagtgcaatggagcaatcttcagtcactgcaacctccacctccctcttgggttcaggtgatcatcccgcctcagcctcccaagtagctgggactacaggcacacaccaccacatctggctaatttttgtattttttgtggagactgggttttgccatgttgccaaggctggtctcraattcctggactcaagggatctgctcacctcaaccttccaaagtactgagattattggcataagccaccatgcccagcagttacttagatgcttattttatgttcttgcatatcctgctaaaatataaactcaccgagagcaaaagacacatattagtgttttgtaagcatcccccattcctccaccaccctcagaatatgcttaacaaatatgtttggaattcaatctgcattaaactgctgatctatcaataaagaatccatcctc

SEQ ID NO: 628563 - DNA, 555 bp, Homo sapiens
atgagttaccttgcctctcactacatgccaacagtagcacagcaccatcttcaccctactcaaacaagaatgatatatttttcttgattatcttgtcyaggcatgcaaaactgatggcatttatggcattctagtttcatcaggtaataaggatcttctacaacaaagactggcagagccctggtctcaggatcctctcttgcctgcactgaatacatacatcgaatgcatatttaatatgcatttgtgtgcccagtgggttgtactaggtatcacaagtaacacttattaagccaaacgaatgacttatgaataaaatgtcccaaaccctagctgtatattcaactaaacacccaccattcctctttccaatactatctacttaccactgcatactaaatttcaaagccctgttttgattagcttaatcacctactcaagaatcatgaatggtttttctactgtctgcaaaataaaatccaatttatttagcatgtcatttattattttcccaacacatggcccactaaccacacctaatttccagaaaaaaat

SEQ ID NO: 628564 - DNA, 600 bp, Homo sapiens
gatcatgacaattcctttcaaccctgaagcaagaaaacccaaattccttgtagaaagattacagccactgtagaaaccatcctgatttgcagcaaggttcccatctatttgtcttttaccagtttcctctttttgtctttgtaggagatatgtgcttaagagaaataactagttgaacttcattctgcaaaatctatttttttaaatagattttttttttactcctatgcttttttcactttctatgcttttttgagggaaatggattcatataaatatttttaactaggmaattttagtttgctcagtttgggatttatataattgatattttaactctgggattgtgccctgaagcaatttcataaagagcacaacttttgaaaatcaactggatcaataggatttctgctatgatttccattttttaatgataaatgttccttgtggcttcaggccttgcatttagaaagattttataatagaatacgaaataatagagttaaggtgaaatggctattaaaatgaatcaaggccaggcatggtggctcacgcctgtaatcccagcactttgggaggccaaggcgggcagatcacaag

SEQ ID NO: 628565 - DNA, 596 bp, Homo sapiens
ataaatgcttatcctcaaaattcatctgtattagaagacattacctgggactttccactccattctcaacatcccagccaagtcaatatctatctacaaacacaccattctgtgatcatgtctcatcctacttccccttatcagtgtgaccttaattcaggcatagtcctaccatgctgctgctctcccaggcctctgtctgcccatgggrgtgctatttcccttggaagttccctttgccattctctggcctttttcatggcagtcccactgcttggaggccgcccttcctgcacgcccacctgcttccacatgtttggaagcgcttattcacttagcaggagacattaagtattcatcattttattctgcaattattcactgatgcccggtgcccattatacagcaggcctaagtgctaagaaaacataaatgagaaaaacagacatggtgtttgcctcctgaagcaaagtctcctgagagacaaatctattaatcaaagaatcaactgaatagtgagtatgatgaaggagttactggatgttatgagagtatgtaatggtggcctgatctagtctagaagagtaaggcaaggc

SEQ ID NO: 628566 - DNA, 554 bp, Homo sapiens
attagcatccttaatgctgaggggagtctctgagaagccctttagcctgctgatctaggttagtagatccggaagtgtgggtgcctgtgagcgagtgtgtgtgtgtgtgtgtgtgtgtgtgtgtgggagacagagagagagagagggagacagagagagaaagagagagagacagagagagaaagagagagagacagagagagagagasagagagagagagagagactgaaatgggtttattagatgtttgatgtttcttccacaatacagtttttcatatttgagaatgatgtgacaccttccaaataaaattcagttttgtgtagaaaattgaatcatctaagcacttacactgaaaagtcacaaagtcctaaatttacaggaaaacaggactcgtaaaacttataacactgagtaaaatattatgctccagagcccctttcagacttctggtctgggacaacccttcccttgtagccccatggttccatcagccccgcggttgagctctagaagctggctgaatttaagtttccactgggcgattttgtgg

SEQ ID NO: 628567 - DNA, 572 bp, Homo sapiens
aagcttaattgacaagccaacagatttgtcccattaaacaaacattttgctactggataaaacaaaaaacaaaaatcctccagatatttatacatatttattttaygcacataaatgtctcatttaaaatctattcaggaaatataagcaagggggtaactctgacagagaagctacagatagtgtaaaaaaatttaaaattcagaggaaaacatgcagtgggtcagcaatgtgagggattctcatcttaccatatggatactttacattgtgagggatgcaacacactatagcaacctttcaaaaggcgaagagtcagccgcctgcctatcatcaagatagctctgctctgccatatgtgattatgttgggcttagctcatgggacgtatactagcatatgaatttctatcatggttaactgagttagtaaaataagataataatgcagcaattctggtatttctggtccctgcacagaaatatcagaattcaacacaggttgaatgaggttaatctagaccatgtgctgtgtaaaattaaagtagaaacctgtataatttacagtagagg

SEQ ID NO: 628568 - DNA, 572 bp, Homo sapiens
aagcttaattgacaagccaacagatttgtcccattaaacaaacattttgctactggataaaacaaaaaacaaaaatcctccagatatttatacatatttattttatgcacataaatgtctcatttaaaatctattcaggaaatataagcaagggggtaactctgacagagaagctacagatagtgtaaaaaaatttaaaattcagaggaaaacatgcagtgggtcagcaatgtgagggattctcatcttaccatatggatactttacattgtgagggatgcaacacactrtagcaacctttcaaaaggcgaagagtcagccgcctgcctatcatcaagatagctctgctctgccatatgtgattatgttgggcttagctcatgggacgtatactagcatatgaatttctatcatggttaactgagttagtaaaataagataataatgcagcaattctggtatttctggtccctgcacagaaatatcagaattcaacacaggttgaatgaggttaatctagaccatgtgctgtgtaaaattaaagtagaaacctgtataatttacagtagagg

SEQ ID NO: 628569 - DNA, 457 bp, Homo sapiens
tccacacatcattggtcaaagtaacatggtcgaatggctacacgtagctccaagggaagaggagatctgccctcttttatctgatgacttttctgtcctaaataaaatcagagtactattgctaaaacagaagggaagagtggaaactggcagaagatagctgtgtctgccacagatgggtcttcagaaactatcaagttgagtagaagtcaycagccactgacaagcccatgagtctccatgagtcataagtatttctttggagcagggttgtctcactgtagtgtcagatgaaccctactcaccgggacataccctcatgctttgaggaacccttttcacttcagggatgttgttcaggatagatctgccacatactaattgctgtctcaaaactgaaaattgttataataatggtttcatgtcttcgctagtatcatatttctagtcaagcact

SEQ ID NO: 628570 - DNA, 457 bp, Homo sapiens
tccacacatcattggtcaaagtaacatggtcgaatggctacacgtagctccaagggaagaggagatctgccctcttttatctgatgacttttctgtcctaaataaaatcagagtactattgctaaaacagaagggaagagtggaaactggcagaagatagctgtgtctgccacagatgggtcttcagaaactatcaagttgagtagaagtcaccagccactgacaagcccatgagtctccatgagtcayaagtatttctttggagcagggttgtctcactgtagtgtcagatgaaccctactcaccgggacataccctcatgctttgaggaacccttttcacttcagggatgttgttcaggatagatctgccacatactaattgctgtctcaaaactgaaaattgttataataatggtttcatgtcttcgctagtatcatatttctagtcaagcact

SEQ ID NO: 628571 - DNA, 589 bp, Homo sapiens
agctaaacccagaccttttttgcacccaacagaaagaggaaacaactaattaaaatttgttattttccttggctcctttccttcctcagttactgctttttgggtcccctctagactttctgtcctaacctctttctgttggtagcaagtgaatgtgaagttgagagaagagagttgctaaatagcattttgccttaacctggaaaacaaaaagtaaagctaaawgagatgtgctgttttgcagggtatcttgccaaagaatcatgtaaaatagttggtcaattctgatttttgtgtattatcaggagaatctcataaattacatgtttttatacctaacttacacatggtactttagtgtctaaaattggtaaactgctttatttcttatggtgatcatttcatagaggaatatgttaccatttttaatagaaacttaaatggcatattgaccttcagtattgattaatgtattatcaaaattatcatttatttatccctttaggcttttctctacctctttacccaaaatcttgataaggaaatacatattttccacacacgttcatgagtgcgagttggatgaatt

SEQ ID NO: 628572 - DNA, 617 bp, Homo sapiens
ccatttcagtcagttttcaaaacaatcttgtatcattakgagaaacacaaacttgggtctgaatccctatcctttaaaggactcctacagacttggcttggggttcctaactgcagggaaaataaatcctcaatcatttaccttcatgacataggagacccaatgatcaacagtatttctctgtataatcttctttctgacaagctctccaaacaaaagaaaagagaaagagaaatggccataggagggaagactttcttctagggcatttgagaagattgtcagacccagatgcgaggcaccacctttccaccttatgcctcattaatggaaataacgcaaaagcccagatctaaggcagagcttcccacctatgaacctgcatctcaatcttcaccttccaggaaccagacagtgtcttctaggctgattacttccagtttatctcattatgatgtccacatattatagctcccctctcccttgtgatgagcatggaaaatatcagtgactccaaatcccaattctttcaccttagaaaacaaatctgagaatccctctaccaccaagcacagtacctggatacaacaggcactcattaaatgtttgcttagcca

SEQ ID NO: 628573 - DNA, 520 bp, Homo sapiens
atctgacatttctatgagacatacaagtagagctctccagcagggagtcagatatggaggtctagagtctagaagagctagatgaagactcaggatctgtgagtgaaaggagaagatgactacaaaggggcaggaagcaccatttgggggtgattgaactgttctatgtcttgattttagtggtggttatatatggctgtatacaattatacacactcagaactgtacacccaaaacagtgaattttacttttgtaaatttaccttaataaaacaattttaatggggcaatagttgaaacaaacaaaaaagttgatcattattgaagctgggtgatgggtacatgagggtactttatattattctctggttgtttgtaggttaaatttccaaagtaaaaaggaataaaaacaacarcaatgacagagcaaaccccttgacctcacattcccctctcacaatcataccacttctgggcctcctgtctaaaaaaatttcttgaaagagttgactacagacac

SEQ ID NO: 628574 - DNA, 483 bp, Homo sapiens
caagagcagtaaaattataaaatatgaagaaaaacatttatcaggaaatagaaagggctgaagaaaagtaaaaaggcttcgaaaataatgtaaaacaagacctgaatttaacattttcctaaatgataagacaatattaaatatttggtgtagatatacgtgcatatagattatggatttgtttaaagtaatttcmattggaaatccaatggagttgagattgggtttattttgaactggacaaaatgattttaaagttcttaagaaataaatgctcaaaggttgaggtataatttatatgcaaactgtacatttaaagtgtacaatttgataggttttgacaaaatgtattctcctgtgaaatgaccacaatcaagaatgtgagagtttccccaatcccaaaagattccttgttccgtttgataatccatctctcctccaccctcatccccaagcaactactggtctgctttctataactgt

SEQ ID NO: 628575 - DNA, 570 bp, Homo sapiens
gatggggatcaatcagaggaaaacatgcaaaaccagaagacaggttctcaatctggtccatggatttagcttgtagctaggctttyaggctttaaagtgtctttggtttggagatggggtttcaccagggacccacccctgtctgcctaggatttgtctgcctcctgccactatgaccaggagagatctctgacaatttgcccaggctggtgtggcttcttgtggtaggagtgtaggtgttccttcttgtgattgtcttcaggtatgacctacagcaacactgcctgagcccaggcattacagtgtttcagttgaatagcacagctctttcaattgtcatgtttgcaaccatttaccccaaagctctctcatggcaacaggtggctgctgcagcagtgttgctagtatctttctgaagatcagcacctcacagcaaagatgcaaaccctggtattgagttcagcttacctcttcaagctcatcctctctatggtgaagttcttacccaaagccctattaccctctccctcaaactttgatctgggacactgaaggccatcagtcatgatt

SEQ ID NO: 628576 - DNA, 538 bp, Homo sapiens
ggggccaaacagatgcctgggtttggagtgcagggcataaactgagtgtttgcatagctctgtggtgtttggtgtgtttgcttgtgtttgagttttcctttttttttttttttttttttaattgaaatggagtctcactttgtctcccagattatagtgcagtggcgtgatctcggctcactgcaacctctgcctcctgagttcaagcratcctcctgtgtagcagggattacaggtgcccaccaccatgcctggctaatttttttgtatttttagtagagacagggtttcaccatgttggccaggctggtcttaaactcctgacctgaagtgatccacctgcctcggcctcccatagtgctgggattacaggtgtgagccactgcgcccagccgaattttcctttctttaaactgtgaatggccctgttgttgtagtccccttgagggggtgaaggacaggtattagggcatggccagtgactgtaatgacctcacctccagttcagggctgcccaggaagtcatcaggaggaagct

SEQ ID NO: 628577 - DNA, 440 bp, Homo sapiens
ccccttgggagtaagacatctcccaggatcatggtctgggcagggcatgggacttggcaaaggaccgagccccctcccatggctctggatgagctcaaatacttcctaggggtgtaattccagagcagaatgtgggctagagatcattactcccttctcacagtgctaaggtaaaatgtctccctttcagggtgcaagtttctaggaacaaagcacataaactctaatggtggctcagggttgcacctatataacctggkatcacataaactgtatagtgactgtccactagaatcaaaccaagcctctcttggctccccaatcatttttgtgtgtatttgtgtttgtgaaaggaatgtgcctataaaaaataggctgagtaccaactataggctaggcatagggataatataaagagggattgaaacatctgtgcttgc

SEQ ID NO: 628578 - DNA, 439 bp, Homo sapiens
agttctatgggacttaccccacacctcagctagaaactggaacggggcaaaggattctgttttaaacctggaaaggagatgaccattttcaccacatcttcctcttctttctttgagaaaagatgtatcaaagaacctcatagatactggcctcagtgatcattagcttccttcactctccatggtcagtgcagctcaggacttgacatttcttaatctgaaaggtctttaaaatcaaaaagaaagaggaaaaaaacgatccaccacattctactctggtttttttttttttttttttttttttttttttttttttaaracacagggtctcactttgtcacccaggctgcagtgcagtggcatgatcatagctcactgtagcctcaaactcctgatctcaagtgatccatcctcttgcctcagcattctgagtaactgg

SEQ ID NO: 628579 - DNA, 581 bp, Homo sapiens
tcttgttcacctcacaattctagtcttacgcacaacttaaaattcttcctgtccccagcactggcgagatctgttgcttgttctctcagcttgcagagaaggggttctggaggctgacgctttctcttcctgctgatctgggcttcaccctggtgtcacagcgaggggtcagggtgagtagaactacgggcagcagaggggtcttctcaagtgagtgcttatggcaaggaggtagcctctgtctgtaggctgtttctgcttcttcaaattggttggttgttagtttctctttgtggcaaatgtttctaaatgccaggattttgtggaaaacttttattggttccttgaggggatcccccttcaagtccctgggtgtgaaatatcccacttaagttcaacatattctttccttcctctggcctctatcacgggaggcccaatatacagcctcttgcttctgggaccccctttatctggtgggcagccttccttcagaagacagaggtaggaagaagagaaaacaccagcaggatggctcatgcccartcatcttccaggggacccactcaacaaacacaaac

SEQ ID NO: 628580 - DNA, 585 bp, Homo sapiens
gctggtaagaatgtaaaatgaaacaaccactttggaaaaatatttggtaaaatcaaacataaacatgtagcattatatttcactccggggtatttactcaagtaatttcactcctaggtattcagccaagagaaataaaaacaaatatccacaaaaagaattgtacagaatgtttgtagyagctttattcacaatagcataaaacagccaacaacccaaacattcttcagcagtcgaatggataaacaaattgtggcatagtcttacaattgaatagtactaagaaatataaagaaacaagttactgatatatgtaccaacatggaaaaacctcacagacattgctaagcaaaagagactatgtacaagagtacataatgtgtgattccatttatatgaatttctagaaaaggaaaaccaatctaaagtgaaaataatcagaacagtggttctctctgggggtcaggggaaaggagtgatggggaaaggacacaatagagctttctgtatcttgaaggtatgggttatagacgtatatctatttgtcagaattatacagttaacttttttgtatttaagtatatg

SEQ ID NO: 628581 - DNA, 548 bp, Homo sapiens
tagggaagccgccaaccagaatcatgtttgtttagtttcgcaacygtgagtcacattttggttctaacactaaatggattatctttcctttttttttgaacattacatctgagttcacacctctgagcattcttacaatattattagattttcctctgcattttggacggtgaatttgagaagattttagaaaaaaatttgggactgaaaaattcatataatgaacttatgattctttaaagcagagactgaataaatatgaagtataacttgaatagtctcattcaaatctcaaattttgttacactttttatgttatagaaacaattgtagttccaaataattatctaaaaattttgctaaaataacttctggttagttgggtaaatttaaataacttgtgttaagttggttaaatttctgttaaagtgtattcgttgagttattcattattagtaaaaattggttatggtgatgtaatgttctctacagtattccctcagaattttttgatagtattggttaatgttcactcttacaaagcccct

SEQ ID NO: 628582 - DNA, 563 bp, Homo sapiens
taagggcatcccaggcagagagcatgtgcctcctatggtagggaagaacgtggcatgatggagggtctaaaaggaggctattgkgtctgcagcagagtgcaatgaagactggagagggaggcagggaccccccacaaactgggccctgggtctgagtgaccatgtgaccctgggacagatgctctgggccacctaaccccctctttttatattgcacccacatatgaagctgcaggagtccagtaccctgttgttaccaaatcactacaggaagactctcagccacacctggcctgtgtgtacctctttcaccaaggaatgcttaagataaattccacccaaaggtgtcaccttacctttctaactctccttgtaactctctacctgttctatacatcctctcaactgacccagcctccttctttgttttggtccccaatcattcctctgtatcttcttgaacttccactctaagacctacaaactccctcagatacctacatccccaaggttttcttagagtggaacctgcacttctatctaaacaaaaatctggagatgat

SEQ ID NO: 628583 - DNA, 563 bp, Homo sapiens
taagggcatcccaggcagagagcatgtgcctcctatggtagggaagaacgtggcatgatggagggtctaaaaggaggctattgtgtctgcagcagagtgcaatgaagactggagagggaggcagggaccccccacaaactgggccctgggtctgagtgaccatgtgaccctgggacagatgctctgggccacctaaccccctctttttatattgcacccacatatgaagctgcaggagtccagtaccctgttgttaccaaatcactacaggaagactctcagccacacctggcctgtgtgtacctctttcaccaaggaatgcttaagataaattccacccaaaggtgtcaccttacctttctaactctccttgtaactctctacctgttctatacatcctctcaactgacccagcctccttctttgttttggtccccaatcattcytctgtatcttcttgaacttccactctaagacctacaaactccctcagatacctacatccccaaggttttcttagagtggaacctgcacttctatctaaacaaaaatctggagatgat

SEQ ID NO: 628584 - DNA, 594 bp, Homo sapiens
ccaaaagagacaaaacaaataccagacaatatagactttattattaatactattattagtttgagactgtatcttgctttgtcacccaaggttggagtacagtggcatgatcatagctcactgtaacctcaaactcctaggttcaagtgctcctcccacctcagcctccctaatagctaggataggtgcatgccaccatgactggctaactttttaaaaacattttgtctctagaawaacaacaatgaaaattagccaggcatggtagcatgtgcctatagttccagctatttgggaggctgaagtgggaggatgacttgagtccgggaagcagaggttgcagtgagccaagatggtgccactacattccagaggggtgacagagtgagaccctgtctcaaaaagaaagaaagaagaaaaagaaagaaagaaagaaagaaagaaagaaagaaagaaagaaagaaagaaagaaagaaagaaggaaagaaagaaaatccctagatataatggcttcactggttaattctaccacatatttaaagaagaactaatatcagtgcttctcaaactttcattaaaaattcagggtgaagg

SEQ ID NO: 628585 - DNA, 449 bp, Homo sapiens
tagccaggcatggtagcatgtgcctatagttccagctatttgggaggctgaagtgggaggatgacttgagtccgggaagcagaggttgcagtgagccaagatggtgccactacattccagaggggtgacagagtgagaccctgtctcaaaaagaaagaaagaagaaaaagaaagaaagaaagaaagaaagaaagaaagaaagaaagaaagaaagaaagaaagaaagaaggaaagaaagaaaatccctagatataatggcttcactggttaattctaccacrtatttaaagaagaactaatatcagtgcttctcaaactttcattaaaaattcagggtgaaggaatacttcctaactcatcctatgaggccagcattacccagataccaaaattagataaagacatcacaaaaaaaaaacaccacagaccaatatcccttatgaatattg

SEQ ID NO: 628586 - DNA, 630 bp, Homo sapiens
caaaccacattatacatcctaagggggagaacaattacactgaaaaccaaaaattaatcagttgactatatatgattacaaaaactatcgcagagtaatttagcrtataatcacataatactacagctaatatttaaataagtatgattttcttagtctactagctccatgataggctaaaagtgtccaagaagcatgctgcctatgttagaaagaaataagcctataaataaaccacaaggtaaaaaaattcacataaaaattatctggaataaattattatctatttctaatatcaagcactaattgtaaaccatagtaatttagggtttggaaacagacattaaaacactgttcatatgctttcaaggttatccatttctaaagctgagttataaatggtgtgcatgaaaaaaaacccacagtaatctattcattcatatatgtataccatgagtgctatatcacacagtcatcattttttatcaagaatgacaattttaacctttaaataaccacttatttgtcaaaaatattccacatgtattaagattaaataatcatgcaaattgaatcaagcaagtctaaataatgcttacctaataaaattaatgtggtgatttcctaact

SEQ ID NO: 628587 - DNA, 559 bp, Homo sapiens
gaaaaaaacaatccagctccaacggtactgatgtgacaggaggttgtcacagcagagcggaagatctggcagaaagacgctgggaaagaagacactaggggaaaacatcagaaagttcggatgatgaaaactcacctcacgccacaacaatgtaggataaagccggcggtcaccccaccccagagtgggacaaagtcgcaccaccccttgacaatggggcatcaagatcttatcgccacgggggytgcatcctggtggggtcttttggagggtttagcaccttgcatcctagaatacaaaacacttttgcgtgttttttggtagaattctctgatcccctacctccaatctgaattaggtctttcatgttttcctcacttggctcagtcttctacacctttacatagttgtatttttatatatttgtttaatgtctgactgtcaactccatgagagtgagaatcatgtctatttccttcactataatttatcctctgcctggcacatagtgggtgctcaagaatggcagcttcatcactaactccataaacaacacgca

SEQ ID NO: 628588 - DNA, 612 bp, Homo sapiens
agagatggggttgaacctaggaggcggagttgcactgagccgagattataccactgccagcctgggagacagagtgagactgtgtctcaaaaacataaataaaaaataaaaaataagcacataaatatataaatacagatggtaataacacrgcaaataagacatttgggaatatgcaatatgtggttgtgaataacaagaatgctagattaattggaccataagtttgtggtgagaaatagtgggaaaagactgcaagagagacaggagacattgtgaaaagcttttaaaagcattgtaaaatgctaacttgaggaatctgcattttcttaggttggtggagggaagctaataaaggtattttgagcaggacagttatatgataaaaggcagtgttttaggaatattaaccagacagaaatatgtaggatgaatcaggagaaagataaagtctggaggcaaaagatgagtttggagataaaccaacagtgtgggaaggaggtaataaaggcttgtagaaggcattggacgaaaagatatctagacatcgggcaaaaaggggctgaaatctggcctgcactccatttgcccatccctgcaccaaccaggttg

SEQ ID NO: 628589 - DNA, 628 bp, Homo sapiens
attctcaggtgtacagcttgatgatgttttccccctgagtctgctttctaggaagactttttacaaatgtatacacccatgaggtctttacatagaaaaaatgtagaatgtttctgtcattccagaaaagtccmttatgtccctttcagcttgatacccacctcccagagataccaattattcatttaaatggaataatatggcataaattattttatgtctggtttattattaagcataataataattgagagtcacctatgttattctcatgacagtttgttctgtttttatacttagtagtattccactatataaatgtaccacatgttgtctattctccctctaatggacatttagggtgtgaattagtcaagatgggattagatgtgcaagagatttattagacgttatgcttaatagggaacatggagaggaagctagaagctagggaagactgtaagagacatcagatctcaatgcagatgaaagagaaaagaaaggaaggaaggttgaatgggggggtcttagagtgcagtatagttctaagaaagttaggcaagaccaaatgtgcccatcagaggagtcctgcgccttctaggaatggacctgtcttagtactccttct

SEQ ID NO: 628590 - DNA, 628 bp, Homo sapiens
attctcaggtgtacagcttgatgatgttttccccctgagtctgctttctaggaagactttttacaaatgtatacacccatgaggtctttacatagaaaaaatgtagaatgtttctgtcattccagaaaagtccattatgtccctttcagcttgatacccacctcccagagataccaattattcatttaaatggaataatatggcataaattattttatgtctggtttattattaagcataataataattgagagtcacctatgttattctcatgacagtttgttctgtttttatacttagtagtattccactatataaatgtaccacatgttgtctattctccctctaatggacatttagggtgtgaattagtcaagatgggattagatgtgcaagagatttattagacgttatgcttaatagggaacatggagaggaagstagaagctagggaagactgtaagagacatcagatctcaatgcagatgaaagagaaaagaaaggaaggaaggttgaatgggggggtcttagagtgcagtatagttctaagaaagttaggcaagaccaaatgtgcccatcagaggagtcctgcgccttctaggaatggacctgtcttagtactccttct

SEQ ID NO: 628591 - DNA, 558 bp, Homo sapiens
gatttggaggctggtaagtccaagagcatggcaccaacatctagtgagggcctttgtgctgtgttttcccacaatggaagaaagtgagcctgtgagacagaggatgggagccaaacatcatccttttatcaggaacccactcctgtgataactaacctactctcatgataatgacggcaggrccctcatgacctaatcacctcttaaaggtcctgactgtcaatgctgttataatggcaattaaatttcaacatgagttttagaagggacattcacactatagtaccagatgactctcaaacacctgttgctgtgaagtgggttccctggttggatgctattccttgttgaattctatgcctgtggatcaggcatttcataagtccttgggtactggggctatttgaggtctgtaggcaggaaaggcaaactcatatgcaggtatctctccttttgaaaacaaactcttgacccttttagaatgaaagggactggtgtgctgtgtgatacagttggcctgtagcaggaacaatgctatatcaggaggttagttgttca

SEQ ID NO: 628592 - DNA, 513 bp, Homo sapiens
agagaaatcctgggccagttgtgatggctcacgcctrtaatcccagcactttgggaggctgaggcaggcagagttcgagaccaacctgagcaactttacaaaaaaatacaaaaaattagcagggcatggtggcacgtgcctatagtttcagttacttgggaggctgaggtaggaggattgtttgagcctgagaggttaaggctgtggtaagctgagatcaggccactgcactccatccagcctgagagacagggtgagaccctgtctcaaacacacacacacacacacacacacacacacacacacagagagagaagggggggagagagagagatagagagagagagagagaaatcctcggggagaggaaataaatagaatattgaaaatcaatgtagtgagtaagagctaaacccagtgacttatggaggagacagaatggggtaaatccctagggggagggccatgattttagcacataccagggttctggatttgagtctaaagtcccat

SEQ ID NO: 628593 - DNA, 617 bp, Homo sapiens
tccccttctaattagcagatgtaaggcgagcatcagccttcctacaaacatgctcttaaaagcttaatttccctagacttttaggagaaggaaggttttgcctctcaggcttctggaagttgtttttcatgcattgcctgagtctcctcttctttccaaactccatcaaggaaaagcctcccttactgctggctgcctccctgaatacctgggtacagcctcttcaaagtcccgcctgggtttcagcagaggggtggatgtaaggcaggccacactttttttttaaacttcatacakttattccttgcaatggtatcaggtaaagctatcctgatgtattagatttttctgaagagttggtggtagatactctattatatgagggaaattaaaaatgcaaataaaataaaaacaataacaaaaacacttggctaaatatactggtaaccatagtccaagagaaaataagaaaaaagtcaacttattctcaagaggtaccctcatggtcagatcccatttaatagcattggtccgttgtcctacagagctacagatcagtcctacctttcaagagctcctgcttcttcaaacctttgcagtgtgaatatctgtcccaa

SEQ ID NO: 628594 - DNA, 578 bp, Homo sapiens
ggcgccagaccactagaatctgagggctgagatgtcacttctgagccctctcccttctactctctgtacctggtctgcagcagttctgcagcatgaagaatggtaccgggggcagcccctcacccctcctctctctgctttccttgctgaagccggccatctgcatacctgcccaggtgaaatccatcccactctccctcctcaggcttccaactggcccaaagcccgcccactgcactgctgccctgctgaccttcccctgcggctccttcccactatgaaattctgctcttcctcctcctccttccactaggagggttccagtggggagccaggcaaaagtttccctattacagggtttggaggatgctggcaatttcttctatgttgtgtttcctccctgcttgccatcagaataaacatcagaggtcactgcataaaagcgtctccccagtttagagaacagaagaagccacttatgcaataatagggaagccctggcagagaggagctggtgggaagaagttggackggagctgtgggggtggggaggagctcaggaggcagcccgcatagtg

SEQ ID NO: 628595 - DNA, 278 bp, Homo sapiens
acccttattacataaaataagggttacttgaccacwagtgttgttatactagaatattccatctgataaccagatggctactgagacagtgtgaatacactagagaaaggaatgatttacatttcaggtgagataaagtggggtggtgtgagattttatcacactgctctgaatgggatacaaattcaaacttatgaattgtttatttctggaatttttcatttaatatttttgaaccacagttgcctatgggcaattgaaatcacaaaaaaacaaaa

SEQ ID NO: 628596 - DNA, 278 bp, Homo sapiens
acccttattacataaaataagggttacttgaccacaagtgttgttatactagaayattccatctgataaccagatggctactgagacagtgtgaatacactagagaaaggaatgatttacatttcaggtgagataaagtggggtggtgtgagattttatcacactgctctgaatgggatacaaattcaaacttatgaattgtttatttctggaatttttcatttaatatttttgaaccacagttgcctatgggcaattgaaatcacaaaaaaacaaaa

SEQ ID NO: 628597 - DNA, 588 bp, Homo sapiens
tggtgcattccccatgcctctttccaatcccatcatataatgaccaactttataggggctcatgaaaatggtgttggccscagtggttggcaatatattgttacggtgcccatgagagaagccccctacccatcaccacccactcaatgagtcctcagtggtcgctaaaaaacttagctctttacaaccagctgttcaggttaatcagggaaaaaaaaaaaaaaaaaaaaaaagagttacaagccaagcataatctgtggcccacactttttccagaaagagttttgagcacttcaatatttaaagggggaaggcaggcaggaagggaaggaggaaagaaaaaaaaggtgggaggaggtagacaaatgagacaggtcattacattcctttgaggttttgattagcactcactgaatccacatgttgcatgtgaaaaggagggggtaaaagaacaatcaagtacttattcatgtcatgcttagtaaatctgcactttacataagataaatacagagcagaggaagatgacaaatatatattcctctacaggtggtggagggaggattcctagtctcctcttgcctcatg

SEQ ID NO: 628598 - DNA, 572 bp, Homo sapiens
tatagcctgaaattctctaaataaattaatttggttttatgatttaactgttctctatgagagtaatctgatctttgccctgaggcatttgaagcttctgagaatttttagcaataaatgggaaaggtacactctcatttttgtcttggacaaaatgctgagttttgatagagtgytgcctctcaattatagcttttactgtttgagcttcatcgcatcaaggcccaaagttacagaatgtgtttacttcattttatttctgctgttcagcaatccctttcttcactcatctttctggtaatgcttgataaaatttagtcaataaaaccccaaaacacaaactttgttttttgatctctttccctacagctacaaaataattggacatgcaatctgcctcacaagatatttcacagatatgttgttgccaaccattccactactgctcaagagtgacatctacagcttttcctgattgtatcctccactccctaaggagaagctgtgtcacacaatcacttaattgaggtggcattctactgaaagcaagacctgtattaggcaggcaatgc

SEQ ID NO: 628599 - DNA, 491 bp, Homo sapiens
tctgatcttagagcgtgatgtaataaatgatccatgctgctgtctctgctggccgcttggtgaaacaaccagttttgtcatgtacatcgcctaagccttggggtatgaaaagccacaatggaaagccattctgagtacctgcagacttaatcccacctggaagtcaccaaagctaatggcttgcttcctttagaataataggycgatctctccttggtgccatttgagccacaacaagtgtctgctagttggaaccagaagttgggcatatttgacaaaagtataagaaaattgggagcgaacaatactgcagtaaaactccgagcaagctatcagattagcctatatagaaagtgggtatatcattcattcaaacctggctaaagtgtggtacacagaccaacaacatggacatcacctgagaacttgatggaaaagatagctcccagctgatgcctgtgctcctgttcttcaaagttcattcaagtagc

SEQ ID NO: 628600 - DNA, 491 bp, Homo sapiens
tctgatcttagagcgtgatgtaataaatgatccatgctgctgtctctgctggccgcttggtgaaacaaccagttttgtcatgtacatcgcctaagccttggggtatgaaaagccacaatggaaagccattctgagtacctgcagacttaatcccacctggaagtcaccaaagctaatggcttgcttcctttagaataataggtcgatctctccttggtgccatttgagccacaacaagtgtctgctagttggaaccagaagttgggcatrtttgacaaaagtataagaaaattgggagcgaacaatactgcagtaaaactccgagcaagctatcagattagcctatatagaaagtgggtatatcattcattcaaacctggctaaagtgtggtacacagaccaacaacatggacatcacctgagaacttgatggaaaagatagctcccagctgatgcctgtgctcctgttcttcaaagttcattcaagtagc

SEQ ID NO: 628601 - DNA, 447 bp, Homo sapiens
actttaaaagtacatttacatattactctgtgaagcatgacttcattcagatcagaaggtgttcctctaaataatattctataatgaagttggttcccatgcatgctgtgacagagtttctgaattttcttttaaatcattgtttatatgcctttctatactgattattctgttctttgttgcttcttatatacatttagattacgtctttgacatttgggttgctttgcaracattttaaaatcaggcagccccagtgaagactcctcattgcagtctttctcatcattctgcaagctgtacacaaagcatggcaccagcatctgcttctgccgagtcttcagaaagcttacagtcttggcagaaagcaaagggagcgcaggcagtgtcacatggtaagacagagatcaatgtggagtgaggttccagactctttaaacaagcaga

SEQ ID NO: 628602 - DNA, 540 bp, Homo sapiens
ttacagtcttggcagaaagcaaagggagcgcaggcagtgtcacatggtaagacagagatcaatgtggagtgaggttccagactctttaaacaagcagatctcatgtgaactcagagaaagaacttactcactaccacagggagggcaccaagtcattcatgagggatctgcccccaaacaccttctaccaggccctacctcygatattggggatcacatttcaacataagatttgcaggagataaacattcaaactatactaatgtttattgaatgtaattctgcaataaaattattatcaaattatacattcattgaattactgtttatgttccataagctctatcacattgtttgcttcttctgaaattgcattctcttaagtatagaacttagaatgtgataacattgagtaaatattgaatgaataaactgatagatgaacagatggatgagtgaacaaatgagtaaatacaatgcttggaggccaaatactacacttaattggtctgccacgattactggatgaaataataaaaa

SEQ ID NO: 628603 - DNA, 540 bp, Homo sapiens
ttacagtcttggcagaaagcaaagggagcgcaggcagtgtcacatggtaagacagagatcaatgtggagtgaggttccagactctttaaacaagcagatctcatgtgaactcagagaaagaacttactcactaccacagggagggcaccaagtcattcatgagggatctgcccccaaacaccttctaccaggccctacctccgatattggggatcacatttcaacataagatttgcaggagataaacattcaaactatactaatgtttattgaatgtaattctgcaataaaattattatcaaattatacattcattgaattactgtttatgttccatragctctatcacattgtttgcttcttctgaaattgcattctcttaagtatagaacttagaatgtgataacattgagtaaatattgaatgaataaactgatagatgaacagatggatgagtgaacaaatgagtaaatacaatgcttggaggccaaatactacacttaattggtctgccacgattactggatgaaataataaaaa

SEQ ID NO: 628604 - DNA, 411 bp, Homo sapiens
aaacaaatacaatcacatatgaggggggaagaggggcaaaatagagacaataggaagtgtaaaattctgaggcgcaaatttcctgaaacaggaaaaataaccatttggaatatttaaaaaatacagcaatgcttgctatgatttttatatagagaatggacaataggagaagtattagaagctgggagaatgattaaggggctattgtaattgcccagtaaaaagaaagttgtggctggctatggataatcgctgagttaatggtgataattaatgasacttagtgtatatttcaataatatgaaaacagtaccagctgagacatggaatgtgcaaagaaacatagattaggtatcaaatactacaaacattttcaatatgggcaattgatgcagatgaagtacaggccat

SEQ ID NO: 628605 - DNA, 411 bp, Homo sapiens
aaacaaatacaatcacatatgaggggggaagaggggcaaaatagagacaataggaagtgtaaaattctgaggcgcaaatttcctgaaacaggaaaaataaccatttggaatatttaaaaaatacagcaatgcttgctatgatttttatatagagaatggacaataggagaagtattagaagctgggagaatgattaaggggctattgtaattgcccagtaaaaagaaagttgtggctggctatggataatcgctgagttaatggtgataattaatgacayttagtgtatatttcaataatatgaaaacagtaccagctgagacatggaatgtgcaaagaaacatagattaggtatcaaatactacaaacattttcaatatgggcaattgatgcagatgaagtacaggccat

SEQ ID NO: 628606 - DNA, 632 bp, Homo sapiens
tacatttgttctaaagaataaaatactttatgctgacttgtaaatatttcctcaaagaagtattactttggagcaagaggcaaatatagagtgagaatgatgaaattactttcaataatgcaaaaagctcaatctgtaaaaatattcttatttcaacttacttatttatagagctctcaggtttttttcttcaaataatgtatattttccaaactagatctaacttcccaaaataaggatttggtatggtttaatgcccctttttggagacattatttaaatagcatatattttaagctttacatctagcaagcataatgckaaattatataataatacgtaatcattaatagaaaatatataataatttatttctaacctcaaagaattatgaacggaaatttgtgtgtttctatggatacttgttcatgatacagtgacaggtatataagagaaaaatactagagaacattcatgtaatacttgctaagaaaaaattcttttgtaaaaatatcttattttaatattggtattgtaaacaatccagaaatcagtatctttcgcactacttattctgaatcttgatagtgttggccttgagactgattatataaagttagatgagaaaaatc

SEQ ID NO: 628607 - DNA, 632 bp, Homo sapiens
tacatttgttctaaagaataaaatactttatgctgacttgtaaatatttcctcaaagaagtattactttggagcaagaggcaaatatagagtgagaatgatgaaattactttcaataatgcaaaaagctcaatctgtaaaaatattcttatttcaacttacttatttatagagctctcaggtttttttcttcaaataatgtatattttccaaactagatctaacttcccaaaataaggatttggtatggtttaatgcccctttttggagacattatttaaatagcatatattttaagctttacatctagcaagcataatgctaaattatataataatacgtaatcattaatagaaaatatataataatttatttctaayctcaaagaattatgaacggaaatttgtgtgtttctatggatacttgttcatgatacagtgacaggtatataagagaaaaatactagagaacattcatgtaatacttgctaagaaaaaattcttttgtaaaaatatcttattttaatattggtattgtaaacaatccagaaatcagtatctttcgcactacttattctgaatcttgatagtgttggccttgagactgattatataaagttagatgagaaaaatc

SEQ ID NO: 628608 - DNA, 582 bp, Homo sapiens
aaacatgtgtatatatttcaattttttagttttgtcttctacctacttaaattctcagaacaagagagtatggtggttctcttaattccttrtagttattgacatattgatgtgaatgtttaatatacttatatgtttgctttaatcaaaatatattataaaatatacacaagcagcaaagtataaatagaaatcatgacacagttgtcaagaatgccagctatgaaagcaaaccacttagggtcaaatttagttttcaatgtttctatctatgtataccttggtcaatcattcaatttttctatatcttttcttcacccgttaaatgaagttcataatgattgattgtaaggattaaattaatttttataaagtctatagtaattgcaactataagcgtttcataaatgaaataagagaaaattattctttccacacttgtgctttaaaacaaaatttcttttgagctataagattatttatacacatatttttaacctatacatatatgaaacatctgtaatgttttcaccccaaactcatactttgaatttagaagtagttgttgctttttctcttata

SEQ ID NO: 628609 - DNA, 599 bp, Homo sapiens
aaataattatacaaaatatcayagctatttctgcagaaacatgcttataattattgtaatgaatagttgtttccatattactgtcttttgatgtcacactttatgtattttttagtgctttatggaaaagtatcacataatgttaaatcttttgttacatactaatataaaaaaagtcactataatagaatgtgtaacaaggcaacactctaaaaaagtgaattttaaggactgttagacatttctctttaaagttacttctggaagttaaatatcctattttatttttaaaaataatattatcaaatatgtccttcatctcttttagtcttaacctcattctttacaattccattttaaacaatattaaactttatagttactgccactgtgaaaaaagctaggattccttccagggcattttcatgtataaatcttatcttcaaaggaaatactccattgctggatttcattcatctatactactggaagctatccaagatgttaaggaccaatttaataaattggtttttacgaaattcatagaggctattatcttcatttatttgacatcaaaacatgtctttctttttaatcat

SEQ ID NO: 628610 - DNA, 601 bp, Homo sapiens
ttgtatggcccacttttgtcactaataaataattatacaaaatatcatagctatttctgcagaaacatgcttataattattgtaatgaatagttgtttccatattactgtcttttgatgtcacactttatgtattttttagtgctttatggaaaagtatcacataatgttaaatcttttgttacatactaatataaaaaaagtcactataatagaatgtgtaacaaggcaacactctaaaaaagtgaattttaaggactgttagacatttctctttaaagttacttctggaagttaaatatcctattttatttttaaaaataatattatcaaatatgtccttcatctcttttagtcttaacctcattctttacaattccattttaaacaatattaaactttwtagttactgccactgtgaaaaaagctaggattccttccagggcattttcatgtataaatcttatcttcaaaggaaatactccattgctggatttcattcatctatactactggaagctatccaagatgttaaggaccaatttaataaattggtttttacgaaattcatagaggctattatcttcatttatttgacatca

SEQ ID NO: 628611 - DNA, 500 bp, Homo sapiens
gcaatacatactgatctctgtagagttcagcaaagtgatttggatgttttaattgaaacaactctaattgactcctacagttctatttataaactaacatttaggacattagaacaggsagatatcataaaatattctttctaagtatatatgattcagagatatggacagatatttagacacattatacttcatataaaacacatttagaattagatataaatttccccaggtatttcatttataattaatatatagatatatggatgttttccattttctaagaaatcttaagaattttgtgttctaggtgacacagcattttgcaatatccaatgactattctgctacattacagaatgacatttcctaagtgttcattcttaaaatataaaaatgttcaatttttaattgttcacaataatccaccttccccatcttggttttgtagtaatataaggagaaagaaagaaatctgtgatttaatgaggcaagatcta

SEQ ID NO: 628612 - DNA, 582 bp, Homo sapiens
  misc_feature 1, 2, 3, 4, 5, 6, 7, 8, 9, 10, 11, 12, 13, 14, 15, 16, 17,18, 19, 20, 21, 22, 23, 24, 25, 26, 27, 28, 29, 30, 31,32, 33: n = A,T,C or G
nnnnnnnnnnnnnnnnnnnnnnnnnnnnnnnnncacatcctgataaaataggtttcataaatgaggaagaaacaaaatctttccaagtcaagcaaacactaggggaatttgccattaccagacaagtcctataagaaatactcaaaggagttctaaacatggaaacagtagaactatacttgctaccataaaagcacatgtaagtacaaagctcacagatcctataaagcaattacacaattgaaacttcaaagcaagcagctaatatcactatgacaggaataaaaacacacattttgttggtcaaaatattcaccaacatgtcaatattaactttgaacataaatggcctaaattttctacataaaagacatagagtgccaaattggattacaagaacaaaacaaacaaacaaacaaaaaaacaagacccaaaattctcctgccttaaagagaaccatctcatgtgtaaagactcccataggctcaaagwaaaggaatggagaaatatctatcaaataaagagaaagccaaaatgagcaggggttgctattcctgtatgagataaaatagatattaaact

SEQ ID NO: 628613 - DNA, 623 bp, Homo sapiens
tatctttctttcttctttggctyatgggttattcaggagtgttttaatgttcacatatttgtaaaattttaagttttcctcctgatattgatttctagtttcaaaccattgttgttaaaaaaaacagtttatataatttcattcatcttaagcttgttaacagttgataatagcaacagctgtgatctatcctgaaaaatgtgttgtgtgtgcctcagaagaatgtgtattatgtggctttttgatggaatgttctgtatacatcagttaggtccatttggtccaccatgtagtcgaaagtccacttgatttctttctggataatctacccattgttgattaaggttattgaagtatcttattattattgtgttgctgtctattttttctttcaaatatgtcaatatttgcatttcatatttaggtgctctgatgttaggtgggtatttatttataattgttacatcttactcttgaattgacccttgtatcattatataatggccttctttgtttcttgggattgtctttcacttgactatcctgtccaatatagttttagccattcctgctcttgtttagtttccatttgcatgaaatatctttttcttacactttcaatc

SEQ ID NO: 628614 - DNA, 623 bp, Homo sapiens
tatctttctttcttctttggcttatgggttattcaggagtgttttaatgttcacatatttgtaaaattttaagttttcctcctgatattgatttctagtttcaaaccattgttgttaaaaaaaacagtttatataatttcattcatcttaagcttgttaacagttgataatagcaacagctgtgatctatcctgaaaaatgtgttgtgtgtgcctcagaagaatgtgtattatgtggctttttgatggaatgttctgtatacatcagttaggtccatttggtccaccatgtagtcgaaagtccacttgatttctttctggataatctacccattgttgattaaggttattgaagtatcttattattattgtgttgctgtctattttttctttcaaatatgtcaatatttgcatttcatatttaggtgctctgatgttaggtgggtatttatttataattgttacatcttactcttgaattgacccttktatcattatataatggccttctttgtttcttgggattgtctttcacttgactatcctgtccaatatagttttagccattcctgctcttgtttagtttccatttgcatgaaatatctttttcttacactttcaatc

SEQ ID NO: 628615 - DNA, 560 bp, Homo sapiens
aaatcacaccaatcatatttataaaatatctttttaatgtagatttgaagactagacattaggtgatttatcactagtcaaaaatgaaaaattggacaaatgagacatatctaccatcatatacaaagaatttgtacttttatcccccataatatgttatttcatttcatgatgaactgtgttgataggtacattgatagaagatttaacatttttctgttgtctggggtttgtaatatgrcaatattctattatcattgcaaaaataaaaataaaagcaaccatcagttaatatttcctttcccttttggctatattttacttatatataataacaggaaaactcatatagtttatagatatattatttcacaaatctaaattaactcacatagtaataatttaaatttattttaacataaaaacctttttgtgccaattaatattatgcatacatttgttaggtctatttggtctagagttgagtttaagtctgatgtctctttattgattttcttggtctggctgatctgtccattgtagaaagtggagtgttgaag

SEQ ID NO: 628616 - DNA, 607 bp, Homo sapiens
aggaacttataacaattccaattgtatggatctgcgtcttgttttctcatgaagctaaaatcaaagtgttggccagggctgtaatcttttaaaggcttgacagggactgacagtttgactaatgcctgcaaatcggcattggttgttgggaagaaagctcagctctaacccacatctgcttctctaccaactgtttcagcctccttctatcatggtagtgtcattttcttttggtcttttacctggaattgtgtaattctttttcatactctcctgcctttttgtgatragactgatgacgttattgtataatattttgaaatttgggtttctttagttgttttccctcattttggtgtgattccgatgatatggaattcccattccataaaatcaggtaggaaatttaagttattagagaaagttttacaaagagacattcaccttttcaaataatagagctacaggaaatgtattgagtggggaataagaaatactagcatttattcaatgaggtttaagaggaaataatcagaataaaggtgtgaatggattatttcctgttgcataaatctacccatttttattgattttgcgaagaaaatat

SEQ ID NO: 628617 - DNA, 535 bp, Homo sapiens
taaaaatattttctattttttaaaaaaatcatttaatttataaaatattacaaatatttgttttcagatgacatattgcttacatcaaaaacgttaagaatcaacgaaaacatccttgtagaaataaaaactatattaggttaatatcaacggatacagaaatcaagatgaatatgcacaaataaattatattttgtatgctacagaaaaatataatataatctgacctggcatggtggctcacacctgtaatcccagcattttggaaggcaaaggtgggaggactgcttgaacccaggaatttgagaccagcctgggcaacataagragaccccatctccacatataatttaaaaaattagcttggtgtggtggtgcacacctgtagtcccagctacttgggtggctagggtgggaggatgacctgagcccaggcacttgaggctgcagtgagctgcgatcacaccactgcactcccacctaggtaacagtgtgagaccttgtctcaagaaaacaaaagtaataaagaacaata

SEQ ID NO: 628618 - DNA, 514 bp, Homo sapiens
ttcataacctctacaaaatgatgtttattgcactcattaagtgtcaggaccaggaatagaatggtgaatcagaaatggacctttcctttaaattcacagaacaggtaaattcacccaaaatctccttctattgatagttggtctaaggtcttatctatctcatttttcaactatctcatctttctttacattatgtctgttgcttctgtcttttgaaactattgatgccttttgaccagatctcatgttaggaaactacatctctcttctccctagcaatgacttgtttttgaaacatttctgcttttcacaccccccttttttttcataattcactttaatcattgacccgttcctagtttctttttgcttattctctaagcttgtaactgtgaggcttrcttgctttaatttaccttcttgggttgctttatttaccttttacatatggccactaagctccatcagaaaacattcctcttagctggcttctactttgactgcaactttcagt

SEQ ID NO: 628619 - DNA, 523 bp, Homo sapiens
tcataccactgcactccagcctgggcagcagagcgagcctctgtctcacaaaataaaaaaaaagagaaacagagtcaccagggatgaatgacctgctaaaggcatccctgaggagccaggggaagcaccgaggatggcagtgatggaagcaggggtggggggtccaaggggcaagaaggcctctgtgggccctggagagggcagatctggagagccggattcctcagctctccctacccgtctttccccaaagaaaacggaaaggaagggactgggaagtggggtctcgtattcctccctcctcatgctgccactgggaggagggagtgtccactctgctcccgtcagagggacacctctggcttctgtccragcacccctcaccacaccctagctggggctgggaggaagggggatctgattttgtgcctgtgaaaggaacaaacatggggttctctctcttcactcctgcctgcccagatggggaggactgctctgctcttccaatggtcagcctggtagg

SEQ ID NO: 628620 - DNA, 561 bp, Homo sapiens
ggtgtgagtcaccgtgcctggccccagaactcctacataaaaccttcctaggcatggcaaatgtccctctgtgagaaagtaaacattcattatatggtcaataatatgatgatttggcagtggaaggcacagtgacttgaggtatatcttctatatctgttttgcattaaaaatttttgcagggctacatactgtctgctgtccctggtttcctccctgaactcagtggtcaacagcactgggcaattgtcactactcaataaagagtggctgaatgaaacaaataattgaatgtgtgcaggaaatcattttttctacaggtaagcctatagaataggcctatttcctggcagggcacagtggctcacgcctgtaataccagcactttggaaggctgagacgggaagatcacttgagccccagagtttgaggccagcctaggtgacatgacaaaaccctgtctctactaaaaatacgaaaattagctgggcatggtggygcacgcctatagtcccacctaactgggagggctgaggctcgagattcgcttgaactcaggaa

SEQ ID NO: 628621 - DNA, 514 bp, Homo sapiens
ttcataacctctacaaaatgatgtttattgcactcattaagtgtcaggaccaggaatagaatggtgaatcagaaatggacctttcctttaaattcacagaacaggtaaattcacccaaaatctcyttctattgatagttggtctaaggtcttatctatctcatttttcaactatctcatctttctttacattatgtctgttgcttctgtcttttgaaactattgatgccttttgaccagatctcatgttaggaaactacatctctcttctccctagcaatgacttgtttttgaaacatttctgcttttcacaccccccttttttttcataattcactttaatcattgacccgttcctagtttctttttgcttattctctaagcttgtaactgtgaggcttacttgctttaatttaccttcttgggttgctttatttaccttttacatatggccactaagctccatcagaaaacattcctcttagctggcttctactttgactgcaactttcagt

SEQ ID NO: 628622 - DNA, 514 bp, Homo sapiens
ttcataacctctacaaaatgatgtttattgcactcattaagtgtcaggaccaggaatagaatggtgaatcagaaatggacctttcctttaaattcacagaacaggtaaattcacccaaaatctccttctattgatagttggtctaaggtcttatctatctcatytttcaactatctcatctttctttacattatgtctgttgcttctgtcttttgaaactattgatgccttttgaccagatctcatgttaggaaactacatctctcttctccctagcaatgacttgtttttgaaacatttctgcttttcacaccccccttttttttcataattcactttaatcattgacccgttcctagtttctttttgcttattctctaagcttgtaactgtgaggcttacttgctttaatttaccttcttgggttgctttatttaccttttacatatggccactaagctccatcagaaaacattcctcttagctggcttctactttgactgcaactttcagt

SEQ ID NO: 628623 - DNA, 619 bp, Homo sapiens
gtgctcagcacagaaatgatactcaatacatatttggtgaataaaagtatgagttgcatttcttccagcctttgtccatcatcctcagaatagggcatcctcacctcactcctgcattcctttaatatctgccttagctggcttccctaactccagtgccttgttctcctgaggagcttgatcaccacttttaccacatcacaattcagcaattctgtatcagcctataataacaccctatttccaatcacaacaattttttagaatgtttggcatwtcccgacttactgttcttgtccaactctacttcttcctattcctacacagaccctttcctctatgtaggtcagcatctttagtctcctcccaactgccacactcattaccttctctacacttaagtgtctatggtgctgtttcccaagactcttctccgcttgctcaaattgaacccatccttcaaagcccaggtcacgccatctcttcttttgggctactccaagcactgctgatgtccctttaccatataacttagcacaaggattggagctcagttttataacatttgttagtgtttgcttggaatgtggtgttgagaaagattctaagtctcagaggg

SEQ ID NO: 628624 - DNA, 569 bp, Homo sapiens
cctcctttctatgtttcatgttccaaaaagatggacctccatccagcagttagactcctggtcccggcctctctctgcctacctgcactttctctaggagggaagtaaatttttgatttggaactgcactgtatgtggcttagccccttttaggatcttcttggcatctgactgcctggaaggaacatgcattttgatctgctgtctggtcatgaataggtatattggagtaggccctgmccctatataggcacaagattaggcctgtgattttccagttttgtccttgactgggtaggtaagatgactccttgggaatatattaataaggccatttttgccacacacataagctacttatttcaatctaagatacttgtgtggcatgtaatttataaaagatcagtatcctctattaagagattgctataactttaactgataaatcttaaaatctccgtagcataacatgatagcaactaatttcttgctcatgcaaattccagtctctgcttgggaaggcttcccttaactcagtaatactccaggttgcagaaggctctgctatc

SEQ ID NO: 628625 - DNA, 518 bp, Homo sapiens
agatataggctaggatcctaaaaaaataggttcaattgtacatactgtttgtaacctcacatctctcctaatttgtcatgaacatctcatacattcatccttctataatattatttttggtgacaacaaagtatttttctgtatcgacatactgtaatttctgtaaccaaatgttaaacatggcctttyccccccatttattacagccaaaattacagtgactattcttgaatatcttcataactgtcttaaattcttaaagtaatttacagagtcaaagggcactcacacttttaaacttctacaaggcattgccaattagaaaaggagccctggcttggaacacacatcctgcccttgtcatctgaaagaaatagatgagtttgcttctctacagaaagctgtttgaaaaacagtaaggccaaaatgttagctgttaagctaatgtgctaaggagtcctgggagtttgtaaatggcaatcacatgagcacacctctcagaagctgctgttcttttt

SEQ ID NO: 628626 - DNA, 566 bp, Homo sapiens
aagggcatcattactattcaacatcaacatggtgtgttttttraatttttggataaattctatttgattccttcaccaggaaaagcaggaccaactggggagactggagaaacagaacgttaggaagaaaatggaagaaaaagataagcaaactgtacagtgaatcattaatccaagtaggtgcattagaaagttagatactaaagaatgagttatcttttaagatataagtgccaggcttaatgctaagcactttatatgtgtcatttaaatgtatttaatcctcacaaccctaaaaaagttctataatcatctctattttagagataaggaaactgtgacacagacagttcaaatatctttaccaaggccacatggctggtaaacaggatagctgaaattcaaactccaggtgtctagttctagtgcttgcacttttaccactatgccattctaccacccactcttttcagaataaaatcgagcccattttagaataaatatatgtgcctctccatgccctcgacagtgaatttttactcctctgtgtgcatatgtgcacacac

SEQ ID NO: 628627 - DNA, 566 bp, Homo sapiens
aagggcatcattactattcaacatcaacatggtgtgttttttgaatttttggataaattctatttgattccttcaccaggaaaagcaggaccaactggggagactggagaaacagaacgttaggaagaaaatggaagaaaaagataagcaaactgtacagtgaatcattaatccaagtaggtgcattagaaagttagatactaaagaatgagttatcttttaagatataagtgccaggcttaatgctaagcactttatatgtgtcatttaaatgtatttaatcctcacaaccctaaaaaagttctataatcatctctattttagagataaggaaactgtgacacagacagttcaaatatctttaccaaggccacatggctggtaaacaggatagctgaaattcaaactcmaggtgtctagttctagtgcttgcacttttaccactatgccattctaccacccactcttttcagaataaaatcgagcccattttagaataaatatatgtgcctctccatgccctcgacagtgaatttttactcctctgtgtgcatatgtgcacacac

SEQ ID NO: 628628 - DNA, 566 bp, Homo sapiens
aagggcatcattactattcaacatcaacatggtgtgttttttgaatttttggataaattctatttgattccttcaccaggaaaagcaggaccaactggggagactggagaaacagaacgttaggaagaaaatggaagaaaaagataagcaaactgtacagtgaatcattaatccaagtaggtgcattagaaagttagatactaaagaatgagttatcttttaagatataagtgccaggcttaatgctaagcactttatatgtgtcatttaaatgtatttaatcctcacaaccctaaaaaagttctataatcatctctattttagagataaggaaactgtgacacagacagttcaaatatctttaccaaggccacatggctggtaaacaggatagctgaaattcaaactccaggtgtctagttctagtgcttgcacttttaccactatgccattctaccacccactcttttcagaataaaatcsagcccattttagaataaatatatgtgcctctccatgccctcgacagtgaatttttactcctctgtgtgcatatgtgcacacac

SEQ ID NO: 628629 - DNA, 527 bp, Homo sapiens
acaaatctaattaatgtaggtcaaacgggaggactggagttattattcaaatcagtctccctgaaaactcagaggctagggttttatggataatttggtgggcaggggactagggaatgggtgctgctgattggttggggaatgaaatagtaagattgtggaaaactgtcctccttcattgagtctgcttcygggtgtaggccacacgaccagttgagtcatgaagcatgcgtccaagtggagtcagtttgttgccagaatgcaaaagcctgaaaaatgtctcaaatgatcaactgtaggctccacaataatgatattatctataggagcaattggggaagtaacaaatcttgtgacctctggacacataactcctgaactagtaagggattataaaaaccatgcctatatcttatcagaattcaggtccccccataatcctaatctcacagcatttcatttgtttagaaaggccattttcagtccctgagcaaggagggggttagttttaggataggactattatc

SEQ ID NO: 628630 - DNA, 610 bp, Homo sapiens
gtgtttggcaaaagctaaggtaatgtttatcttttaggtttgtgttttatgtaagtccctacaatgttatatcttctcataatctttctgcagaaaattacaagctggctgcagaatagcaatgagttattcttttctattcttttgtgtaagacataattcacgttatggaaaggtctgatttcataaacctatgattaggtgaggtaacatacaaacatgtagattcattcagkgtctagtttttacagctttctaaagtccatatgagaactccagtgtgtcttcctttaaaaaatatataccttgtttttggaagatgatctagggggtaaggtaagattgaggtcacaggaaacaagggtccatgataattcagtgcaaggcgttagtttttgtggttgttggcagtcagagagtggttaagtgatgaccgttgcagcatccttcctctggcagcagcaggagctgggtgacgctgagctgcctgtttccaggccactcactgtggctttgatgtgctgtgtctgcaactcattccccagttccgttctccagcatttcattgtcagccacggccagggtaccccgccgcctctcacttccatca

SEQ ID NO: 628631 - DNA, 610 bp, Homo sapiens
gtgtttggcaaaagctaaggtaatgtttatcttttaggtttgtgttttatgtaagtccctacaatgttatatcttctcataatctttctgcagaaaattacaagctggctgcagaatagcaatgagttattcttttctattcttttgtgtaagacataattcacgttatggaaaggtctgatttcataaacctatgattaggtgaggtaacatacaaacatgtagattcattcagtgtctagtttttacagctttctaaagtccatatgagaactccagtgtgtcttcctttaaaaaatatataccttgtttttggaagatgatctagggggtaaggtaagattgaggtcacaggaaacaagggtccatgataattcagtgcaaggygttagtttttgtggttgttggcagtcagagagtggttaagtgatgaccgttgcagcatccttcctctggcagcagcaggagctgggtgacgctgagctgcctgtttccaggccactcactgtggctttgatgtgctgtgtctgcaactcattccccagttccgttctccagcatttcattgtcagccacggccagggtaccccgccgcctctcacttccatca

SEQ ID NO: 628632 - DNA, 610 bp, Homo sapiens
gtgtttggcaaaagctaaggtaatgtttatcttttaggtttgtgttttatgtaagtccctacaatgttatatcttctcataatctttctgcagaaaattacaagctggctgcagaatagcaatgagttattcttttctattcttttgtgtaagacataattcacgttatggaaaggtctgatttcataaacctatgattaggtgaggtaacatacaaacatgtagattcattcagtgtctagtttttacagctttctaaagtccatatgagaactccagtgtgtcttcctttaaaaaatatataccttgtttttggaagatgatctagggggtaaggtaagattgaggtcacaggaaacaagggtccatgataattcagtgcaaggcgttagttwttgtggttgttggcagtcagagagtggttaagtgatgaccgttgcagcatccttcctctggcagcagcaggagctgggtgacgctgagctgcctgtttccaggccactcactgtggctttgatgtgctgtgtctgcaactcattccccagttccgttctccagcatttcattgtcagccacggccagggtaccccgccgcctctcacttccatca

SEQ ID NO: 628633 - DNA, 611 bp, Homo sapiens
gttagtttttgtggttgttggcagtcagagagtggttaagtgatgaccgttgcagcatccttcctctggcagcagcaggagctgggtgacgctgagctgcctgtttccaggccactcactgtggctttgatgtgctgtgtctgcaactcattccccagttcygttctccagcatttcattgtcagccacggccagggtaccccgccgcctctcacttccatcacacagccagccccaggcagactgtttttaaaaacataagccagtcttgcttctctgcagatggaatgttttacgtgagaaataatccagctgagtgtttgctccacagtttgaataagaatgaactggccagtggcttagtagggattcaggtcaggaatgtgttctgctgtcagaaggggaagttaatggtggaaatttgtaaactgctgttgttgggttgacataatatgtatggtctagtaggattagaagttgattctagagttagacacaggttgaagtcctggtgttgcttttcagtagccaccccttgtgagcctcagttttccttccatgaaactgaggaaaaacttgatgcaagaagtgaagagagaatgcaggtacag

SEQ ID NO: 628634 - DNA, 565 bp, Homo sapiens
  misc_feature 528, 529, 530, 531, 532, 533, 534, 535, 536, 537, 538, 539,540, 541, 542, 543, 544, 545, 546, 547, 548, 549, 550, 551,552, 553, 554, 555, 556, 557, 558, 559, 560, 561, 562, 563,564, 565: n = A,T,C or G
acataacatggatgaatctcaaaaaacattaagcagagtgaaggaagccagacacaaagattacatgcagtctaaaagcattttttaaaagactcttgaaaaaataaatctaatttatagtgacagaaagcagagcagtggttacttggggccaagggtggggtggggaaattgactggggaaggaataaaggaaacctttcgtggtgacagaaatgttctgtatcttgattgtggtggtagttacaagagtgcgatcaaacagtgttcttaaaatggctgtactttattgyatataaagcatgttgcagtaaagttaaataacaaaattctgatcggatggtttctgtcttttttacaacatgggtttatttagccttaattattaacaacagttgcatactcaaagatttctagattgatagctattttccctcaacatttaaaatacattattctattatctacctattattgctgagaagacggtcagttccattgttaccgtgtcttattttcttctccccgnnnnnnnnnnnnnnnnnnnnnnnnnnnnnnnnnnnnnn

SEQ ID NO: 628635 - DNA, 669 bp, Homo sapiens
tttaataccttaattttcttgtcatcttatttccaactttcttctgcattattttacctggacaaaattcacccttcagtcaagacacatttaggataatagttgtcagggaatcaacttgtttccaggaggtttttaaagcattttgatttcttcaactattctaaattgatataaaatggagagtttttctctctagcatgcaatttattaaaatactataaatttgtcattaaaaatgaggaagccttaccctctgtggtttttcttttttttaattgtatctgaccattgctgaaaagcccattgtattgtatgtatttgttcatttcactatcactctaatagattgtragctactcaaggacaagggttgtgtcttaatcacctttgtattcccagagctagtgcagggcttggcacccagtggatactaaacacatggaaacaaatgactgcaagttaagacaaggtcctgggtcatgcttctaattcccaacaagactgaaccaaaggcatccaagaggcgtagttgtagcatatcttatattttaagagtctttgaagaagtatggtcagcaaaattgtatgcaacatgtaccatatttacacagtacatttcccaaagtacttacattatcacatctattctaataattaagtgatatg

SEQ ID NO: 628636 - DNA, 537 bp, Homo sapiens
ggtattgatcctggttgggtattgcacatagtagacactcaataaatacctgctgaatgagtgaaggactaaaacatttagcaaataaggggtttaaaacacaaatcaactgtcactgacttaagcaagttaacataagaatttgaactaaactcttaagtttcctgaattggtaaatatatcatgttgtctcttatttcatctctggctttacataataaagtgaatacttccagatacttgtgttttaaagcttagaacagcttaatttgggggaaggccaatatgacgtagtgtaaaatgagaagtayacaatatttttaaaaaatgaactttcacatccttcacttggtgatatggtttggatgtctgccccctccacatctcatgttgaagagtcatcctcagtgttggaggtgaggcctggtgtgaggtgtttttgtcatgggggtggatccctcatgaggcacccttcctgcagtaatgaactctcactgttaggtcatgtgagagctagtggtttgaaagagcctggca

SEQ ID NO: 628637 - DNA, 537 bp, Homo sapiens
ggtattgatcctggttgggtattgcacatagtagacactcaataaatacctgctgaatgagtgaaggactaaaacatttagcaaataaggggtttaaaacacaaatcaactgtcactgacttaagcaagttaacataagaatttgaactaaactcttaagtttcctgaattggtaaatatatcatgttgtctcttatttcatctctggctttacataataaagtgaatacttccagatacttgtgttttaaagcttagaacagcttaatttgggggaaggccaatatgacgtagtgtaaaatgagaagtatacaatatttttaaaaaatgaactttcacatccttcacttggtgatatggtttggatgtctgccccctccacatctcatgttgaagagtcatcctcagtgttggaggtgaggcctggtgtgaggtgttttkgtcatgggggtggatccctcatgaggcacccttcctgcagtaatgaactctcactgttaggtcatgtgagagctagtggtttgaaagagcctggca

SEQ ID NO: 628638 - DNA, 537 bp, Homo sapiens
ggtattgatcctggttgggtattgcacatagtagacactcaataaatacctgctgaatgagtgaaggactaaaacatttagcaaataaggggtttaaaacacaaatcaactgtcactgacttaagcaagttaacataagaatttgaactaaactcttaagtttcctgaattggtaaatatatcatgttgtctcttatttcatctctggctttacataataaagtgaatacttccagatacttgtgttttaaagcttagaacagcttaatttgggggaaggccaatatgacgtagtgtaaaatgagaagtatacaatatttttaaaaaatgaactttcacatccttcacttggtgatatggtttggatgtctgccccctccacatctcatgttgaagagtcatcctcagtgttggaggtgaggcctggtgtgaggtgtttttgtcatgggggtggatccctcatgaggcacccttcctgcagtaatgaactctcactgttargtcatgtgagagctagtggtttgaaagagcctggca

SEQ ID NO: 628639 - DNA, 627 bp, Homo sapiens
tagcattagaaaaagaacagcaggagaagcaaacagcttatataaaatgccctgttcatttgagggtgagtattagatttgaaagaatcatcatccttctccaaaaggagagagttataaaggcctaagaacattccagcagacgtggaagaactcctcattgtgactggaagccccttggaaatcctgttagattcgttgatttctgttgcaagcatctgtgtgtacccaagcaatgcccaagtgtgcctggagtgggggccttctaaaggaaatctctactcatcagatgattccctttgggatgcttccaggccatctcagtcctctaaggagatgctcttgtgtccagctcttcctcagcatctcagaggctttaaagtatttggatgaaccaagtagatccacatggcaaatatctgctgaagtacacatctatactaataggataacatgaattatgaattgccattttaaaccatgcctgtgatagaagaaaatgactgcagttgcagcatcaaagtgacaacatgcatwaaccccctagagtcacttcctgacccctccagatgcaccaaggtcagtgaaggttcccatggtcaggaggataaagaatcaacaccacca

SEQ ID NO: 628640 - DNA, 618 bp, Homo sapiens
ttcaaaatatgtattttggagggaggggggacaacaaaacataacaatgtgaatataatacttattcaaaaaatgaaatgagtttaaaaataaaaaagcaaacattatcctgctgcctccccctcctccagtttattgaatgtctactacgtgctaggtgtatggtagtactggaagaagattaatcacaatagagggaactcacaatagagttgcaaaatgaacaacaagatattttaatatttaatttcctgggaaaatgaacagtcattttcaaatgatatttctaagatgttgctgtatacaatgtatcaaacatagtataygaggtatgaagtattctgttctctttccatcctcgtctacttttattcctctcttttcccttcttaattctttctctcctcttatttcttgcttatattttcggtaactcttcttgttctggattagggcctctcattcaagtagcctggagaccactgaaagtttcaattcactcttgctcatttaagagaatttagggctcagtaaatattctcacttttatctcacgctcttgcttaggatggagggtagcaaggattctagtttccacaaaggacttgctttcactcc

SEQ ID NO: 628641 - DNA, 564 bp, Homo sapiens
gacacatccttatcaaccaaagtccgtagcttacaggaggcttcactcttggcgttgtacattctgaaagtttggataaatgtacaatgacaagtatccaccattatagcatcacatagartaatgtcactgtcctaaaaatcctctgtgcccccacctactcatccctccctcctacctaatccctggaaaccactgatctttttactgtctctacaattttgccttttccagaatgtcatacagttggaatcatatagtatgtaaccttttcaaaatgacttctttcacttagtaatatgcattttaaacttcctccttaccttttcatggcttgatagttcatttccttttagcatgttttagcaccattgtttggatgcaccactgtttgtttattttagatcttttttattattttaatatatgttaaatctctctgataaatttctgaattgcttttctgcattatcttggagatcactgagtttccttaaaactgctattttgaattcttggccagagagttaacatatcacagtctcattggggtcagtcactggt

SEQ ID NO: 628642 - DNA, 512 bp, Homo sapiens
ctgagtctaaggatttccattactttgcagcattgcaagaagacttgctaatggttctgaacttctgactttaaaatccattcttagtgagaatgtatgtgaatgctctgactccgctaataaaatatttacagggagggatgcctgtagaaaccaacaagagcttatataaattgagggaggagttgcatccttgactatatataaattcaaaatgataaatatatgtttgtaaaacacatagamttctctttatcctctcagggttggtagtactaccctttcttcgtcaacttacaagttcaacgctaacaaacatatctactgaaatgtgttattcaaatatagaggttattgaaagcacaagcagtacaggaactaaaactagattcattccatttattaaaccctgcattcaactatactgggaaaatggatgtgttcacaacaatacttttaagaaaactctttccagatagcatgttcaaggacagaggcaaatccaaggtttt

SEQ ID NO: 628643 - DNA, 561 bp, Homo sapiens
aaaaggtaaaacaaattgatgaatctctgtaacgtgtatatagggtgttctttgtattgttcgatttttcttcaggcttgaaatttctccaaataaaaagttggggaaatccgaaaggatgctgagttgcagagaggtaaaataatgatagcaaagttgagattcaaaccgaggtgtttctgctttagctttggttccaactccctgcacataagttaccgctcatctggctgggaaaatgagaggtcactcttgaaaaactggctcacaatacaaagaagtatatcccacctcacaaatgagtcagaggtacagtaaagactgtaggagtttggaagaggagtcgatgctgccatgccctaaggccaggaactgcatctctttcttcagggctctatgtccaggttcttggaaacagtaggcactcaaataaatttattgaayaagtacttcttgttagtattggccatcctatggattgtgacttttgaattagacacttaaagatgagttggattttgattactgaaaagaagggaagactatccaggtaaataaatg

SEQ ID NO: 628644 - DNA, 561 bp, Homo sapiens
ttgttgctttatatctgttgctcttgaaaagaatgaatggcttttccacaggggacattcccctttacgtttgtctgttccaccttcacgcaggtgtgctgggagcagcttgatacatattgacattgttgggcacaataacaataccttgtgtttcaggggttgtgtgagaatgtattcaggtgacttctttttggaccttttttctttgcattggatgatgtttttcttctaccttttctacaatagttcagaaatagatacaaacaggagggttcggggagattcctggaaggggatggtattgacacgaagaattagcaaaaatcatagctctctccagacggtttgtgagggctagaccattagagraaaaaaatggttcaggcaaaataaactgcagcagaaccccaactgttaggccctctcccctgggtgttcccatcagtcctgcatggatgcatttcaaataccaactttccattctaatcttttagggcagcatgtaaccaggcctcactgagaggagaaatccaagaagagtgtagagaaacacacatg

SEQ ID NO: 628645 - DNA, 418 bp, Homo sapiens
gaactgtgcaaaggtttgaaatagcagtaagctcaagtcttgggaatgcaaactggatgacattttggaatgtcctactatcgaaaaggagagaaatgaagcttaaccccatatgtcagtgtattctcataaacagctacctaaaagggcatagccaagatgcagttaaacatagctacagacacacgtgtggacctggacagctagaygcctgctttaggatatgaaaaatttcctaggtcacaattataacagtgcaatgatttctagaaaaagaagatcatttcctatcctggctcagaatgttaaaaaaaatgactttcccataacattttctaatggatcttccagtcacagtctcctatggaggcataatttatgtagtggatgacaaagagttttatgatatctggaattc

SEQ ID NO: 628646 - DNA, 534 bp, Homo sapiens
cagtcacagtctcctatggaggcataatttatgtagtggatgacaaagagttttatgatatctggaattcatttaaaatctttagattggaaaaattgagatccaattaaaatcttaataaatgactctgtgttgcatataaatatattaaattaatatgtgtgcaggctgaaattggaaaagttatgagagtcagcatgttaattctatttctatcagggaactaactgtatgttataactctgagaattattgggtaatggggctgtttacaatgaggcaaaactgaatttaaatagcaaatattcacccatgacttgtcataactcatgaagtctccaccttgaggcatggtgaaatctcactagtgaaaggcctctgaggagarggaaggtggaccaggaagccaagaagagccctagggaggctgatgtagtgaaagggccaggtccaaggatctctccatgaaaggaagcaaaggctggcaggctgctctgtggcacccccacgtagtaggtgagatgcagcagtgag

SEQ ID NO: 628647 - DNA, 543 bp, Homo sapiens
cagatgataaatctgaaaccgtaggataaccctggcaagtagacaagtcacttcatttaataaatctgctatgacatttcttattgctgcccaggaaatgctgaattctcagcagctgcctggcctaatttccagtcttacagtgactgagcagatgcttttgctacgtatatcagcacattgtggggaatgagtggcttgggtaaaagtagtgctctttggatggattgataacaacagcaacaataggtgccatttattgaacagccagagtgctcaggctggcttctgtgctaagtaaacttttattacaaatgaagacactgaagttcagaaaacctaagtaaattgtccgatgtcctgtggtcagtaagtgatggaggtggggttcaccctgacttcgtgtggttgtaaagcagggstgttcaaactttaggcttccttgggccacattggaagaagaattgtctgggccacacataaaatacactaacacgaatgacagctggtgagctaaaaaaaaagcaaatcgcaaaagaaatc

SEQ ID NO: 628648 - DNA, 543 bp, Homo sapiens
cagatgataaatctgaaaccgtaggataaccctggcaagtagacaagtcacttcatttaataaatctgctatgacatttcttattgctgcccaggaaatgctgaattctcagcagctgcctggcctaatttccagtcttacagtgactgagcagatgcttttgctacgtatatcagcacattgtggggaatgagtggcttgggtaaaagtagtgctctttggatggattgataacaacagcaacaataggtgccatttattgaacagccagagtgctcaggctggcttctgtgctaagtaaacttttattacaaatgaagacactgaagttcagaaaacctaagtaaattgtccgatgtcctgtggtcagtaagtgatggaggtggggttcaccctgacttcgtgtggttgtaaagcagggctgttcaaactttwggcttccttgggccacattggaagaagaattgtctgggccacacataaaatacactaacacgaatgacagctggtgagctaaaaaaaaagcaaatcgcaaaagaaatc

SEQ ID NO: 628649 - DNA, 623 bp, Homo sapiens
tgctgcgcggctggccgcgacaatgggctggactcgaaagaaagagaagtgaaagtctctctttgtgaagmgtttgccttatcagagaaagtggtaccagagaagagacacgagaactgctctctagggtgtgggcagtaagaagactgtggggtgcagaggtcagagctagaccgactctgagtcccatcctggctttgtgattaatatgaataaaacaataatacccttatttcatggtctgtagcagtgctgtccagcagaaatataatgtaggctttttatgcaattgtacatttcctaagagccattattttaaaaaagcaaaaaagaaacatgtagaatttaataatgtgttttatttaacttggtatatccaaaatactttcatttcaaaatgtactcaatataaaaattaatgagatatttatatctttttttttacaaacagttcttaaaactcggtgtacgttttacacttatagcatctctcagtttgaattctaaatttttcatcagaaatatttgatttgtattttgattttactaatttaaagtaaaaaagtaggttcactcgtctaagttgaattgtgcttagaccttttccagtagctgaatggaac

SEQ ID NO: 628650 - DNA, 414 bp, Homo sapiens
gagacaacgccagaggaatctgcaaactaacctcacttcatcagttttctcctatatatttaccttcccacagtttcccatccttggaagcccaaaacctcacttctttgtcctgycttttcttgacaactttattgttctttgttgaacatgccacataagccagatgccacataagccagagttctaagctgctgctgtgggttacctttcattgaggtttctcctgtgtgatgtacactgcatgcattcataagttgtttgttttacttctgttaatctgtcttttattacgggagttcatcccaactaagaacttatgaggcttgggggaaaagttatttttcctccctgacagtcactgcagggcaactgacgttctgacagagggaggcatctgccacaggaacacga

SEQ ID NO: 628651 - DNA, 573 bp, Homo sapiens
gtggatcttatttactgagtttttatttaagactgcattgaatccttaaaaattccacttctaggtatttatccaagtgaaatgaaaacgtatgtccacaaaagagtggtacatgcatatattcatagcccctttattcgtaattgctccaaactggaaacaaccagtatgtttataaaatgtaaaactactaagcaatgagaaggaatgcactgtygatacatgcaacaatgtagatgaatctccaaaacattacattaagcaaaagaagccagacatgaaagagtacgtaatacgtgattctatctatatgacgtttataaaagccccaactctacagtgatataaatcaatcagtggttgactgaagtcagggatgaagtgggcagattagtgggaagagctttacaggggcatgtgggtatgaactggggtgatgattacagagatcactaaaccacatcctaaaaatgtatatattttattgtaaataaataatactttattaagttttcttttaaagactccattaactccatagattcgtttaggaaggactaacatttttacaaa

SEQ ID NO: 628652 - DNA, 578 bp, Homo sapiens
ggttgccattttacaatgaaatgcaagggtttttatagacaagctggtggggagggtgtttcatttacataaggctcaaatttctgacagttcccaccccactttttctagtgctcatgcgggctccttagtctgagttactccatgttgcctatctcttcccactgcgcatgtgtgaaaaaggccaggaggcgggaccctctacagtggacgctcctggtccagggtagctcgtcttatcagtgctgctgcaggcactccctgctgtgcaaacctccttgtctgagtatttccaagaagggagaggactgtgcttactggggcccactgtatgtctgtatgtcacacaggaggcccctttctgtgttagaagctgcttttttgttagaagggaattctacttaggacccttgccctatctgcctagttgatttctttctctctcctctcacagagtgtcacagaaagaactccaatccatcaagcaaaagtaattaacagcaattcaaatctttaytggactcttagaaaataaacaaggagatctaatttgtagctcccacatagatttttgtctc

SEQ ID NO: 628653 - DNA, 575 bp, Homo sapiens
ccttccttgtagcccattttgtttagactgtagacgtgaattgtgcatctgtcagaaagaagaagcatcttccaactgtgaggcacaggcagcccagaaacatacaaactgtgatgcagtaagatcttagccagttaaccagtcttcctgcccacccataactctgcaaagagcagctcagacagyccttgcaaaggcccttgaagttcctgcccaccctgggcatgcggattccacgctgtgatcctggaatcacagtcagcctcccttagggggctgccctccaactccaggagctaaaggtcacagccacccctgttcatgaaaaatgcattttccatggaatcatgtcaacttgacactcctgaaagaaggcaagaacaatgagaaagcattccaatgaagctgtccttccaaactgcttttgctttgaatcttttttttgtttgtttctgtcttacaaccatctttctatttagtagttttttctttggtgagtttactctttgtttttctcatttctgctcccacctctacagcatactggctaagttttaacgttgaattagaaaatc

SEQ ID NO: 628654 - DNA, 625 bp, Homo sapiens
gtaaatttggaatctgataaagtcctccaactattttcacccctttgaggattgttttgataacatctaaacaatctgtttagattgtttaggaagcttctgttccaagctttttcatgggcaccagaggagacaaacctgggaatgggtgggaactctttttacatctgtgactccaagggttccatactcttatgccagcccacacttcctctttagccatttgtttaaaatgttagcttcttattcagttgcatggttcccctggctcttcctcctacacagataagccagctcactccttgtctccaagaagacaggggactcccttgttctgagatttcaggctactttactgttagcacagctctctgatgggctcaaaaaatgtgattatgtagtttgtccaggtattcttgctgtaagactgggagcaatgctcacggggtctatagtgatgtctcctytcattcttgatattgatcatttatcctgatatttatgcatacatactttttcttgatcagtcattaatcttttcaaagaaacaactgccagcatttcttgttttcctctgttgcttatctgttttctgtttcactgatttccactcatatttcattat

SEQ ID NO: 628655 - DNA, 561 bp, Homo sapiens
gttcagagatttttcaaaaccaacctcaggtttgaaagttgctagaaagactctcagaactcactgaaagctatgatactgacagttatggctgttaagggaaaggataaaaattataaccatccaaaggaagagacagagaaggcagggtrtgagaaggtgtggagcttctggctgtcttccccctttgggttctcacatggatggcattacctccttctgaccatatgtgacgatgtgcacagagtgctgccaaccagggaatctaacctgagcttctgtgaccagaagttatactggggcttcattgcacaggcgtgatcaatggaatcattgtccatgtggctgaactcaatctctagccacgtctccacagaggataggctgatatgaatcatctcattagtatataaactataaagtgaggtctgaggggcccatcacaaataacaaggacatccttaccattcaggaaattccaagtatttagaggttacctacctaccaggaggcggggcaaaggccagacctctctttggaagacaaattccttactataca

SEQ ID NO: 628656 - DNA, 561 bp, Homo sapiens
gttcagagatttttcaaaaccaacctcaggtttgaaagttgctagaaagactctcagaactcactgaaagctatgatactgacagttatggctgttaagggaaaggataaaaattataaccatccaaaggaagagacagagaaggcagggtgtgagaaggtgtggagcttctggctgtcttccccctttgggttctcacatggatggcattacctccttctgaccatatgtgacgatgtgcacagagtgctgccaaccagggaatctaacctgagcttctgtgaccagaagttatactggggcttcattgcacaggcgtgatcaatggaatcattgtccatgtggctgaactcaatctctagccacgtctccacagaggataggctgatatgaatcatctcattagtatataaactataaagtgaggtctgaggggcccatcacaaataacaaggacatccttaccattcaggaaattccaagtatttagaggttacctacctaccaggaggyggggcaaaggccagacctctctttggaagacaaattccttactataca

SEQ ID NO: 628657 - DNA, 479 bp, Homo sapiens
ttcaagcacaaaactgggcagccagttgggcagacacggagctagctgcagaagttttttttttttttttcataccccagtggcgcctggaacaccagcgagacagaaccgttcactcgcctggaaaggsggctgaagccagggagcctagtggtctggctccgtgggtaccaccaccacagagcccagcaaggtaagatccactggcttgaaattctcgctgccagcacagcagtccgaggtcgaactgggatgctcgagcttgggtgaggggagggacatctgccattactgaggcttgagtaggtggttttaccctcacagtgtaaacaaagctgccaggaagttcgaactgggtggagcccaccacagctcagccaagcctctgtggccagactgcctctctagatgcctcgtctctgggtagcgcatctctgaaaaaatggcagcagtcccagttaggggcttatggataatac

SEQ ID NO: 628658 - DNA, 384 bp, Homo sapiens
gagcccaccacagctcagccaagcctctgtggccagactgcctctctagatgcctcgtctctgggtagcgcatctctgaaaaaatggcagcagtcccagttaggggcttatggataatacccccatctccctgggacagagcacatagaggaaaggatgtctgtgggtgcagcttcaacagacttaaatgtccctgccagatggctctgaagaagcagtggatctcccagcacagcrctcgagctctgctaagggtcagactgcctcctcaagtgggtacctgacccccatgtctcctgactgggagacacctcccagtaggggctgacagacacctcatacaggagagctctggctggcatctggcatgtgcccctctgggac

SEQ ID NO: 628659 - DNA, 370 bp, Homo sapiens
accaacatagaccaagggtagataaatccacgaagatagggagaatccagcgcaaaaaggctgaaaattccaaaaaccagaatgcctcttctcctacaaaggatcataactccttgccagcaagggaacaaaactggatggagaatgagtttgatcaagtgaaagaaataggcttcagaaggtcggtaataacaaactcccccgagctaaaggagcatgttctaacccaatgcaaggaagcaaaaaaccttgaaaaaaggttatatgaattgctaactagaacaactagyttagagaagaaaataaatgacctgatggagctgaaaaacatagcacgagaactttgagaagcacaaacaagtattaatag

SEQ ID NO: 628660 - DNA, 557 bp, Homo sapiens
tttctgattcaggaagggaaatctgtactgcacattagggataactttgtgaccataaaacttgggctaaatagaatctccaaagaaatttgaaaatctcctttcctattcatattctcccccaccttttctctttatatccaaaaatccctccttgcctttaaagaggttgccaatttcttttctgaatggattttaatggacttgyctatctctcaggttctgcttctgaaatcataagaaaattctgcttcccgggggagaaaaatgtcaatcagaagtcaggaacagaacgtgacttgcactagagtgaccagggctgccaaaaaacagaactgtgactgctgatagttacccctgcgggtctgcagcaacctccattcttgcctcctcagaagaaagaatttgactgaggggcagaaggagattctgaggcaagttttagagcaggagggaaagtttatcgaaaagcttttgagcgggaaggaaagggaagaaaggaaggaaagcacacttataagagggccaagcaggcgatttgagagaccaagcctgca

SEQ ID NO: 628661 - DNA, 655 bp, Homo sapiens
caccatgcacagggacatcattggcaatggtggctgctctcagtctgactcccaacaggaggagatgatagcagactcaagagaggtgagtaacatgaacaagaactaaacccttattgcaataagccactgtgattttgaagtagtttgctagtgtagcataaactaacttactgtgatggacatacaaccaaaacagctttaacgaataaagccagctaacaactgaaataaagacattagtctgaggccatttgcagccctatttgaaagcttgagactggcctaygtgtcaggataagattgtgtgtttctgccaataaccatgaggaactcatgtttgcaaaaattttggcttcatcttaaataaataaaatcataccttttagagaaagaaatcataccttctaaatgtggtttaaacattttttaaatttggctccagtttgtcataacaatgagacaacgaagtctgcaagaatagatgaaattgaatagcttagccagcaaatctctgtgtcagggaaagaagatctgtggatgtggcattgtgatgtaataaaaaacaaatatttggtctttgttcctggttcctgacatagagctcctaaaacccttccggagtgatgagtatcttccacatgctaatgagtcg

SEQ ID NO: 628662 - DNA, 619 bp, Homo sapiens
atgtggcattgtgatgtaataaaaaacaaatatttggtctttgttcctggttcctgacatagagctcctaaaacccttccggagtgatgagtatcttccacatgctaatgagtcgactatagctggggcccctaggtagcgtcgtgatgggagctggtggccagaaacaccgaggtgtgattagagggttggaacttttagccccactcctgacctgtggagagggaagaggagctacagattgagttagtcaccaataagcaatgacttagtcagtcttgctatgtgatgaaacctccatagaaacctctaaactacagggttcagtgacttctgggttggtgaatacactgaggtactgggaaggtgctgtgccccaaagggcgcagaagctccatgtcccacccccacaccttgccctrtgcatctcttccatttggatgttgctccgttgtatcctttctaacaaacaggtaatagtgtcagaaatgttgtgggtagcagcagctcagatgaccacaagccctcagaccttagcaatttccccacatcctggctactggctctgaattcccaggatgcattatgagtggaatcccgcttataatataaaggtgcc

SEQ ID NO: 628663 - DNA, 632 bp, Homo sapiens
ggggcccatgtgcaaatttgggggkagttagcatgaaacatgctgtgggaatttgggctgtgacagcagcaagctccttctctgcaaactctgcttggccatattggttccaatgattgcaggcagttttgttatctcacaagcagagggaatttccacttttcagcaagttgtttcttttcttatctgccatcctgcagacttatgctccttggtactcacccaagggagttgaaaacttatgtctatattgtagttgtattcacaattatcacaacttggaagccaccaagatattataggtgaatgaataaataaacagtgatactttcagacaatggactactattcagcactcaaaagaaatgaacaaacaagccatgaaaaatcatggaggaaatttaagtgcatgttagtaagtgaaacaaagcaatttgtaaaggctacatactctatgacgccagctacaggcatatcttgttttgtgtgctgtgctttactgcacttcacaagttgttttacaaatgggaggtttctggcaaccctgcatcaagcaagtctattggctccatttttccaacagtatgtgcgcacttcatgtcttggtgtgacattacggtaattcttgcgat

SEQ ID NO: 628664 - DNA, 499 bp, Homo sapiens
caatagcaaagacttggaaccaacccaaatgcccatcagtgatagactggataaagaaaatgtggcacatatacaccatggaatattatgcagccataaataagaatgaattcatgtcctttgcagagacayggacaaagctggaaaccatcattctcagcaaggtaacacagtaacagaaaaccaaacaccaaatgttctcactcatacgtgagagttgaacacatggacacagggaggggaacatcacacaccgggcctgtcagtgggttgggggcaaggggagggagaacattaggacaaatacctaatgcacgtggggcttaaaacctagatgacggggtgatagatgcagcaaaccaccatggcacatgtatacctgtgtaacaaacctgcaccttctgcacatgtatcccataaattaaagtaaaatttaaaatgtatataatatataaataaaaacctaacagtttagtcatgtaaaaaaaaagagagaaaa

SEQ ID NO: 628665 - DNA, 439 bp, Homo sapiens
cttcccctggagtggattggactggcttatgaagttatgggctctgcatcttgacctgtttatggacaggggatccctctggtgtgccagaggttggaataggcaacctctaagattcctcgtggcacaaagtgaacaagagcaaggcccaaatggtaaaagactgagaaggttgtggggccactatccttcctgtgaggcatcaattcaggtagtcctgtatgttaagatttcagagtgtgtgtagtcatggaatgagccaggctttggagtcactcattcmgggttagaatcatggttctgtcatttacaacacgtgtgactttgaaggaaattttgtttcctcaataatagcataaataaataacatatgtgcatatataaatgaatatataagataaatagacctcctagcattgtagtagggtttagatggtgt

SEQ ID NO: 628666 - DNA, 590 bp, Homo sapiens
gagtaatataacgtaagatttttaaagtggaatctgctcaaagaaatggaaactttatataaaggagttagaatggtattccaattggatatgataatcataaagcatacaatttayattcattttaatcactttcttcttcaatataggccagatctcgtgctgggatctggttaaaccaaagtggataagacacagcccctgcctttgaagcctaagactagcgaagacaatgcattcatttatttgtacatttcacagacctttggttggtctgtgctgtgtaccaggtattagaaatagaagtaactatttcaaggactgtgcatgcaattctagaaagacataaataagcacatcagaatattagtgctatggcagagataggtgaacagtgaaatgggggaagagctaactaagagccacatgctacaggagtaaatggggtgctggaaattctgaatgaactcaatctacctccgtaccacactcatactagttagagaaagagctaaaaatttcactttccagactcccctataacaagggctttacatgcaaattagtcttacaattagatgcgttcatga

SEQ ID NO: 628667 - DNA, 552 bp, Homo sapiens
tatgtctagcctgttccagcacttcaggtacattgtactttatttaattctcagacaaagtctgtgaagtggattccatagaacccacagcaatacctgttccctgtatacaagcaagagacttttgctcaaactcacattaccgaaaggttagagccaggaatgtaaagcagagttgacttcctttaggagcccatggtgtatgctgtgggcacaatacaccacagaygtgactttttatgggcattgaatgtgcccaaatgtggagctacagccccagctcaatttctctcacagtttccaactgtttccaaaaggctctgaaatagtcaaagaccacagaacagtattttcagtagaaatgtttacttgtgtttcctggcagaacaaggccagggcaccaacttgtttgcttgtttcttttagaaattcaggttatggggatgtatgatgtggatgataaggcagaatgcctgcattgcatcacaggatacgctttgcagcacgtagcttcttagggaagaactgtgcacagaactaggcattcccgtg

SEQ ID NO: 628668 - DNA, 582 bp, Homo sapiens
gtctgtgaagtggattccatagaacccacagcaatacctgttccctgtatacaagcaagagacttttgctcaaactcacattaccgaaaggttagagccaggaatgtaaagcagagttgacttcctttaggagcccatggtgtatgctgtgggcacaatacaccacagatgtgactttttatgggcattgaatgtgsccaaatgtggagctacagccccagctcaatttctctcacagtttccaactgtttccaaaaggctctgaaatagtcaaagaccacagaacagtattttcagtagaaatgtttacttgtgtttcctggcagaacaaggccagggcaccaacttgtttgcttgtttcttttagaaattcaggttatggggatgtatgatgtggatgataaggcagaatgcctgcattgcatcacaggatacgctttgcagcacgtagcttcttagggaagaactgtgcacagaactaggcattcccgtggcatcatgtgcccaatgcacagtgccacaggaatggccaatgtctaatagggaaattcagtaaattccaaaagtgaaaaatcacaatgc

SEQ ID NO: 628669 - DNA, 511 bp, Homo sapiens
agtgtgatggtattaaaaggtggggtctttggaaggtaattaggacatgaagttggagccttcaaggtgggattaattccccttataagaggagacatgagagcttgcttactctctctcctttccaccatgtaaggatatgagaaaaagatggccattttcaaaccaggatgagggctctcaccagacaccagatatgttggagctttgatcttggacttcccagcccctagaattatgagaaataaatggtttttgtttaagccatccagtctgtggtattctgttatagcagcccaaagaccatgaatctggcattctaacatttcctaaaacaaagattgagggttgcagcaacaagtcatctctcctcttaattctcccttcattccctctcaggtatatgggttttactacagtgtgttgagaatgggatccaaataggaytgtggaatagtaagtttggggtccttggccaaaagcttgggttaaacctttgagacaaatttag

SEQ ID NO: 628670 - DNA, 591 bp, Homo sapiens
ataataactgtagaacagtcctctctgagaagagaggaaaggaagtagaaatgaagaaggaaatggatacaactgccatggtatgtgtaatattttattttttaaaamagatttcaacaaatatggcaattataaaaagcttacatctgttaaatctaggtggtagacatatgagtgttctttgtattattctttctaatatattactcaaaataatgtttcatcattttcaaaattgtaggaaagtcatctagaacaataaatatataaaataagagtaataactattttagaaaggcaaatttcaaatgaattttatctagcatttaacacataccctatttttttagaactttagttacctaggtcctgatgttagtattatgaaatttttgctttcagataagtgctaaagagaagaatacaagaaaaagattagagatttcaaatatttcattgagattttagcttaatcaataggtgaaatttgacaagctttaataagattaaagtatgtcagaatgctagaaaaagtgctttattaaagtagtttatttagtgtgattagaatatcaataaagatatttatat

SEQ ID NO: 628671 - DNA, 497 bp, Homo sapiens
aaagtgctttattaaagtagtttatttagtgtgattagaatatcaataaagatatttatatagagaacctcaaaaaaattccagacrgtatttattgatttgataaataatgtgtgagcttgcttgaattttattgtgtttttaactgaagaaaaatatttacacagtaaaatatataattttaactatacaatttgatgagatttgagaaatgaacacactaatgtaatcagcacctcaatcagacatagaacagttccatcatccaagaaagtttccccatatcacattaaaattaatttccaacccctgaaaggcaagctctgttctaattttcactaccaggggttagttttgtctgttctgggacttcatatagagtaatagagtatgcactcatttttatctggattactttgctcagcataatgtttttaagagttacctattatgtggcataccaggagtccaatatttaatgtctaagaagtattcca

SEQ ID NO: 628672 - DNA, 623 bp, Homo sapiens
gagtaatagtgcttggtacatttttgtttaaaattgatagattctggctgaggaaagagtggtaatttaatagtttcatataaacctagcatagaatcagkataacaaaataaatttaaaacttcctgcaacctgtcagtagtgaatctattatattagcaatgattcatgaaattaagacatatttaattttaaattttgaatttaaaaattttcaattttaaaaacaacaatatttaattttaattgataagtcaattttggtgatgtcaaagagtaagctttgtaaataattttcattacaattttgccaattaatatttcaagaatttaattcatagtatacaaatctctacacaatttgcaggaaataaaaagaaagcaaactgtatttgttttgggacagggctacagatatagttagagataggcatgcaaacaatgcaatatggacatttctgtataaaggtgtacatatacaatagtagactatgaagatatgaaacaatgaagtcaacccaaggcagtcaactgaacatttcctggggaggatgctcttgaatagaaattagaagtagtaggagttatgagtatatgtaaggtcgtgacagtgttttttaaaa

SEQ ID NO: 628673 - DNA, 549 bp, Homo sapiens
tattgcctaataattccatgtcttaaagtgaaactactagctgtgattctcaaaacctgtcacttacccacagtcarcatcatactgaatgggcaaaacctggaaccattccccttgaaaacgggaggaagacaaaggtgctcactctcaccacttctattcaacatagtactctaagtgctagccagagcaaaagaaagaaataaaagtcatcaaaataggaaaaaaaagaattcaaactgtctttctttatagacagtatgattctatacctagacgaccctacagactctgccaaaaggctccgggaactgacaaaagacatcagtaaaatttcaggatataaaatcaatgtacagacattagcatttctaaaaccaataatattcaagctcaaacccaaagcaagaatgcaaacccatttacaatagtcacaaaaacaaaaacaagaaatacatctaaccagacagataaaatctctataagtacaaaacactgctaaaaaatcatagatgacacaaagaaatggaaaacatcctatgcttatgc

SEQ ID NO: 628674 - DNA, 569 bp, Homo sapiens
caataatagagaacatcagcttgaatgtatatgtgtgtgtgtgtatatatatatatatatatatatatatatatatatatgtatatgcatcagtatatgcacaaacatatgtaagtgtgtttgtatgcatggattcttgtaagtcttgaaatatgtagtagtagaaaacggcctttaatttttgggttgattccaattttcttctggttgccttaataattcttttttctgttacctgctcaccatctctatattaactaagaactgaaatgagggaggcatctaaattttctragcagatatacataattattaaagtgaaatattggaactaagcactgtaattaaatgagaaaactttgcctgtacaaaaaatgtgaataatttatttgaaatgttaaaaatgaacaaaagcaaatcaggctgaaatgaaacacaaaaagataatatcctgcattgtttaagtatttcatcttaattatatccagaatatctacaagaaaggaaccaattttacctgattaaaaaatttaaaagattttaaactttaagctttaagtgttcctata

SEQ ID NO: 628675 - DNA, 606 bp, Homo sapiens
ctgattgtatcataaattgggagagatttagacactccacttctacccccttcacacacacttctctaaaattattgattcttgggttcaaaaaaacaagcaaactttaccaaatgcaaattaagaaaacatgatactttttttttctcaaagatatttattaaaatgctgaaaagggaagattcattacaaacttcccttacccacacatcacatattttggttatgttttacagtcaaatacaagtatattgaacaactctcaattcaggtaatcatttcctgctatgaccaaaacacacayacacacacacacacacacacaaagtgacacctcatgaatggtgcattctttcttcagtgttaaaagttttaatagcaagcctggatatatttatctcatgccatagtttagaggttttgattttcttctttcttccctaaagggggaggaatgtgtattgactcatcttcagcctcacaacagttatctcattttttatggtttcccaaagataaataactggtggttgtatagtgacaatgaaaagctctttcagtatctgattcatctggatctagacatatgaacaaatcataagtgac

SEQ ID NO: 628676 - DNA, 624 bp, Homo sapiens
tttcgtttgatttctgagatatttactgcatttattactatcttactgctccctactttgaatttttctcatctacmtctacagtcatttgctaggtgacttggttcatctcatgactttaattaccaactaagagataatgattccagacttatatcctgcgaagaccctccccatcaattccagacttctgtacaagtctgacagtttacatgaaaacttcatgtaagagtcaattaggcatcacatacttatgacgtgcaaaaccaaaatattagttattctacaggaacctggtcatacttcagtgtgtcatgaattttagtaaatcatcctaactttaatataaagtgcttaagcaaaatacttggaattatcattgactcgtttttctttcatgattcccaatgtaatcaattactcctgttatttctgtgcacatttgaaaagtggactacttctcattaatttgttatcactatttcattccagcctaccgtaatctcatgcttgattggtgtaatttctttctaactcttgtctctctaatgctttatatttcaaaaatgctttataatcaaacagatcttttgaaaatataagtcagattacatccttccctat

SEQ ID NO: 628677 - DNA, 393 bp, Homo sapiens
tataatcctatgattaggtctcagttgtttagtgaccctatgtctctgcactgttaacttcataaatatttcaccttttcctcactcccttaggtggaayacaagatgccagactggatatttcctttctttcatgttaaagcctagaatgagctagagtttagtagttctttcctcacagatttaaggctagagctggctgaagttgtatattttctttcctgtgggtcagttaggctctgataatatcccagcagctgaagtagtttctgctgatggcaggccttgttaacaagaagagtgctctggtctggcatatatcaaaatggttccttttcccctcccactgcaggaagtataatgagatttttcttcaatatttactgtgggatc

SEQ ID NO: 628678 - DNA, 619 bp, Homo sapiens
gggtaatttgtaaagaacagaaatgtattgcctcacagtgctagaagccttgaagtctgacataaagkcatttggagttttggtgtcccaatcttcactttcaagatggcaccttaaatgccatatgctctgaggaagaggaatgctgttcctcacatggcagaagggaaggagagagcaaacccatgcctgcaagttctttttatagtggcattaatctattcatggtaatggatgcttttgaactacctaaacaacacctcttaggccccacctcccaaaactgttgcattgggaattaagcttccagtacatgaatttgcaggggccaaaaacatttaaaccatagcagtagtatactgggttgtcctatgacatcaatgattgcttggatgctccacctaaatcccttttcagaagggtgcccattctcctgcaagccaggatagttgactgctgatggttcatagatgagacccactttgggaatggaattcagctgaaggaagcttgaacccaatttgggacaactcggtaaggccttctcaggcccagagctccccttggggctaacttagatctgtgtcaacaaccacatctcagcccacccaaatacctc

SEQ ID NO: 628679 - DNA, 464 bp, Homo sapiens
cagttcctgcaggtaccacgccttctcaagcatctggcttttgcaggggatggcagacagcagcagccagcaggttcccatggcactccctcaagaagtttcaaaaattttctccagtaagacatatccacctgaatagttttttcctagcacccaaaagaacaaatcttcagcaagttccatcaccctgatattactgcaacttttcagctattcagtgaacagaaccctcactggaaarttcagtatatctcagccctggaggcaaagttctttactgggtgtctttcttaaccgtggaggtggcagcttctcattatatctgctaatattatatgttttagaattctctgtatttttactaaataatacctttttatttcagtctcctgttctactgaataatcatctgtattaaacttggactcagactgacacatctatcttatattacttaagggtca

SEQ ID NO: 628680 - DNA, 593 bp, Homo sapiens
cttcggtttttttttccattttgttgatagtctccttcacaaagtggatgttttcaattttaaagaagtccagtttaccaattttttattcattatgtatttggtgtcctatcaaraaagttattgctaagccccaagttatctagattttcttctatgttatctttagggagttttagagttccttattttgcgtcttatctatgttccattttgagttaattttgtgaagagtgtaagtctatatctagattcattgttttggcatgtggatatctagtttttacagaaccatttatttaaaagactatctctattgcattgcctatgatgcccatattgcattgtctatattacctatatactgactatatttttgtggatctatttctgagctctctcttctatttcactgatatattttttccttcaccatccttttttgattactgtatatttatactaagtctttaagttagaatcagtctttcgacattgttcttctttaatattcagcttactattatatgttgttgatatcactacataaactttagaatcagtttgtaaatacccacaaaataacttgctgg

SEQ ID NO: 628681 - DNA, 593 bp, Homo sapiens
cttcggtttttttttccattttgttgatagtctccttcacaaagtggatgttttcaattttaaagaagtccagtttaccaattttttattcattatgtatttggtgtcctatcaaaaaagttattgctaagccccaagttatctagattttcttctatgttatctttagggagttttagagttccttattttgcgtcttatctatgwtccattttgagttaattttgtgaagagtgtaagtctatatctagattcattgttttggcatgtggatatctagtttttacagaaccatttatttaaaagactatctctattgcattgcctatgatgcccatattgcattgtctatattacctatatactgactatatttttgtggatctatttctgagctctctcttctatttcactgatatattttttccttcaccatccttttttgattactgtatatttatactaagtctttaagttagaatcagtctttcgacattgttcttctttaatattcagcttactattatatgttgttgatatcactacataaactttagaatcagtttgtaaatacccacaaaataacttgctgg

SEQ ID NO: 628682 - DNA, 554 bp, Homo sapiens
agggcatggtgcaaacccattcatgagaaatcctccctcattatccaatcacctcctaccagtccccaccaccaacataggggattacaatttgacatgagatttgatgaagacaaagattcaaaccatgtcatttataatcatacataagcatatatatatatatatatatatatatatatgtttctatatataccatacacataatattacacataagtttacaaaaataaaacacattctcattattattattttaaaccattatctgttacatcaacaaagaataagaaaaaataataaaagttttcattttatcttcccttattcatttttttatatagatatgagtttctgacttgttactttccttttctstaaagaacttttaacatttcttgcaaggcaagactactggcaacaaattgcctcaatttttgtttgtctgagaaagttgtaatgtctctctcacttttgaaaggtaatttcacctagagcagaattttagattgatggttttattgctgttgttgttttctctcaacactttaggt

SEQ ID NO: 628683 - DNA, 597 bp, Homo sapiens
aattacatgagtttagccctctaaaccagtgtattattgaaatttgtgaaaaaaaagaaaagtaaaacaaggcatgtagattttattactgaacatataagaaagaacagcaggtctttgatatgaacagaatagcctatcttcttagtttgagctataaaaaaaattcactaaaattatttcaacccaaacactaacatgtacattgaaagatgtaaaaaatacagagtgttttaaaaatatgccttagtctctactgttagaaaaatagaaatttgagaatttttaaaaagaaagataggctgattagcctgaaggaagaaatagattttctcaagacaaactcacaaccttaaactttgacctcaatggaagagaaaaagtgatataatgtatttgattttaaacatgatactataaaaatgggacatatttagacatcactagaacaraatttactatgtttcaaaaacacttaacaaaagtacagaggtaagatcatagagagcagatgggcatgacttcttagagcaatccaggttttgatgaattatttaactatatcctctgaaagctttataatatctatagtagcaa

SEQ ID NO: 628684 - DNA, 636 bp, Homo sapiens
cactagaacaaaatttactatgtttcaaaaacacttaacaaaagtacagaggtaagatcatagagagcagatgggcatgacttcttagagcaatccaggttttgatgaattatttaactatatcctctgaaagctttataatatctatagtagcaatgtaatctggtattataatgtgaccgtttctatcttgtctattcaccttaggtccccaaactgagaatagcagaaatcaagtaatctttgtattgtaaaaagagataatagtcaatctattgggacttgcaaagacgggggcccaagacaaatccagtcaccattaatgcatcatgcacatttaagctagaaatccattaggaggccaaaactgtgaattcctttggagagatcaggaagactaatgtttcctctgtcctgtcctctgtgtaggagaaaaaaggggagtacttcaccctttcagacacagaacaagggaaaataatgtcwgaaaatcatttggagaccttaacatttatgatccctggagtattagagaattatggacctagcgactgttcctgactcatactcattaaaaatctaaaaagagagaagttggctggagtgcttagtgatctttataaaaggacaggacgt

SEQ ID NO: 628685 - DNA, 636 bp, Homo sapiens
cactagaacaaaatttactatgtttcaaaaacacttaacaaaagtacagaggtaagatcatagagagcagatgggcatgacttcttagagcaatccaggttttgatgaattatttaactatatcctctgaaagctttataatatctatagtagcaatgtaatctggtattataatgtgaccgtttctatcttgtctattcaccttaggtccccaaactgagaatagcagaaatcaagtaatctttgtattgtaaaaagagataatagtcaatctattgggacttgcaaagacgggggcccaagacaaatccagtcaccattaatgcatcatgcacatttaagctagaaatccattaggaggccaaaactgtgaattcctttggagagatcaggaagactaatgtttcctctgtcctgtcctctgtgtaggagaaaaaaggggagtacttcaccctttcagacacagaacaagggaaaataatgtctgaaaatcatttggagaccttaacatttatgatccctggagtattagagaattatggacctagcgactgttcytgactcatactcattaaaaatctaaaaagagagaagttggctggagtgcttagtgatctttataaaaggacaggacgt

SEQ ID NO: 628686 - DNA, 305 bp, Homo sapiens
agcttgggactatgttaaaaatccaaacccaagaataataggtgtcccaaggaagaacagaaatctaaaagtttataaaacatatttgagggaataatcaagcaaaacttccctgatcttgctggagaactagayacccaaataaaagaagctaaaagaacacctggaaaatttatcaaaaaaagatcttcacctatgcacatagtcatcaggttatcaaaagtcaagatgaaagaaagaatcttaagagctgtgaggcaaagcatcaggtaacctataaaaatacccctgtcagattaacagca

SEQ ID NO: 628687 - DNA, 656 bp, Homo sapiens
tcagatatttatagaacattctacccaacaacttgtagaatatacattctattcatcagcacatgaaacattctccaggatagaccatatgttaggtcacaaaaaaagtctcagtaaatttaagaaaatcaaaatatcaagtacttcctcagaccacagtggaataaaattggaaattaactccaaaaggagtcctcaaaaccaagaaaatacatgaaaattaaaactgctcrtgaatgatcattgagtcaacaacgaaatcaagatggaaatttaaaaattctttgaactgaacaataatagtgacacaacctatcaatacctctgggatacagcaaaaatcgtgctgaaatgaaagtgcatagcactaaatgcctacatcaaaaagtctgaaaaagcacaaattgacaatctaaggtcacagctcatggaactgaacaaacaagaacaatccaaacccaaacccagaagaagaaaagaagtaacaaagatcagagcagaatgacatgaaattgaaacaaatttaaaaaaatacaaaagataaatggaacaaaaaactgttattttttgaaaagataaataaaattggtagaccattaatgaaattagccaagaagagagaagatccaaataagttcaattacaaatgaaacagg

SEQ ID NO: 628688 - DNA, 574 bp, Homo sapiens
ctatcactgtttgatgctgatgtgattgtatacctagaaaaccctagagactccttcaaaaagctcctataactggtaaatgaatttagcaaagtttcaggatacaacattaatgtacacaaatcattagctctgatatataccaacagtgaccaaactgagaatcaaatcaagaacccagcccctttcacaatagctgcaaaaataaataaataaataaaatacttaggaatatacctaaccaaggatgcgaaagatctctacaaggaaaactasaaaacactgataaaagaaatcagagtacaaaaacaatggaatcatatcccatgctcatagatgggtagattcaatattctgaaaatgaccatactgccaaaaccaatcttcaaattcaatgcaattctcatcgaaatatcatcatcattctgcacagaactagaaaaaaaaaaatcctaaaattcatatggaaccaaaagagaacctgcatagccaaagcaagactaagagaaaagaacaaatctggaggcatcacatgatctgatttcaaattatactctaaggccatagtcacgcc

SEQ ID NO: 628689 - DNA, 405 bp, Homo sapiens
tttgatccagcaaccccactactaggtatcccagaagaaataaaagtcattattcaaaagagatacttgccttgcatgtctatggcagcacgatttgcaaatgcaaaatatggaagcagcccaaatgcccatcaatcaatgagtggataaagaaaatgtggtatgtatttaccgtggaatactactcagccataaaaaggaatgaaataatggcattcacagcaacctggatggaattggaracttattctaagtgaagtaactcaagaatagaaaaccaaatactgtatgttttcactcatatgtgggagctaagttatgaggactcgaaggcataagaataatacattgaactttggggacttctggtaaaggctggtgggtggcaagggatgaaagactaca

SEQ ID NO: 628690 - DNA, 405 bp, Homo sapiens
tttgatccagcaaccccactactaggtatcccagaagaaataaaagtcattattcaaaagagatacttgccttgcatgtctatggcagcacgatttgcaaatgcaaaatatggaagcagcccaaatgcccatcaatcaatgagtggataaagaaaatgtggtatgtatttaccgtggaatactactcagccataaaaaggaatgaaataatggcattcacagcaacctggatggaattggaaacttattctaagtgaagtaactcaagaatagaaaaccaaatactgtatgttttcactcatatgtgggagctaagttatgaggactcgaaggcataagaataatacattgaactttggggacttctrgtaaaggctggtgggtggcaagggatgaaagactaca

SEQ ID NO: 628691 - DNA, 545 bp, Homo sapiens
tgaattattgaagtttcactactatatatgtgattatctttcataggtcatgcatgagattttctgcacttcttgaatgtgtaaattggtatctgaaaattctcagccagtatctctttatatattgcttctttctcattcttttgctctctgcagggaagactaattaaacaaatattgaaatgtctcactttctacacagtttctttgatctgacatatgaaatttgtatctttttttcagtgatkcattttagataatattttgtgttctatatcccagcctaataattacatttccccatttattttttatttacaaatataataatgataaaatatgcataagtatacagataaatgtttgtaaactaaacacaaacatcacaatcattcagatcatgagaaatattagcagaaatctgttcatgccctcatctagtcacaatgtcctcctcaagtataaccactagcaaggcttctactagcatattttagatttttttatttgtataaatataattatacagttgttttctattgtat

SEQ ID NO: 628692 - DNA, 594 bp, Homo sapiens
atataattatacagttgttttctattgtatctgacttatttcattcataactcatatgagattcatctatattgccaggtgaagttgttgatcatttattctcacttgttgagtattccataatgagaatattacttatgcgctctactattgctgaacattttagtaggttcaagtgtttttctattattaataatgctgctgttaactttctagtacacatcttgtgaagcacacacatacacacagtagcgaattcttaaaattttatgttgcctcagcatccattttaaatatgacttggactgtctcttaccagaagtagggtatggtcacctttgacacagtttctatttttctgcctcctctcagtttytcaatgtggtcaatccacatttttcctgtgcatctgcttcctggtgaccacttccttatctggaacagctagatacaactcactggacttgtcccattgatattcactccctgcatggactgcaaatataccatagtgaccacctctcagtcacagcctgcctccatggagcacatgtctctttgctctaaacctaccaattaaaactccctgcaaga

SEQ ID NO: 628693 - DNA, 583 bp, Homo sapiens
ggagacatggagtcaaatgagattactttggagctttaagatttaacgactgccctgctggttttgggacttgcatgggcctgtagccttttccttttggcagatttcttcctcttggaaggggagtttttaccccatttgcctatacctccattggttttggaagtaactaacttatttttaattttacaggcttatataaagaaggtcttgtctcagatgagactttggactttggacttttgagttaatgctggaatgagtaagacttcaggggactgttgggaaggcatgaatagattttgcaatgtgagaaggacatgaggtttgggaggggctggggtgsaatgatatggtttggatctgtgtccccaccaaaatcttatgtcaaattgtaatccccagtgttggaggtggggcctagtgggagctgattggatcatgacgggtagatctttcaagaatggtttagaaccaccactttggtgctcttctagtgatagtgagtgagtaagttatcatcatatcttgttgcagcaccctgccacacttcctcctgctccagcaatgtaaaacgtgcctg

SEQ ID NO: 628694 - DNA, 619 bp, Homo sapiens
ccaatgaaaatttggaattgtttcattcttttcaggccaaccacaaatttcagataaacttgactgaaatcttaattttaacctcatcaacttttatttttctactttttttctgtttttgttttatcagagcagattcactcctattactaacttatgtattttaaattttatttattgcctcttctttcatgcaacaagaggacttttcttttttagtcattttatttttcccatacctaaaatagtgattgatatatatacagtagatgctcaagtatcatacagtgaagaccaggataaatatttataaatattttgacaagattatcaatcaagtaagaaatcatatccccataaataaataaagattgtattggttcattagagttgatacaaataatatagataataaaactttttattaagaacatttatgattaaatgagatgactgaattaacattaacatgttaacaagaataatacccttaaaatatgaattatascacatagtaataaaataacagtagtatcataaaacttaaaatttttaccattattcttgagatgtgtatgtgtgcttgaggaccgctagaaaaattataccaattactgtg

SEQ ID NO: 628695 - DNA, 540 bp, Homo sapiens
ttaacactttttagtctttcctagccaatccatttgtcttagtccatttgagccattgtaacaaaataccatagaccaggttgttcataaaaaacagaaatgcatttctcacaattctcttggctgagaagttcaagaccatgtcaccatgtctagtgtctagtgagggcccacttcctggttcatagaaagcrtcttctcactgctttttcacatgaggaaagagcaaggcaactctctggggcttcttttataagagcattaatcttattcatgacctaattaactctcaaagaccttaccttctaaaaccatcacattggtaattaggtttggacatacaaatttgggggaggacaaaaacatccagaccatagcaccatttgattatctctctgccctgttcttcatccgaggttacaacattttctggtgctggtagacattcttatacaaatggcacatttcaatctatgctttagcatctcatctcttctgcaatagtggaatgaagtgatgcaggactttttgctccttagc

SEQ ID NO: 628696 - DNA, 643 bp, Homo sapiens
caaagtccattacaatgttatccctgattaatattrttttacttccctgagttgcaattatgctttgcataatgggtgatcagaattcagtgcaatgaaagagtcatggaggtcatatttgaacaagtggaatgtggtgagtaatagctctgaggtctagagtgatatttaatataagccccattatttttctaatgtatgtatccttttttatctagaaattagaacattattaatgttcaatgacattatgtcccttttatcaaatgaaagtctgagacctttgtatggcacactgaaagagtaaaggcactaggtttcaatactgttacataaacttgtacgtgatgaaaagctaaattttaatttgaggaaaagaagtagatcataacattcatatatctttgaaatcttaccttgataacctatttcactgatcagcaaggcacatttttgcaaaaaaaaaaaacccacacaaaacaaagtacacaagtataacttgtatatatagtctatatacagaaaagaatctggaagaacatatactcgcagttcttatttgtaagttggttagctggccctacttcagggacatttctcccctgcaagaaggcagatgagagtagttgggggcagctgggaa

SEQ ID NO: 628697 - DNA, 473 bp, Homo sapiens
gtcagcctaacattttcttcacttaattttatctgatttcctctgcttctactctttcatcacattattctggaggaataagactgacaggctttaatggatgtgtcttaatgtatacccttaatttggggtattaaaataattatgaaattaaaaatatagaataattccttatctgtctcattaagtgccttaaatattcttattatgatttcacattggtcccatgagtaatgatataagaaagaattcattacattatagaaaaaattcctacacatttattagatttatacctataggtcaaagtccattacaatgttatccctgattaatattgttttacttccctgagttgcaattatgctttgcataatgrgtgatcagaattcagtgcaatgaaagagtcatggaggtcatatttgaacaagtggaatgtggtgagtaatagctctgaggtctagagtgatatt

SEQ ID NO: 628698 - DNA, 643 bp, Homo sapiens
caaagtccattacaatgttatccctgattaatattgttttacttccctgagttgcaattatgctttgcataatgggtgatcagaattcagtgcaatgaaagagtcatggaggtcatatttgaacaagtggaatgtggtgagtaatagctctgaggtctagagtgatatttaatataagccccattatttttctaatgtatgtatccttttttatctagaaattagaacattattaatgttcaatgacattatgtcccttttatcaaatgaaagtctgagacctttgtatggcacactgaaagagtaaaggcactaggtttcaatactgttacataaacttgtacgtgatgaaaagctaaattttaatttgaggaaaagaagtagatcataacattcatatatctttgaaatcttaccttgataacctatttcactgatcarcaaggcacatttttgcaaaaaaaaaaaacccacacaaaacaaagtacacaagtataacttgtatatatagtctatatacagaaaagaatctggaagaacatatactcgcagttcttatttgtaagttggttagctggccctacttcagggacatttctcccctgcaagaaggcagatgagagtagttgggggcagctgggaa

SEQ ID NO: 628699 - DNA, 573 bp, Homo sapiens
cgctgtggtccagaagggaacatcagtaagtcggttcaccgcttgcaagtgggggcacttacatataaatgaagaaaaaacaagttcttaaaaagcagccgaccctgggttcttaaaaagcagccggggaagagggctcaggggaccggacgcggtgccccgcaccacgctaggcctgacaaccggaagagaggggccaggaggggctcctccagagcgacttcggctccagtagggaaaccgccgaggctcccccagctccagggagcgccggggacgcaggcgggaagcctccwtcgggcagccggcctggactcacgacgcggggtggggccggcgcccgccccgcccctctcctcggggatgccgggatgtttacactcctgacagcggcggcagcaggaggaggatcgggagtcgcgggaggatgggccgccgctaggctcgcactccggacgcgcctcgcagtgcgcagggtgggtgccccgcgcctgcagcgtccgccggggcggcgcggcgggaggtggccgacaggctccgggcctcgcagcctcagcccccggcccagcgcgc

SEQ ID NO: 628700 - DNA, 581 bp, Homo sapiens
gaccagaagtccagtgcagttacagtttgtgtaaataagtacttaatctcataaggaccycatgccccaaatctttcctggtgcttgcagttgatagttttgggctctgacttactgtaaacatttaagtattctttttttttcccctcaattattgcgcatttactgaaatatagacttctttttttcacttaaatatgtggtctgagatatcattagagacttttacagtgtttccagaactaaacactattttcctaggaactatctgatgttttaagaatgtacctctgtagtattacaaatgtcgccaccattcagggtacctgagaactgggcctgagagcagggcccagttaagtgttagtgattacgcacttttggggaaaaaaaaagtaggtaattccaaaatttctttcaggttttgtttcccttgatttttttttttttttaaataggctttggtattttaaaaatgcacagtgtagtatttaaaaaatacacagtgtagctgcagctgcagctgcacaaaacagcactctgtcctcattcccggtttcattcacatttaagtgtttacc

SEQ ID NO: 628701 - DNA, 581 bp, Homo sapiens
gaccagaagtccagtgcagttacagtttgtgtaaataagtacttaatctcataaggacctcatgccccaaatctttcctggtgcttgcagttgatagttttgggctctgacttactgtaaacatttaagtattctttttttttcccctcaattattgckcatttactgaaatatagacttctttttttcacttaaatatgtggtctgagatatcattagagacttttacagtgtttccagaactaaacactattttcctaggaactatctgatgttttaagaatgtacctctgtagtattacaaatgtcgccaccattcagggtacctgagaactgggcctgagagcagggcccagttaagtgttagtgattacgcacttttggggaaaaaaaaagtaggtaattccaaaatttctttcaggttttgtttcccttgatttttttttttttttaaataggctttggtattttaaaaatgcacagtgtagtatttaaaaaatacacagtgtagctgcagctgcagctgcacaaaacagcactctgtcctcattcccggtttcattcacatttaagtgtttacc

SEQ ID NO: 628702 - DNA, 616 bp, Homo sapiens
tatctaatctgaattgctgatggggtggtatactcatatgaaaatttgagttcaaccaagaatgtgtatgggcaaaggttggactgtcaggaaagactgtctgtcatggggcccacacatccttgtacatccttaccaagtatgccaaacaacaaatgcaccagccatcctgtatctttgagctacttctgtagctagttatgtaggcaatccagtaggtcaaagaactgcaaagyaggtctcagcattccttgccagcctgtatgataactggcaaataacaatacaaaacaaaacaaaacaaaacaaaaacttgctcttttgctctttacacaatatcctggcctttgaaacttttaaaggaaattctaaaggtaaagggaagtttaataaatctaaatatttaatggtttcaatattatagtttgccatacatcacatacaaccgatatgccttaacatcacttgaattcattgctaaacagaaaataagtaagcagaaatatttcagtagctaaagaaataatttcaaatacatcctttcacaagtaaaaataatttctgttgatcattttactgttctaaacatatttgccataagttaagtaacatgacc

SEQ ID NO: 628703 - DNA, 634 bp, Homo sapiens
gtatctttcactgtatcattcttttttaaaaaaacatttctgatgattcttcacaatctttacaataaattccttagcctggaattacaggcccctatctattcaacggaaatttactaaactcctcctttgaaccaggcaggtactcagaatggttccattaaagagctcatggcctagtggaagtagtagtattccgaaacatcttccagagacatcgccacatgaaaaatcaagaaaaatctgaagtttcaggctaccaatgtaacctctaaagacgggttttccagatgggagttatagggttgatttttcatttyacaaataccaccattttggcagctataaagagaatgaatcagaacctcatgccccacttatttctgccaaactggcccatttttgagtttcagaaatcctattataatttcacctaccacaatggcctcctctcaaagccaagcacaaatccctatgcttccatgagttctcattcaaaccaaaggagacatccccttcctgtagaaggcctatactatggtatactctagtggcactaagggcctttcttatattgttaatgactactatcaatcgggattatgaagtccataacaacaaagtctgtagtaga

SEQ ID NO: 628704 - DNA, 612 bp, Homo sapiens
tctctctctcacatgcgcacacacatacacacacttttattcacatccattctccctctctccagttcaaggcctaagagattaaaacacccttgtccatttagacacagaagccaaaataggtcgacctacttaatatttaatatatgatctaaatgaaagagacaaattaagaatggtgaaaacattattaatgtatgtgcaagaacacctttctaactgaaagctgaccatcattatccacatctctaattcttcttggatttaccatcttgaagtaaaaaatattcattacagccaactattgagaagatgattattctgatgccctgctattcacttctacctgttgcctaccttttttattatttcactctttatttccatcaacagaggtaaacctgaaaatatctacgcatatttgaacatatcaagtayataaagccattttaaaattatatatatatatcacttttttctattaaaacaagaaaaaacagaatcctaacaaatgaaatcatttcattaactgacaaagtttaatgaagtttctccttcaattcaaccacttaccctcacatgtcatttttaaagaaatgatttgctttactc

SEQ ID NO: 628705 - DNA, 582 bp, Homo sapiens
atgtagtttgaaaggtgaatgttggggaggtacaatttgatactgattatttaaactgtccaattttagcctgaccaatgcaaatgactctatctttaccccatttccaactggattctctctatttagacatagttgtcagtgcgcttttgctaaaatacgctttctaaaagaaactacctggcagttaaaaatgatgatatataagttcctccagtcctctggcattattattgaagcagggctataaaaattcttatgcttttcaggccagragtggtggctcatgcctgtaatcccagaagtttgggaggttgagcaggtgaatcacttgaggccaggagtttgagaccagcctggccaacataatgaaattccatttctactaaaagtagaaaaaattagccaggtgcggtggaggatgcctgtaatcccagctgctggggagactgaggcatgagaattgctttaccctaggagacagaggctacagtgagccgaggtcatgccactgcactccagcctgggtgacagagtgagactctatcacacacacacacacacacacacacacacacacaa

SEQ ID NO: 628706 - DNA, 582 bp, Homo sapiens
atgtagtttgaaaggtgaatgttggggaggtacaatttgatactgattatttaaactgtccaattttagcctgaccaatgcaaatgactctatctttaccccatttccaactggattctctctatttagacatagttgtcagtgcgcttttgctaaaatacgctttctaaaagaaactacctggcagttaaaaatgatgatatataagttcctccagtcctctggcattattattgaagcagggctataaaaattcttatgcttttcaggccaggagtggtggctcatgcctgtaatcccagmagtttgggaggttgagcaggtgaatcacttgaggccaggagtttgagaccagcctggccaacataatgaaattccatttctactaaaagtagaaaaaattagccaggtgcggtggaggatgcctgtaatcccagctgctggggagactgaggcatgagaattgctttaccctaggagacagaggctacagtgagccgaggtcatgccactgcactccagcctgggtgacagagtgagactctatcacacacacacacacacacacacacacacacacaa

SEQ ID NO: 628707 - DNA, 567 bp, Homo sapiens
ttagtcttgcttctacatttaaaaaaagcatttcaatgctttttctcaatgattttgtacaaacatgtccctttcccaaactcttaatagtacattttcaaataatttttgaagagctcatatgtgatacattgtctctgaacgttgaaaataaaaaaagtaattctattgccatcatacatgaacaataatttggctgtgtatgcccttttttagccacaatcctctgctttgattttgttaggtctctgaagtaattgttccattacttctggcattttgtgatactgaagagaacactttgatcccttccaattcttggctgaagaacagtaatttactttcatcaattattggttcagaactgtgtgtttacctactactacttaatatagtacttgcttgaagtaaatcaagctagcaatgtgaatcactacataaagagcataataaggaaattattttatctacttttatcgtttctacacaaaatgwgtcttttgctctgtgatcaataaacaagtctgctgattctcttgtttaagtttcctttaatggtaagtccct

SEQ ID NO: 628708 - DNA, 576 bp, Homo sapiens
aaaaaaaaacacaatgctttcctatccattattcctcttgatgctgctgaaaactggacaaggaaactgaggccctgatctcagtggtaaagcaatgactgactctagctcaggtcttctgatgtcctctgcaatgaactttttcactaagccccacttaggccctgactgcattcttaggacctgagttagtcataacaagagtctatttaatgtataattaggttagtaggacacaatcgatgtttagcaacagaaatttagtctgttactttacttcttggaaaactcactgccttcctccccctcctacccacctccccacgtacacaagaaacgaagcataatacttgtacctttgagatttttttttttaccaagcataaacgtcaatgcaaattaagatttcaaaaacgtaaaattaagaaaggaaggaaaaaaggaagtatataaaagccactgcctcataaatataaaactatccttgtacttaataacaagatgtttcaatgtacttacaaggtaaatcaaagttatattttacrttttaaaatttacctctgggaaactaaattt

SEQ ID NO: 628709 - DNA, 530 bp, Homo sapiens
tgtctccagtttcacttttaattgagcttatttggatcttctctcttcttttcttggttaatctagctagtggcctatcgattttgtttatcttttcaaataaccagtttttgtttcactgatcttttgtacttctgcttgtttgtttgttcyaatttcatttagttctgccctgatcttcgttacttcttttcctctgctagcttgggtttggtttgttcttgtctctctaagaagaaggtgtgacattgggttgccaatttgtgatctttcagactttttgatatagatatttagcgctataaactttcctcttaacactgtctttgctgtatcctagagattttgataacttgtgccactgttatcattcattttgaaaaatttttaaatttccatcttgatctcatggttaacccaaaaatcattcagaagcagattgtttaatttccatgtatttatacagttttgatggttccctctggaattgatttctagttttattttgctgtggtctgagaatataattg

SEQ ID NO: 628710 - DNA, 563 bp, Homo sapiens
aacatgctgctttctgaattgatctgtaatttataaggacatcattataattacaaatatggtattattattctgcattcattgtgttagaagggtagcttaatgcttataattccttccctatttttccacaactgatttatcacttgtctgacccaacttccctccactccattgttctgctctctccgtacatcccwcttcacagaggaatgttaataatggaatatgttatttaccttttcatttacatgcttccaagctgccattctctgtaattaatcactgccataaatattcccatgtatgtgctttatatatatactcttactgggtcactgaactaataaaacagcttattctaagcattgttgcaaatcacagcctatagttagtaaaatgcataaggtaaggatagatttgcaagatattttgagtcaggtgaaaatgatgaaatcttttgtttctcaaataatacatgtattattagtattattagggttattattagtagcagtggtactattagtactattaggattattagtactattaaaagtagc

SEQ ID NO: 628711 - DNA, 563 bp, Homo sapiens
aacatgctgctttctgaattgatctgtaatttataaggacatcattataattacaaatatggtattattattctgcattcattgtgttagaagggtagcttaatgcttataattccttccctatttttccacaactgatttatcacttgtctgacccaacttccctccactccattgttctgctctctccgtacatcccacttcacagaggaatgttaataatggaatatgttatttaccttttcatttacatgcttccaagctgccattctctgtaattaatcactgccataaatattcycatgtatgtgctttatatatatactcttactgggtcactgaactaataaaacagcttattctaagcattgttgcaaatcacagcctatagttagtaaaatgcataaggtaaggatagatttgcaagatattttgagtcaggtgaaaatgatgaaatcttttgtttctcaaataatacatgtattattagtattattagggttattattagtagcagtggtactattagtactattaggattattagtactattaaaagtagc

SEQ ID NO: 628712 - DNA, 563 bp, Homo sapiens
aacatgctgctttctgaattgatctgtaatttataaggacatcattataattacaaatatggtattattattctgcattcattgtgttagaagggtagcttaatgcttataattccttccctatttttccacaactgatttatcacttgtctgacccaacttccctccactccattgttctgctctctccgtacatcccacttcacagaggaatgttaataatggaatatgttatttaccttttcatttacatgcttccaagctgccattctctgtaattaatcactgccataaatattcccatgtatgtgctttatatatatactcttactgggtcactgaactaataaaacagcttattctaagcattgttgcaaatcacagcctatagttagtaaaatgcataaggtaaggatagatttgcaagatattttgagtcaggtgaaaatgatgaaatcttttgtttctcaaawaatacatgtattattagtattattagggttattattagtagcagtggtactattagtactattaggattattagtactattaaaagtagc

SEQ ID NO: 628713 - DNA, 230 bp, Homo sapiens
gaattctgaaaataagcaaattaagcattaaaatcatcatttttcagcactttggttgaaggtcctctcactgttccagttatacctgcctcgcctttgtctcttttaatcatcatgtatcttccttcctctggttcccggcattcagagctgagagtggcatragaggtgtctctgaagcctcagggtgatgtgatgggagccctggtgccctcactgccagcactgcc

SEQ ID NO: 628714 - DNA, 615 bp, Homo sapiens
ttgcatgacaatgaatgaaatgggctactaggaattgatagagtaagaagctgaaagacaaaggaaaacatttgtaaacagagagataaaataattatacaataaattcatgattcaaaagtataacaaactgaaatgtgacatgattttgaataaatgatgaataagaaaggataatccatttgaacttgatcctgggaagatcccctcttgagagtgttcataagcgtggtgtcttggagaagggaattaagcatactataacagtatggtgcaatggtaacaccatcaaatgatagaactattattaattggtttcaacctatggaatcaaactaggcaaacactgaagactttctttgagtatataaaagaatgtaaatattrtgaatcttcacaatataaaagtaagagtttgaccacaacattgagaagtggaaggggagatgtgaagtggagggaaggatacaggtaataacatggtcatcttacaaagggggaataaagataacaagtagaggggtcaatattagagatataattctactggggagggagaggaaaagagaagcagttatagatgagctagttcttcatcaaacatggaagaagtca

SEQ ID NO: 628715 - DNA, 571 bp, Homo sapiens
catttacagatattggctgaaataactattccaaacattgcaatttgaggaataaaacacatttyatatagatttgtaactaatgtgtgacttgagatctgttttttaaaaaaaaggaatggggagatattcaagagacatccgcgtgtgcctgggagggatgtttgtgctccctcccaattttccttcttcttttaaaatgtaacatataataacaacaatattaacaacaactaaaatgccccaggaatagtccaggcccctgctactgttgctgctccccgtccccccttccttcttctcctacttccactaagtaatcattcagtgtctgtgaataaaaaccccattgcttatttttgtttggatccaatttatactcagaaaggcactgagcatgagctgcttctttcatgttctttgcctgagtctaaaacagctttattagtggggccaaaaacagcggcagttttggcaggcattgccaagtgcgcatcactttcaatgatacatctggatgcaaagaactaaactgaaaatagagtgaacctccactcctattaaatgaaaa

SEQ ID NO: 628716 - DNA, 583 bp, Homo sapiens
taaccctgagtctcaagggggagagtggatgccagaatgaaatcagagttccatccactttccattagaaagaaargaatgggagaggagcagagaaggctccagacagacaactaacagtgtttgatacaataactttcttatgtttctgtaacttaaggtccattttgtctattgctagcatatataagcttaatgcctgctagattctgttgtttacactgtcctcttctccctggagtagtaccgagggtgagggagcctgtggcctctgtaatatcaggacatagaggatagggttgccggggggcacatgtggtcccttgattgccacgtttctattttggtttcttttctttaaaagaaaacttcttttattttatagataaggtctcattctctcacccagggtggagtgcagtggcgtgatctcggcctactgcagccttggcctcccaggctcaagcaatccttccaccttagcctcttgagtagctggaactacaggtgcacaccaccgtgccaggctaattttttatttttattttttgtagagacggggtcttgctgtattgcccaggct

SEQ ID NO: 628717 - DNA, 583 bp, Homo sapiens
taaccctgagtctcaagggggagagtggatgccagaatgaaatcagagttccatccactttccattagaaagaaaagaatgggagaggagcagagaaggctccagacagacaactaacagtgtttgatacaataactttcttatgtttctgtaacttaaggtccattttgtctattgctagcatatataakcttaatgcctgctagattctgttgtttacactgtcctcttctccctggagtagtaccgagggtgagggagcctgtggcctctgtaatatcaggacatagaggatagggttgccggggggcacatgtggtcccttgattgccacgtttctattttggtttcttttctttaaaagaaaacttcttttattttatagataaggtctcattctctcacccagggtggagtgcagtggcgtgatctcggcctactgcagccttggcctcccaggctcaagcaatccttccaccttagcctcttgagtagctggaactacaggtgcacaccaccgtgccaggctaattttttatttttattttttgtagagacggggtcttgctgtattgcccaggct

SEQ ID NO: 628718 - DNA, 583 bp, Homo sapiens
taaccctgagtctcaagggggagagtggatgccagaatgaaatcagagttccatccactttccattagaaagaaaagaatgggagaggagcagagaaggctccagacagacaactaacagtgtttgatacaataactttcttatgtttctgtaacttaaggtccattttgtctattgctagcatatataagcttaatgcctgctagattctgttgtttacactgtcctcttctccctggagtagtaccgagggtgagggagcctgtggcctctgtaatatcaggacatagaggatagggttgccggggggcacatgtggtcccttgattgccacgtttctattttggtttyttttctttaaaagaaaacttcttttattttatagataaggtctcattctctcacccagggtggagtgcagtggcgtgatctcggcctactgcagccttggcctcccaggctcaagcaatccttccaccttagcctcttgagtagctggaactacaggtgcacaccaccgtgccaggctaattttttatttttattttttgtagagacggggtcttgctgtattgcccaggct

SEQ ID NO: 628719 - DNA, 583 bp, Homo sapiens
taaccctgagtctcaagggggagagtggatgccagaatgaaatcagagttccatccactttccattagaaagaaaagaatgggagaggagcagagaaggctccagacagacaactaacagtgtttgatacaataactttcttatgtttctgtaacttaaggtccattttgtctattgctagcatatataagcttaatgcctgctagattctgttgtttacactgtcctcttctccctggagtagtaccgagggtgagggagcctgtggcctctgtaatatcaggacatagaggatagggttgccggggggcacatgtggtcccttgattgccacgtttctattttggtttcttttctttaaaagaaaactwcttttattttatagataaggtctcattctctcacccagggtggagtgcagtggcgtgatctcggcctactgcagccttggcctcccaggctcaagcaatccttccaccttagcctcttgagtagctggaactacaggtgcacaccaccgtgccaggctaattttttatttttattttttgtagagacggggtcttgctgtattgcccaggct

SEQ ID NO: 628720 - DNA, 601 bp, Homo sapiens
tttgtatttttaatacagacggggttttaccatgttgggcaggtgggtctcaaactcctgagctcaggtgatccacccaccttggcctcccaaagtgctgggattacagatgtgagccaccgtgcccagcctgttgaaaacatttaaagacataaactccccatagctgtctggagcaagggacagcagatgggtcatgcagcacatagaccaaaaatcctgggaaggaggacgctgaggaggaagatgcttggggaaagaaggtcrttgaagggctactgcatataccagggaacccaggctgcaatgcacatgtccagggctggacacatgctcagaaaagatctaagaggaccctaggcttgcacctgtggctgatctttgtattccatgcaagcaggaggtaaagtctagggaaaatggaaagagtggcttggctaagtgtctaaggaatgcctcagctcagagccaatctgccaagatcagaagatttttcttttgtgtttggtccaggtgtttttagtccaggtatttaaggaaatctgtgtcaactgtggctgaccactgaggtaacagatcaaagacttcagtgtctacatat

SEQ ID NO: 628721 - DNA, 623 bp, Homo sapiens
ccatttatttattcagcaaatatctttcagcacctaactattttaggtgctggagagtttagtgttgttgtaataacagtcagtataagaaattataagatgactraagaactgaggctagggaaccatatgcctgcttataaccaggacaaactgaactgtcagcccaaaagctgaggaccctgaggtggtgagtgtggaggagggtgtgcctaccaacagtgttcccctgggtttctatgtttaaagggcaagtatgaggacgtttagtaaaatatgtaaaatgtagtttaagcatttaggccttttctcttgctgaaacttgtaaaaccatttaggtaagatagatttctattaacgttaaatagcataagtcatgaataaacataagtcataccacaaagtttatcaatgtatggcaggtatgtggataaatttccctattgtattctctatgttaagctactagaagaaagagtaatattttctgagcccgaaatgatgagaaaagattgtgtttttgaaacagcaaaattaggcagacagttgtaacatttttttaaaaatacactagttagcttggtgttctgttgcatttgaaaatagcatgatacagtatcatc

SEQ ID NO: 628722 - DNA, 559 bp, Homo sapiens
gccttctctctacccctcattcctgctgctggcttgattgagtcgggggaaggcaaaaaaaaagcaacggctttgagaaagagatgggtaaataaaatttcaatagaaccttctggtttctgaaatagcctttgttgcaacctgtttgagagactttcaatgctgattgtttttctgggatattgacattgaatgtgagcttctatatgtgtgaaaccatgccgttactgactgtcttagctcatttgtgttgctaaggttatttataaaggaaaagttatttgrttgacaattctgctggctagaaaactgagcatctggtgaaagcctcaggctgcttccaatcacggtacaaggtgtagagtagccagcatgtgcagagatgacttggaaagacagatagacaagagagaggagagggaggtgcaagattcaaacaactagctctagtgggaacttatagagcaagaactcactcattaccacgagcacagcaccaagccattcatgaggaatctgcccccatgactcaaacacctcccattagaccctatctcca

SEQ ID NO: 628723 - DNA, 510 bp, Homo sapiens
ctgcagtccacatggaaaaagatagatctttgtgatcttaaatcatagaattggaaaactaataacaacacactttatatctttggagaacctcagaaaagaaaaatcaaatttatctgggaaaaatataggatagagtcaaaagaagatacagatattatttattttttataattagaatttcaaatttcttcaacatcttttgatatattattaagttcatgtttattaagggtttgctattttgctaggtgctagaaacagaatggttaacaaatatggtacattaaagtataggttcacaatcctccagttgcaatgctgtacaccagatgtttcwtattcagaattttttgtattttagaaagacaatacaacacatattttgtatattgcatatcactacttgtgacatctgggccaaaaatatatattaatattattgtatttaatatatgaagaactatactaagcaagatataaatcattataaatagctttttatcactt

SEQ ID NO: 628724 - DNA, 579 bp, Homo sapiens
tgtctgctatttatgaatctgtgagatcttgagcatgttgctaaactctgtgagccttattcttctcacctttgaaatagaaaaagtcatccttatcttgcagaacagtccagatgtcatctaaatgttgcataggacttactcatggaaatctgactagacttggcccaaaccccatctccaggcctatgattctcagtgcctttccaccccttcctgtgatttacgatgcctcacttccttatgggtggaattgcgtcttcctcccacaaattcatatgttgaggctttaatacctggtacctcagaatgttactgttttcgagacagggcctttaaagagatgattaatataaaatggggycattaggcaggaccctaattggatatgatttgtgtccttctaagaagaggagattatgacacacacacacacacagagaagtgtgtacacagaggaaagagcaagtgatgacacaatgagaaggcagccatttgcaagctgaggagagaggtctcagaagaaatcaaacaagctgtgtgacacctttgacaccttcatcttggacttgtaacctc

SEQ ID NO: 628725 - DNA, 560 bp, Homo sapiens
ttgctttgggttctatcctgaagcagcaaggatgcctacaatatgaagtacataaagcattaacacatttaaaatagatccattagcaaactagcacttcattactctaaactccagtttcattagtcatagttctgttcattaactgggttgaacagattgctacctgatttctaaggtgttaaaaagcattttaaaaaatgggagtcgaaggaaacctactgacaacygaatattttcaaaaaatacaaagttaacatcctttcttatcatactagagaaaaattactaaaatgtttcaggatatctccttttaattatagcctagaagcaatctctaaatagccaaattttcttttgtccccaccaagcgccaagttgtattattttttaatccagagtttaaaatgtacttttgtttactatattgcttcctttttaaacaggaaatgcagctgttcatgattaagagtcacctacttggaaacctaaatcacattaaatagtgttcatcaccaaaaatagttagatgagctttgaaacttgtaaaactattgaaa

SEQ ID NO: 628726 - DNA, 521 bp, Homo sapiens
ttctcttagttttggcttcagattgaacacatgaggagctcagacctcagggagtgccaagcccagctctttgcatagctagaacagagtacaggaagcccagcctagatcagccaacttccagcgaaaccaaaagcacatgarctaagtaatttcttattgttgtatgatgttgatattttgtagttgtttgttatgcagcattactataccagtaacaaactggtatcaagaataattgcccatagacctgatttccttcaactattcttggtatatcataattcccatttcaccaaatatcttagatgttttcttctgaaaccattccagtggtcctagtgttcatcttaaagttgggctcagtgatcttgagatatatcagatgagagttgactggcacaaaaaaatggcactattacatcctgtgtttctttcttcaaaagtccttcaacataatctgaagttgtagttttcttaagtggctatgtcatattattgtgttttattaaacttgttac

SEQ ID NO: 628727 - DNA, 622 bp, Homo sapiens
tttaacaagcagcagtcccacttatagcagcatagaggaaaatgctggcattaagggaagcttctccttcccttgtcatcatcaatacattttctatgagtaagccccgatcatgttccccaaagtgtgctatgtagcactataacagcatcaagtggtattaatatgtttctcactttttattttaattgcttaagataagagacagaaaaagaacagtagtgggagagaatatgataaagaagcacagttattgtctatcataagtgatacatacacagcaagagggaattttaactttcagaactctaaacaagggagaacagagcatrctagatatttgtaaaataatggaagataatggaaaatgatgtataataatcaaaatggactctgccacagtctataccttagattattaaaatataacttctcatttcttccatagataaatgtttacttggacaaatggctgcactaatagtgaatacaccctttcagctagatgtgccaccctttcagctagatgtgccctcgtgactaagttaggacacatgggatgtgtgcagagatgggagtgtaaatcaagatcctttcccgtttaagaataatctcctcatcc

SEQ ID NO: 628728 - DNA, 517 bp, Homo sapiens
tttgtaaaatctgatattttggaggcccaaactcaaatgcatagattattaagaagcaggatttgcttaattctctttttgccaaaattttaataacatcygcagtgaaagagaacctatatccattatatgctaattcctaattgattttactctttcagactccctacccctctaccaactgatttctgaattttaaaataagagggggccttaaacaacaaattaagtaatctgtatctttaacattcttctacttcttctcccctccaagaaacaaaaataaccataaaaaatatatatttaatgcttctctggcacttggtacacaccaaacactgctaagaggtttacataacctttcttatttaattgccacaatttttgaatgatagtattagcccaagaccagaaaagaaaatttatttttagctaattaagttacttgtcctaaactaatccagctttgcaattcatccagtccataatatgcatccaaaatagtcactctcatttg

SEQ ID NO: 628729 - DNA, 517 bp, Homo sapiens
tttgtaaaatctgatattttggaggcccaaactcaaatgcatagattattaagaagcaggatttgcttaattctctttttgccaaaattttaataacatccgcagtgaaagagaacctatatccattatatgctaattcctaattgattttactctttcmgactccctacccctctaccaactgatttctgaattttaaaataagagggggccttaaacaacaaattaagtaatctgtatctttaacattcttctacttcttctcccctccaagaaacaaaaataaccataaaaaatatatatttaatgcttctctggcacttggtacacaccaaacactgctaagaggtttacataacctttcttatttaattgccacaatttttgaatgatagtattagcccaagaccagaaaagaaaatttatttttagctaattaagttacttgtcctaaactaatccagctttgcaattcatccagtccataatatgcatccaaaatagtcactctcatttg

SEQ ID NO: 628730 - DNA, 560 bp, Homo sapiens
tgtgctaagtttatgtccaagtattgctttaactacattctcaarttttaacgtgtaagatttttattatcattgaattataaatattttttcatagccatttgaatttcttcctcaaagcattagttatatacaagctgtttcttatttcttcagagattaaattaattgagatcaaaaattatattttaaagttttttgaaataggatgtatttgttttagagtcttttcatgataaattatcctaaatgaacgcatgcgcttgaaaagaatgtgattctgcagttgctggatgcagatcaaaaataaaaatgaaaatcattacaacttataggtgtactgaaatttttatcattatgaagttaccctctgtctctagcagggctttttttggccttactctcatactgctcagatattaacataactagttgtgttttctttttaaaaatttcctgatatatacatatttgatataaatatttcctattactttataatatttgccttttaatttagtccatttataactattataattgttgatatatttgaattt

SEQ ID NO: 628731 - DNA, 560 bp, Homo sapiens
tgtgctaagtttatgtccaagtattgctttaactacattctcaaattttaacgtgtaagatttttattatcattgaattataaatattttttcatagccatttgaatttctycctcaaagcattagttatatacaagctgtttcttatttcttcagagattaaattaattgagatcaaaaattatattttaaagttttttgaaataggatgtatttgttttagagtcttttcatgataaattatcctaaatgaacgcatgcgcttgaaaagaatgtgattctgcagttgctggatgcagatcaaaaataaaaatgaaaatcattacaacttataggtgtactgaaatttttatcattatgaagttaccctctgtctctagcagggctttttttggccttactctcatactgctcagatattaacataactagttgtgttttctttttaaaaatttcctgatatatacatatttgatataaatatttcctattactttataatatttgccttttaatttagtccatttataactattataattgttgatatatttgaattt

SEQ ID NO: 628732 - DNA, 597 bp, Homo sapiens
ggtctaagataaatcactaaaataaacatgctccctaaaaagccagtcagtatctgcctgagatttaaggtgaatatgaatattgaattaagaaatcaaaacataaaagatcaaaaattctgaaatgatactttttccgtttttgcttcattgtttttgctrtttgaagacattactttcttatcatgtcctggcttattagtatatttctactaaaaaatactactttattacttaagttatcagtcccaacgcagaatttcctcaagtacaaagagcacatccgatgtgtccagtaaaagaaaaccttctaaataaattaacaattttaactttactttcttctagctgtagacagatgatttgatatctcccacaaaaaagaaaatactcaaggagatatgattcattcctccctggaacatggtcatgaaaaatatctcttctaagatttctttctatctgtgaagttataaattctttagttttctattctttgagtcaaatgagacaagtccttataggatccttgtgaaacacaatcttggcttctttctgagtctttgctaagtcctctacaatatacttaaggcacaa

SEQ ID NO: 628733 - DNA, 617 bp, Homo sapiens
agatattggcctttaaaatgaggttgagaaagggatgggtgtagtaagtatattcaaagggataataacagagaatttctaaacatggagaaatatatcaatatttaaggacaagaaggtgacagaacaccaggcagatataacccaaaggaggctatctcaagacacttaaaamtcaaactcccaaagatcaaggataaagaaagatcctaagcactgagagaaaatacagacacaacatgcaaaggatctccaatacgtctggcttttgacataaggtttccactggacttttcagtggaaaccttacaggccaggagaaagtagcatgacatatttaaagtactgaaggaagaatacttttatcctagaataggatagccagtaaaaatatgcttcaaacaagaaggaaaaataaagacttttccagacctggcctgtaagaaatgctaaaggaagttcttcaatctgaaagaaaaggactttaccaataaaaacccatctgaagatacaaaactcttgggtaatagtaagtacacagaaaaacacagaatattataacatcataagtgtggtgtataaataattcatatcttgaatagaaagattaaaaggtg

SEQ ID NO: 628734 - DNA, 570 bp, Homo sapiens
ttgaccagaccaataaccagtaatgagattgaagctataatgaaaagtcttccagcaaaaaaaaagcctgaacacggtggcttcactgctgaattttaccaaacatttaaagaagaactaacaccaatcctctcaaattattcagaaaaatagaggacggaagacttccaaattcatcctatgaggcaagtattaccctgatactaaaactagacaaaggaatatctaaaaaaagaaaactacaggccaataaacctgatgaacattgmtgcaaatatccccaataaaatactagcaaactgaattcaaagacatactaaaaagatcattcatcatgactcagtgggattgcaaagatgattcaacatatgcaaatcaatcaatgtgatacattatgtgaacagaatgaaggacaaaaactatatgatcttttcaaatgatgctgaaaaagcatttgataaaattcaacaatgctttatgatttaaaaaaaccctcaaaaaaagtgggtatagaaggaacatacctcaacatgataaaggccatatataacagacccacagctagtatca

SEQ ID NO: 628735 - DNA, 590 bp, Homo sapiens
ggtggcttcactgctgaattttaccaaacatttaaagaagaactaacaccaatcctctcaaattattcagaaaaatagaggacggaagacttccaaattcatcctatgaggcaagtattaccctgatactaaaactagacaaaggaatatctaaaaaaagaaaactacaggccaataaacctgatgaacattgctgcaaatatccccaataaaatactagcaaactgaattcaaagacatactaaaaagatcattcatcatgactcagtgggattgcaaagatgattcaacatatgcaaatcaatcaatgtgatacattatgtgaacagaatgaaggacaaaaactatatgatcttttcaaatgatgctgaaaaagcatttgataaaattcaacaatgctttatgatttaaaaaaaccctcaaaaaaagtgggtatagaaggaacatacytcaacatgataaaggccatatataacagacccacagctagtatcattctgaacagggaaaaactaacagtcttttctctaagatccatatcccataaatatacatgcctattatgtacccataaaaattaaaaataaaaa

SEQ ID NO: 628736 - DNA, 590 bp, Homo sapiens
ggtggcttcactgctgaattttaccaaacatttaaagaagaactaacaccaatcctctcaaattattcagaaaaatagaggacggaagacttccaaattcatcctatgaggcaagtattaccctgatactaaaactagacaaaggaatatctaaaaaaagaaaactacaggccaataaacctgatgaacattgctgcaaatatccccaataaaatactagcaaactgaattcaaagacatactaaaaagatcattcatcatgactcagtgggattgcaaagatgattcaacatatgcaaatcaatcaatgtgatacattatgtgaacagaatgaaggacaaaaactatatgatcttttcaaatgatgctgaaaaagcatttgataaaattcaacaatgctttatgatttaaaaaaaccctcaaaaaaagtgggtatagaaggaacatacctcaacaygataaaggccatatataacagacccacagctagtatcattctgaacagggaaaaactaacagtcttttctctaagatccatatcccataaatatacatgcctattatgtacccataaaaattaaaaataaaaa

SEQ ID NO: 628737 - DNA, 612 bp, Homo sapiens
attcaataggatatagatttatatttagaatatatgaaaaatgaattgtttataaagcacaaagtacagaatacaaaatatgaacatggtgaaaaattttgcccacttggaagtatgccagctaagaaaaaaaatatatccagggatatgccaccttaggaaatcattacagaatttccagaatttgggagatttttatgtgtattaaaagagagcatgattaaaagaaaaaaagacaaaatacgytggtctgaaataaatgtgctacacttgatttatcaagcatcataatttattgaatgatggcatatttgctaagtattttggactagaatattgttaaatgctctggactaaaacagaataggcattttaaaaaactatcaccaccaccaaggagtttgaattacagggattcttcccaacattgcaaatatatatgtatctatgtatatctgtatatatacatgtatatatgactcacaatcagtgtcttcttgtattgaacaaatgacttaaccgtactggtaccttatcaaacctttagttcaatgggtaacaagagatgccagaaaatagacgaacaaagacaacaactaaaatagttagatc

SEQ ID NO: 628738 - DNA, 637 bp, Homo sapiens
ggatgcccatagataggccaaacttcacaaactaagggcacagttttccacaaaatttccacaaaattctacttcatacaacactcacaagtttgggggactccaggctattcttacttctgaccggctggctacaaattcgggggttcccacggtcttatcaagtttaataatttttcagaacaactcaaaggaaaaaggaaagtgctatacttatgattatagttttatcatagcaaaagggtacaaatcaaaaccagtcaaagagagagacacatatgacaagagcacagtctgagaggatcccaaacatgaaggttctgacagctgctgggtcacattatcctcctggcacgtcattatgtaataatagataaaagtattgctaaccagggaagctcacaggagtctcagtgtccagacattttattatggtttcattgtatagacatgatagattaaatcatatcaatatccagccttctccactcctcaggttgggctgatatcacataggccaaagcccaaactctaatattatggttagtcttccyggcatgaccattgccatcttgaatcatctccttagtataaactataaggtgtggttgaaggggctcaccatgaataacaaaga

SEQ ID NO: 628739 - DNA, 637 bp, Homo sapiens
ggatgcccatagataggccaaacttcacaaactaagggcacagttttccacaaaatttccacaaaattctacttcatacaacactcacaagtttgggggactccaggctattcttacttctgaccggctggctacaaattcgggggttcccacggtcttatcaagtttaataatttttcagaacaactcaaaggaaaaaggaaagtgctatacttatgattatagttttatcatagcaaaagggtacaaatcaaaaccagtcaaagagagagacacatatgacaagagcacagtctgagaggatcccaaacatgaaggttctgacagctgctgggtcacattatcctcctggcacgtcattatgtaataatagataaaagtattgctaaccagggaagctcacaggagtctcagtgtccagacattttattatggtttcattgtatagacatgatagattaaatcatatcaatatccagccttctccactcctcaggttgggctgatatcacataggccaaagcccaaactctaatattatggttagtcttcccggcatgaccaytgccatcttgaatcatctccttagtataaactataaggtgtggttgaaggggctcaccatgaataacaaaga

SEQ ID NO: 628740 - DNA, 591 bp, Homo sapiens
aataaacacatatttaattcataaatgtctgaataaaaatgtagtttttttgttttgttttttaaatcatgtaataaaaatctggtggtagataatccaattttggtacagtggctctgtacatttccatcttttgtatattgttttcagcaggtcagcttttgtacttaaagttatttttatcgagaactgtgaaaggtttgagattttgctctgtttgtaatttaagtaattaacctgtcacaggttcataaatgctgaaggaagacgtgagatttctgggtcaggtataaaatactttgtgattcatggcatagcaggcagcatgaacttcatgtttgcattggttccccttgccaagcaagtcctactggggycatgtgaacagctcagatagatgccgcacacactcaattagtgtcacaactgaggaaccccaagccaggaaataccagatcttataatgggactgctagcaaacttgactcactgttgcattggaggggaccattattctggttctagccagaccacttaatttgcaaaaaaatttactggatagaactgctctagagcatgcctggatatttg

SEQ ID NO: 628741 - DNA, 173 bp, Homo sapiens
tttgtctctgcctttctttatcttcatgtctaaaaagagaaaatgattttaaaagcaaaaacaaacacaaacattaacctttaaaaagataaattattttactaatgtagcaacacacatatgttattctggtctgaaaaygaatctgctctcatcccaaaggaatacactat

SEQ ID NO: 628742 - DNA, 571 bp, Homo sapiens
aacagataatcccaaattgcttggatctggaggaaaacttccggtgtctctacttactgaggtatttcctgttaacaggcacaggttatcactgcagctaaagactccggttctggagtaatactgtcaatagctgcaaaacctgggattaaaataatttatggtctctaagcctttgtttacttatttgcaagtagtagattatgatagtattatttagataatatgggataatatgtgtaaggcacttcacggtgactagggtatatttatgctgaataaatgcttacatcattattacttatctcatttatgttagagacataaattcttagaagtataggttgttatgaaartctgtggacacctactacactataaaagcctttcatgctatgctaatgagtctatgttctatttctgtttttgaagtgtagtttaaccgctgaagttcatggttatttcttgagcacacacaatgtgctagcaactcctctaggggcagcagttatgcctagtgtaaatcacattttttctctcatggggctcttgggcaagtggtggcaagggg

SEQ ID NO: 628743 - DNA, 571 bp, Homo sapiens
aacagataatcccaaattgcttggatctggaggaaaacttccggtgtctctacttactgaggtatttcctgttaacaggcacaggttatcactgcagctaaagactccggttctggagtaatactgtcaatagctgcaaaacctgggattaaaataatttatggtctctaagcctttgtttacttatttgcaagtagtagattatgatagtattatttagataatatgggataatatgtgtaaggcacttcacggtgactagggtatatttatgctgaataaatgcttacatcattattacttatctcatttatgttagagacataaattcttagaagtataggttgttatgaaagtctgtggacacctactacactataaaagcctttcatgctatgctaatgagtctatgttctatttctgtttttgaagtgtagtttaaccgctgaagttcatggttatttcttgagcacacacaatgtgctagcaactcctctaggggcagcagttatgcctagtrtaaatcacattttttctctcatggggctcttgggcaagtggtggcaagggg

SEQ ID NO: 628744 - DNA, 525 bp, Homo sapiens
aacttcttattttgagaggacagctttcctcttggaacaatcctatttctacatttttagggaatttaaaaagtagagcagacaggtgacatgacggagtatgacactgcaggtggttgaaattatcgacagtttatataccatgagggaaaatagtctagggaacagcaactcaatgagtgtacaaaaagaatactgactatatatatatatacacgtatatatatgtgtatatatatgtatatatacacgtatatatatgtatatatatacgtatatatatgtgtatatatatgtatatatatacgtatatatatgtgtatatatagtatatatatatacacatatatatgtgtatatatatgcatatatatatacacatatatatgtgtatatatgtgtgtgtgtgtatatatatatatatatatacacatatatatatatatatwtttttttttttgagacagagtctcactctgttgccaggctggagtgcagtggcaaggtcttggttcactgcaacct

SEQ ID NO: 628745 - DNA, 525 bp, Homo sapiens
aacttcttattttgagaggacagctttcctcttggaacaatcctatttctacatttttagggaatttaaaaagtagagcagacaggtgacatgacggagtatgacactgcaggtggttgaaattatcgacagtttatataccatgagggaaaatagtctagggaacagcaactcaatgagtgtacaaaaagaatactgactatatatatatatacacgtatatatatgtgtatatatatgtatatatacacgtatatatatgtatatatatacgtatatatatgtgtatatatatgtatatatatacgtatatatatgtgtatatatagtatatatatatacacatatatatgtgtatatatatgcatatatatatacacatatatatgtgtatatatgtgtgtgtgtgtatatatatatatatatatacacatatatatatatatatttwtttttttttgagacagagtctcactctgttgccaggctggagtgcagtggcaaggtcttggttcactgcaacct

SEQ ID NO: 628746 - DNA, 566 bp, Homo sapiens
aagggagactaaataatcataagtgaaaagagagagaagtattttaaagtattataaattgttacagtagtgaacagcttgacacttttaaaaataatgtaaagctttcctggtttaacttggactttgaatcaagctccatactaattaagatgaacaatttacctacaatacttcccatacctaactgataagaaattaaaaattcaatatagttgacattatatattttctatggattaaagttgagtataaaataatgaaatacttggaagtttgtaatttctcaagttaaatagttttcaggcaaagggaaattttaaaataaaatacttaaaccatgtttcctctatatatttcttactttcttggcttagctttagggcaggcatgtggatacattaaaacactttttaaaactgaaattctgcggtgagtgcacaaaactagccataacatccattktagcataatcaaatgcaaattttagcaaccattttgagagtaatacatgcactccaggtttttcagcatgctattagatttagtagtctgagatgagagct

SEQ ID NO: 628747 - DNA, 586 bp, Homo sapiens
ttggcatgtgaaagactagaatcagtgtattgccctagaggcaataacatgtatgaatcagagtcaaagtcacatgcttctgttcttgctggattgtgatattacatagtaaaacatgaggtggtayttctgttgtgtgtagctctttgtttgttacattcttggtgttatattttatttgagtatattatctgaacaataagttcattgtcttaaatcttctatgattaattaactttcaatagtgaaattgctcctttaggctaactctgtgtggacagctaattgtaaatgcttccaataactttcacaatggctttattgatgccttgattgcacaattatttgcttacatagacttaacctattcacactatctggacagcttatctggaagagtctaacattttttgtgtaaagatgttatgataaaaatcttaaagcaaaactcagcaaattgagttctgcattttgcttggcagttcctcagagtttctatagattaatcatccaagaagaaattccaaaatagagattcatgagccccacataaatcaactaagtgagactctctggagtacagtct

SEQ ID NO: 628748 - DNA, 617 bp, Homo sapiens
tgatagctaatgtttattgagcactcactatgtgccaactagttayataagttctgtacatgcattaactcatgtaatacttataataatcttctttaatgaatgagaaagatgaggcacgtaaagattaagggtgaagcgcaagatatctcaacagaaccatggcaggttggctataggacctgcactgctattgaggatcctgtggcatgtccttgtcctgtctttccaaatggaaagcgatagcacccttagctacattgtgcactgataaaattatattaatagtaaaatgtgaaggtattaatttttaaatgtgagattattcaaccaaaaaattgggatatttttcaatcttcattcagcacttctaaaataactgcacaattctaaggattttgtgttctgttgtgttagagtctgaaagctgagcttttggcatctttgatcatagctaggataacatataccaggaaagctaaagcaaatgtaaagaaaattaaaacccaatacttatttttcttctcagttcaaaggttttatcagcaaatcagattattttagtgtgcaatcatgaagataaaaaagaaagagacttcctggatgataaacaccct

SEQ ID NO: 628749 - DNA, 607 bp, Homo sapiens
ggtagatgagcacagagagagagacagcatttgtctgggaaaaagtaaggaaaaagaaaatgtaagggaaaaagaaaatggtaatctctggatcagcttcctggtaatccagagattattctggatcttctckaagaccaccaagggggtacctccttgagtctgcaaaaaacaccacatcattgatgggcttgaggcccaagtgcctttgaatacctgcaaagccttcccaagaaggacaggtacaaataagcctagactgtgaagactgcaataaatgtataactcttcaatgcccagacaccaaccaacatctacaagcatgaacaccacccagaaaaatatggcctcatcaaatgaactatataagacaacagggaataatcctggagaaagagatatatgacctttcagacagagaattcaaaatagccatgttgaggaaactcaaggaaattcaagataacacagagaaataattcagaattctatctgataaatttaacaaaaagattcaggaaccaagcagaaatcctagagttagaaaatgcaatggacatattgaagaaaggatcagagtctcctaataacagaatcaatcaaacag

SEQ ID NO: 628750 - DNA, 632 bp, Homo sapiens
gctaagcccatgtctttctttataaactgctttataggcagtgcctagaaaagaatatgtgtttaataaatagctgttgaatgaaaaattaatgaaaaagtgattagtgaaagcagaggcagtaagtgatgggtagaaacatgttttttaaaaaaagacattggtactgatccagagatatttcaataatgtgaactaatgataagagtttggttcctttgtttgttgagttgcaaaaaagcagaatggtggcattctaagagtcactaaaagacagaaggtgggagatggggaagaaaaatgtcttaacttcccacaaattcttagatttctattaagtttcagttccaactgattgtgttcacagtccttcatttttatatcataacaataaaattaacgtattttatatggcatttataaaacaaaagttctaaggtgccattaaaataaatatatcttaygtagctacacatggaattatttagcagcaattactgttctgcagaagatttttcaatagaaatttttgcttaatgaattaaaaatccacggtaaaatggacaatgttttgataattttgagacatactgtaaacactatgaaaagacctgcctccttatttgaagcta

SEQ ID NO: 628751 - DNA, 548 bp, Homo sapiens
ctcttttgcccaggctggagtgcagtggcacaatctcggctcactgcaacctctacctcctggattcaagtgattctcctgcctcagcttcccaagtagctggaattacaggcacatgccatcacgcctggctaatttttgtatttttagtagagatgaggtttcaccacgttggtcaggctggtctcaaactcctgacctcaagtgatccgcccaccttggcctcccaaagtgctgggattacaggcatgagccaccacagccggccagaagttggctatatgagtttgattgatatttggggatctttattagtgtatctgcctccccatsgggctcagttggagggatgctggtttccaggggtcaggcaggcaaatagacaagtggcatcaccacctcctttacctgtcccaaagtcaatggctctcagggcgtctgctatgtgctctaaatccaaagtaaagaagtccatgttctcaaagccctgctctgtcttccccagctggcagcccttggaagcttccacaatgctgcaggggagacag

SEQ ID NO: 628752 - DNA, 501 bp, Homo sapiens
gagctgcccaggactccagaggaggggatggaattgatttaggtcagtgaggggttgcgtggggctgggagggggttgaggttgggaggctgaaggaggagactcccttcaacctgggaggtggaggttgcagtgagcagagatcgtgccactgcacaatcctttctatctcccttcctgggctgtgagtttctcggggcagggaaacagatcactcatccatctgtcacgttgtgatgtatactagttgcctgatgtatatactagtactcagaaaaatgtctgatgaatgaataaaattcattcatcgaacattttcatcatagcattggctattaaccccttgaatccccgtggctcacttgctgggtcccayccctgacccactagcctggtgccggggggagaccaatttctggaggaagctctgggtacccagtcttgccctaagcctgcctctgaacaggctgttcttgtttatgacccccgtcccagcagaat

SEQ ID NO: 628753 - DNA, 465 bp, Homo sapiens
cagaattcagtctctgccctaagaccggagcacttcaggcagcttctggaaggtctgggatgttccccaactcataacatccacattcataaagcatcaggactattttcttgtcaccccaccaccagcaaacccacacactgcccttactcactgcatggctctacttcaaataacaatagctaccatttgtggaacctctgtgccagggacttcatttaatgttcacaccagccctgggaggtgaatccatcccattttacagatgagaaaacaaactctakagaagtgaggagatttgcccaggatcccacagctgggaagtggcagatctcggccttgaacctggatccctggggtctaggccactctgctccgttcggggtgggggtggggtctctggtcctctgatactctgatccctgtgcagggtaggggtctgtacctatggtagaaggcggctgt

SEQ ID NO: 628754 - DNA, 586 bp, Homo sapiens
ttttctcgaagccttcattctcttcctcaggctcttttatgactcccagcccagctcaatggcctgtttggagccttcctgtgtgcaccctggctgagctaactgcttcacttcctctacaaggactcttattaatctatctggcttctctagaagtaagatttgacagtctgtgtgctggaaaatgctaacccagtctgactctctgggcagaatccttccttactttttatctgctcagccttaagcccagggcctagtgctcagaaaatgactgctgagtaaaggaatgaatgtttccttctccagcctccccaagagacatctgcttttcacgtggcttcatcaatttccatggggaaaaggcaacagaatcttgggacttayaggaggcagcaagaacacttggaaatcttccccgtgcctcccctcaaatagtggtcatctttggggtctggaagtcatcagggccctgccctgtcccttacccccaccctggatcccaggactccagctgggaagggggcagacctgggcacagtgctgggagcctgccaccgcctggatgagcttcagagggggctgg

SEQ ID NO: 628755 - DNA, 643 bp, Homo sapiens
catttgatgaggttgatcataaacttttacttaaaactcagaattctcatactgaaggctttggagataggcaattctggatcaaaatactggctctttccggctgggtggcctgagaaaaattacttaacctgtctgagctttcgtgcctggtacacaaacacttaaatgctaacaactagcatattttattataatcattatttatataagtgcttagcacagagtaagcactatacaactgtatgtggggaaaaaaaatattagggtaggaggtttggaatgagtcgtgttttatgttttgaaagatccccaggggagaattccaaaacctaccttagacaacccttgcttcaagtccccatcttaatggaagtgctctctgccatctaacctggctccctcctgctgctgcagctgaggcctaagtctaccaggactacctggttctcccatctcagtcctgccttctaccctcgtttttgggcttgcrtctattccagccccctcccatccagcccccaaggcaaaaggttcacttactgcccaggtccagggtcttgctcacagcgcccatcccaggggcaggcagaggagccagtgtctgctgtgcgccacccacccctctcctcttccagggcta

SEQ ID NO: 628756 - DNA, 528 bp, Homo sapiens
aggcaaccatgtctttttattaagcaccttaaaattttgcaggtttaggaatccatcttttcttgaaaattgttttaatcaacgttaaaatagtttgaattaaaaaaccagacttaactccctaacaattttttttaaagttttctcggaggttactaaacttaatcactaagaccactgtcatcaaggttactaatgggctattgtattttgctaaataaaaagtaaataagaaaaatcacaatcttagtttacttcccagcagaattttaccttgctgatggttcttatacctttttaaaaagtataatattaacatcaaaattgaaaagcatwcaaataatgttaaagtgtctgaacaagcaattgggaaacatcatcttattcttcccactcagcagatataactatagtaagcagtgcacatggacatagtctataaactttgagacatgtgtttatgcacattcaaatgcaccaagtcaatagaaatgttaaaactgttcaaaataagttaatgaggacaga

SEQ ID NO: 628757 - DNA, 632 bp, Homo sapiens
agaaagtaggaattattatatwagcctgttgctggtattcattgttttccccaaaatttaccatgatattgttgttgtccttcagaaaagattttctgtttgtttgattttagtcactggggttgtgccttaaattcactgtgtttttgttggtgtcatttatccctgtatattctgtctctcatggagctgcatgtacatccccctcttcataaaaattccattaacctttggtgtctgctcagggctttcaagacatattgtaggatcacgtcaagctcaatttcatcactctgcactatattcagccatactggctcttaagccactcagctagtggcttaagatctctattgaaggtagaagcaggatcccgctctttcgatttactaagaatttggctccttatgaaaatgagcctcatctttgaagcaacataactcttttagtagactccaaagatgagtcaccatgaagctgatctgtctctaggagaattcatccctaaattcccagaggtgagctcctgaagcattttcctttagtttttgtcaacttcctaccctttcatgtcgtggaaagaacaatctcctttatgaaaagtaaacaatggatttcatgtacatatgttt

SEQ ID NO: 628758 - DNA, 439 bp, Homo sapiens
gaattctctcttttatcctgtgtgaacagcccattgcattcttgagcagtacacagagcccagggatgtggtgcaatactatagaggagaaattaagtaaaaggctactcacaaaacaaagctaacaaggtctttttccctattctgctctaaaaatgtgggtgrccaggccacttccactgactgtcactgactgactggctctaggaaaaagaatacagactccaagagagagagttcttaaacaaatcagccaggtctctgcttgatcacagtgcaataaagttagtagctggaaagccactcacaatgaatacatggaatttcaaaccacagtttttggttttttatttttcaatataagtggagagtgaagcataacaatatatgttaagaaattctctaacttcacagcgacagaccaaagtcagttgggggt

SEQ ID NO: 628759 - DNA, 575 bp, Homo sapiens
atttgaggacatagtccatgaaaatttccctaatctcactagagagattgacctgcaaatccaagaaatatagaggaccctagccagacactgcaaaagacaaccatccccagggcacatggtcatcagatgcactaaagtcaacacaaaagaaaaaaccaaaagtagacacatgggacttaaactaaagagcttctgcatagcaaaagaaacttataacaaagcaaagaaacaacctgcagaatagcagaagttattcacaaaccatccattcaacaaaagtctaatatccagcattgatatggtttagctctgtgtccccacctatatcttgtaatccccatatgttgagggaaggacttgttgggaggtgattggatcacaggtctccccatgtctgttcttgtgatagtgagtgagttctcacgagatacgatagtttagaagtgtgtggctggtcaggtgcagtgacttacaacatgcctgtratcccagcagtttgggaggccaaggcaagcagatcacctgaggtcaggagttcaagaccagcctcccaacatggtgaaaccctgtct

SEQ ID NO: 628760 - DNA, 175 bp, Homo sapiens
tagttaaacatcttaaagtagttacatataggtggcatgataagttagaaatggaaaggcactatartattttactttctgaagacactatattctataagaaatatttgtatttattgtaggaatatttacatagtatttgatgaaaatataaattaaaaataaaccagaaaat

SEQ ID NO: 628761 - DNA, 610 bp, Homo sapiens
tggctgggactgcaggtgcaygccgccatgcctggctaactttttgtgttttttgtagagataaggttttgccatgttgccccactggtcctgaactcctgggctcaagtgatccacctacctcggcctcccaaagtgctgggattgcaggtgtgagtcaccagcctggcctattatgtaggttttaaagatcaaatatagtattgttgaatatgctttattaatggttctttgatatattattaaagtactaattgcaaaagttttcagattattactttgtgtgttgtcccttgcaaatattattattattattattattattttctttgagacagagtctctgtctgttgaccaggctagagtgcagtggcatgatctcagctcaatgcagcctctgcctcccgggttgaagtgattctcctgcctcagcctcccaagtagctgggattgtaggtgtgcactaccatccctggctaatttttgtattattagtagagacagagtttttccatgttggtcaggctggtcttgaactcctgacctcaggtgatctgcccacctcaacctctcaaaatttctgggattacaggcgtgagccaccgtgccc

SEQ ID NO: 628762 - DNA, 565 bp, Homo sapiens
tggggggtatagggtttcactcctatcacccaggctggagtgcagtggcatgatcttggctcactgcaacctctgcctcccaggctcaagtgatcctttcacctcagcctcccaagtatctgggactacaggcacccaccactgcacctagttaatttttgtttttatagagacagggttttgccatgttgcccaggctgggattaaactcctgagctcgagtgatccacctgccttggtgtcccaaagtgctgggattacaggcatgagccactgcacctgcacactcccccrtggtatttaataaagcttcatttagttttccatttcattttttattccatttaaaaatttttaaatgcaacaagagaggagaggtggaggacaactatatagtaaggaaacctgtcaaatactaactcagcttggttatcaaggttaacatcatcactgacaggtcatgtgatatggtttggatctgtgtcccggcccaagtctcatgttgaattgtaatccccaatgttggaggtggtgcctggtgggaggtgattatatgatgggggtg

SEQ ID NO: 628763 - DNA, 462 bp, Homo sapiens
tggaatctgagagctagaagagaccataaaagatcatctgatttaaacatttaattatggaaaagagaataagatccagaaaagtgaaatgatttgcatgaggctccatcaccaaggagatgtgaattagcacamcctcaattgcaaatattagaaaccccacatcagaatagctttaatgaaaaagacttctggttaactataatgggttgaacatttgcatttatttctgctccttccgctaaatctctctagatcagtacttcccaaacttcaacatgcatatgaatcaactgaggagctcattaacatgcaatgcatccaaaaattctggggtgaggcttgattctacatttctatcaagcttctaggtgatgccagtgttgctgatctgtggatcacattttggatagtaaggctctggatcaggggctgatgaactacagccacagcctgtttttt

SEQ ID NO: 628764 - DNA, 574 bp, Homo sapiens
gcaccatcagttccagatggccaagatgcaaaggattttttcctttcctccttcctactgaaaaagttttaacaccctctaatatgcagttagctgcacaagttcctaagtttcaccgcagggagggraggaagtaggccccagtaattgtgatgatggagaacactgttaatggttcccctaaattaaacagggtgggagcttcagctcctcactggcttggcatttcattagcagtaacactacagccttgcacggagacgggaccagtatggctggatcagggaaattaattagagtctgacaatacccttaatggaaattggttatttctcccaaataaagcagctattacaagtgcaagggaagaaataactcagccctccccccgcgttcctttcatgaatgtgtgtgtagatgctgccatagcgggtgcacaggagccaggaatcatcactgccttatcccaggccttgctcattttctcacattcagcaaaacctcgatcattgcccgtggagctggcacagacatgtaaactgtctactgtgactgcagtgcagagagctctcta

SEQ ID NO: 628765 - DNA, 571 bp, Homo sapiens
aaaaccatgtgagctgagtggagagaaacactgctgtttctgaggataacacagtctataaatagcctcagagccaggtgagtgctaacacctgcctgatgtcacctgggcccggagccctcaagggctgggcatgtgttcagctcatggcttagcctatagactatccttcttcctgataccactgagaccagaccaggaagggatgccatcatagctaagcctttggggaaggtagccttttctctggcttaggaggtagtgatgaygtttgattttccaaagagagtggaaggagtaacatgaatgaaagaagctggttcccagtccagagtcctcagcatggagtctttgcactattcatggctccccagtgctatccaacaatgtcagacctcagccaggccttcagagccctctgtgattgggtccccacaggcctttcagctcatgctcactattaaaaccatctccctagtccctgagctccatagccccctggccaactccaccgtttctatcttactgtgttgtctgcccaggcttatctctcttgcctccccaccctgtc

SEQ ID NO: 628766 - DNA, 492 bp, Homo sapiens
tccagcagtagtgcgggcccagtaggcctcaggccccggccacctggtggaccccagaatgcccctcctgcgagtcgggacacactcagagacagtgtgcccggcgcctcaacccctgccactgtccttgggggccacactgagcacctcccctaactctgtttttgggtcttttctaaagcaaagtaagaaacagtcaccagggtagctttagagggaaagccctagtggagccttcaggtcggccacacattgacagcaggggtctgtttgtgttgactggcccgtatcccagggagcccttagtatttcttcttcattctcagtttcttctggaaaatagggacacccttcctgcttccatttggttccagggtgggtcttgcagcttcgagggtagaggctggctgggatggggcttcagccttccctccccayaccctcatgcctctccctgggcctcagtttcccaaccccgaatggaggagctgg

SEQ ID NO: 628767 - DNA, 634 bp, Homo sapiens
atattgccatatacaacacataataataaaataaacacctgagagcccagtctccaaactaattgccccacgttaccaaagctattgactttacctgtggacttcttccctatttcagccccttgcctcctccagagataactccattcacaatttcatgtttattattctcttgttttataaactggttttgtctcatatttatgtatttataaacagtatattattygttttgcttgttttttagctttatgaaaaatgaatatatatatgaagacactatagtctcttgtgatttacatttctacttttttctatgatttatacattttttgtgcatgagccataatttatttttcaatgctatatgatattttattttttcaatataccaaaatgtattcatccatttacttatccatcctcttagcattattgtgaacaatgctgctatacacatttcctatattgttctcctggtgaacatgtgcaataatttctccaaaacctacttttgagttagatttctgtgccatagtggagacaaatgtttaactttataaaataataccaaattgttttccaagatgtttgtcaaatttgctttcccctcagcagattctaagtgtgccta

SEQ ID NO: 628768 - DNA, 500 bp, Homo sapiens
actcctcaatcaaaagacatagagtggctgaatggataaaaaaacaagatgccatgatctgttgcctgcaagaaacatgtcacttataaagataaacagactgaaaataaagggatggaaaaagatattccataccaatggaaaccaaaaaagaacaggaatagctatacttagaccaaatagatttcaagacaaaaactgtaagaagagacaaaraaggtctcttatataatgataaaagggccaattcagcaagaagatttaatgattgtaaagataaatgaacccaacactggagcacccaaatgtataaagcaaatattattagacctaaagagagggatagaatccaatacaattatagctggaaatttcaacatcatagtttcaccattggacagatgtctcagacaaaactcaacaaagaaacatcagacttaatctgcacaatagaacaaacggaactaatagatatttagagaacatttcatccaactgct

SEQ ID NO: 628769 - DNA, 607 bp, Homo sapiens
ctgtctgtgaggaagtaggccctcactagacatcaaatctgccagcaccttgatcctggacttctcagcctccagaactgggagaaataaatgtttgtttgaacatttcatgctcatggactggaagaatcaatatcattaaagtggccacactgcscagagcagtcagtttcaaggatattcctattaaactaccaacgtcatttttcacagaactagaacaaaatattctaaaattcatgtgaaatcaaaaaagagcttgaatagacaaagtgatcctaagcaaaaacaacaaagctggaggcatcaccttacttgacttcaaactatcctataagtctacagtaaccaaaacagcatggtactggtacaaaaatagacacatagaccagtgtcagaatgcagaaataaagccacaaacctacaatcattcgatcttcaacaaagtcaataggaatggggaaaggactgcttgttcaataagtggtgctttgatagctggctaaccatatgcagcagaatgaaactggacccctacttttcaccgtatacaaaaattaatttcgaggtggattaaatatttaaatgtaagacctgaaactataag

SEQ ID NO: 628770 - DNA, 622 bp, Homo sapiens
tatacattctttaagcacacatgtgttccttatgatgtgttgtattcatttcctatgtactgtaatcactgaatgcagttagcataccaattttgagttttactcaagctgcaggtaacactaattactgagcacacagtttgacatctgcattgaacatatctgtatgcataaaatataattatccttggtagtgggacaatatgttcttattaatcaatgccaatataaacattttatattattttagatgtagatatattttaatccatacccaaacaaatgtattcacagtttcttccctaattttctagagtaaaccctgcctattttataccacaggatgccaacatatttcctagggcaaataattaaaagaaccttgaaatatttcggtacaaaaccaaaagacaaatatcacagcaaacatagaaaatatacatgtcaagttttaaacaaacagatgtatgtattctcctttttggataaagataaacatttatagtctttctgtaaaaacatttgaattgtcttccctccctgctgacaaaayagattagtctagctgatttctgtccataaaaggttttgcacttttgactcaacaatttaactgctacca

SEQ ID NO: 628771 - DNA, 601 bp, Homo sapiens
tttcataactactcaactctgccattgtagcatgaaagcaatcataacaatacacaaatgaatgggctggttgtgttctgttaaaattttatttacaaaaagaggcagaagtctggatttggcctaagagccatagtctgatctaaaagtgcccattgtttcatttttcacatttaggtccacggtccatttaaattttatttttgtgtatagtttgacatcggtatcaaggtccattttctttcatataaaaattcaattactctgacattatttatttaataaaattattctttcccccacttaattacagtgaaatcttagttataagtcaagtgactctatatatgtgggcctgtttctggactctcttttctgtacygttggtctatttgtcaatcctttcatcagtactacactgctttaaccattatgggtttataagtagtcttgaagtccaggagcataagacctccaactttgtttcctctctttcaacactgtattgactattcaatacttttgcatttcaattcaaatcttataatcagcttgtcagtttatacacacacacatacactcacacacactgcagtgattt

SEQ ID NO: 628772 - DNA, 587 bp, Homo sapiens
gagcatttaaaccaaccttagccagaagggaatcgccaatctcagtggttggaatttgwgatcccatcacaggctaatgtgctttggagtctcaaataaacttgaaaggcagtctaggccacaaggacagcaactcctaggcgaatcctagtgatgaactgggcccagagacagtggactgggagggtctatgaccttctgagacattagcaagggcagccaagagactgctggcatcccccctcccctaacgccagggtgcatagctcatggctccaaaagggaccacttttttttgcttgaagagagcagagggaagagtggggaggattttgtcttgcatcttggataccagctcagccacagtaggatcgggcactggtcagagtcacgaggctttcttcccagttcctagcttataggtgacatttctgcacacaccctgggacagaaggtaatgtgctgccttgaagggaaagatctagtcttggcaggcttcatcacctgttaactgaagagcccttgggccctgaataaccagcagcaatacccaggtgctacattgagggcctcaaatgagactctga

SEQ ID NO: 628773 - DNA, 585 bp, Homo sapiens
ctcagcactagctgaaatactgaaaagcaaattgcagcattgcttgggaagagataacttttttttctctcttattgcccttgcctctttctcttgttccctccacctcctcctattcttcttcctcaactaagtaaatcatttatttttctcttttttaagatggctaatataatggtttctctgaagtcagtgtttatgtagctaaccaacggtgctgtcactaacagctgctgctactgtagcaagattttcaatgtggtgtgttttcagtatctgtgcacactgttcctttccaggtttgttgaaagattggaaattcccagtggtaatctcaggtatcatcccggtggccacagatcagccttggttcttcagcttcttcagttatactgctgcccatgaagcaagggttttgttttgttttraatttctgtcccttagtcaatacttcagtaatcatcagcctagttgttactaatttcagtacatctttctttttttttttttttttggagacagagtcttgctctatcctgaaggctggagtgcagtggtgcgatctcagctcactgcaacctctgc

SEQ ID NO: 628774 - DNA, 581 bp, Homo sapiens
cagtcatcatttattggaaaatgcaaaactttatgtatcacccagaaagaaaaaaatgctgccaattaatggcaagatgtcataatttgtaaaacatatccaaatttcagagatgttcaaatgtggggggaaaatgtgtatgtgagaatgataaaatacattgtatgcatatatgcactgggtcactgcaatatgtatttcctactgtggatcatggccaacagagtttgaaaacctccattctttgaggtagaaaagctgactggagtatctacgtggtggttggagctgccaagggcacccaacctggtcaacaaattagtgtgctcagccagaggcagtcctggatgaattcaggctgcaaagtgccctgtgacctggcccttgggaagccacgctctgatgaggtttgcagatctccccgcaatccagggccaagcatgaatgaaggtgttaggcatttcaaggatgcgamtaggacgtgctgctgtctcaggttcacattatactgaaataaggtcctggccagacagcaccatatagttaattgaggtgtttgggagatactcaaatgggtgtta

SEQ ID NO: 628775 - DNA, 581 bp, Homo sapiens
tatccattgatattttttggaggcttttattccctccaataagttctgccaaatactggctgctggctctatttgttaaacaatggagggtgttgttctgcttgttttttttttttgtttgtttgtttgtttttcttaatctgagctttctgcccactcttagcacggggcaaagggaagatttttctgccacttcttttggtgagaagagtcactttctgattaggatttgagctgaaaataggtcccccttkgggaagaaacatgagtgcagggcgcttcctgtgtcactcccaaggaggcacctcctcagggcagttcctctttgagaatttcatggtcagtaagaagtaggctcccagggaccccagagtggggaccctttgactgaagtcaccccagtgggtataagataaacataagagacgcttctcagagaagatttggaaagaagtaaaagagtaaaaggttcacacggaccatggagttctggaaaagggcccagaaagggaagctgtggctaagatgagaaactgcctgattacactgacccaggagaggggatgaaatctctggtcacg

SEQ ID NO: 628776 - DNA, 645 bp, Homo sapiens
ctatgttgccaggctgatcttgaactcctgtcctcaagcaatcctcctgccttggcctcccaaagtgctgggattaaaaatgtgagccaccatgcccggcctgactgatattttaaggccatgctgttggttctaagtaaaatgataaagatgttcagccaggtgaattttagatttgtgaatgttctgctgtgttggtatactgtttagatttgtcttcttatgtrtaaggaagagtatagcctgtggatgagaatgcagacttttgagctggactctttgaattctgactctgacttagtggctgtgtgatctggatcaggtgaatcaacctttctgtatttcagtttcctcatctgtgaaataggtacagaaatagtgcctacctcatagggttgttggaaagattaaattactgaatatataaaaagcctcttttaatgcaatacacattggctgctgttgttgctccttcctgtaatatacaataaccttagtgttgtttacatggtggagacatctaggctatcttctcttgtgattatcaccatatagtaatctggatttagaatttggtgatccaatgctacatcaacagtctgtcttcctgacaataatgaatccaatctcattgttggtaatatt

SEQ ID NO: 628777 - DNA, 645 bp, Homo sapiens
ctatgttgccaggctgatcttgaactcctgtcctcaagcaatcctcctgccttggcctcccaaagtgctgggattaaaaatgtgagccaccatgcccggcctgactgatattttaaggccatgctgttggttctaagtaaaatgataaagatgttcagccaggtgaattttagatttgtgaatgttctgctgtgttggtatactgtttagatttgtcttcttatgtgtaaggaagagtatagcctgtggatgagaatgcagacttttgagctggactctttgaattctgactctgacttagtggctgtgtgatctggatcaggtgaatcaacctttctgtatttcagtttcctcatctgtgaaataggtacagaaatagtgcctacctcatagggttgttggaaagattaaattactgaatatataaaaagcctcttttaatgcaatacacattggctgctgttgttgctccttcctgtaatatacaatarccttagtgttgtttacatggtggagacatctaggctatcttctcttgtgattatcaccatatagtaatctggatttagaatttggtgatccaatgctacatcaacagtctgtcttcctgacaataatgaatccaatctcattgttggtaatatt

SEQ ID NO: 628778 - DNA, 599 bp, Homo sapiens
ttgcttagccacacaggtgtagcagtgggggaagcagaaagctagatgaatccatggatggaatttttcaggagagtaacatagggcatgaaggtgagagaaccgagtgtgctggaaagaggatgattatttggggatggtagttgctttagctctctattgccacagtgttgctgcatagcaaaccaccacaatcctcaactgcatgcattggtaagctcttttgctcatgggtctgggatgtaggaaaagctgtcattgctcatgtgtctgtgatgcaggtaggtgaccctgctggtcttggctgggtttgttcatatgtcatggatttgctggctgcctgccggccctggaagtcctcagctagggtgatagaatcmaagtatgatgttgagacaaaggtacatggcagagtatgcacaaatggcaggtggaactttggggctatttttgctgtctaccacagtagctgccaatacattttagcatccttttgaaaacatttcaacttatgttaaattctggggatacatgggcaggtttgtaacacaagtatattacatgatgctgaagtttggggtatgggtgattctatcacc

SEQ ID NO: 628779 - DNA, 571 bp, Homo sapiens
tgaggtaagagttaatgtttctctctgtctctctctgcatgtggataactaactcttccagtataatttgttaaaagtttatttccccattgaaatgtcttggcacctttgttgaatagcagttaaccttatttatgcaggtctagttctgaactctacattctgttcttttgcataataatcagtatgccaacatcacattttcttgtgacaatatggctttctggtgagtattaggtagtgtaagtcctccaactttcttctttctttacaaaattggtttggctcttctagatgacatttgcattttcatgtacattttaggattagtttgccaatttctaccaaaaatctgccaaaattttgatgggaattacattgaatatatagatgaatttggaaagaattgcactcttaamaaaattgagtgtatctctctatttatatagatctttaataatttatctcagcaatacattgtagttttcagtatacagtcttgcatatctttgtttaatttctaactagatatttcataattttatgagcagtattactttaaagttttatt

SEQ ID NO: 628780 - DNA, 608 bp, Homo sapiens
aacatcacattttcttgtgacaatatggctttctggtgagtattaggtagtgtaagtcctccaactttcttctttctttacaaaattggtttggctcttctagatgacatttgcattttcatgtacattttaggattagtttgccaatttctaccaaaaatctgccaaaattttgatgggaattacattgaatatatagatgaatttggaaagaattgcactcttaaaaaaattgagtgtatctctctatttatatagatctttaataatttatctcagcaatacattgtagttttcagtatacagtcttgcatatctttgtttaatttctaactagatatttcataattttatgagcagtattactttaaagttttattttctgatttttcattgccagtatttaggaataaaataaattttagatgtagaccttgtatcccatgacttttgtaaagtcatttattggttctagtggatttttkatagattatttgggtttaccagatagatcgtcaagttgtctcttagtagagattgttttacttcttcctttccagcatatatgcatttcaattcttttacttgccttattacactggccattc

SEQ ID NO: 628781 - DNA, 601 bp, Homo sapiens
ggtttcacagtgttagccaggatggtctcgatctcctgaccttgtgatccacccacctcggcctcccaaagtgctgggattacaggtgtgacccaccacgcccggcccatctgtagcctatttttttaaatgttgacatttgtagtctgttatggagaatgtgctaatataaagaatgcttattctgctgttgttggataaaatgttttgtaaatgtctattaaaatcatttggcctaaattccagtttaaatccagtgtttgtttttwgatttactgtttcaataatctttttcatgctgaggtggggtattgaagtctcccacaattgttacattgcagtctatagtctatccctctctttagctgtagtaatatatgctttatgaatctgggtattctggtgtttggttaatatatatatttagaattgttatattctgttgctggattggtcactttattattatttaatgagtttctttttctaatttaaattctggtttatgtgatataagtatagctacttctgcttatgtttagtttctcattgcatgaaatatcttttttcatgcttttactttcttgtctatatgtgtctt

SEQ ID NO: 628782 - DNA, 634 bp, Homo sapiens
aaacgactgaacaatcacttagaaaataattatttagcatttaattattgccagggactcttctaaaaccttttcttaaattaactaattcaatcctcaacaactctgagaggtactgttactatccttaagatgagggaactgaggaacsaagaggttaagcaatttgcctttggttcacatagctaatgatgtggagatttgaacttaggctgtttgtctcccaagcctatgttcttaaatttggggaaatagtaaagataatttccacaatgtgaagacagttagcagccttaaggatgaaaggatggtgcaagtaccatgcccagtgagtgacagagtatcaaggctggtagagcctgatgaaagcacaagttttcagaaaagagggaaacaaacaattcctataaagttaagaaaatcacattgacaccagacttctcattggtagagaccacaaagcccttttcaaaagtgggtcaaactggcaggctgagcacatatccttccttccctttctgtcaaaagatgggacattgtcttcaactttgaatgacttacacagcaaaacattcaaatttatggaaagaaatgaagacaattttagacatgccagactcatggtttactatac

SEQ ID NO: 628783 - DNA, 564 bp, Homo sapiens
acttaggctgtttgtctcccaagcctatgttcttaaatttggggaaatagtaaagataatttccacaatgtgaagacagttagcagccttaaggatgaaaggatggtgcaartaccatgcccagtgagtgacagagtatcaaggctggtagagcctgatgaaagcacaagttttcagaaaagagggaaacaaacaattcctataaagttaagaaaatcacattgacaccagacttctcattggtagagaccacaaagcccttttcaaaagtgggtcaaactggcaggctgagcacatatccttccttccctttctgtcaaaagatgggacattgtcttcaactttgaatgacttacacagcaaaacattcaaatttatggaaagaaatgaagacaattttagacatgccagactcatggtttactatacaacaaccatctcagaaagagttattcagtaatagcatcaaaatgaaaaataaatcaaagaaataaggtagtaatcaaaataagagttaagtaactactgacagatataaggaaagtagtaaccattcggaactaa

SEQ ID NO: 628784 - DNA, 610 bp, Homo sapiens
atattttaaatgaacatttaatccatttacaatcaaggtttacattgatatgtaaggttttgttcctgttatgttatgaattgttttctagttattttataaattctttaaatttttccttttctttgattgtcatggtggcttggtggaattctgtagtagagtcctttgattcatttctcttcctcctttgtrtgattgcttatacacctgagcacagatacacacatgtgcacaggcacacacactcatgcgtgaatacgcacacgcagcagggcagagtccatcagcatgggtgacttggggcctcagcccctgctggtctgcccctaatcatcaggtcccagacctccctactgcaagctacagcaggaagaatagaagttggttccctatagggtgcccagtagagttctctccagcctcctggggtgcagtgcaatggaagcattctattgtttccaagaggggctccaagatccttttgaacgcccatttaaatgtatatgaaagaagccccaaggacccatcatcttccctttttaatgagtaagaagtggctgttcacagggcatctattttatgccaagcagtgggctggatccttgac

SEQ ID NO: 628785 - DNA, 596 bp, Homo sapiens
aagcttcaataaggggaatcctgggaagaaagtggtagctggggcaaggtagtttgtgcatcttcccaacataaccaggtgacagagtacacccatcagtgccaaaatacatgcaggtgacaacatgccaccaagygccatgagacccgagtatgaggcatctatgcaagggaaacagtgagaagcaacgggaagactgacctgaaacaggaaaaccccaaaagggccaccaggcctctgctggaaagcccggcaggccaacccgagaagagcggctgaggctgggaaggatgggaccacttccagtacagggagtacaaggggctgagtgagatccaatggggctagaagttgagcccaggagctctcagacttgaccctggctgctctctgccaggacagagcctcgctgagaggacagagctggcagtggaatcacagctggccagaaaaaggaaaactgacatgaagggaagagaagatccaggtaaaagtggtggaggaaaacaaacaaaaaatctcagtgagcaagttcccatatttggaacattccgcaaaaacgatagaagagggagcactgcaaagtcagaggagct

SEQ ID NO: 628786 - DNA, 596 bp, Homo sapiens
aagcttcaataaggggaatcctgggaagaaagtggtagctggggcaaggtagtttgtgcatcttcccaacataaccaggtgacagagtacacccatcagtgccaaaatacatgcaggtgacaacatgccaccaagtgccatgagacccgagtatgaggcatctatgcaagggaaacagtgagaagcaacgggaagactgacctgaaacaggaaaaccccaaaagggccaccaggcctctgctggaaagcccggcaggccaacccgagaagagcggctgaggctgggaaggatgggaccacttccagtacagggagtacaaggggctgagtgagatccaatggggctagaagttgagcccaggagctctcagacttgaccctggctgctctctgccaggacagagcctcgctgagaggacasagctggcagtggaatcacagctggccagaaaaaggaaaactgacatgaagggaagagaagatccaggtaaaagtggtggaggaaaacaaacaaaaaatctcagtgagcaagttcccatatttggaacattccgcaaaaacgatagaagagggagcactgcaaagtcagaggagct

SEQ ID NO: 628787 - DNA, 586 bp, Homo sapiens
aaaagggatattttggctagtacataggtctacacagctcattttaagttgtgataattaagcaggtatcttctctggtcttatagattcagctcagagcagagggagataaaagtaaatgcatgtttcacgattctgtcctttgtacttcaaatcttctatgtaatgagatagtaaagaaagaacagaatgaaggacggaatagtatgcagccataaaaaggaataagatcatgtcctttgcagggacatggttgaagctgtaagccatcttcctcagcaaactaacacaggaacagaaaatcaaacactgtatgttctcactcataagtgggagttgaacaatgagaacacatggacacagggaggggaatattacacaccgtgkcctgtcgggcggtagggggcaaggggagggagagcattaggacaaacagctaacgcatgtggggcttaaaacctagatgatgggatgataggtgcagcaaaccaccatggcacatgtgtacctatgtaacaaacctatacattctgcacacgtatcccagaacttaaagtaaaaaagaaaaaaaaaaaagaaggaaaac

SEQ ID NO: 628788 - DNA, 594 bp, Homo sapiens
caataaacagcacgatgctaaaccagtcttaatattagaactagtactaatagccgggcgcggtggctcacgcctgtaatcccagcactttgggaggctgaggtgggcggatcaygaggtcaggagatcaagaccatcttggctaacacggtgaaaccccgtctccactaaaaatacaaaaaattagccgagcgtggtggcgggcgcctgtagtcccagctactcgggaggctgaggcaggagaacggcgtgaacccgggaggcggagcttgcagtgagccgagatggcgccactgcactccagcctgggtgatagaatgaggctccatctccaaaaaaaaaaaaaaagaaatagtactaataaaaggaaggcaaaactagctactacttaggacaagcaaatggcaacataagacaataatatacatttaaaacattaaatggtattgaaagttgccttaaccacatattccataacattatttatatataacatgatttaccccttcccacacatacacccacctacaccaacactggtataattttttctagttatatcatgatcattctacaaacaacagaacatagctg

SEQ ID NO: 628789 - DNA, 457 bp, Homo sapiens
ttatactagacaaaatagatttcaagacaaaaactataaaaagagacaaagaaggttattacataatgatcaaggggtcaattcagcaaaaagatataatacttttaaatatatatgcacctaacactggagcacccaaatatataaagcaaatattattagatctaaagagaaagacagacsccaatacaataatagttggagacttcaacactccactttcagcattggactgatcatccagacagaaagtcaagaaatatcagacttaatttgcactatagaccaaatggacctaatagatatttacagaatatttcaaccaatggctccagaatacacattctttctctcagcccatgaatcattctcaaggatagactgtatgttagatcacaaaacaagtcttaaaatattgaaaaaaattaaataatattaagcatcttctctcatcaca

SEQ ID NO: 628790 - DNA, 495 bp, Homo sapiens
gcaggattatttatcatagtaaaaaactggaaacaacagaaacrcccaacagcagaagatgacttaatgtctaacacattcatagaggcactatgtaccaggcactattgtacagactttacatatttactaactcatctaatcctcccaaaaactccatgacacaggtactagtattatctctattttgttggctaggaaactgaggcataaggaggtcaactaatttgcccacaatcatccagctaataagtggaagaggtgaatttgaattcaggtagtcttactccagcaactgtgcttttaaccattaagttttgctagttctttaatcaattatggtatatccacacaatgaaatacgtatcaaactttaaaaaatatagttaactggtatcaaatatattcacaatatattgtaaattttaaaaaatcaagttatcaaataacatgtaaacttctcatttctgatcaggagattggcagtcatcactc

SEQ ID NO: 628791 - DNA, 495 bp, Homo sapiens
gcaggattatttatcatagtaaaaaactggaaacaacagaaacacccaacagcagaagatgacttaatgtctaacacattcatagaggcactatgtaccaggcactattgtacagactttacatatttactaactcatctaatcctcccaaaaactccatgacacaggtactagtattatctctattttgtyggctaggaaactgaggcataaggaggtcaactaatttgcccacaatcatccagctaataagtggaagaggtgaatttgaattcaggtagtcttactccagcaactgtgcttttaaccattaagttttgctagttctttaatcaattatggtatatccacacaatgaaatacgtatcaaactttaaaaaatatagttaactggtatcaaatatattcacaatatattgtaaattttaaaaaatcaagttatcaaataacatgtaaacttctcatttctgatcaggagattggcagtcatcactc

SEQ ID NO: 628792 - DNA, 564 bp, Homo sapiens
gtctgctctgtcacccaggctcaagtgcagtggcacaatcatggctcactggtgccttgacctccctgggctgaagtgatcctcccgtctcagtctctcgagtagctgggaccacaggtgcatgccaccacacctggaaaattttyttttttttttgtagagacaagatctccctgtgttgcccaggctggtgtcaaactcctgggcacaaggatcctcttgccttggcctcccaatgtgctgggattacaggcatgagccaccgtgtctgacctaattaatactattattatctaatcacattgattttcagtgggggctttctatttcatgtgggggcttgcgaggggagggtaataagggtatggtgagaaatggataggaaatgtacctttatcgtagagggaaggaaacagtttttttggtctttcacctgtattgcgagtagcaaaacatgttcatgttttcagtctatgtgagagattgctaagcgagcagggtgttaaaatgtggtcatgtggaaagcaggttgtcattcttcctcacacgtgcacagcgtagctc

SEQ ID NO: 628793 - DNA, 592 bp, Homo sapiens
ctgaatgtactaaatgccacggaaatgcacactttaacrtggttaattttatgtcatgtgaattttacttcaactaaaaaaatagatgtttaacttcagtagaagtaaaacacgtctttcttcatcattaaaatcagtgaaataaagttatttctagccctatgttttattaacagagctattaatttgaaagccctctggaaatgagttttcttaagagctgcagaataataatatacagcaaattagagcacattaacagagcaggggtacggcagagagagctcttaaccgcagctagccgagcttcatggagtcaggtgggctgggagtttaccctccatataacctggtgggcctttttgctgtttgaaagcttggtttccttaaagtgagggtagtacaatctgttctgcttgtcttaaagacctattgtgaagctcatatcagagaaatagctggaagctatttgtaaatctaaaaattgagacaaaattgaatcattatcattatcggcaaaacaccgtaatttgagtgaaaagctccttcattgcagggtgcctggtaaagagcagaggtgatgttcacagcg

SEQ ID NO: 628794 - DNA, 592 bp, Homo sapiens
ctgaatgtactaaatgccacggaaatgcacactttaacgtggttaattttatgtcatgtgaattttacttcaactaaaaaaatagatgtttaacttcagtagaagtaaaacacgtctttcttcatcattaaaatcagtgaaataaagttatttctagccctatgttttattaacagagctattaatttgaaagccctctggaaatgagttttcttaagagctgcagaataataatatacagcaaattagagcacattaacagagcaggggtacggcagagagagctcttaaccgcagctagccgagcttcatggagtcaggtgggctgggagtttaccctccatataacctggtgggcctttttgctgtttgaaagcttggtttccttaaagtgagggtagtacaatctgttctgcttgtcttaaagacctattgtgaagctcatatcasagaaatagctggaagctatttgtaaatctaaaaattgagacaaaattgaatcattatcattatcggcaaaacaccgtaatttgagtgaaaagctccttcattgcagggtgcctggtaaagagcagaggtgatgttcacagcg

SEQ ID NO: 628795 - DNA, 592 bp, Homo sapiens
ctgaatgtactaaatgccacggaaatgcacactttaacgtggttaattttatgtcatgtgaattttacttcaactaaaaaaatagatgtttaacttcagtagaagtaaaacacgtctttcttcatcattaaaatcagtgaaataaagttatttctagccctatgttttattaacagagctattaatttgaaagccctctggaaatgagttttcttaagagctgcagaataataatatacagcaaattagagcacattaacagagcaggggtacggcagagagagctcttaaccgcagctagccgagcttcatggagtcaggtgggctgggagtttaccctccatataacctggtgggcctttttgctgtttgaaagcttggtttccttaaagtgagggtagtacaatctgttctgcttgtcttaaagacctattgtgaagctcatatcagagaaatagcyggaagctatttgtaaatctaaaaattgagacaaaattgaatcattatcattatcggcaaaacaccgtaatttgagtgaaaagctccttcattgcagggtgcctggtaaagagcagaggtgatgttcacagcg

SEQ ID NO: 628796 - DNA, 453 bp, Homo sapiens
aaaaatggaggaactcagcagaaagtataactgaagcccttgacagacggccctagttgagctagctctcctagttcttggggccaccccagctaaggccccagtcattgtgaagcagagatgagtgcactgcctaaatccttccccacagaagcatgaacataataaaatggttgctgactgactccacygactttgggggtggcttattatgcagcaatagataactagaacactgagagagcagaaagcataggggtcatagaaaaagattaaatttgattccaggctcttccacgtacttattgtgtgctcttgaccaccttaattaccatctttgagctcagtttcctcatctatccagtaggaataatcacacatacattgcaggattcttgtaaggaatatacaaagtgtatgcagacttgcagctgtgaagagcacttaataagt

SEQ ID NO: 628797 - DNA, 623 bp, Homo sapiens
cttgtcctcagtaagtactattgagtatttccattatcaatctgtcaattttcatggtatacactgcattgattagttgtttttctttgtgtttttcccaaaagtatgtcagctcagcaagagcaggagctgtgtctaccctgttcacctctgaacctccaatgcctaaaacagtgtctagcacattgtagaggctcagttaatattaactgaatgaatggatgcattcgattagcygccagtataattaaatcagactcaacaattaagcatccaagtataagaagaaaacatgaaattttagaatgagcactcagtgcagaggaaggaggccttgtacaaatcctctaacatcggctagccatgtgatctttggcaaataactttgcttctctgagtcttagtttgctcagcataaaatatctctaaagtccttcccagagataaaatggtatgggtatttggatttacttatcttgtataatgctacttgaggaaggacagttgcaatcagagaaagatgaagaggtagaagagaaacttttccaaagattctgaaggaggcttctgaggactttggaggactttgcaagtgatgactgttagtctaatatcttcatttt

SEQ ID NO: 628798 - DNA, 623 bp, Homo sapiens
cttgtcctcagtaagtactattgagtatttccattatcaatctgtcaattttcatggtatacactgcattgattagttgtttttctttgtgtttttcccaaaagtatgtcagctcagcaagagcaggagctgtgtctaccctgttcacctctgaacctccaatgcctaaaacagtgtctagcacattgtagaggctcagttaatattaactgaatgaatggatgcattcgattagccgccagtataattaaatcagactcaacaattaagcatccaagtataagaagaaaacatgaaattktagaatgagcactcagtgcagaggaaggaggccttgtacaaatcctctaacatcggctagccatgtgatctttggcaaataactttgcttctctgagtcttagtttgctcagcataaaatatctctaaagtccttcccagagataaaatggtatgggtatttggatttacttatcttgtataatgctacttgaggaaggacagttgcaatcagagaaagatgaagaggtagaagagaaacttttccaaagattctgaaggaggcttctgaggactttggaggactttgcaagtgatgactgttagtctaatatcttcatttt

SEQ ID NO: 628799 - DNA, 531 bp, Homo sapiens
actcagttgtaggaaattaacaaacaagttgcttgattaaaacaagtatagragattaacaaacaagctgcttgattaaaacaagtaaactttttatctggctcattctttgatctatttgactttagttggtttggttcatggagaccctggctaaggagcatactccaaactattgttattatcctcctgatagtcataatggtagtctccctgatatgctgtattctctcaaaagtttgaaatgtatccatgcagccatccatagaataccaaatagtctcttttgactggaacagcaaaaactcaaagaaatacatgatcttgtggatggaccctgtaacctataaatgacatgttgactggaaactcaaaatgatggtaactgagagtagtgctaaagccctaagtctgtcacacccacatctaggtgagaacctgaccaaaaggggggaattgttaaacaaaattatggcaggccatttttttggattgagttcatgcattaggccctaacaaagcagacctaaa

SEQ ID NO: 628800 - DNA, 531 bp, Homo sapiens
actcagttgtaggaaattaacaaacaagttgcttgattaaaacaagtataggagattaacaaacaagctgcttgattaaaacaagtaaactttttatctggctcattctttgatctatttgactttagttggtttggttcatggagaccctggctaaggagcatactccaaactattgttattatcctcctgatagtcataatggtagtctccctgatatgctgtattctctcaaaagtttgaaatgtatccatgcagccatccatagaataccaaatagtctcttttgactggaacagcaaaaactcaaagaaatacatgatcttgtggatggaccctgtaacctataaatgacatgttgactggaaactcaaaatgatggtaactgagagtagtgctaaagccctaagtctgtcacacccacatctaggtgagaacctgaccaaaaggggggaattgttaaacaaaattatggcaggccatttttttggattgagttcmtgcattaggccctaacaaagcagacctaaa

SEQ ID NO: 628801 - DNA, 610 bp, Homo sapiens
cctaggggagccgttggtgagaggcttagtcataaggacacagatattgattcttacctccattccctgagctcggcaaggacctggagctttagagaaaaagccttgatttattacctctatctttcgactgaaatctctccattaacaaggccgagctagttgaaaaaaaaaaaaacttaccgtgaaatatttttaatatacctcaaagtaaggtaattcaataatcatgtcattgttttgtctatccccactcctttctcttgctgaaatattttattttattttattgaaacggagcctcgctctgtcgccaggctggagtgcagtggcgcgatctcggctcagtgaaacctgcggaggtttcaagcgattctcctgcctcagcctcccgagtagctgggactacaggcatgtgccaccacgcccggctaatttttcgtgttttgtttttagtacagacggggttycacgtgttagccatgatggtctcaatctcctgacctcatgatccgcccgccttggcctcccgaagtgctgggattacaggcgtgagccacagcgcccagccttgctgaaatattttaaagcaaagcccagatatcatgtc

SEQ ID NO: 628802 - DNA, 648 bp, Homo sapiens
tggcacatgtatacctatgtgacaaacctgcatgttctgcacatgtatyccagaacttaaagtaaaatttaaaaaagaaaagagagagagaaaatacgaacaatgcctccaagaagtctcagattatgttaaatgaccaaacctaagaataattagcattcctgaggaagaagagaaatctaaaagtttggagaacatattttggggaataatcaaagaaaacttccccatccttgctagagacctagacatccaaatacaagaagctcaaagaacacctgggaagttcattgcaaaaagacaatcacctaggcacattgtcatcaggttatctaaagttaagacaaagaaaagaatcttaagagctgtgagacagaagcaccaggcaacctataaaggaaaacctatcagattagcagcagatttctcagcagaaaccctacaagctagaagggattggggtcctaccttcagcctccttaaacaaaacaattatcagccaagaattttgtatccagtgaaactaagctttgtaaatgaaggaaacatacagtctttttcagacaaacaaatgctgacagaatttgccactaccaagccagcattacaaaaactgctaaaagagctctaaaatttgaaataaatcct

SEQ ID NO: 628803 - DNA, 648 bp, Homo sapiens
tggcacatgtatacctatgtgacaaacctgcatgttctgcacatgtatcccagaacttaaagtaaaatttaaaaaagaaaagagagagagaaaataygaacaatgcctccaagaagtctcagattatgttaaatgaccaaacctaagaataattagcattcctgaggaagaagagaaatctaaaagtttggagaacatattttggggaataatcaaagaaaacttccccatccttgctagagacctagacatccaaatacaagaagctcaaagaacacctgggaagttcattgcaaaaagacaatcacctaggcacattgtcatcaggttatctaaagttaagacaaagaaaagaatcttaagagctgtgagacagaagcaccaggcaacctataaaggaaaacctatcagattagcagcagatttctcagcagaaaccctacaagctagaagggattggggtcctaccttcagcctccttaaacaaaacaattatcagccaagaattttgtatccagtgaaactaagctttgtaaatgaaggaaacatacagtctttttcagacaaacaaatgctgacagaatttgccactaccaagccagcattacaaaaactgctaaaagagctctaaaatttgaaataaatcct

SEQ ID NO: 628804 - DNA, 578 bp, Homo sapiens
tttggctcataatgtggaatagcagaatgttgttagcgcttctgtggtggggttggttgaaaggatattgtcttcatgctaggctctgaggtgttaaatgagaaaasggaacaaacaggaaaaccaggacctggtcagactcagcctataatcactgctgagaactggaaaaggaattttcagcaggacagtcctactctggggcattccctccaggctggacaggctgagagtcagaaatgctgggctattctagaggtaccactaatgggcctgcaaccattttatccttctctctgtccaatgagggagaagaactagataatctttcaggttccctctcgtttcataattcctgtgtctgtgattccaagtttttaatttcacatggaaaatatttgttgtaaaaccaagacagtatgtgattgtttaagtgggagccaaagagaggaaactggggagagggttgtgtcagaggatcaccaagtgtaatgagtgcaacaggagaatcagacagtaaggagtcaatgtgcactgcaacccctgctcagagctaaccacactctgaggagcagctc

SEQ ID NO: 628805 - DNA, 578 bp, Homo sapiens
tttggctcataatgtggaatagcagaatgttgttagcgcttctgtggtggggttggttgaaaggatattgtcttcatgctaggctctgaggtgttaaatgagaaaacggaacaaacaggaaaaccaggacctggtcagactcagcctataatcactgctgagaactggaaaaggaattttcagcagsacagtcctactctggggcattccctccaggctggacaggctgagagtcagaaatgctgggctattctagaggtaccactaatgggcctgcaaccattttatccttctctctgtccaatgagggagaagaactagataatctttcaggttccctctcgtttcataattcctgtgtctgtgattccaagtttttaatttcacatggaaaatatttgttgtaaaaccaagacagtatgtgattgtttaagtgggagccaaagagaggaaactggggagagggttgtgtcagaggatcaccaagtgtaatgagtgcaacaggagaatcagacagtaaggagtcaatgtgcactgcaacccctgctcagagctaaccacactctgaggagcagctc

SEQ ID NO: 628806 - DNA, 456 bp, Homo sapiens
tgaatgtcggatcctcaactaaygagatgcaagtccttgaacaatttatctctagtcctcaatttcctaaagtgtaaaatagggctaatattaccttttgtatatacttgctgtaaggataaaaaaagaaaatcttagcacagtgccactaggacgaactccatgaattatggctactatttctttctaaaatttcatttcaaatatttcagtatttctacacatagacataagtgtttcatgttgaaaagccacaatttcctaaatcaatcccctaatgctggatagttaagttactgccagtttttattatcacaaacatgattacaatggacatcttcatggcttagctttttcattcttttatcttatttatctggcttctctaaattcctaacggtgaaattactggtttttgcttttaaaagggtttttattagcatacaataatatcac

SEQ ID NO: 628807 - DNA, 456 bp, Homo sapiens
tgaatgtcggatcctcaactaacgagatgcaagtccttgaacaatttatctctagtcctcaatttcctaaagtgtaaaatagggctaatattaccttttgtatatacttgctgtaaggataaaaaaagaaaatcttagcacagtgccactaggacgaactccatgaattatggctactatttctttctaaaatttcatttcaaatatttcagtatttctacacatagacataagtgtttcatgttgaaaagccacaatttcctaaatcaatcccctaatgctggatagttaagttactgccagtttttattatcacaaacatgattacaatggacatcttcatggcttagctttttcattcttttatcttatttmtctggcttctctaaattcctaacggtgaaattactggtttttgcttttaaaagggtttttattagcatacaataatatcac

SEQ ID NO: 628808 - DNA, 596 bp, Homo sapiens
aaaggggtcaattctccaatacaacataacaatatttgtcatgtatgcacctaagaacagagtatcaaaataagctaggtaaaaaactaatagaacttaaaagacaaatagatcaatccaccattataattggagatttcaatgcccttctatcagaaatggacagatctattaggcagacaatcattaaagccaacagttgaacttaatggcactacccatcaattggatataattgacttctatagactacttcatccaacaacaacaacagaatatacattcttttcaagttcacatggaacagtcactaacagagaccacacactgggccataaaaaaaaccttaacaaatttaaaagratataaaccatacaatgtctgcttttagacaacaatgaaattaagctagaattcaataacagaaagataacttgaaaatctcaaaatacctagagattaaacaacacacttctataaaatacatgagtcaaggaagaaatctgaaatttaaaaatattttgaactaaataaaaatgaaaatacacctaatcaaaacttatgggatgaagcaaaagcagtgcttagagggaaat

SEQ ID NO: 628809 - DNA, 575 bp, Homo sapiens
cataattgccaaaactcgaaagaaaccaaaatgtcctttagtaagtcagtgggtaaataaactttgatacatccatacaatagaatattactcagtgctaaaaggaaatgagctatcaagccattaaaagacacagaggaaacttaaatgcgtattactaagtgaaagaagccaatatgaaaaggctacatactatatgattctgactatttgacattccactatggagacagtgaaaatatcagtggttgtcaaagggttaggagggagagaggaatgaataggcagagcacacaggacttttaggacagcgaaactattttgtataatactacactggtgaatacatgtcatcatgtattagtcaaaatccatagaatgtagaacaccaagagtgaatcctaatgtaaactatgaaccttggctgataatgatgtgtcaacttaggttcattgattacaataaatgtaccactctggtgtgggatgtggatagtggaggaggctatgcataggsacagtgggtatacaggaactctctgtactttctgctcaattctgctgtgaacctaaaac

SEQ ID NO: 628810 - DNA, 575 bp, Homo sapiens
cataattgccaaaactcgaaagaaaccaaaatgtcctttagtaagtcagtgggtaaataaactttgatacatccatacaatagaatattactcagtgctaaaaggaaatgagctatcaagccattaaaagacacagaggaaacttaaatgcgtattactaagtgaaagaagccaatatgaaaaggctacatactatatgattctgactatttgacattccactatggagacagtgaaaatatcagtggttgtcaaagggttaggagggagagaggaatgaataggcagagcacacaggacttttaggacagcgaaactattttgtataatactacactggtgaatacatgtcatcatgtattagtcaaaatccatagaatgtagaacaccaagagtgaatcctaatgtaaactatgaaccttggctgataatgatgtgtcaacttaggttcattgattacaataaatgtaccactctggtgtgggatgtggatagtggaggaggctatgcataggcacagtgggtatayaggaactctctgtactttctgctcaattctgctgtgaacctaaaac

SEQ ID NO: 628811 - DNA, 562 bp, Homo sapiens
ttgcaaaccaatacaataaattctccctcctcctccccaccttggaccacaggttgggaatgacaggtctacaaggaaggtgagtggcattttggatatggaagggatctggccttacccagacctggttctaactccagttctgtgatgaccgcaatgatgactgatgagttactgaaactcactatgtctcagttttattctttgtacatggggacggaaatactctaaaaggtttttagcaccaaatgacactgaatttattacatgtaatacaacaggtagttagtgttaacatttctgtttgctagaatcagtggttcgaccmcctggaccggcagcatcagcatcacctggaaactggttaaaaatgcaaattttcaagctgcaactcaggcacattgaatcctctggtggtgggcccagcaatctgtgttttaacagccctccaagtgattctgatgctcatcaaaatttgagaactgctgctctgaagtcatagttttcaactttctttttttctttataagcagaggaatcctttcttcaaagggatcttatt

SEQ ID NO: 628812 - DNA, 627 bp, Homo sapiens
ttaggtaatacattcctatcatcttttaatactcctcaagttcctcaaaacatttggaaaccctgatccagtggaaatagcacaggactagggaggaagaaacctaattttattgatgagaaacccaaagccctttaaagtgaatttcaggcagggctttcagtaatgcagagtggagaagataacaaatcctctttcccaaaaacaactggagaaaactgtccaaaccaacmattttagtcttctgggaatggacagaggtcaacaacaaactgggaaacatttattcatggaaccttgctgaactttgggtaagaacaaagttcctatctctgggtaagaacaatgggagtctgtgatgttcttgcttggggatgcctcataaccatagatctgttgtcacaatagtgttgccagggtagatctgcttgtgccagaaggcactgacttgatttagagtgaagggcatcgtcagtaaaatcagaaaattagaaacacacaagaagagcctacagttttgctagcctcagattgtggccagaaattcaacaggaagaccttgggaattaaatcagctctccacacatcactggttgactgagaggatatgcatgcacaagaagtcca

SEQ ID NO: 628813 - DNA, 582 bp, Homo sapiens
aataatgtaaacaaaaaatttactagatgggataaataacgaatttggtatcatggaataaggaatccrgtaacttgaaggcagatagaaattatcccatctggaaaacatagagaagaaatattgaagaaaaatgtctttaaaagatctgtggggcaacactaactgtcaatatgcatgtaatgaaaatcccagaggtcaaggagagagaaggaaggcagtaaaattatttgaagacataatggctgacaaatttgcggctttgataatatgcacattaatctggccggccacagtggctcacgcctgtaaacccagcattttgggaggcggaggtggaggcgggtggatcgcgaggtcaggagatcgagaccatactggctaacacggtgaaatcctgtctctattaaaaatacaaaaaattagctgggcgtggtggcgggcgcctgtagtcccagctgcttgggaggctgaggcaggagaatggcatgaacctgggaggcggagattgcagtgagctgagattgtgccaccgcactctagcctgggtaatggagcgagactctgtctcaaaaaaaaaaa

SEQ ID NO: 628814 - DNA, 582 bp, Homo sapiens
aataatgtaaacaaaaaatttactagatgggataaataacgaatttggtatcatggaataaggaatccggtaacttgaagrcagatagaaattatcccatctggaaaacatagagaagaaatattgaagaaaaatgtctttaaaagatctgtggggcaacactaactgtcaatatgcatgtaatgaaaatcccagaggtcaaggagagagaaggaaggcagtaaaattatttgaagacataatggctgacaaatttgcggctttgataatatgcacattaatctggccggccacagtggctcacgcctgtaaacccagcattttgggaggcggaggtggaggcgggtggatcgcgaggtcaggagatcgagaccatactggctaacacggtgaaatcctgtctctattaaaaatacaaaaaattagctgggcgtggtggcgggcgcctgtagtcccagctgcttgggaggctgaggcaggagaatggcatgaacctgggaggcggagattgcagtgagctgagattgtgccaccgcactctagcctgggtaatggagcgagactctgtctcaaaaaaaaaaa

SEQ ID NO: 628815 - DNA, 572 bp, Homo sapiens
aaaaaatttactagatgggataaataacgaatttggtatcatggaataaggaatccggtaacttgaaggcagatagaaattatcccatctggaaaacatagagaagaaatattgaagaaaaatgtctttaaaagatctgtggggcaacactaactgtcaatatgcatgtaatgaaaatcccagaggtcaaggagagagaaggaaggcagtaaaattatttgaagacataatggctgacaaatttgcggctttgataatatgcacattaatctggccggccacagtggctcacgcctgtaaacccagcattttgggaggcggaggtgsaggcgggtggatcgcgaggtcaggagatcgagaccatactggctaacacggtgaaatcctgtctctattaaaaatacaaaaaattagctgggcgtggtggcgggcgcctgtagtcccagctgcttgggaggctgaggcaggagaatggcatgaacctgggaggcggagattgcagtgagctgagattgtgccaccgcactctagcctgggtaatggagcgagactctgtctcaaaaaaaaaaaaa

SEQ ID NO: 628816 - DNA, 556 bp, Homo sapiens
acacaataatgtaaacaaaaaatttactagatgggataaataacgaatttggtatcatggaataaggaatccggtaacttgaaggcagatagaaattatcccatctggaaaacatagagaagaaatattgaagaaaaatgtctttaaaagatctgtggggcaacactaactgtcaatatgcatgtaatgaaaatcccagaggtcaaggagagagaaggaaggcagtaaaattatttgaagacataatggctgacaaatttgcggctttgataatatgcacattaatctggccggccacagtggctcacgcctgtaaacccagcattttgggaggcggaggtggaggcgggtggatcgcgaggtcaggagatcgagaccatactggctaacacggtgaaatcctgtctctattaaaaatacaaaaaattagctgggcgtggtggcrggcgcctgtagtcccagctgcttgggaggctgaggcaggagaatggcatgaacctgggaggcggagattgcagtgagctgagattgtgccaccgcactctagcctgggtaa

SEQ ID NO: 628817 - DNA, 549 bp, Homo sapiens
taagcacccagcatactgcagactgcttggtctctggccaaagtttaaaaaatctgacatggctcatcagtgaactctcagttctttccttctccaagcaggacatgggcttggctgtgcctgctgaagttgaagggctcatcagtgatatcagggaagttaggtttctctggagacaatgtgagtatcctgggttttccatcctctttcagagcaatgaaacctagtagagaccttgcattatacttcaatcagctgatcgtagccacttgaatttcctgtgggttctagttactcatgaaatgaattttagtactatcccatctaccccatacacatacacactgtcccctgtccccacagmcttcaccctctacctccaaatcttattctctgtagtccaacatatcaaaatctgttcctcagtgtcttagacttctccactagcaagatactacttgcggtttattactctgtttagactaagagtctgatgccagaagtcaaggcttctggactagcctacttctcactcattattatctagaa

SEQ ID NO: 628818 - DNA, 670 bp, Homo sapiens
acatatttatccatccaaccatctgtgcagccatctgtttaaccatccatttcaccatctctccattcatctacatttctagggtccactatgttacaactatgctgtgaaggatgtaggtgttaatgagacagttcttgcccccaaggaatttcatctcttatagaaatgacacaattcttggaatatattctcaaggacagtattaatgtaaggccctaaatgttgtcagagtgctagttaagtacttggctgtaaacttgagtccataagatcattcaacaatgcaaacagtaccatcaataaggtaaacaaaacagaattttatttcctggataatgaacttactcctgtctattttaatacagggtcaacttgattttttttaaaaaagttggaagtgtagcttcttcactttcagcaagacatattcttttctttagtgcaggcaaaaataaagagaatatgcagagatgtcttaaggaggtaggtattaccagcgtagaggctggtgttgatttrtttgggtcaggaagctctttagagatggcaaaaactctgagatgtttccagagtacagagtagactcagaacattttaaagttcatgtcacttattttcttccagagaggttaagtcaaataatctattgaaagcacattcaggattt

SEQ ID NO: 628819 - DNA, 610 bp, Homo sapiens
agatgttcagatggacatttggggtcaaagggcccattgtaacctttaccaggcattgcatttggtgttaacctgcgtaaaactagtaataagtggtattttgatttttatttattattcctttcatggacagctcccccaggaactccagtggaagggaagataagcagaacaggatttgggcattcctgggtctctggccatgaaaatgattcatatcctattctaaccttgctaatgctggggatagaaaatagaatagtgtatcagttagggttcagtgcaggaaaaagagccactttaggtattttatgcaagatgtgatttaatgcaggaaattagctgctagtaaaagtcattggaaaggtgggaggagaaaaatccttactccaagaataacacagcaactcctaacccctatggaagttaccatctctgaagctacccctggaaattttgagtagaagtagaagaactcaccaccccatagtcaagacctgcattgcacaatctgaatgacaccttcaaggatcagaaagccagattaagaaamtacaatccccactgcctctattgccactactttctacacaacgaagctggataatag

SEQ ID NO: 628820 - DNA, 625 bp, Homo sapiens
tcctctttccccaagtgaatcataagataargcatgatttttaaactacgtatgccttaccccctagattctggtatctgcccattggggtgttttgatatataaaacctcatggctacattctgaatttttactaagcatctggcatgttctgtagtcttttgcctctaactaaagcctcaaggctttattacctttaaaaaatgcttgcagaattaagctaataaagacattgtctgccttatttgtggtagtggcagtttttctcccctccagttgtatctgaataaggctggctcagatttcaatgccaagtagtttgccacacaacttttgttgtatggttccatgcagtttgggcctagcagccacagaaaacactgtggaatattaagacaactccttggaagagactagaagggagttcaggccccttctgccaggagtctccaatatatttgggttttctggctgcctggccagtattggtgcttttcagaagagcagtgtttccttcatgaatgaaacccatttatcatgacacactcagtggacagagttagctcccaggggacagtcgttctcccagcctctgacattttcccagtgtgacagtgaataccac

SEQ ID NO: 628821 - DNA, 575 bp, Homo sapiens
tttcccagtttttctccattataagcagcatggcattgaccatactggtacctgccttcctgggaacttgcaagtcattctgcaggatagagacmaagaagaacaattgctaggtgggaggcaatgtgaatttacaagtttttttagataactccaaattgtcctccacagaaaggctttttcaattcatatcctcaccaacagtgcacaaggtatataccttttgctactcctcaggaaaacctgctgttattaatcttcttacattttgtgctaatctcctgtgtgaaaaatgtcttgtaattattttagtttgtttttctctaattgctagtgaggctgtgcatcttttcacatcttttgacactggctatttgtctttcttctgtgaattacctactcatatcttcttttatttctatttggggctatttgtctttgtcttgttgatttataggacttctttacatattccacatgtttatgatttgttacgtgtgctgcagatatttcctcccagtctataatttcttttatttttagtttatggagccttctaccatttaaaagcttga

SEQ ID NO: 628822 - DNA, 575 bp, Homo sapiens
tttcccagtttttctccattataagcagcatggcattgaccatactggtacctgccttcctgggaacttgcaagtcattctgcaggatagagacaaagaagwacaattgctaggtgggaggcaatgtgaatttacaagtttttttagataactccaaattgtcctccacagaaaggctttttcaattcatatcctcaccaacagtgcacaaggtatataccttttgctactcctcaggaaaacctgctgttattaatcttcttacattttgtgctaatctcctgtgtgaaaaatgtcttgtaattattttagtttgtttttctctaattgctagtgaggctgtgcatcttttcacatcttttgacactggctatttgtctttcttctgtgaattacctactcatatcttcttttatttctatttggggctatttgtctttgtcttgttgatttataggacttctttacatattccacatgtttatgatttgttacgtgtgctgcagatatttcctcccagtctataatttcttttatttttagtttatggagccttctaccatttaaaagcttga

SEQ ID NO: 628823 - DNA, 585 bp, Homo sapiens
tgattttttttttttttttttagacagatgcatttgcatcatgttggcctgactagtcttgaactcctgacctcaagtgattcacctgcctcggcctcccaaagtgctgggattacaggtgtgagccaccrtggtgggcccctatacttattttatcttgatagcaaacacaaggtttctagattagtgatcagaccaattatttacctacagcagtaacattaatggttctccatgctccacttacccctttgtggtgatgtgatgagggcagatattccccttgcatgtacaaagggagtcagtccttttggagggaaacccagaaattatgaacctcagagtttatgaaggaactgctgccctttcctctgcagagaggaaaagaaaccattgctctctaatgtaaaccaatcctctataggaagagaaggggaaggtccctaggtgtccacatcctttgaaggtaaataaataatagtttttgggaaaataaaccttcaaatctctctggggtaataaacaatctcgaaattctaaggcttgtttaccattcactcatacttggccaggaatttttgctca

SEQ ID NO: 628824 - DNA, 580 bp, Homo sapiens
tcaggtccctttcctctcttgccctggagtgaactgcatgccccatattctgggaggagagaattcagagcaggtgtttcctcctctgaaaggcaaaacattcctctagcacttcatcttttctctgccatctctgacatttgctcaccactccccagaaatgtattccctgtggagtaaaatctagagttcagctgaaggacaggaagaaaaaccataaaacccttacatatcaaactgtctgacctgctgatgtaattcatttgcaaggacactataagattgttatacttagatagagcttgcgtttggcaccggcttyggggaattgctttctctttttctgcacatagcaaggatcatccctgtccttatcctggggtgtgggacctaccttccttaacccctattacctagtttcctggccacttggggcttccttcttataacttcttgtaatgactgtattcatactcacataacttttctgtatagctttgaaaacagatctccccatccatccttcctgccccttcatgcctttcctaagctctccccaccaaaacacacaatttgaggg

SEQ ID NO: 628825 - DNA, 519 bp, Homo sapiens
agatctggtggcagtgggttagagaggagaactgccaccacttttaacaagtatgcaatttatatagcattttcacttagtatcctctccctagcaacctccacctggtaaccttcattcaacccaaaacaaagggccttgagcccctgtatgagctgcattccacaggatgggcagagggcatgtgtcggtrgtggtgggggtttggatgttcctcatagataaggaatgaatctctgggttggtcactcccggattccttatcttggaactctaaacacattcttcttagaccatagggtcattcgcagggtatgcttacattaaggtattgctgtcacttatgtctgccatacactagtaatatgttgctacttaaatgtaaatgaaggaaaattttcctagccagagcaatcagacaaaagaaagaaataaagggcatccaaatcagtaaagaggaaattaaactgttgctgttggctgatgagatgatcatataccaagaaaaccctaaagatt

SEQ ID NO: 628826 - DNA, 465 bp, Homo sapiens
aatgaaaacaaagataaatagatgggacccaattaaactaaaaagcttctgcatagcaaaagagataatcagtaaacagacaacccacagaggggragaaaatatttgcaaactatgcatctgacaaaggactaatatccagaatctacaatgaactcaaacaaatcagcaagaaaaaaacaaataatcccatcaaaaagtgggctaaggacatgaacagacaattctcaaaagaagatatacaaatggccaacaaacatatgaaatgatgctcaacatcgctaattatcagggaaatgcaaatgaaagccacaatgtgataccaccttactcctgcaaaaatggtcataatcaaaaaatcaaaaaataacagatgttagtgtgaatgtggtgaaaaggaaacacttttacactgttggtgggaatgtaaactagtacaaccactatggaaaacagtatggagat

SEQ ID NO: 628827 - DNA, 542 bp, Homo sapiens
aatcaaaaaataacagatgttagtgtgaatgtggtgaaaaggaaacacttttacactgttggtgggaatgtaaactagtacaaccactatggaaaacagtatggagatttcttaaagaactaaaaatagaactaccatttgatccagcaatcccactactaggtatctacacagaggaaaataagtcatatgaaaaacatgcttgcacatacatatgtataacagcacaatttgcaattgcaaaaatatggaaccagcctaaatgcccatcaaccaatgagtggacaaagaaaatgtgagatatatatatatatatatatatatatatatawaactcagagataaaaaggaatgaaataatggcatttgcaggaatctgtataaagttggagaccattattttaagtgaagtaactcaggagtggaaagccaaacattttatgttctcactcataagtgggagctaagttatgaggatgcaaaggcataagaattatacaatggactgtagtgactcagagtaaaggatgggagaggggtga

SEQ ID NO: 628828 - DNA, 503 bp, Homo sapiens
gttagtgtgaatgtggtgaaaaggaaacacttttacactgttggtgggaatgtaaactagtacaaccactatggaaaacagtatggagatttcttaaagaactaaaaatagaactaccatttgatccagcaatcccactactaggtatctacacagaggaaaataagtcatatgaaaaacatgcttgcacatacatatgtataacagcacaatttgcaattgcaaaaatatggaaccagcctaaatgcccatcaaccaatgagtggacaaagaaaatgtgagatatatatatatatatatatatatatatataaaactcagagataaaaaggaatgaaataatggcatttgcaggaatctgtataaagttggagaccattattttaagtgaagtaactcaggagtggaaagccaaacattttatgttctcactcataagtgggagctaagttaygaggatgcaaaggcataagaattatacaatggactgtagtgactcagag

SEQ ID NO: 628829 - DNA, 527 bp, Homo sapiens
ttcagggaaaccagcaaataataacgtagtatctagaagctagcaagaaggggaaccattaccaccctaggcctgaagaggtaagggttaccagaagagggggagtttagctgtgtggagacggccatmtgataggagctatggctttcactggggagatgcagtgaacccactgacacccagctgggaagaaattagggcaataaatatcccaatctcttattctttgatttcctcccattggccaaaccctgccagaagctagaggacaagggagcccattggtgcagtccacgctggtcaggctgctggggcacagagcaggatctagtggggaaaacaagatttagggcacagtcaatttctttaaaatctagaaataattaaataaataaatcaagtccctaaacctctgtgacagcaagaaatccaaccacccttctaaaaaagtactgccttccaaaaaaggattcctgaagaagacgtaggcttcctgataaagatacacatcttttgttagcacttgc

SEQ ID NO: 628830 - DNA, 639 bp, Homo sapiens
gaatcagccaagaatcagtcaacatttaagcaaagctgctaacatgaaagacacagataaaaagaaggttttaaaacacacagaagaaaggaaatgcaaaagaaacaataaagacaatagaaagaacaggaaaaaagtccaatatataattaatactttcaaagagatgagaagataccrtacccatataaccagaatatttactattaaaaaataaagtatatatgtggaatcaatcagtggggctgaagaagtaggtattcagagaataaaagttcttttttaaaatgccaagaagacaaaacaattgtcaagaaaaatagacactattaggatgtatatttcttagagaagaaatctataacttaggaagaaaattgtagaccaccatgacatttaatttgaagaattcataagtattcttcctacatagagtatacagtaccattaaaataacacaaaaataaattttatatgttttgtaaggacacatgcaaataaaaagatgtatataaaaattagatatacattagacttagaatgtctatgagcaggaaaggaatggggtaggaacagcataaaaaggatatgaatgaaaaccatcagcataaacatccttgggagagaaatagcagatct

SEQ ID NO: 628831 - DNA, 442 bp, Homo sapiens
cagaatatttactattaaaaaataaagtatatatgtggaatcaatcagtggggctgaagaagtaggtattcagagaataaaagttcttttttaaaatgccaagaagacaaaacaattgtcaagaaaaatagacactattaggatgtatatttcttagagaagaaatctataacttaggaagaaaattgtagaccaccatgacatttaatttgaagaattcataagtattcttcctacatagagtatacagtaccattaaaataacacaaaaataaattttatatgttttgtaaggacacatgcaaataaaaagatgtatataaaaattagatatacattagacttagaatgtctaygagcaggaaaggaatggggtaggaacagcataaaaaggatatgaatgaaaaccatcagcataaacatccttgggagagaaatagca

SEQ ID NO: 628832 - DNA, 621 bp, Homo sapiens
actgagcagttcatttctagtctacttggtgtcagatggggaggccagggccaaaggttcctcttccaaaatatcttcttcattcatgtgtctggcactttggtgttccctgccccaacccctacacacagacacaccccacacagtgtattgtagattcatttttactctattgctacttctgtaaactactttgatggtaaataacttcatatatttaaagtttgttatttctataatctctttagcaattcagtctgctaacatggcacctaggaaatattcatggcctcgtacttgttctgggtccataatttagtggacctgagaggcttcacagagaactaaatatatacaaatcttggctgagagcasactcatgttcttctgaaatcggaagccctgtagccatattcagtgcagtacacaattacaatgtgctacataaatgtggggactaacaaacaattgcagactggattttgaatctacatagaaaaactcccttcttttcaacttcagcttgctgcaaaagttttcttatacttaagcctcagaggtgttgaggttttgtttgttttgcagaagaaagaggcacaattagaggtgcctcacaggaag

SEQ ID NO: 628833 - DNA, 566 bp, Homo sapiens
aggctaaacatatctatttatttggattcatttatttgtcaggctaaacatatactacattatccccagtgtctgaatgctgtgtatgtgaaaagcccgacacacatactcttttcacattgcacattcagataacccagtctttccttttcaaggacaaccattccctgctgagactggcacactcaggatgctttctgcttgaggcctgcatttccatacctttcttttagctaactctggttcgttaaagaattcctgaacttgagtgtacctttctcaaataataacaacgagtacgactattttactacatactaggtatgtctgtaagcactttcctatgagctcatgtcaatcatgttttccagtatgacctcaatacagagtgtatgacagatagtaggcactcaataaataygtatttactagttgggttatgctttagttcatgtaactctcatgtccacattataaaataagtattataattatcagtgtttcataggtggggtgcagataggtaaagtcaattacttaatggccaatattttgctaaggtcaat

SEQ ID NO: 628834 - DNA, 566 bp, Homo sapiens
aggctaaacatatctatttatttggattcatttatttgtcaggctaaacatatactacattatccccagtgtctgaatgctgtgtatgtgaaaagcccgacacacatactcttttcacattgcacattcagataacccagtctttccttttcaaggacaaccattccctgctgagactggcacactcaggatgctttctgcttgaggcctgcatttccatacctttcttttagctaactctggttcgttaaagaattcctgaacttgagtgtacctttctcaaataataacaacgagtacgactattttactacatactaggtatgtctgtaagcactttcctatgagctcatgtcaatcatgttttccagtatgacctcaatacagagtgtatgacagatagtaggcactcaataaatatgtatttactagttgggttatgctttagttcatgtaactctcatgtccacattataaaakaagtattataattatcagtgtttcataggtggggtgcagataggtaaagtcaattacttaatggccaatattttgctaaggtcaat

SEQ ID NO: 628835 - DNA, 590 bp, Homo sapiens
cattttacttcccaacatagtttttaggaacacattatggtgaaaaatggaaacttgctgcttatattagagagtttacttctctgctgatgccctaattttacccaagaagggaattattgaaaattcttagcacaggcagagtaaattctcaaaaatatctaatagcatacacagtcccccttggaacattgccaacattttttatagcacaatgttgcctttaaatatgctttttaattttccaattatacatacccatagggaatgcctgtagcagacacttcctttagaggaaaggtgacaagatctctttattctaaactaaattatgcgatctcaacaaatttgaaattatttgcttggttttaggaattcctgtgggaataagctagaatagccaatgtgggagtcattctccaaaaaattgatatcctgcacatagtttccttataaaaccttcagaaaaaggaaagtaaaaagtgttgacatctaattacctttgaaatatagagaaaaaaatacaggaatatgattaatttgtcwggaataaataaaaaaatttggaaatataatttacctctattgca

SEQ ID NO: 628836 - DNA, 459 bp, Homo sapiens
aatgacttccttgtgtcattatattctgaagtggcagtttcctgtgattcttattcatactgattttttgaacactagcaatgacttccctgatccttgctttatcactcatcccaaaggtttggtaactttccaatctctgtattacatccctttcagtttgaaatctcaagcatattctgtttttctaaccaacctctgactgatatgcagaatttcaacagctgcccaaggtctcacagttaatcagatttgaatccagatctgtccagcttttgactatatgaattcttgagttctgtatctttcttcagacgattgtgggttgctttacattcctaaatggwgaatagcatgtttggagttctgtagggggaaaagattatacctctatatctaaatctaatctatgtagtacttatatcactttgtgtttccttagactgatttggagaagtc

SEQ ID NO: 628837 - DNA, 551 bp, Homo sapiens
acattacccaacttcaaactattacaaagctacagtaacaaaaagagcatggtactggtacaaaaacagacacatagaccaatgaaacagaatagagaatttagaaataaagcttcacacctgcagccatgtgatactcaacaaagtcaacaaaaataaacaatgaggaagggactccctattcaataaatggtggtgggatagctggctagccataggcagaagaatgaaacaggacccctacctttcactatatacaaaaattaactcagcatggataaatatttaaatataacacctaaactataataattctaaaagaaaatgtaagaaaaaccattctggacaccagtcttgggaaacaatttatgactaagtcctcaaaagtaattgcgatgaaacaaaagttggcatgtgggatgtaattaaactaaggagcttctgcacagcaaaagaaactatcaacagaatatataggcaacytagtggatgagagaaagtattcagaaactatgcatctaacaatagtctaatatccaacaagaaaaata

SEQ ID NO: 628838 - DNA, 577 bp, Homo sapiens
atgataaatgtttgaggtgatgaatatgctaattactctggtttgaccattacacattatatgtaccaaaatatcactatgtactctgtgaatatttacaattatcatgtgtcaatttaaaaaatagaatgaaaacatagttttgattatcatatactcttgcctctacycatagcttaaaatctctgttggttacaaaatatggtttgaattcattatcacctaacacatgtgacccagccaaaccttcctatactattcttgcatatactgttactctcaatatctgcctccaccaatcttacttttaggctgtactccaacacttgccatgctgtaaacctaaagataatgtctcttctctgtggttttacacatactgttttctatctggactgtcctttctctcttcttctgcatcacaattaccttaaaatgtcatagtgatgaagtgtggatggtttagacagtgttgggtctgaatgccagtttgcatgctacttcccagctgagtgagtttgttgtacaggttacatcattctccccatctcacccaaaacttgtttttgtattctgc

SEQ ID NO: 628839 - DNA, 483 bp, Homo sapiens
tcttaacttttaaggatctatgatgtcttctgctgataaaatgttaatctgaagttcagaaattattttcggccaggcatggtggctcacacctataatctcagcactttgggaggccgaggcgggctgatcaccagaggtcaggagttcgagaccagcctgaccagcatggtgaaaccccatctctactaaaaatacaaaagtcagaygggtgtgatggtgggcacctgttaacccaggtactcgggaggctgaggcaggagaatcacttgaaactgggaggcggagactgcagtgagccaagattgtgccattgcactccagcctgggcgacagagtgagactccgtctcaaaaaaaaaaaaaagattattttcattttacttttttctttggtttaagttaaagtaaattcagtacttaagaaaatagtatatttagattgatgccatttttctgaagttacttcttgttactgatctag

SEQ ID NO: 628840 - DNA, 517 bp, Homo sapiens
acaacctaggtacctctaatttttgctacgagagtactggaatagaagatgttttaaggtatatctttgtgtatactgagcatgttgtccaattacttccttaggaaaaacgtctagaggtaaactactgagtcatactgtaataacattttaaaggctattcatctatttctaagattaactagaagggtatacaaattggtaattttcccaaaagcagaggatgtctgcttcacaaacccttaccaattctgaataacattactaatcttagtatttcagtccaataggaaaaaaacaaaacaaatcattgcttattgtctttttatgctttgattactataaaggctatagaatttttcatagaattactatttttgtatatttctagccttttctattgtcatccttatacttttgctattaatttgcatcatttttaartagtcacattattgctcctttgtcatctgtttccaaatgtttataggtatttatttttcttgtacaattaact

SEQ ID NO: 628841 - DNA, 572 bp, Homo sapiens
ggggatgtaaatcccagtataaagacaggacccttaaagtgctacgcccacagaaaatgaggagctcgataaaatgtgtctacatgtcttargatgccagcaataacattttctttattttgggttctgggtgagtaaaaaaaaaaaaattaccatgagaaatcaaaacctcaagcttaagtaatctgagatgtagagtccaatttacagtgttcatgagtgatgagaatccaagcctacttcactgaagtatgtagcagaggaaaatgaaaaactgctctgaaccaatgtcatatgaaattcctacaagagaaaaaaaacgacatacaagaatttcttaatcaaaaattacaaaatgtgctagaaaatagttatcagacagaataaatcagattagtagagaacctagaaggacaaataataatctgaacaagcttataaaataatttaaatggctaaagagataaaagaaaaaatgaaaatcaaagaataagaaacaacaaaaaatagaaagtctaagaaacaaaagaacttatagaaatgaaataaatatttattgagatttcaaatcc

SEQ ID NO: 628842 - DNA, 572 bp, Homo sapiens
ggggatgtaaatcccagtataaagacaggacccttaaagtgctacgcccacagaaaatgaggagctcgataaaatgtgtctacatgtcttaggatgccagcaataacattttytttattttgggttctgggtgagtaaaaaaaaaaaaattaccatgagaaatcaaaacctcaagcttaagtaatctgagatgtagagtccaatttacagtgttcatgagtgatgagaatccaagcctacttcactgaagtatgtagcagaggaaaatgaaaaactgctctgaaccaatgtcatatgaaattcctacaagagaaaaaaaacgacatacaagaatttcttaatcaaaaattacaaaatgtgctagaaaatagttatcagacagaataaatcagattagtagagaacctagaaggacaaataataatctgaacaagcttataaaataatttaaatggctaaagagataaaagaaaaaatgaaaatcaaagaataagaaacaacaaaaaatagaaagtctaagaaacaaaagaacttatagaaatgaaataaatatttattgagatttcaaatcc

SEQ ID NO: 628843 - DNA, 600 bp, Homo sapiens
agagctgaggaaataacccaagatgtagcactgagtcataaagtgatagaaatgtaaaataggttaaaagattcgcagaacaaaaggagaaggtccaacatgtgtctattaagagtatgaggaaaggaagaggtgggagagcaatattcaaaaaggtaaggtctgtgaaatttttcaagttaataaaatacatgtaacataagattgcataagctcaagtcytgagcaaaataaaaaaaaaactacatgtatatttatcatagaaaaatagcagaatatcaaagacattggaaataaaaacataaaaggagaagaaagagaaaaagatagattaccctgcaaaggagtaattaaagttataccaaagttttcaatagcaagatggagaccagaaaagagatgaagaaactgaggcacagaaaagtcacacatggtccttaaagacaggtagccagtatgttgcagagtcagattttaagtaaggtgatctgactccaaagcccacattcttcaacaacacagaaagcttttctgcataacattctggacagttgtctttgactcacctttacttaaaaaaaataaaagaaaatgaaaaaa

SEQ ID NO: 628844 - DNA, 540 bp, Homo sapiens
cgcattcatactgtgcatgaggcatggatattgtcaacagatctataacaatgctgcatgagaatctatctgagccttgacagcatctaaaaccttaagcctttggtcatgacagtgttttcacctgtattacgaaggaatgctcagtcaagcctgagaaaacaatgagccaggtgaagacaacctgcaggacataagcaaacactcacagaacctgcctcagcctgagataagtaatgactggaaatgctcttccctagcaggaagcccatagagcaaggttaacagagcccttggtaagccccaagacctaagaytcctgggttaagggattttacaaggatcatattgtaaagtcctgacgggcttcctcactttgttggctttgatgggtcagtaggcaataaaggtttactctgagatctgatgattttggccacaggacaaaagaacagccttgagtctctaccctaaattgatatgcagtctgagtcactgagataaatgcatgcttcctccaccccagcctctagactgaaa

SEQ ID NO: 628845 - DNA, 442 bp, Homo sapiens
tctccatgcatcttgagactcttccttaggctgacctgatttttaatctttcctcctggggcctctcctatctcttcctcccctgtactgtgtcctgcccaaatagagactatgcttcttttaacatccacatgcmtctgttacatcttccctgcttgtgatgccgaactgtgttgcaactacagtctattttccttttccgacacacatggtccaaactttatagccaataatgagcttcaaaaactttgtaactcaaagaaaccataaaacaccgctccacaaatttctcaggcaagatccatggttggcgaactgatatattcactttgcccaacagggatttaacttctgatcctctcttttcctgactgtggaaagagcaagactacatggcaggaatgagcctccagagagggcccggacaaacaccagatgaatt

SEQ ID NO: 628846 - DNA, 530 bp, Homo sapiens
ctgccacttataggtgagaacatgtagtatttggttttctctttcgtttagctcatttaggatagtggcctccagctctatccacgttctgacaaaggtatgatcttgctcttttatatggctgcatatattccatggygtatatgtaacacattttctttatccagtctatcattgaaggacatttaggttgattccatgtctttgctactgtgaatagtactgtgatgaacatgcatgtgcatgtgtctttatggtacaataatttatattcctttggttatatacccagtaatgggattgctaggtcaaacggtagttctgtttttagctctttgagaaattgccacactgctacattcccaccagcagtgtataagcattcccttttctctgcaacctcaccaataagtgttattttttgactctttagtaataaccattctgactgatgtgagatggatcttattatggttttgatgtgcatttctctaatgattagagatggtgagcattttttcatatgcttg

SEQ ID NO: 628847 - DNA, 590 bp, Homo sapiens
acattgttagaggtaaccaagttaagattttaccattgacaagttttcaaagttcatgtgcttattcrctatgccagtgtgcctcaaatcaggcatccatggacctccaaggtcaattgtctttttctcaagggtctgcaagtctaggttttttttccccctcattttggtaaatgcacagcctgaggtttagctggatgagcacctcgcagttgattactgacaggtgattccagtattcatatttgcattagttttacaaccaagtacacaccaagtgaaggccaaatgaggttggctcttgctgatggatgacaggtttccaacagtttgaacagagaaaaagctgggaggcctgaatcatcccatgacaaatattagtagagtcatgccaattgtaaataatctgcacagtagctatgtctcatgaaagttatcttcaactctaaaaatctataatcctgttggattaccatgccatttagggtcaggcaggaaatggatggcataagaaaggagaagaggacagagaatttaacagacttttacaaaagtgtaagcaaggataaaaaaaaatccaagtgagatgg

SEQ ID NO: 628848 - DNA, 621 bp, Homo sapiens
ttggttctttcatcttccaggatatgatctgagaggttggcatttcttccttggtccttgagataaaaggattctcaaccagaaaactaaaggataagcaagaaaagagatctttgggcatctgtgacaagattctttacccatctttggaaacttataaagaaaatattagaacaaagaagaatgaggaaggcacaaaacagttccagaacttctaagcaaccaaaagtaactgaaaagtcaactgaaaatagtagtagctattttttctcatattgtaagaatccagttagctcagaccaaaggaaactccttttaaatttagagcccacagttgaaacctgtgaggtcaaccaactgaaagtaaatacatgattaaataagaatttccacagttggaattgtgtgcaaagatgaatttgacatagtacctttcaaaaggrcctttaagacagaaaagcaacacaaactctccttacagggttgatgacagttagacagaaactgtatgaaactcagcacaatgagaaaagttcattaaaggaaaatcgagaaaatgattagtgttgactgtgagccttgaataatgggcagaattatatccagtggaaatagtagaaa

SEQ ID NO: 628849 - DNA, 450 bp, Homo sapiens
ctctttggtatttgttttagagtgattctgctaaagatgaattacttcagatttggttttctgaacgtaaatatttgaaggatattttgttcaatatagaatttctgattagtaattattttctttcagaaatttaaagatgccacttcattattttctaactcctattgtttctgttgaatattttgctgtaagtcttattgcaactcctataagcrtagtgtgtcatttttattcaggtttcttttacaatcgtatgtatttggtttttagcagttttactaggatgtacctaggtgtggtgattcttcatatttattttgcttggattttcagagcttcttttatctgtaggttgatctagtttctgtttcaccaagctcagcaaaaaattgtagtacatacatagaatggaatattagtctgcctttaaaaagaaggaaatcctga

SEQ ID NO: 628850 - DNA, 451 bp, Homo sapiens
gtggttggtattttttccctgttgttcaaactctgctatgtaattctgggctactatttgcacctcacactatatcatttgattttgaaataaaataaatgaacctcagactatatcagtttcataaagaagctgtttgctgttttagctaatgtagctggaaagtcattgctggatctgggtttcaagtgttgcccagcwctcccctccgcttcctctcgtctctaccctttcttttccactccctctttcatatattgactctcttttcctcagtatcaacttcattttcttggccttttttaactctgtggcaggaatgatagtgaccagaaactcaagattgagatgatatttatagcttttaactccataacaagagtgatgctttctctttatccacgtgtcaagccatagagatgatctgactgggtttcagttatgtaatcac

SEQ ID NO: 628851 - DNA, 371 bp, Homo sapiens
aagttatttgtggacatttgttttcattctttttgggagaatacctaggtgtgaaaatgctggatcatagggtggrtgtatgtttgacttaataagaaacaaactgtttttcaaggtggttgtactattttacagtttcagtgtagtgtatgagagttctgattgctccaggtcccccagtgattgacttgtgagtatttttgcttttttagtgagtgtgtactggcatcttctgatggttttaacttgcatttttctgagagctaattatattgaatgctttattcatgggcttgtgaccatttctatgcttttccttgggaggttgttttctgttcaagtttttctcatttttatagagttgtttgtct

SEQ ID NO: 628852 - DNA, 569 bp, Homo sapiens
cagccctttccatcacaggcccagaggtctaggagcaaagaatggtgtcagggaccaggctctggaccctgttgctctgtgcaggcttgcacactgctccctgcatcccttgctgcttgagctccagccatgactcaaagggacccagatacagttcaggctgctactctggagggcacaagccctacgctgtggtggttttcatgtggtgttaattcttcaggccttcagaatgcaagagttaaaggaggcttggcagtttccacctagaattcagagtatgtatgggaaaggctgggtgcccaggaagaagcctgctgtaggtttggtgccactgcaaagacattctactgcagaagtgccaaggagaaatatggggttggagcccccrcaaagagtctccactggggcactgcccagtggagctgtgggaagagtgccatcaccttccagaccccagaatagtagagccatttattccagtaaacccagtaaaatatcataagtcagaaatgcattaaatatgcttccctactgaacatgctttgtaaaatttcagtccttagcaa

SEQ ID NO: 628853 - DNA, 627 bp, Homo sapiens
cctttgttacagctagtaatgttctaagtgatgtgctgcttcagatttgtggaggcctttcaaycaaatccagggcatgctgttttgtctatgggttctctctctctggtcttgcatagggtggaaagtcattgcaactctttcatcaaattgaattaaattgcttaagtctttgtaacctatatgaactcagatatccttgtgcaattatagtgttcaatattcaggactcacaataaggaaagtacctggtttgaacaggtgctaggtcatgagggagcagtgcaggcgtgaagctgaaaccccccatttctagtctttgttctgctgctagctcactctgtgaccctggtcaaggtcttttacttcttggagaactgaattcctcttatgtaaagtggggaaggcggtgcaggtgatctctgaatataatattttatagctctggaattgcattgtaggagtgaagttcctctcatatggtctgcgagaactttatactctgatttcattaataataagtctgaatttctgtagttctgagttctggaggtaacacaattgtctgaaaataatttatgtacttagatttcgatttggggaaatatattaggaaaaatgtttaat

SEQ ID NO: 628854 - DNA, 627 bp, Homo sapiens
cctttgttacagctagtaatgttctaagtgatgtgctgcttcagatttgtggaggcctttcaaccaaatccagggcatgctgttttgtctatgggttctctctctctggtcttgcatagggtggaaagtcattgcaactctttcatcaaattgaattaaattgcttaagtctttgtaacctatatgaactcagatatccttgtgcaattatagtgttcaatattcaggactcacaataaggaaagtacctggtttgaacaggtgctaggtcatgagggagcagtgcaggcgtgaagctgaaaccccccatttctagtctttgttctgctgctagctcactctgtgaccctggtcaaggtcttttacttcttggagaactgaattcctcttatgtaaagtggggaaggyggtgcaggtgatctctgaatataatattttatagctctggaattgcattgtaggagtgaagttcctctcatatggtctgcgagaactttatactctgatttcattaataataagtctgaatttctgtagttctgagttctggaggtaacacaattgtctgaaaataatttatgtacttagatttcgatttggggaaatatattaggaaaaatgtttaat

SEQ ID NO: 628855 - DNA, 562 bp, Homo sapiens
gccacctgactcttgcaagaatggccataataaaataaataaataaataaataaataattaaaaaacaatagatgttgacgtggatttggtgaaaagggaacacttttacactgctggtgggaatgtaaactactataaccgctacagaaaacagtgtggagattccttaaagaactaaaagtggaactaccatttgatccagyaatcccactactggatatctacccgaaggaaaagaggtcattctatgacataagacgcttaagacactgcatgtgcatgtttatagcagcacaattcacagttgcaaaaacatagaaccagcctaaatgcccataacagcaagtggataaagaaaatgtgattaatatatataaatatacaccatggaataccactcagccataaaaaaggaatgaaataatggcatttgcagcaacctggatggagttggagactattattctaagtgaagtaactcaggaatggaaaaccgaacattgtatattctcactcataagtgggagctaagatatgaggatgcaaaggcataagcatgat

SEQ ID NO: 628856 - DNA, 586 bp, Homo sapiens
taaagagaaccactgttccattacacaaccaagaaaaacagaaacattttctggcttgggcagtacctgaatggggaattctctgttcctgctgccttacttcttcccacagatgaatgcataagtaaaggcctactggtttctatgttttagatacttatytattattttagaaatagaagtgttctattagcaaaatgatggagaccaccgttgctgagttgctgcctggcacatataaagaaaccaagagctgcttccttggttgactgctcataaaaactgacatattggatactttcaaccttgacaattaattaaatacatttagaggggtgccagattaaaagcgagccctgcaaatggtttggcatagatgaaaggaccctgcaagctagacccataagttccactgggcttcaggttaacagtgcctgggacccttgctctccctcctggtttgaaaaatgccctcagagcttctgtctttggtaatggctgtgcaaagagactttgcgtttcagagcaacctcttcttgagaggtatccagaaatagcacttctcttgtctctctgtggttttgtc

SEQ ID NO: 628857 - DNA, 585 bp, Homo sapiens
gcaggtgcctgtaatcccagctagtggggaggctgaggcaggaaaatcgcttgaacccaggaggcagaggttgcagtgagctgagattgcccattgcactccagcctgggtgacagtgtgaaactctgtctcaaaaaaaaaaawtttttttttctttttttttaactattgatattggggcagataatggaactcataatagtcttcagtacatatcacattatcataatggattcatgcaaagttttatgactttttattttttctatctaatgtgtttgctttatattcttacatatatgtatttatatttatgtattcttaaatatatattcttgtaaaatatatggtattgattttttcttaatttacataattttgcactataaatcacactctgctcacttcttacaatgtttttaagatctgtcaacattattgtatatgcatctactttgttgcttgttagagctgcatagtactccatggcatacaattccattttacaaatctttcaccctaaaaataaatattgaacataccctttatttccatcaccataaacaatgtcacaatgaacatgct

SEQ ID NO: 628858 - DNA, 585 bp, Homo sapiens
gcaggtgcctgtaatcccagctagtggggaggctgaggcaggaaaatcgcttgaacccaggaggcagaggttgcagtgagctgagattgcccattgcactccagcctgggtgacagtgtgaaactctgtctcaaaaaaaaaaaatttttttttctttttttttaactattgatattggggcagataatggaactcataatagtcttcagtacatatcacattatcataatggattcatgcaaagttttatgactttttattttttctatctaatgtgtttgctttatattcttacatatatgtatttatatttatgtattcttaaatatatattcttrtaaaatatatggtattgattttttcttaatttacataattttgcactataaatcacactctgctcacttcttacaatgtttttaagatctgtcaacattattgtatatgcatctactttgttgcttgttagagctgcatagtactccatggcatacaattccattttacaaatctttcaccctaaaaataaatattgaacataccctttatttccatcaccataaacaatgtcacaatgaacatgct

SEQ ID NO: 628859 - DNA, 476 bp, Homo sapiens
tttggttttaatgtagtcaaatccatttttaaaacttatagccttttgaataattattttagaatgtttacctacaaatttgatcaaaaatatgttattttacatgttcttctgttttttggtggtttgatatttacgtttggtttttaattcatttatttctcacttggtgtgctrttaaaatgtaaaagtccagctctatttttcttcatatctactttttcataacattgtcgactgaacaatccattccttcatcattgctttgtgggactatctttatcatatatcaaagttttcatatgtgcagggattatttctatttcttctattgcattttattaacctattagtctaaatccattttctgtttctgtattggtatcatatctctttttagaattgctatagtttagtaatatatgttaatttctagtagggttagttccttgtcttagtctactttttcaaagttg

SEQ ID NO: 628860 - DNA, 476 bp, Homo sapiens
tttggttttaatgtagtcaaatccatttttaaaacttatagccttttgaataattattttagaatgtttacctacaaatttgatcaaaaatatgttattttacatgttcttctgttttttggtggtttgatatttacgtttggtttttaattcatttatttctcacttggtgtgctgttaaaatgtaaaagtccagctctatttttcttcatatctastttttcataacattgtcgactgaacaatccattccttcatcattgctttgtgggactatctttatcatatatcaaagttttcatatgtgcagggattatttctatttcttctattgcattttattaacctattagtctaaatccattttctgtttctgtattggtatcatatctctttttagaattgctatagtttagtaatatatgttaatttctagtagggttagttccttgtcttagtctactttttcaaagttg

SEQ ID NO: 628861 - DNA, 570 bp, Homo sapiens
atacacacatacacatatatatattctacattttctttattcatttgatgatggacactgtattaggctgttcttgcattgctataaagaaaaatctgagactgggtaatttgtaaagatgtttaattggctcagagttctgtggacttgagaggcagtatggtgctggcatctactcagcttctggtgaaggcccasggagctttcaatcatgccagaaggtgaaggaggaataggcacattgaatagcaaaagcagtaggaaacaagagagaatgggcagggggaggtgacacactcttaaatgaaaatatcttgtgtgaactcagagtgagagctcacttatcagcagaccattcatgaaggttccaacctcatatccagacacctcccaccaggccccaccttcaacactggggattacatttcaatatgaaatttgggcaggtacaaatatccaaaatgtattaaatacttaggttctcctttccaatttagatgccttttatttctttctcttgccttattgctcttgctaggacttccagtactatgttgaataggagtggtg

SEQ ID NO: 628862 - DNA, 592 bp, Homo sapiens
accacactgtattccacaatgatgtaactaatttacactcccaccaacagtgtatagtttttcctttttctccacaaccttgccattatctcttattttgttatgttttaataatagccattctggagcagcctggccaacatagtgaaaccccatctctactaaaaatacaaaaaaaaaatcagccagatgtggtggcgggcacctgtagtcccagctacttgggagkctgaggcaggagaatcgcttgaacctgggaggcggaggttgctgtgagccaagattgcaccactgcattccagtgtgggcaacacagtgagactctctctcaaaacaaacaaacaaagccattctgactgttgttagatggcatctcattgtggttttgatttgcatttctctaattatcagtgatgttgagcttttttcaatatggaaaagttagttgctttcctatataacagtgataaacaactggatttacaaatttaaaataccatttatgaaagcaacaacaaaaaagaaatacttagctataaatctaaaaaaacatgcagaaaattatgactgatgaaagaaataaagatttaaa

SEQ ID NO: 628863 - DNA, 590 bp, Homo sapiens
taatctattactaacataacagcctgagtcagatcatactatttctttgctcaaragccttcaatgttctcactagttattcacagtaaaacacaaattttctcctgtaatttacaaggtcttgcatcatctaggccttgtttcagctctaaactcctctcttagcctttctttcttgcttactctgctccagctacatgagcttctttgctctgtctcaacacatcagccatattcccccctcagagcctctgcattttcctttgcttttgtctacaatgatatttccccagatatctgcaaggcttgtcgtcatacctactaatgcattatcttaatagtgactaccctataaaaaatagagacagtcctccttccatccctctttctctgcttcatttctccttagcatttattactatctaacatatttcacatttacttgcatattagttgtctgaattcccctactaggatgtaagctccatgtaagctccaatttagcaactatgtgaattcccaggttgcttagccactcttaagtctcagttttctcatctatagaatatcatcaagattacatcagtggc

SEQ ID NO: 628864 - DNA, 619 bp, Homo sapiens
ttataacaagttagtatgagtttattttgatgcaaaaattttgaaatccatgcataattttttcatagtattcattttctgtaagctttttgaagaccccttatacttggtatgattgttatcattgccaatgtggaaatcagcttttttaaatggttatcagaaacctcgtctgagctcacaattcagttcctaaaatgtagattagtctccataaacagaagtgagtgagaagcatgcaaggcaaggcaaccaagtatccttgaggtgctgacactgaaggaagggtgaggaagaaataacaagcagggagaagagaaatgaaaaacagaaaatgaagttgtcatgtgtccatatgtatggtatggtgggtattcatartggtcaaaagtcttacataaaagaaggaaaagatttgtcctaggccatgtctgcctactaaatattaataggtaaagacctactaacagttaaaggtaaaagaatctgaaacctgtggaagtcattaccttactgactgtgagtttatgagccattgtttatccagtagataaaaggaagcaacttttgccacatgccatatttttagaaaagaagcaaactcttaagtcttactcca

SEQ ID NO: 628865 - DNA, 513 bp, Homo sapiens
agttaagtgacttgcccaaggacacaaagccagaaagaagaagggtagggtctcagaaccattttctgtttctaggttcagccctcttcccactacaacagaggtttatactatatattaagttgtgggtatgtcagggaagactataataagggaagaaaatatattacaaaataactataatattatcaaaataacattttaaacacattgggataaaattaaaaacctccttaaaacaaatattaccatttatatattaattttagttatcagttacaaggcaaaataacttctccaaattgtaatactataaaagtcatcttttaaaaacacaaatgacattacattgcttaagttcaatacctactgtttactgaatgtaattcaaatttctaatcttaataataggagtcaattttgataagaccctgcctwactctcagcttcatttccactcatataaattgctataggcatgccaatatctcatacctttttaaaattcctatg

SEQ ID NO: 628866 - DNA, 575 bp, Homo sapiens
tactagtctttactgctgatggcaaattgcttctggtgtgccttttatacaggaatgtagaaaaaggcatttgccaagtcaatagctgcataccaggtaccaggagatgtgttaatttgctcaagcagtgaaactacagctggtacagtggctgcactttgagtcaccacttggtaaagcttatgataatccactgtcattctccaagatccacctgtcctctgcacaggccaaataggagggttgaatggggatgtggtgggcatcaccactcctgcatctttcaagtcctttatggtggcactaatctctgcaatccctccaggaatgcaatattgcctttttgatttacaatttttctaggtagaggaaggtctaatggcttccatttggcctttcccatcataatacccttcaccctaccagtcagggagccmatgtgggggttctgtcagctgctaaatatgtttatgccaattatgcattctggcactggggaaatgaccacaggatgagtccaagggcaaactgaactcactgtaagtcagacctgagctaaaactctacaaattacc

SEQ ID NO: 628867 - DNA, 626 bp, Homo sapiens
gtctgagtcccaaagctgaagaacttgggactccagtgtttgaaggcaggaagcatccagcatgggagaaaaatgtaggctgggagactaagccagtctaaccttttcatgtttttctgcctgcttcatattcactggcagctgattaggtggkgcccacccagattaagggtgggtcagccctctccccagcccactgactcagatgttaatctcctttggcaacaccttcatagaagaatacttagtattcttcaatccaatcatgttgacactcagtattaaccatcacagttgttcatgaattttctcccccaagataatttttttttttgaagacaagtctcactctattgcccaggctggagtgcagtggtgcaaattttgctcactgcaacgtctgtctcccaggctcaggtgatcctcccacctcatcctcccatgtagctggtactataggcatgaaccaccacgcctgactaatttttttattttttgtagagatggcatttcgccatgttgtccaggctggtctccacctcctgggctcaaatgatctgcctgcttcagcttcccaaactgcaaggattacaggtgtgagccaccacacccagcctcctgcagga

SEQ ID NO: 628868 - DNA, 626 bp, Homo sapiens
gtctgagtcccaaagctgaagaacttgggactccagtgtttgaaggcaggaagcatccagcatgggagaaaaatgtaggctgggagactaagccagtctaaccttttcatgtttttctgcctgcttcatattcactggcagctgattaggtggggcccacccagattaagggtgggtcagccctctccccagcccactgactcagatgttaatctcctttggcaacaccttcatagaagaatacttagtattcttcaatccaatcatgttgacactcagtattaaccatcacagttgttcatgaattttctcccccaagataatttttttttttgaagacaagtctcactctattgcccaggctggagtgcagtggtgcaaattttgctcactgcaacgtctgtctcccaggctcaggtgatcctcccacctcatcctcccatgtagctggtactataggcatgaaccaccacgcctgactaatttttttattttttgtagagatggcatttcgccatgttgtccaggctggtctccacctcctgggctcaaatgatctgcctgcttcagcytcccaaactgcaaggattacaggtgtgagccaccacacccagcctcctgcagga

SEQ ID NO: 628869 - DNA, 629 bp, Homo sapiens
tacttaattttggtgatgtttacaattattctcagtacaactggaagcagctgctataaatcagtctgtgctcaggattaaaacattgtaccattgttgaggtgtggtctcacacagtcactcagcttccctgagtaccagtttcctaagtggtgtgggttgacctatatatcccattttacatatgacaataaaatgtgagttcatatgtgaaatcattttgaaactgtagtcttctttgcctgcagaataacatatttaactattccttccctgaagactttcttctgcctatccaggccttattgttactttcttactcttctcttgttactttgtattgcaattacattttatagytctgtctcctcaaatagactatgttgttcttgtgggctggaaaggtagtctattgttttcttagggcctagaactatacttgatgacatgctttggctgtgtccccacccaaatctcatcttgaattgtaactcccacaattcccatgtgtcatgggaggaacccggtgggaggtgatttaattatgggggtgggtctttcctgcactgttctcgtgagagcaaatgaatctcatgagatctgatggttttaaaaagaagagttttcct

SEQ ID NO: 628870 - DNA, 606 bp, Homo sapiens
atctgttctatattctcatctgtatcacagaggctagaaagtgctaaaaactatattatcaagatttccatgcaacgaaggatctgaatgtgacacaaattttactgatgagatgcacttgcatgggatttaaaggaaaaatagaggaagaagcctcttgcctgttgtcctgattgtcagtgctagccagcaaggatgtgattttagtgaacagcagattttagtgttcatttttcagtcttctrgatgccaataattagtgggtgtagtggccatttcttaacctgatgctaatctctggattgctgattcgggtgtccatttgccagcttggcagtgttcataggctgcttctcggtgaatggatagctccagacctaggccagccatggtggcctcaggggtagaactttccttagggggccagttctgtgttgttttagagacattgcgagacactggccaggagtcttttccttcagcccttccaacaactttgtaaacacttaatttcctctaccaaacctcatttattttatgagaaaactaaagttcagggaggaaaatgactcactcacaattatataatttgctaatggtagagac

SEQ ID NO: 628871 - DNA, 597 bp, Homo sapiens
ctatgctgtttgaccaacataatctcatcatatacataagcattttaaataatatggaaaaatggagactttgcccaagaaaaggtagtaattgtgtttaacatgctatgtagttcaataagacagtgaccttggggtccctgtgctgtgtctgtgtgtgtgtrtgtgtgtgtgtgcatgtgtgtgcatctgtaaagttttttctaggatcattcctcatttatctgtgtttcaacagcaaatgtagaaaatattattattattaatctgtgcatgtccaactctatcaatttcaaagtagaagagctccaaatctagataataatgcttgcttctgggtttgtgggttcatatgaagaaaattagtaaaagtctgtataccttgttgatctgcatagagaacttccacaatgtgttctacctttcctctagttctttccttctggaaagttctttccttaaaacagataaaagaaacttttaggcttttctaatttttggttctgaaggcagaacacctgggtttaaatccaagctttattgcttactaggtttgaaatttggggtaggtcatttctttgtgcctcaatgtaatta

SEQ ID NO: 628872 - DNA, 620 bp, Homo sapiens
taatcaaactaaagtgtatatgtgtcattcttatataatctttaattttctttaagagcttattctagccaggtgcagtggctcaagtgtgtaatcccagcactttgggaggccaaggtgggtggaccacttgaggttaggwgttcaagaccagcctggccaacatggcgaaaccccatttctactaaaaatacaacaattagccagatgtggtggtgggcacttgttatcccagctactcgggaggctgaggcagaagaattgcttgaacctgggaggcggaggttgcagtgagccaagatcactccactgccctccagcctgggtgacagagcgagactctgtctcaaaaaaaaaaaaaaaaaaagcttattctgactttatttttggactataatttgaattattttaaaattgtacataaatgtatcagaatatatacatgtttatatataatttataatatataaaaatatttctatatatgtatatacacatacacatacacatcccttttgcttgaattgtgaaacgctgccccccagtagcttttaactaaagctttatgacaggtaaaagatgtttttgtttaactatgtaatcactatcaaaagcaatgc

SEQ ID NO: 628873 - DNA, 620 bp, Homo sapiens
taatcaaactaaagtgtatatgtgtcattcttatataatctttaattttctttaagagcttattctagccaggtgcagtggctcaagtgtgtaatcccagcactttgggaggccaaggtgggtggaccacttgaggttaggtgttcaagaccagyctggccaacatggcgaaaccccatttctactaaaaatacaacaattagccagatgtggtggtgggcacttgttatcccagctactcgggaggctgaggcagaagaattgcttgaacctgggaggcggaggttgcagtgagccaagatcactccactgccctccagcctgggtgacagagcgagactctgtctcaaaaaaaaaaaaaaaaaaagcttattctgactttatttttggactataatttgaattattttaaaattgtacataaatgtatcagaatatatacatgtttatatataatttataatatataaaaatatttctatatatgtatatacacatacacatacacatcccttttgcttgaattgtgaaacgctgccccccagtagcttttaactaaagctttatgacaggtaaaagatgtttttgtttaactatgtaatcactatcaaaagcaatgc

SEQ ID NO: 628874 - DNA, 620 bp, Homo sapiens
taatcaaactaaagtgtatatgtgtcattcttatataatctttaattttctttaagagcttattctagccaggtgcagtggctcaagtgtgtaatcccagcactttgggaggccaaggtgggtggaccacttgaggttaggtgttcaagaccagcctggccaacatggcgaaaccccatttctactaaaaatacaacaattagccagatgtggtggtgggcacttgttatcccagctactcgggaggctgaggcagaagaattgcttgaacctgggaggcggaggttgcagtgagccaagatcactccactgccctccagcctgggtgacagagcgagactctgtctcaaaaaaaraaaaaaaaaaagcttattctgactttatttttggactataatttgaattattttaaaattgtacataaatgtatcagaatatatacatgtttatatataatttataatatataaaaatatttctatatatgtatatacacatacacatacacatcccttttgcttgaattgtgaaacgctgccccccagtagcttttaactaaagctttatgacaggtaaaagatgtttttgtttaactatgtaatcactatcaaaagcaatgc

SEQ ID NO: 628875 - DNA, 620 bp, Homo sapiens
taatcaaactaaagtgtatatgtgtcattcttatataatctttaattttctttaagagcttattctagccaggtgcagtggctcaagtgtgtaatcccagcactttgggaggccaaggtgggtggaccacttgaggttaggtgttcaagaccagcctggccaacatggcgaaaccccatttctactaaaaatacaacaattagccagatgtggtggtgggcacttgttatcccagctactcgggaggctgaggcagaagaattgcttgaacctgggaggcggaggttgcagtgagccaagatcactccactgccctccagcctgggtgacagagcgagactctgtctcaaaaaaaaaaraaaaaaaagcttattctgactttatttttggactataatttgaattattttaaaattgtacataaatgtatcagaatatatacatgtttatatataatttataatatataaaaatatttctatatatgtatatacacatacacatacacatcccttttgcttgaattgtgaaacgctgccccccagtagcttttaactaaagctttatgacaggtaaaagatgtttttgtttaactatgtaatcactatcaaaagcaatgc

SEQ ID NO: 628876 - DNA, 590 bp, Homo sapiens
gactttgaaacatttctttcttgcggtggctgctaaaatcttactttcaacctatccagatgattccaagttttgcagggatacatgtatatgtgtttatttttctctgccatttctaacttagaggcatctcaccggcaagaaattgagatgtactgttctagtctatgatatacagtccagccttctctgtctttataagggattgccagcatttaatcttacctgccataggtgaagttgattggggaaatggggtacactgttaacctctgtggaatataagaatagaattgaactagacacttattttacattcggatctttaatgacctgatattattatttttaattatatgacagaaattctggggtgccatagacactgttttgatggcctctgttactcattaacctttgcagacattcttacattctagataatcttccaagagtatcagaggaaaggaaaatgaatgacaaatcttactatgatcaatatatgatgattaacaccttcacagctcttgttgttgcttttmattttctgagggttattccttgtttgctttttagatgaggaaactctc

SEQ ID NO: 628877 - DNA, 659 bp, Homo sapiens
ccttcatggagactgtggcagaggcaaactctatcccacccatctccccagcctctcagccttgtaatagtacctgccctgatctggcccctgcctcctaataagaaatgtagaatgagagttatgtgagctcagttagtataaaaagcactgcagcccttaaactaatcaatttctatatttactacagcccctgatgaaaaatgactcattgtgcagtgttcagagatatgtgataaaccatcatacttcctgcaatggaacatggtcagaagatgtgggaaatcacacgaaattcactttcctgtggacagagcaagcacatactgttacggttctggccatcaattcaattggtgcttctgttgcaaattttaatttaaccttttcatggcctatgagcaaaggtaagaagaggtacagagtggtaatccattgcctcttttaatatttaacttttgcaaactctcctattttaaattatctttcaagcagcctgcaattctctgcatctgaaagtctctctttcacctttcatttcctttgtctggaaaaataacaaagtacattgtacaatgatcacrtaatacagtccttgagctttcatttgggagaacattgttgtaatggtgttataatatatgagaatgttttagtga

SEQ ID NO: 628878 - DNA, 598 bp, Homo sapiens
tataatctccatgtcaagaatcctgctctttgaccatctccccttgcacccttcatgttagtttattccctctactactcaacttcaggaataattctccatggttcttggctcccccttctgggtgccaggttctggcctgagtaaccctctcttcttcatgaaaagcagcccatatgcgcatctaagttgttttcacagcctgctttcctaccagcacaatttttaatggtygaaaggctttttttttttttccattttgttctgtctctgtctctttctgtctctatattagcactatttctgctaatacacttctctcacaaaactacctggacctccagtggatctctctggtgttcactccattagatatgataaaagcctgcaaatctcctagagatcttttctctgtcttctctttgatctttgctcagaaggcatttcttaattttaacagtgtttgctatctggagaggctagacacttcaagactatgaagtcctctttccttttgtttaagggccctttcttcaatgtatatctctcctcttacagcaagaagaaaccaagagacatccgcaacacttgctggaaa

SEQ ID NO: 628879 - DNA, 598 bp, Homo sapiens
tataatctccatgtcaagaatcctgctctttgaccatctccccttgcacccttcatgttagtttattccctctactactcaacttcaggaataattctccatggttcttggctcccccttctgggtgccaggttctggcctgagtaaccctctcttcttcatgaaaagcagcccatatgcgcatctaagttgttttcacagcctgctttcctaccagcacaatttttaatggttgaaaggctttttttttttttccattttgttctgtctctgtctctttctgtctctatattagcactatttctgctaatacacttctctcacaaaactacctggacctccagtggatctctctggtgttcactccattagataygataaaagcctgcaaatctcctagagatcttttctctgtcttctctttgatctttgctcagaaggcatttcttaattttaacagtgtttgctatctggagaggctagacacttcaagactatgaagtcctctttccttttgtttaagggccctttcttcaatgtatatctctcctcttacagcaagaagaaaccaagagacatccgcaacacttgctggaaa

SEQ ID NO: 628880 - DNA, 338 bp, Homo sapiens
ttctgcaccatcatgtttctctctcagctaatagacaygatataataactcccatttaaaaaaataaattttctctgttacacatttctgtcaagtaaccaccccatttcactacttcttttaaagaaaacaaagttttgaattgtatgaatacattatatcttcaaaagttaataaaaaagtcaacaagtgactctggccacgagggaataagagggtctggattactctcctgtgataaacaactagaaaactggaaaaaatgtaggaaataattattttcagacattggacaaagacagacagaactgtgattcctaagagaaggaaacaaaatg

SEQ ID NO: 628881 - DNA, 338 bp, Homo sapiens
ttctgcaccatcatgtttctctctcagctaatagacacgatataataactcccatttaaaaaaataaattttctctgttacacatttctgtcaagtaaccaccccatttcactacttcttttaaagaaaacaaagttttgaattgtatgaatacattatrtcttcaaaagttaataaaaaagtcaacaagtgactctggccacgagggaataagagggtctggattactctcctgtgataaacaactagaaaactggaaaaaatgtaggaaataattattttcagacattggacaaagacagacagaactgtgattcctaagagaaggaaacaaaatg

SEQ ID NO: 628882 - DNA, 562 bp, Homo sapiens
gtcatcctcacacacacccagattcagtggtgccaaagagcacacaactatggaccccaaaaccagtatttctgtgtcctactcaatctagtgcccacacgtggcctcctagtgtccctgaactcagcaccaccacacaccccacctagccaawgtccttacacccacccactggtgaaggtctttccctactgatgccagcctgtaaagtcaggaagaatgactgcttcttcagatttgtagatatcaacacaagcctacaaggaacacacacaaaaaaatcagggaaacatgacataacaaaaggatcacaatgaattttcactagcaaatccccaggaaatggagatctgtaaattgcctgaaaagaattataaacaattatttaaaagctcagcaagttacagacaacagatatacaactaaaccaaatcaggaaaccaatacatgaagaaaatcagaagttcaacaaacagatagcaatctcacacacaaaaagaaactcccccaaaatctggagctgaaataatacaatgactgaaatgaaaaaggcaataaaagg

SEQ ID NO: 628883 - DNA, 552 bp, Homo sapiens
agaacgtttaagtctgctgcagctgcacccacagccacctcttccccaaggtgttgtgtcccagggagatgggagttttatctataagcccctgactgaggttgctgcctttctttcagagatgccctgccaagggtgraggaatctagagaggcaatctggctacagcagctttggtttgctgtggtgggctccgcagagaaggacttcctggtggctttgtttatgctgtgagaggaaaactacctactcaagcctcagtaatggcagatgcccctccctccaccaagcttgagtgtcccaggtcaacttcagactactgtgatggcagcgagaatttcaagccagtggatcttaacttgctggcctccatgggaatgggatctgctgagctagaccacttggccccctggtttcagccccttttccatgggagtgaacagtactgtcttgctggtgatccacatgccaatggggtgtgaaaaaaaaactcctgaacctagctcagtgtctgcccaaacagctgcccagttttgtgcttgaaacccaggg

SEQ ID NO: 628884 - DNA, 552 bp, Homo sapiens
agaacgtttaagtctgctgcagctgcacccacagccacctcttccccaaggtgttgtgtcccagggagatgggagttttatctataagcccctgactgaggttgctgcctttctttcagagatgccctgccaagggtggaggaatctagagaggcaatctggctacagcagctttggtttgctgtggtgggctccgcagagaaggacttcctggtggctttgtttatgctgtgagaggaaaactacctactcaagcctcagtaatggcagatgcccctccctccaccaagcttgagtgtcccaggtcaacttcagactactgtgatggcagcgagaatttcaagccagtggatcttaacttgctggcctccatgggaatgggatctgctgagctagaccacttggccccctggtttcagccccttttccakgggagtgaacagtactgtcttgctggtgatccacatgccaatggggtgtgaaaaaaaaactcctgaacctagctcagtgtctgcccaaacagctgcccagttttgtgcttgaaacccaggg

SEQ ID NO: 628885 - DNA, 552 bp, Homo sapiens
agaacgtttaagtctgctgcagctgcacccacagccacctcttccccaaggtgttgtgtcccagggagatgggagttttatctataagcccctgactgaggttgctgcctttctttcagagatgccctgccaagggtggaggaatctagagaggcaatctggctacagcagctttggtttgctgtggtgggctccgcagagaaggacttcctggtggctttgtttatgctgtgagaggaaaactacctactcaagcctcagtaatggcagatgcccctccctccaccaagcttgagtgtcccaggtcaacttcagactactgtgatggcagcgagaatttcaagccagtggatcttaacttgctggcctccatgggaatgggatctgctgagctagaccacttggccccctggtttcagccccttttccatgggagtgaamagtactgtcttgctggtgatccacatgccaatggggtgtgaaaaaaaaactcctgaacctagctcagtgtctgcccaaacagctgcccagttttgtgcttgaaacccaggg

SEQ ID NO: 628886 - DNA, 585 bp, Homo sapiens
ctcagtaatggcagatgcccctccctccaccaagcttgagtgtcccaggtcaacttcagactactgtgatggcagcgagaatttcaagccagtggatcttaacttgctggcctccatgggaatgggatctgctgagctagaccacttggccccctggtttcagccccttttccatgggagtgaacagtactgtcttgctggtgatccacatgccaatggggtgtgaaaaaaaaactcctgaacctagctcagtgtctgcccaaacagctgcccagttttgtgcttgaaacccagggccctggtggtttaggcmtctgagggaatctcctggtgtgggggttgcgaagaccatgggaaaagcatagtatctgggctggagtgcaccattcctcatggcacagtccttcacggcttcccttggctaggggtgggagctccccaaccccttgtgcttcctgggtgaggcaactccccaccctgcttctgctcaccctccatgggctgcacccactgtctaaccagtcccagtgagatgagccaggtacctcagttggaaatgcagaaatcacccaccttctgtgttgt

SEQ ID NO: 628887 - DNA, 575 bp, Homo sapiens
tcattcactataaaacctcatgaagggctaggcgcggcagctctcacacctgtaatcccagaactttgggaggccaatgagggcggatcacttgaggtcaggagttcaagaccagcctggccaacagggcaaaaccccatctctactaaaaatccaaaataaataaataaataaataaaagctgggcatggtggtgtgcccgtaatcccagctactggggaggctgaggcaggagaatcgcttgaacctgggaagcaggggttgcagtgagccgagatcacatcactgcactccagctgggcaacagagcaagactycctaaaaaaaaaaaaaaaaaagccatggaaatcatctcctaatgtttatacaaatacatgtaacaacaatatcccagttctcatacaggctgaatatgtaacaatatcccagttctcatacaggctgatcatgttttaagttgttcgcctaacattgtgattagatgcaggtgtgctttactgttttaaactggttaagaaagagtaaaattacctacttatgtagcttccttttataaatacttcttcacatttctt

SEQ ID NO: 628888 - DNA, 592 bp, Homo sapiens
ggtgtggtgaaattatgttgggatgctgatctgataatataaaaaatgcctgggcctctatctcccatgagctattagagaaagaatccttcaayggagaatttttgctagagaagcacttggtgactgaactatttataagcccttgttcttcaccagtttcacttggtttagagttgctgatcagcgtggcgtatttaacaaagggttgtctctggctttcgtcctcataggttacctcagtaccctcagcctcagagaagttaacactgttgaactggtcactaatacaaacagaacccttttcaagatctgttgttgaaagtagagagaccacagttgttggcatcatctcatctttatttttccatgatgtatcaacactgatatcttctgaaattgtttcaggctccaaaagaagaggaccacatgtcactgatgctgtatgcttgataaaaagatgctcaaacgtttctggctaaaagaaaagacacattttaaggctcaattatgttaaaaaattttgcttcattatgtcatactggcagaaatggaagtgtgttaagttaataataaagaacataagtcaacc

SEQ ID NO: 628889 - DNA, 556 bp, Homo sapiens
accttgaaaaattaacacaactaaattaagggctatagaaaatrtgttcagcttatatatcatacacgtcatttaacttgaattttacaatttttaaactaatagaattcagatttattacttgaaataatggtatacccagctgttcttcataatggcaagcatattccatatacaatacaatttatttagcatagttttatactcttaagtaaaatatgttagtgattaaaagcataaaggaataaatatgccaagcgcaaaatataataatggaatagacttatgtaggtattaaaatactgcataatgacaaatactgaattaatacaactttcctattattcataatcataatatatgaagagaaaactgttcctatgcctgttttttttttctgaaagaaatctatggttttatacatttcttcaaatatttgcttgctcattttcttttttcttaaggcttctactatatatgcactgaactgtcttaaaatttaaatgaacctacatattaagattgtcaaaagaattagatgctatcaatatgaaaa

SEQ ID NO: 628890 - DNA, 556 bp, Homo sapiens
accttgaaaaattaacacaactaaattaagggctatagaaaatgtgttcagcttatatatcatacacgtcatttaacttgaattttacaatttttaaactaatagaattcagatttattacttgaaataatggtatacccagctgttcttcataatggcaagcatattccatatacaatacaatttatttagcatagttttatactcttaagtaaaatatgttagtgattaaaagcataaaggaataaatatgccaagcgcaaaatataataatggaatagacttatgtaggtattaaaatactgcataatgacaaatactgaattaatacaactttcctattattcataatcataatatatgaagagaaaactgttcctatgcctgttttttttttctgaaagaaatctatggttttatacatttcttcaaatatttgcttgctcattttcttttttcttaaggcttctactatatatgcactgaactgtcttaaaatttaaatgaayctacatattaagattgtcaaaagaattagatgctatcaatatgaaaa

SEQ ID NO: 628891 - DNA, 618 bp, Homo sapiens
ttctaatactctatagactgttgggaagttggcacattgggttcatctgtagtgatcatgattagacttcaaagaatgtccgttctctgtttagataaaataaaacaaaataagaaagcaaaataaaaaatcactcacaaagaaaaagataaaagatttcaaaaaacattgtcaagcatgggttctggactataaatttttgtgttaggttacaataatgcatccttttgggaaagggcaaaattttgaactaaggtggcttctcccrttttcttaatgaatgttttaatatcacactctaaggacagctttaattaccccaggaagggaaaaactatagggaaataacagaataggtaaaaggagagaagaacaacgagctggaaaaatttaaagagggagaaccaacagcaatataggatagtttggaacaagaaaaaataaaagaggagagcagtgaaaagaaaaatttaaaaaaaataaagagaaagaagtgctaaaaatggtaaagaatagaatcacagaaccattcattaccatgggtttttaaaatctagaaataagatctcagaaattatatggtccaagtgtctcccttttttctgacaaagcaattga

SEQ ID NO: 628892 - DNA, 653 bp, Homo sapiens
ttggttcagtaagtcacaatatttacataatcataacaatgcaaattcagtttattagtttttctatttttaaaaataaaccacagacaaattacaacacagaacatcatatcaaccctgacttaaggaaaaacataaacttagatttagagattggaaagtagagggagaaatggagggaagcgtaagagtgctaatgtttttattwaaaaaaaaaaatagcaggggagctccaagaaatagtcttctgtttaaaagaacaagaaatggaagtttaagtagatttttctgaggttggagaaatgattacttaaggaattgaaaaaagtgacaagacaatatgggtagaaacacaaggagggaataatgtgtgggagtaaatcctcgttgtagccagaaatcaatagataccgtctacatttcatagtggcataagcatatggtttttagaaataaaaaggtgacataccagaaaaaccaaaagtcagacagttaactaaagaggcatttggagagcaagactaagggtacggaggggtggaaaaggggactgtccttttcatgaagtggtcttccaaactcaaatatttaactgtaacatttcattattaagtcattcacatatattttttcaaaaaattttaaatattgag

SEQ ID NO: 628893 - DNA, 613 bp, Homo sapiens
ttccgtcattttctgacctccttattccacagtcattttcctactaagactaagtcaagggctgaaatttattggtctatggaatggggaagataaatacagctgagacaaagaggtcactattcaactttgactttcaaaatagagttktttttttttaatactgatgccaaaacaatacaatagaaaacaaagactttatttgaaagagccatgctttgttggtggtgggatggtgttcaaagggccatagctcagagggtttatgtgggagttatattcttactaatagaaaaggagattaccttttccagcattattgtgggttaaataagttaaacttttttctattaaaaaaactagaaatgctcattaaactgaaatatccttttaaatgcttagatgatcctacaaaaattaaggcatatactcatgagcttaaaagaagaaggaattaaaaactagggccataagcacctgaaccttatttattgctgattctctgcagtgtttgctggtctaagtaacataaggcttgtgttttagtagcatcttatgagaaaatgagatcttgggccatcaggagacatggggttagaactaatatcaggtt

SEQ ID NO: 628894 - DNA, 613 bp, Homo sapiens
ttccgtcattttctgacctccttattccacagtcattttcctactaagactaagtcaagggctgaaatttattggtctatggaatggggaagataaatacagctgagacaaagaggtcactattcaactttgactttcaaaatagagttgtttttttttaatactgatgccaaaacaatacaatagaaaacaaagactttatttgaaagagccatgctttgttggtggtggkatggtgttcaaagggccatagctcagagggtttatgtgggagttatattcttactaatagaaaaggagattaccttttccagcattattgtgggttaaataagttaaacttttttctattaaaaaaactagaaatgctcattaaactgaaatatccttttaaatgcttagatgatcctacaaaaattaaggcatatactcatgagcttaaaagaagaaggaattaaaaactagggccataagcacctgaaccttatttattgctgattctctgcagtgtttgctggtctaagtaacataaggcttgtgttttagtagcatcttatgagaaaatgagatcttgggccatcaggagacatggggttagaactaatatcaggtt

SEQ ID NO: 628895 - DNA, 613 bp, Homo sapiens
ttccgtcattttctgacctccttattccacagtcattttcctactaagactaagtcaagggctgaaatttattggtctatggaatggggaagataaatacagctgagacaaagaggtcactattcaactttgactttcaaaatagagttgtttttttttaatactgatgccaaaacaatacaatagaaaacaaagactttatttgaaagagccatgctttgttggtggtgggatggtgttcaaagggccatagctcagagggtttatgtggragttatattcttactaatagaaaaggagattaccttttccagcattattgtgggttaaataagttaaacttttttctattaaaaaaactagaaatgctcattaaactgaaatatccttttaaatgcttagatgatcctacaaaaattaaggcatatactcatgagcttaaaagaagaaggaattaaaaactagggccataagcacctgaaccttatttattgctgattctctgcagtgtttgctggtctaagtaacataaggcttgtgttttagtagcatcttatgagaaaatgagatcttgggccatcaggagacatggggttagaactaatatcaggtt

SEQ ID NO: 628896 - DNA, 386 bp, Homo sapiens
ctaactttgagcatagtttgttcttctttttctagttccttgaggtataaagttaggttgtttatttaaaatcttccttctttttaaattaaagcatgtattaccataaacttatttcttagtgctgcttttgcagcatccyctaagttttggtatgttgtgtttttgttttcatttgttttatatatatatatatatatatatatatatatatatatatatatataaaacaaatatatatatatataacaaatatatatataataacaaatatatatatgacatatatataaaacatatatatatatatatatatatatatatacttttttttgagacagagtctcactttgtctctcaggctggagtgtaggggtatgatcatg

SEQ ID NO: 628897 - DNA, 612 bp, Homo sapiens
ctggcatataacttaacattaatttttggtacaattaaccatttcttatttctttatttcggcataatttccaaataaaatgcatgcattctttcattactacaataaaatttagatagatagatgaagtaatttttttagattttatttaaacaattatgaaacttcatgcaataagaaagaagacttttaggctgggcacagtggctcatgcctgtaattccagcactgtgggaggccaaggtggtcatgatcacttgaggtcaggagtttgagaccarcatggtcaacatggcgaaactctgtctctactaaaaaataaaaaataaaaaaaatttagccaagcatggtgcacacacctgtaatcccagctactcagaaggccaaggcaggagaattacttgaacccgggaggcagagattgcagtgagccaagatcgcaccactgcactccagcctgggcgacagagcaatactccgtctcaaacaaacaaaagagtagagaggtaagaagtcagtcatcactaaggtaagagagagagcacaaaataaatggtctctacttcacactttttcttattttcatagtatgcctgtaatagaaatggctat

SEQ ID NO: 628898 - DNA, 632 bp, Homo sapiens
cccccgttcctgaaccacctggaaattctgtgtatggaatgcgttgtctcttggcttttgtcattgctgatttaggatttggcttttwgcttttgtttagctttgttttgttctttcctgataggtcagttcaaacttgtatatctgcttttcagaatctaaacgtttgatgctgttgcctcctctctgttccctccattcttgcgggtttatgtctagttaaaaacaatccatttatagtagtttcagcggggtttgtagagggaagagattagatgcatttttactctgccacctgtattctgaagtcctctctctgaactttttgaaatctgcttttctaaagcacagagcacattctggtgagacccaggtctcccacctgatgatcacagtctctaagagtgcatgttcatcacatcccagagttcttgtcttttctaccgcactgaatctgttctctgtgtttacttgtattgtagctatggtaacagttcccttcattacttactcaaacttcagagagataaaagagaaggagtcacagcatctttgtgcaaaatatgcctcgttttctgggaaaaggcttgtttcagaagagaagacagtggtgagtcacagaagatatgagg

SEQ ID NO: 628899 - DNA, 604 bp, Homo sapiens
gattgtgagcaacctcctcccctctctcagtttctgtcaccactaaggtagattcacatctctcatgctcyctcaccgtgacccactctcttgtctaatgccccttcatgttcagcactagtatttgagttcttgccttagaactttataagcacattttataccccacaaagaagaaaccatgctcacaaatacagtaaagtattggctttgaaatcaagctttaaattctgccaagaaaggaagtgtgaccaagtatgactggtatatgtccttgaacaggtcgcttcctattcctaaaactctgtttcaaaacacacagctcttcctctagcgaacacaggcagataattaatattagctaaaattaacatttagaaatgctaatataaattgataaataattataatattttaaaagtaaataaataggatccacattctttcaacagactaaaaagtaaaggtaatttttattttgtctccataggttaaactggcaggcaatacatttcattctctgtaaccaatgtgtagaactctttggtttgtgaaatatgagtatgtttttgaaagttgcatgtgtcaaataacacattcatta

SEQ ID NO: 628900 - DNA, 397 bp, Homo sapiens
tctatcttttctctgttacacttgataaaacatcaatgatctaattttctagaataatttgcaatttatacctgtactyatcacagcacagaaacagaaaaatggcactgtgatttgaatgtttgttgtgttccctgttgaaattccaacctccaaggtgatggtatgtagagttgggacctttgggaggtcccatcatgatcataggagatcatgagggaggacccctcatgaatcagattaacactcttacaggtccaagggagcttatttgttccttctatctatcatttatagacatagctggaaggcaccatccatgaaccaacaaataggctctcaccagaaatcaaatattccttgatcttggatttttcagcctccagaactgtgagat

SEQ ID NO: 628901 - DNA, 396 bp, Homo sapiens
atctcacagttctggaggctgaaaaatccaagatcaaggaatatttgatttctggtgagagcctatttgttggttcatggatggtgccttccagctatgtctataaatgatagatagaaggaacaaataagctcccttggacctgtaagagtgttaatctgattcatgaggggwcctccctcatgatctcctatgatcatgatgggacctcccaaaggtcccaactctacataccatcaccttggaggttggactttcaacagggaacacaacaaacattcaaatcacagtgccatttttctgtttctgtgctgtgatgagtacaggtataaattgcaaattattctagaaaattagatcattgatgttttatcaagtgtaacagagaaaagatag

SEQ ID NO: 628902 - DNA, 596 bp, Homo sapiens
tttccctatgatttcacagtatcctgttttggtcagtaatacatcactttccattgcatgataaatggtggtttacatcaacttaagggaatgacgtcttattcagttttgtattctaaggacctgtaatggtctgagaaataatagttgcttgttccgtatatgtagaaataatcaaatattttacttgaatcttattttctgcaaggcttcgtggaaatagtagtatcatctaagaatacaatatgtttggagctctaacctgcagatatttttttttcaggtgcctgcaatctgtctggaattcagactattacccttctggattcactaaaactatactcttaatctgtacygggaagttctatactgttgctttaatccttggtgctgtttatttcaaccaagatacaccttgaagacaatctgcctgcaacactcataatccctgaatggatagcacccaataaaagagagaacatcattgccaattttttcttctatccaagtcctcctctgtctttataccttatttgacctgaatatcttatctttccgtgttaaatgctcttctctcttgacctctagatcactgt

SEQ ID NO: 628903 - DNA, 450 bp, Homo sapiens
aaagaaaaacacctcttgtgacccttyttttgttgtgataaaaggtttgcggtggttataggggaagtgatgcttactaggtaaaaaattaattatattcaaatgtgcatgtgtcatgggtgagtggactgaagattttcctgaaccaatgtaatattttgatgagcatacaggaagacatatgtacgtatacattttgaatatttactgaggcagtttattatctctaactaacttagaatattacatttcattatctaggtaaagcaatgaactcaaagccaccaatagattattggtgtatataaatgcagagtctaaaaatagctaagccatcataaatattgttgtcatgatttattaatttaaagtactaatgagtcattaaaactcttctaactagcctctgtcatcaatcaacaaatattcactgaacagttattaggtatc

SEQ ID NO: 628904 - DNA, 537 bp, Homo sapiens
atggtacaagggacatggctgtgctttggtcaaggataggctgaggtaggatatttacatcagcgactttagagcataggcatataactccacttgttattacagccatgtagccataacatgggaaggccatcacttggctctacaccagtattatctgtaaaatgtataattgccctgttaacactgtgtaggtgcgttggttcccacagaaagagagtcagaggtgtctgtctttgcagacagacagaagggagccaggacacagcttggctcactcgtgcccagagagagaaagagytaagctgctgaccctgaaggcaagggagagctggacacgcagctgtgtatgggggccgccggactaaacagtcaagacagggtgaacaatgtgaggaaaagctgttatgagagctgctgctgaataaaatcatctttcactgcctacggcccctagagtgttctttctgctcattcacccactcccttcagacctcaggatgggctggaacccaacctcaagcataacaattggca

SEQ ID NO: 628905 - DNA, 537 bp, Homo sapiens
atggtacaagggacatggctgtgctttggtcaaggataggctgaggtaggatatttacatcagcgactttagagcataggcatataactccacttgttattacagccatgtagccataacatgggaaggccatcacttggctctacaccagtattatctgtaaaatgtataattgccctgttaacactgtgtaggtgcgttggttcccacagaaagagagtcagaggtgtctgtctttgcagacagacagaagggagccaggacacagcttggctcactcgtgcccagagagagaaagagctaagctgctgaccctgaaggcaagggagagctggacacgcagctgtgtatgggggccgccggaytaaacagtcaagacagggtgaacaatgtgaggaaaagctgttatgagagctgctgctgaataaaatcatctttcactgcctacggcccctagagtgttctttctgctcattcacccactcccttcagacctcaggatgggctggaacccaacctcaagcataacaattggca

SEQ ID NO: 628906 - DNA, 569 bp, Homo sapiens
gcaacatgggtgaatttgaaagacactatgttacaggaagtaaaccaggcacagaaatacaaacattgcatgatctcatttatatgtggaatctaaaagagtgagttcatagaaatagagagaacagtgtttattggakactcaggaggatagggatgatggaagattgggagatgttggtcaatgggtacaaatttagacagacaggaagaataggttctgctgttctataacacaggagggtgactatgcaaataccaatgtagtgtatatttcaagatagctagaagaggttttgaatgttgtcaccacaaagaaataataagtgtttaaagtgatggatgtggtgattaccccgatttgattattatgcaatgtatacatccattgaaacatcatactgtatataaatatgagcaattattatgtgccaattataaatgtaaacaattattaataaaaagcatttaagaagatgccataatttaacaaaaaatatttttttaaaaaagagcagtaaatatttttaatttagagatataatacttatacataaatagcagcaactg

SEQ ID NO: 628907 - DNA, 569 bp, Homo sapiens
gcaacatgggtgaatttgaaagacactatgttacaggaagtaaaccaggcacagaaatacaaacattgcatgatctcatttatatgtggaatctaaaagagtgagttcatagaaatagagagaacagtgtttattggatactcaggaggatagggatgatggaagattgggagatgttggtcaatgggtacaaatttagacagacaggaagaataggttctgctgttctataacacaggagggtgactatgcaaataccaatgtagtgtatatttcaagatagctagaagaggttttgaatgttgtcaccacaaagaaataataagtgtttaaagtgatggatgtggtgattaccccgatttgattattatgcaatgtatacatccattgaaacatcatactgtatataaatatgagcaattattatgtgccaattataaatgtaaacaattattaataaaaagcatttaagaagatgccrtaatttaacaaaaaatatttttttaaaaaagagcagtaaatatttttaatttagagatataatacttatacataaatagcagcaactg

SEQ ID NO: 628908 - DNA, 599 bp, Homo sapiens
attaatatgttcagttacatttagaatcgtttgacagaaaattaataatgattagaattatactgtttgtattgtctaactttatcagaaagatataaaattgcttaaagttttaggcattttgaacaagaaatatatgtatatgtaaatgcgtatatttaacactaaatataacactaaattatactctaccatgaatatttgtgaaaattattgaaaaatgagaatgagtttatgaaataacatgcaaaagatagtaattttatatatgatgatgattataatgtacattatttcacaaatggataaatactgaaataaactttaataaaaacatttttactaggtagataagatttttaatattttcagaatgaattatataacataaaatttgagtgtatatgttaatcaaaaaagtgaggaagaaaatctaaaatgtcaagttasagaaatggaattgcttgaaactcaaaatgaaaaaaatatataaaaaataataatatattaaagagaatgccaggattcagtttggataaggaaccttttttaaaaaaatgtttgtagagatagggtctcactatgttgcccaggctggt

SEQ ID NO: 628909 - DNA, 537 bp, Homo sapiens
cctttactcagttttcagtctaacttaacaaactctgtggtgggctcttgtgtacggtgacttcactggagtatgttggggtattggtaccattgaatcagctgtggaacaagaagaaaactgggccaaatggtaaccaccctgggccaagcagcrggagctgggatcaaacaacagtgttgcaaggcttgatctcaccaaatgcagccaagaagtctaatgtccaatacaaatattattgagcttagacatgacttaggtatgtatcagtactgagagggcctccctagttaatggagcacagtgacagagaatctgaacaaagataatattacaggcaattttaggcctgtgactgtagtatacacttacaaagctaaaaaaaaggacatacaaaaagctgagcataatatcaatgaccaattaaattttctgctcctcaggactagagtgttgactgaaacatcctgtaggatgattaatcagaaattagaagggggtgaagcagacaaggccactctaatgggaaaaaagggt

SEQ ID NO: 628910 - DNA, 537 bp, Homo sapiens
cctttactcagttttcagtctaacttaacaaactctgtggtgggctcttgtgtacggtgacttcactggagtatgttggggtattggtaccattgaatcagctgtggaacaagaagaaaactgggccaaatggtaaccaccctgggccaagcagcaggagctgggatcaaacaacagtgttgcaaggcttgatctcaccaaatgcagccaagaagtctaatgwccaatacaaatattattgagcttagacatgacttaggtatgtatcagtactgagagggcctccctagttaatggagcacagtgacagagaatctgaacaaagataatattacaggcaattttaggcctgtgactgtagtatacacttacaaagctaaaaaaaaggacatacaaaaagctgagcataatatcaatgaccaattaaattttctgctcctcaggactagagtgttgactgaaacatcctgtaggatgattaatcagaaattagaagggggtgaagcagacaaggccactctaatgggaaaaaagggt

SEQ ID NO: 628911 - DNA, 406 bp, Homo sapiens
ttcctaaaccatgtgccacaaaacactcatatattctgggtaatcttaattgatattaagaaaaatatgcaatattatatgcctccttttgagattcaaattgaaaattctgtctcaatttgagattgagaaattctgtctcaatttgagaaaattctgtctcaaattttgagattcaaattaaaaaaaatcggtctcaatttgaattacaaaaataaaaataaatgttgtgtaatccggcatgttttagaagtatatgaaatgccttaaaaaawtttttttttcctagtgacaccttgctgacctcttgtgtctcaagtgaaacagtttggaaatgctcccctagtctgtaaggacaacattaacaagccttatctcttgtctctctttccaccttgtaacctgt

SEQ ID NO: 628912 - DNA, 462 bp, Homo sapiens
tcaaatgacaacattgaaattcagtagtagaggccaacatagacatttctgaaatttgaatataaattttctgttatgaaagaaccaggaaaaaatataaacctaaaaattatatttcttgtcaatttatagaagtttataggcttcaaaataaaaagtaataaaaatwcaaaattaaattatttttatcttttagagcctgatgaaactaaacattatcttgtcttattatttgcaatcatagctaaagaagttctgaatatttacatagagataagggttcctttagtaactttgtacctgggctgtctttcatggaaataaccacaattccttcaagacctcagaaggtatagatcaatgtggaatctttgatgtgtttcatttccaagaacagccaaagaattagaaggacatacaggattatcaaaatagtcacaagcctgaccactcaacaaattt

SEQ ID NO: 628913 - DNA, 462 bp, Homo sapiens
tcaaatgacaacattgaaattcagtagtagaggccaacatagacatttctgaaatttgaatataaattttctgttatgaaagaaccaggaaaaaatataaacctaaaaattatatttcttgtcaatttatagaagtttataggcttcaaaataaaaagtaataaaaattcaaaattaaatwatttttatcttttagagcctgatgaaactaaacattatcttgtcttattatttgcaatcatagctaaagaagttctgaatatttacatagagataagggttcctttagtaactttgtacctgggctgtctttcatggaaataaccacaattccttcaagacctcagaaggtatagatcaatgtggaatctttgatgtgtttcatttccaagaacagccaaagaattagaaggacatacaggattatcaaaatagtcacaagcctgaccactcaacaaattt

SEQ ID NO: 628914 - DNA, 589 bp, Homo sapiens
tctgacttgaattccagttgctcacccttttattaactctgttttctacactgtaagattggaattataatcaaatctttttttcttctttttgagacggagtctcactcagtcacctaggctggagtgcagtggtgcgatttyggctcactgcaacctctgccttctaggctcaagtgatcttcctgcctcagcctcctaagtagctaggaccacaggtgagagcaaccatgcccagctaatttttgtattcttgataaagatgggattttgccatgttgcccaggctggcctcgaactcttcggttcaagtgatccacctgccttggcctcccaaagtactgggattacaggtgtgagccactgtgcccagcctcaaatctttatatcagaagcaaaccacagaaattttttgttctgtttgtttgaggtgacagaaatttccagcaagctagacaactgaaatcagaaatgagcaggcttggtggcaggtaggtaacagtagatttcatctcctcccaagcactctgaggccaggcctattccctcttacactatcctctggctctggccatggaggtaaaaagac

SEQ ID NO: 628915 - DNA, 589 bp, Homo sapiens
tccagttgctcacccttttattaactctgttttctacactgtaagattggaattataatcaaatctttttttcttctttttgagacggagtctcactcagtcacctaggctggagtgcagtggtgcgatttcggctcactgcaacctctgccttctaggctcaagtgatcttcctgcctcagcctcctaagtagctaggaccacagrtgagagcaaccatgcccagctaatttttgtattcttgataaagatgggattttgccatgttgcccaggctggcctcgaactcttcggttcaagtgatccacctgccttggcctcccaaagtactgggattacaggtgtgagccactgtgcccagcctcaaatctttatatcagaagcaaaccacagaaattttttgttctgtttgtttgaggtgacagaaatttccagcaagctagacaactgaaatcagaaatgagcaggcttggtggcaggtaggtaacagtagatttcatctcctcccaagcactctgaggccaggcctattccctcttacactatcctctggctctggccatggaggtaaaaagacaggggagctgaa

SEQ ID NO: 628916 - DNA, 564 bp, Homo sapiens
ttctagggtcgggaagagctttttctcaaagtcaagatgagatttttaaatgtctgctaaaatccatacacatctgccctaccatcagaccgcaactaaccaaaacatctctggctgtttaaacactatgtccaaacacactttcaaactcgtaaacaattcggtaaacccaataaaagtaatgtataaatagaacatatgtagcaaggctttctgacatttwaaaaaatcaatccatgtcattgagcaaaatttcctttaaacgtagagatagtcaagtaagtggatagaagggtttccaagtcctagcatccctgaagtaaaagaagagtaattcaactttcttattattagtttgactgtacaactggctgcaatttttgaacaccacttctagaaaaattcagtttaaaatagcatcagtaagactcatatcaagatttttaaaaattggatagtctgttaaccaaattgctctgtaaattcactcaataatatgcttctgtgtagtagtcctttgttactacacgttcaatgagagtccttacttttttttatcacaca

SEQ ID NO: 628917 - DNA, 558 bp, Homo sapiens
cacacacatctttcatttatctatacaagtgaatgacatcttgggttggtataaaatagatccatccaatttagtctttcttcaactcaaataaatgttcttctattgtttattcattgtttcctctctgccatttgtttctttttctccttctgtacctcatagcattgattaatctatcctaagatgctcatgatttctattcttttgcatttttgctctatgatttaagaaattcttgttttcttaagctaccaactatgcactgagtatcctttccwttttgtctcattttaaaaaattgctcttattatttaagttgctctgtctgcttcattggctctgtttggttgaatcctcttcatattctgtttctcttcctgtctcccttcaggtgttcttttaaatctctgtctattgtttgaagttgaggtgtaggcatgcattgtgagtttcagtagatctgtgagtgatgttaggagaagcattctctgccacatgtgtggtttgacttagctggctttcagtctactattacaccaccagcagagggctgcc

SEQ ID NO: 628918 - DNA, 460 bp, Homo sapiens
agtcttactgctacatgttagtgcctgtcacagagattatcaatgtgaaaggtgggtcaacagaaaataccatcaccttctgtatatgtgggttccacatctgtgcattcaaccaactacaggtcagaaatattcccaccaaaggatgcttgtgcatatactacacatgtacaccttttgcttgtcattaatcctaaacaatacaggataaccgtgatttacatagcgttgatgttaagtattataagttatctagagctgatttaaagtatattggaggatgtatatagattataygcaaatattaaatactacatttttctatataagggacctgagtgtctataaatgttgggttctatggggcatcatagaaccaattcccccacagatagagaaggatgaccatataaagattggaacatacaaagacacaaagatttacagtacagaagggaaa

SEQ ID NO: 628919 - DNA, 556 bp, Homo sapiens
taaagtatattggaggatgtatatagattatacgcaaatattaaatactacatttttctrtataagggacctgagtgtctataaatgttgggttctatggggcatcatagaaccaattcccccacagatagagaaggatgaccatataaagattggaacatacaaagacacaaagatttacagtacagaagggaaacgaatatacctgtgaaaccactggattcaggtataaaacacctagagaatagtttacagcattaaaagcatatattaaaaataagaaaggctcagaatcagaaatatagaagttcatctaaaaacatttgaaaaataacagaaaattaaaaccaaataatgtggaaataagaaaatatgtaagtaaatattgcccatgaccttgaagtttatataaaatgaacaaatacaaaggctcaacttcctaaaaccaaaacaagaagaaatagaaggtctgaaaaaggccacatcaaagaatatccaaaaatatgctacgtcaaaaaaaatcctaccaaaaaaagtgaactcagtttggaaagtc

SEQ ID NO: 628920 - DNA, 568 bp, Homo sapiens
gaggatgtatatagattatacgcaaatattaaatactacatttttctatataagggacctgagtgtctataaatgttgggttctatggggcatcatagaaccaattcccccacagatagagaaggatgaccatataaagattggaacatacaaagacacaaagatttacagtacagaagggaaacgaatatacctgtgaaaccactggattcaggtataaaacrcctagagaatagtttacagcattaaaagcatatattaaaaataagaaaggctcagaatcagaaatatagaagttcatctaaaaacatttgaaaaataacagaaaattaaaaccaaataatgtggaaataagaaaatatgtaagtaaatattgcccatgaccttgaagtttatataaaatgaacaaatacaaaggctcaacttcctaaaaccaaaacaagaagaaatagaaggtctgaaaaaggccacatcaaagaatatccaaaaatatgctacgtcaaaaaaaatcctaccaaaaaaagtgaactcagtttggaaagtctttctatagagaaacctaaggccc

SEQ ID NO: 628921 - DNA, 624 bp, Homo sapiens
taattaaaacaaaaatttctacattttgaatgtaaataacttctttcttcagaatcaatgctactgaaatacatgaatgctactgagatgtatgatcccctgggcctttaaccaatctagtcactaartttctgttttattgtcctcttaaaaaaagcacttttctgtaagagaaacatgttttaatgaaaacataaagatactggctaaaacttggccctggtgcctgaagacttgtggaagtcaatacattacttgtgtcttaacacactacactagacgtaaacaactaaatttgcgtggcaagacatcttcattttgctttgttttctaatgcatatctacagtattaacagtgcaatattttactctgaaaagtgtcttaatgatgtattaatcagttaaacatttagatacagtttttccacagacggatcatttcccattttacaaacttgattttaaaaggcttagaaaatctgtaactttttaaagcaactaaatataactgaaaaagacaaagataataaaataaagagtatggatttcccaaccctataccacccaactgccacctaaacatcatcatggaaattaattagaacagtaatgggaatggagtat

SEQ ID NO: 628922 - DNA, 551 bp, Homo sapiens
agtacgcctctctatgcctgggcctgagcacagaggctgcttggccactggaatggaactacagtcctcccttgcagagccaaccacagcacctgtatctctgctggaagcaggaccatcatttacagctcacaaacggggaacacctgggcactgaaaaatacatgatctggttttctttgtcccaagaggtgctcccttcatgaactgcactctccctttttttaggagcagcactccctccccagggacagactccctccccaggggatagacccctggaaattctgcagcttccttaggtccagccagtcctttgctgctgacataatctgagcaggcactagggaatgtctgcaggggttcccatgatatggagacacaagggctgagattccctgggtaagacacagttatctgatagcttcaccacaagtatggtgcctggtcaccactcctcaagttagagagagggtgaataacctgcagggagttkgtagtctgataataccctcaaaaagtcaccaatttgctgtctataccagcctata

SEQ ID NO: 628923 - DNA, 580 bp, Homo sapiens
tagcagtgagcagagggagagtagaagtacgcctctctatgcctgggcctgagcacagaggctgcttggccactggaatggaactacagtcctcccttgcagagccaaccacagcacctgtatctctgctggaagcaggaccatcatttacagctcacaaacggggaacacctgggcactgaaaaatacatgatctggttttctttgtcccaagaggtgctcccttcatgaactgcactctccctttttttaggagcagcactccctccccagggacagactccctccccaggggatagacccctggaaattctgcagcttccttaggtccagccagtcctttgctgctgacataatctgagcaggcactagggaatgtctgcaggggttcccatgatatggagacacaagggctgagattccctgggtaagacacagttatctgatagcttcaccacaagtatggtgcctggtcaccactcctcaagttagagagagggtgaataacctgcagggagttggtagtctgataataccctcaaaaagtcaccaatttgctgtctataccarcctataccag

SEQ ID NO: 628924 - DNA, 591 bp, Homo sapiens
gtgtctaaggttacccagtgggtataaggcagaccaaggattctagcctttcagaatccaaagcctagtatcttctctcttgcccttttagcacctccccgtattagggaagtttgccatttagacggtgtaattaaatttcaataattgtaatttatcagctggtattatcactgtattagtccattctcatgctgctgataaagacatagctgagactaggcaattttcaaaagaaagaagttcattagacttacacttccacatggccagggaggcctcacaatcatggtggaaggcaaggaggagcaagtcacatcttacatggatggcagcaggcaaagagagagcttgtgcagagaaactcccatttttaaaaccttcagatctcatgagacccattcactatcacaagaacagcacggcaaagacccacccccatgattcaatcatctgccaccgggtccgtcccacaacatgtgggaattatgggagctacaggatgagattttggtggggacatagccaagcygtatcaaccacaaagtgaaggaagcaggaacacctgctttagtagatttagcaaagctt

SEQ ID NO: 628925 - DNA, 635 bp, Homo sapiens
cctgtctcacattccattgtctttccccttgaggagtttacattcttattgaaaggatggtaaatgaagcaacaaaaacaataacacaagtagcttattaagtcaaattgaagcataaactctatgtcctatagaagtttagaagagaaaagaattgagtctggacagattgactagggaaagcaccatgctgggatttcaggtaaactttgawggttttgacaattgtaattaagtaggtgggagaaggtgggcattgtgagaaaatggaatttatatctcaggaaatgaatgattgaaaattttagattaaattttatgagattaaaaatatttaagaataaatacatgtgcatgacataaaaataaaaatgtataaatagtgggtacctatccagtaacagagaaatccctccccaaagaggcaatcactgttgtcaattccctttcagagatagcctgtgtatacaaaaatgcgtgtatgtgtgcctatctgtctgtattttttttccctggaactgaccttttccatgaagagataccttgctcttcaccacagctcaagtcaatatatgagagtgcttactttatttaaatactttagccatttgcctattaatagacatttgggtcac

SEQ ID NO: 628926 - DNA, 633 bp, Homo sapiens
gtgctgtggtggtatgggggttatttttagtactttcggcactttgtgtttttccaaaactgttggcttctatgaacaagatgtaaaaatcactagatttctttctttacagtattgcagagcagtttaaaaagaaagaaaacgtaatattatctcacatttctaaatctgagtttgcttgccatttttatatttttaaacctatcttttattttctgcacaggcatagattgagcttaataccaatattggtttactgattagaaaagtgatgcctactagcaagaaatatgaacaatatagagaccaacaaatcagaaaatgaaaatcccgctttaatcaccatcagatgaaatctcaatgaagagttttgaggagagtcatacagacttttctctgcatattttcattacatatgtaaatgtgcacgcatacrtgcttatttttgacctaagataatattatatgttctttcctgaaggtttcctttttttccatttgtcagtgtgttttgctcatggttgcatgccaatacatgtagcattactagattactttttaactatttgatgttccattatgactatatcatagtttagtaaaccagttgccttttgatatatatttgttatt

SEQ ID NO: 628927 - DNA, 617 bp, Homo sapiens
tgcacatttaaaaaaactgaagcctttacatgagcaaattgtcactgtcgtgacaggctttttaaaggtagaattattttaggaaaccaagtaaagcctaaacccaatggctatgttggtgataggtctcatcagctccacattcaaaatgccaagatgcaataatttgcccaatctcttgagttttagagacattctaaaccgtcctttgtgtggctttgtgaagctctcaccatggtgtctcttaatctcaytgtcatggccatcttcatccatgtaccttccccactgtaccatgctttctcttagctgaccgtgtttaggattaactcagtaaatggtttcctaatgtgcttccagatggagctcagagagcaatttaacccagttgtaataaccatgttttagaaagattaagcccatttggattactttacaccaaagaaggggatttatctgaaagatccagatgaatttcatggatcccatgagcttaaaacacagtcgtccctcagaaaagactagaaccaggaactgaaaagccatatagaactgaggtgacttcatcttcccaagaccttggggtttctcatctctgtgtctctctgctctcattc

SEQ ID NO: 628928 - DNA, 656 bp, Homo sapiens
ttcctctctttctgtctgaaactcaatgatgccctcatataattagatttgtacacattcccaatccagtttgacaaatattcattattcctgtaatatgtgccagagttgagcaaagggctgaagaggccaaggtcaccaaggcccaatgggacttcaggcagatgtaccacctcaaggtcactatgtggctctggacaagccacagccttttctcatgttggcttccgattcctaaaatatattatttttatataatatattatataaaatataaatatattgattccttctacattttggatatgagcccattttcagatgtatagtttgcaaatatatgttcccattccgtrggttgtctttttgtctgttgactgcttccctcactgtgtagaagcttcttcgtttgatcttatcccctcactccagtcacagtggctactatcagaatagcaaaagataacaagtgttagtgaaaatgtggagaaaagattgctggtaggactctaaattagtacagccattatggaaggagcaatatggaagttcctaaaaaaattaaaaataggactaccatatgatccaacaatcccactactaggtatatatccaaaggttataaaatcaatatgttgaagagatatctgcaatcc

SEQ ID NO: 628929 - DNA, 645 bp, Homo sapiens
attccattcatatgatatgcccagaataggcaaatctgtagaggcagaaagcaggttcatggttgggagaatgggctgggagaaaggggagaacagggtgattactagtggggatggggtttcttttgggggtgataaaatattctaaaattaattatgatggttgcacaactctgtaaatatactaaaactattgaaatttacactttaaatgggtgagttgtataggatgtgaataacatctcaataaaatgattacaaaacattttaaaawatatttctcaacatatttttcaggagctcttcgtctgcccaccctttcctgttcaccttcccattcttccagggcatgtgtaaacttgtccaagcatttagactttgaagcaaaacaaaacttggcctaagggatttttctcaaatcaagctacttttggcaaacattttaattggctgacatgcaaagaaaatccaaatggcatctatctcatttaattaaacactttttagtatttgtttctgcttctctaccctctgtacacctcttttttccctgtatcttactttattttggtatagtagaaaaagcactcaacctgacttctattcatatgtgtttgttctcaacttctaggaggaaagtttgat

SEQ ID NO: 628930 - DNA, 645 bp, Homo sapiens
attccattcatatgatatgcccagaataggcaaatctgtagaggcagaaagcaggttcatggttgggagaatgggctgggagaaaggggagaacagggtgattactagtggggatggggtttcttttgggggtgataaaatattctaaaattaattatgatggttgcacaactctgtaaatatactaaaactattgaaatttacactttaaatgggtgagttgtataggatgtgaataacatctcaataaaatgattacaaaacattttaaaaaatatttctcaacatatttttcaggagctcttcgtctgcccaccctttcctgttcaccttcccattcttccagggcatgtgtaaacttgtccaagcatttagactttgaagcaaaacaaaacttggcctaagggatttttctcaaatcaagctacttttggcaaacattttaattggctgacatgcaaaraaaatccaaatggcatctatctcatttaattaaacactttttagtatttgtttctgcttctctaccctctgtacacctcttttttccctgtatcttactttattttggtatagtagaaaaagcactcaacctgacttctattcatatgtgtttgttctcaacttctaggaggaaagtttgat

SEQ ID NO: 628931 - DNA, 645 bp, Homo sapiens
attccattcatatgatatgcccagaataggcaaatctgtagaggcagaaagcaggttcatggttgggagaatgggctgggagaaaggggagaacagggtgattactagtggggatggggtttcttttgggggtgataaaatattctaaaattaattatgatggttgcacaactctgtaaatatactaaaactattgaaatttacactttaaatgggtgagttgtataggatgtgaataacatctcaataaaatgattacaaaacattttaaaaaatatttctcaacatatttttcaggagctcttcgtctgcccaccctttcctgttcaccttcccattcttccagggcatgtgtaaacttgtccaagcatttagactttgaagcaaaacaaaacttggcctaagggatttttctcaaatcaagctacttttggcaaacattttaattggctgacatgcaaagaaaatccaaatggcatctatctcatttaattaaacactttttagtatttgtttctgcttctctaccctctgtacrcctcttttttccctgtatcttactttattttggtatagtagaaaaagcactcaacctgacttctattcatatgtgtttgttctcaacttctaggaggaaagtttgat

SEQ ID NO: 628932 - DNA, 578 bp, Homo sapiens
tgaaaacaagttaatgtgtggtaagtaatcaaaagcgttgtgaaattctggaggttaattttggctgtgtmtgaggcttcatggagatgattgtgtttgaactgaaccttgaaggatgatttcgaccaacatagttggctgtctctttatatgctaccagcctataaaaagaggtatctaagataggagtgtctccacttctcggtgtttcagtttcatgatagcctcatagtaaagaaatgtatttcactggatgactttgaaaatttttagctgacatataattctgtaatttgattttaggatttcaaaaactctcaaaacccagaaatgagtcagctaatcctcttaatatgcagtcatgtgtcacttaacaatggggataagtactgagaaatgcagctaggcagttttgtcatgcaaatatcacagagtgtacttattcacacccagatggtatagcctactacacacctaggctatatagtatagtctattgctcctagtctacaaacctgtgcagcatgttactgtactaaacactgtaggtagttgtagcacaatggtatttgtgtatc

SEQ ID NO: 628933 - DNA, 578 bp, Homo sapiens
tgaaaacaagttaatgtgtggtaagtaatcaaaagcgttgtgaaattctggaggttaattttggctgtgtatgaggcttcatggagatgattgtgtttgaactgaaccttgaaggatgatttcgaccaacatagttggctgtctctttatatgctaccagcctataaaaagaggtatctaagataggagtgtctccacttctcggtgtttcagtttcatgatagcctcatagtaaagaaatgtatttyactggatgactttgaaaatttttagctgacatataattctgtaatttgattttaggatttcaaaaactctcaaaacccagaaatgagtcagctaatcctcttaatatgcagtcatgtgtcacttaacaatggggataagtactgagaaatgcagctaggcagttttgtcatgcaaatatcacagagtgtacttattcacacccagatggtatagcctactacacacctaggctatatagtatagtctattgctcctagtctacaaacctgtgcagcatgttactgtactaaacactgtaggtagttgtagcacaatggtatttgtgtatc

SEQ ID NO: 628934 - DNA, 611 bp, Homo sapiens
caatcttaactgttttattgcacatcttttttaagtttttaatataagctgggaaatttgtttttcctttgattcaacccattgttcctatcactgacccccattttcagagagaggcggaggcatctttcatcctttccctcttcttggcagccttctcttcagagtgacttcagtgatctaaagaatgttggtcctgccctctggcattagaatsccataaagatctctaagtttgcctgtgcgtggaagcactgtctccataaagtttgagcatgtccattctctgtaagtagtattcctgtccctttcctgcactacctggactttttgaaaaactgctgaaggatagtggatttctatctgctactaactgtagcaagcttgaaatttctttggaaatatttatttaatttattaatttattatttattagagatagggtctcattctgttgcccaggctggagtgcagtggtgtgatcatagctcactgcagcctcgaactcctgggctcaagcaatcctcccgcctcagcctcccaagtagctgtgactacaggtgtgcaccaccatgcttggcttttttttttttttttttttgtagaaacag

SEQ ID NO: 628935 - DNA, 611 bp, Homo sapiens
caatcttaactgttttattgcacatcttttttaagtttttaatataagctgggaaatttgtttttcctttgattcaacccattgttcctatcactgacccccattttcagagagaggcggaggcatctttcatcctttccctcttcttggcagccttctcttcagagtgacttcagtgatctaaagaatgttggtcctgccctctggcattagaatcccataaagatctctaagtttgcctgtgcgtggaagcactgtctccataaagtttgagcatgtccattctctgtaagtagtattcctgtccctttccygcactacctggactttttgaaaaactgctgaaggatagtggatttctatctgctactaactgtagcaagcttgaaatttctttggaaatatttatttaatttattaatttattatttattagagatagggtctcattctgttgcccaggctggagtgcagtggtgtgatcatagctcactgcagcctcgaactcctgggctcaagcaatcctcccgcctcagcctcccaagtagctgtgactacaggtgtgcaccaccatgcttggcttttttttttttttttttttgtagaaacag

SEQ ID NO: 628936 - DNA, 484 bp, Homo sapiens
agaccaacccttcctcttcctcctcagcctattcaacctgaagacgaggatgaagatctttataattatctacttcctctcaatgaatagtaaatgtttccctccttataattttcttaaccttttctgtagcttcctttattataagaacacagtatataaaacrtatgcaaaatatgtgttagttgactgtttacattatcagtaaggctgcccgtcaacagtaggctattagtagttaagttttggggaagtcaaattatacacaagagtttttactgtgcagggggtcagtgccccggccccctctctgttcaaggggcaactgatcagcagatggataaaataaaaattccaaaaagaagcaaaccctatcaggagtgatatttaaaatgtaatagccagtaaagtttaggtattaagcaatcagaatggcccaggtgaactgggcttagagttcacctggttgattattggctccagt

SEQ ID NO: 628937 - DNA, 561 bp, Homo sapiens
taaaccaacctactcataacagactctgtagtactcatgatgacagaattgtgaatgaggccctttcctatgtgttgagcaattaggttgcttccaaacaactgaagataagctcaaaacaaaccattggtaaaacaagccaggcaaaattcaatgtaatcttcttcctatttctttatcacttttatttcttcatagaatactacataacatttygtctctgggggaatttaatctgctctttttttttttccaaaacaacttcaagaagaaaatcttccatacaaacattagcttttctttttattattatggctcaatttatccaactttaattactttaaaggcaaagtactttctgtccaagataagagacttgttcaactctcatttggtattctctgcataactttttgagaccgaaaaaaaaaaaaaaaaagatcaccctaatttacaaaggagaacgtcacaaggcatggtaaggttgaactgcttggccgggaggtaggtcagaggcaggtgggagaatagggcctgagtctcctattttctacctatttg

SEQ ID NO: 628938 - DNA, 567 bp, Homo sapiens
ctgtggctggtttttgttttgttttgtttttaagagacagggtctcactctttgttgcccaaggtagagcacattggcatgatcatagctcaccacagcctcaaactcctgggttccagcaatcctccacttcagtcttccaagtagctgggatcacaagtgtgctccaccacaactggctaacttttttatttttgtgtgtggagatgaggtctcacaatgttgcccacacgggtctttaattactggcctcgagcaatcctccaatcttggccttccaaagtgctggaattacagrtgtgagctccaccatgcctggctagtggctggtttgatctatccacagcactcagaccttctccctagcagcaataaggctatcttgctttcttatcattcatgtgttcactagagtagcacattaatttccttcaaaaacttgctttttgcattcataatttggctcactagtgaaagagtcctagtttttggtctgtctcagcttttagcatgccttcctcactaagcttaatcatttgtagcttttgctttaaagtggaagatgtg

SEQ ID NO: 628939 - DNA, 561 bp, Homo sapiens
tggtatgtgtctcattcagtagtaaatatatatttactattttctatatgggagaagataacccctgcctttagaagttttaaatgcagaagaaaaagtcacactaaaaaataactgcagaaccatggtgtatgttaaatgtgtgtgagcattctttctacatatctggcctagtgtcgagtggatttcatagcatatagaatagagtatatagatgtttgttgaatggctatatgcatgactggatacttgaacaaacctccaagtagagtgattaaagcaaaaggcttgatgaagaggtaggcttttaagaggcaacrtgggagccagaaggcaagtattccaggcagagagaattaataagagttgatttgcttttccaaggaaggaaaagataatgtggcatgaagcctgctgacaaacaggtaactgggaggatttggcttttaagatttttgtacacctgactatacagaaaagtctagtgtataagacttttctttagtggtggacaaatttggaattctgtagagaatgcatttcccttatctgttatccttg

SEQ ID NO: 628940 - DNA, 561 bp, Homo sapiens
tggtatgtgtctcattcagtagtaaatatatatttactattttctatatgggagaagataacccctgcctttagaagttttaaatgcagaagaaaaagtcacactaaaaaataactgcagaaccatggtgtatgttaaatgtgtgtgagcattctttctacatatctggcctagtgtcgagtggatttcatagcatatagaatagagtatatagatgtttgttgaatggctatatgcatgactggatacttgaacaaacctccaagtagagtgattaaagcaaaaggcttgatgaagaggtaggcttttaagaggcaacatgggagccagaaggcaagtattccaggcagagagaattaataagagttgatttgcttttccaaggaaggaaaagataatgtggcatgaagyctgctgacaaacaggtaactgggaggatttggcttttaagatttttgtacacctgactatacagaaaagtctagtgtataagacttttctttagtggtggacaaatttggaattctgtagagaatgcatttcccttatctgttatccttg

SEQ ID NO: 628941 - DNA, 585 bp, Homo sapiens
tgccagtctacagtgacctgtattgctagtggcaatgctgaatagtttcacaaaaagaaaaacatgtctcaagctaggagttctggagccrtagctgcagtgagcccaacttgcttccagcagttgtatgaatatttacccagctgtgatgaaattaggtttggttttaaggatccctgaaggtttaacagtggaggctgattgacactaggtgatcctgctggggatttttgttttgagtttgtttcttgctgaaaagctagggaagtacttttccatcctatagcattgggacttttgtcacaagccaatagtttaccagttgtggtaataagaaacatgcattttccgcatacttgaaaatagaaaattgccattttaactgttacagctggcttatggctatgatttcaggctaattacagttttctcacatatactaataacgctaatttagaatttttaaataatcacactctcaggtagaactgacaagcttctgagaagtgaaagctttgtgtatatcctggaggaaatttaggttgttgcagacttcatgccctgccctacagtaatgagatgtat

SEQ ID NO: 628942 - DNA, 585 bp, Homo sapiens
tgccagtctacagtgacctgtattgctagtggcaatgctgaatagtttcacaaaaagaaaaacatgtctcaagctaggagttctggagccgtagctgcagtgagcccaacttgcttccagcagttgtatgaatatttacccagctgtgatgaaattaggtttggttttaaggatccctgaaggtttaacagtggaggctgattgacactaggtgatcctgctggggatttttgttttgagtttgtttcttgctgaaaagctagggaagtacttttccatcctatagcattgggacttttgtcacaagccaatagtttaccagttgtggtaataagaaacatgcattttccgcatacttgaaaatagaaaattgccattttaactgttacagctggcttatggctatgatttcaggctaattacagttttctcacatatactaataacgctaatttagaatttttaaataatcacactctcaggtagaactgacaagcttctgagaagtgaaarctttgtgtatatcctggaggaaatttaggttgttgcagacttcatgccctgccctacagtaatgagatgtat

SEQ ID NO: 628943 - DNA, 605 bp, Homo sapiens
ctccagcatttcttgtgtgtgaacttgatcctgggactctaaaggtttgagaagtgttgctctcatgaactcggctcttgcctgccctggacccttgccactcaatttagataggactcaaccaaatgtagctgctaccaggtcctgggaggtacagcagcaccctggttgtgtaaatgaaagagtgcaccccatttagcattctggtgcctgctaaaatttggtyggctgcacaaagatggccacacatacattcaacagagaggcctgattgtgagaagtaagtatgcaactgggtctctttagactgcaacatgcagattaatctcagtaaaaatcatttgaattgatcacagcccattttgattttagaaagaggttcctaagctctggctgtgtgtcagaatcaggcttttaaacaatattcattcctgtgtttcacctgcaatactaaaattcagtctaatctgaggcccaggtgcctgtttaaaatacaccttccagatgtgtctgcagccagtctgcagagtgtttgtgaattactgatctggatggtgcttctcaaacataagtgaacattagagtcaccaggagggcttcttaag

SEQ ID NO: 628944 - DNA, 610 bp, Homo sapiens
attttttcttttagtaatactttcagaaaaaaatctgattttcttaaggttcttagccttaggcaggtttatatgctatttttgttttgttggcttatctggtggtatttattaagaactcatgtgggtgtgtatttctgaacccttctctctctctcgtgttcttaaatttcctgcaatcaatatggactactaaaaacaaaagacttctcctgcgtatggttacatagtgtacattgatcttatgaagcatgttgaagagatctggtgcttatcttcctagcacttaagcaactgatgaatgttaggcttacctagggagctttgaagaatccagatacctgatctggggtagatccctaaaataagtattttttaaatggtgtttaggtgattctagctttcagtcagtgctaagagccattgacttagaagttaattgtcatttgttttctacaatttcttttttaatttaactgcccatctagcacgctatggaaatggtctccaatatctatatatttaagtgaaaaaagcaagacatggatatttattaratgtatacatgtatgtatatatacgtgtatgtatgtgtgtgtgtataacatgg

SEQ ID NO: 628945 - DNA, 610 bp, Homo sapiens
tgtcctatgggttggaatttctacaaagaaattaatgtcagatgaaattattaggagggaaaataaagtacttaatttaaataatttgttttgatatcaaatatcacaatgatttgaataagcaaaaactgacaaaatacagtgctgaattattgattcagcttagggtattcaatgattacattgcacaatatttcwgttcatgggtccagttcatcaagtgaactgtgggttcatggactcctcatgcttttcacatgatgctccctttcatccttgtacatgtgtcgtcgtgggagtttatgacaaatcaagttcacttgaccccaatctcagtatccgccaccccccaggcatgatgaaacatgtggttttagtcagcagcttttgtggttgtattagtctgttttcatgctactggtaaagacatacccgagactgagcaatttgcaaaagaaagaggtttaatggacttacagttccacatggctgaggaggcctgacaatcatggtggaaggcatggaggagcaagtcacatcttacatagatggcagcaggcaaagagagagcttgtgcagagaaactcccatttttaaaaccatcagatct

SEQ ID NO: 628946 - DNA, 610 bp, Homo sapiens
tgtcctatgggttggaatttctacaaagaaattaatgtcagatgaaattattaggagggaaaataaagtacttaatttaaataatttgttttgatatcaaatatcacaatgatttgaataagcaaaaactgacaaaatacagtgctgaattattgattcagcttagggtattcaatgattacattgcacaatatttctsttcatgggtccagttcatcaagtgaactgtgggttcatggactcctcatgcttttcacatgatgctccctttcatccttgtacatgtgtcgtcgtgggagtttatgacaaatcaagttcacttgaccccaatctcagtatccgccaccccccaggcatgatgaaacatgtggttttagtcagcagcttttgtggttgtattagtctgttttcatgctactggtaaagacatacccgagactgagcaatttgcaaaagaaagaggtttaatggacttacagttccacatggctgaggaggcctgacaatcatggtggaaggcatggaggagcaagtcacatcttacatagatggcagcaggcaaagagagagcttgtgcagagaaactcccatttttaaaaccatcagatct

SEQ ID NO: 628947 - DNA, 498 bp, Homo sapiens
ggctttaatgcagaaggtttamatcaactggctgtgaggagaatttccaaggtcttcttggatggtaaaaaatattcatttcagtaatccctaaatgaaaatttagctatttctttaattatgaacataggcataaaccacagtagtatgaattgtgactttgtcactgtagtaattatgaatactattatatttcattatctttgttgaagatgtcttgaagtattatttatgctctttactatttaaaaattatagttgttattagacctactatttgtacaatataatgcattaataaagaagcaaatatattatcacaaatttgttttttaaaatgtcttaaaactgtgatattgcaatacagtaaatatatttcaatgatgtcattgtctttagctaatttgtttacttagaaagtatgtaatcacccaagataatggaggtcaggagaaataatggtatttcaatttgtttgtcttccttaccagccctgtt

SEQ ID NO: 628948 - DNA, 561 bp, Homo sapiens
tacatcccataacacaacatgtcaactgttccagaacagagggcataagatagaacagtagtccagaaaaaaaaaatttacagcaggccggaaaatagatggtgcacttagctacagctggcttaaggtttcttctcaagagaagtaattyagaggtttaagatatatgccttctgttctgcatattggttaacttaaccatggctcaaatagtatgtaattatcattttctagtagaagttcagtcatcctcagttgattctcttttaatgtctggagtcagaggatgcccctgagcgatgttataaagaggtttctgaagcaggtgggctatgactgacaactgcagccaaggctttggcccacgattttgggcagtaccaggtgagctataccactgggaatttcctttcataaaggcctgatgaatatgtgactgtaatggggaagttgacatcaaacaattatttactgccttgatcactgcaggaatgagagaagtggaggaaacgtatttgctcatgagtcacatgagctttacagacaacacgggaaaattcc

SEQ ID NO: 628949 - DNA, 530 bp, Homo sapiens
aacagttccggggttaactgaaagaactagcttatccacagaaaccctttcaatcccagaaggagaaatttagaatttggaaactgaacattagtcatttcttaaggtaaagccacttcattccaaagtcactgtctgttcgcccttaatttatcaccgtaatttatctaagaggtaaaactgaacaccgaaaaggtaagatgtagagtgacaaaaggagacggtgggtcacagggcgagtgcccaggtgacttcgggcctcagtcctctcgccagcaaagggcggacaatgacccctcccgtcccgcccgggaaggcgatcgaggaaacgcactggccaggcccatttactgatgctcagcagggtttgcaaaaagcccccaacgggaggttttcatgctgaaagtcctgttgcccccccatcccccaccatctaattaacctgcacgttactgkaaggaaggttctgcttccgtaattttctttatttcgacagaggctggagaaaaaaaatcataggctggaagatg

SEQ ID NO: 628950 - DNA, 539 bp, Homo sapiens
ttaaagcctgcggaaatcaagccagctccagtcctaaagtgaagacggattgtgcttttaaagctcaggaaaggaagtgcccttcccaagtccactggaccacctcccatcgaagggaatgtgaaaatcccaaagaaaagatggccctgaaactaaaaagtggcgcccgacaacctggactgcaaatcacagagccttcctgaaatacagatagggtactttgttttctgttttgataatgctttctcacccagttctcgatttttttttctaatcttcctttttgtttctcccccttcasccttttgatcctagccgccccttctacattttcccaccatgtttacttttttttttttgagacagagtctctctgtcacccaggctggagtgcagtggcgcgatcttggctcactgtgcaacctctgcctcctgggttcaagcaattctcctgcctcagcctcccaagtagctgggattataggtgcgcgccactgtgcccggctaatttttgtattattagtagatacaggttttca

SEQ ID NO: 628951 - DNA, 454 bp, Homo sapiens
  misc_feature 424: n = A,T,C or G
aatttaaccccgtgtggtgtttctgacactggtatacttgttgcggtatctagcctcaaaaaatggccaygcctaatcaaccatgctgcttagtgctcatgcccctgtgtcatccactcccacactgagcctggcctggccctgggtgaccagtacaacatggctgaagtgactctgtgacttccaaagctaaatcacaggaagccctgcagcctccactttgttccctgggaacacttgccctggagacatttcctctttgactcttgctgtcatgctgtgagatacacaagccacatgcagaggccatgtgtaggactccataaaatagcccacatcaattgacagccatcttccaggttcctagggccacccagacctcctgaatgtaaacctgttttaaatagccttccaggtgattctngtgcgcgtggggcggtgttgatcgcatcaa

SEQ ID NO: 628952 - DNA, 496 bp, Homo sapiens
tgaaatagctccataagataggggctagtaagactctgaaaaaccacggtgtggaccaagctgactaagactgactgaacccaacatggtgctgggtttctcctaggaccttattatgcactaattaacatattaaatcacatacttactagtgccatgacagttccaggaataccaatatttggtgtaaacatgcgtggcaccacagttctgggaaatcttccccttttccagaaatcttaatgagtattacaccccttggttaaagaaacccataaagatagaaacctcaaatctcatggcaggactttctcttgaggatgaccacactgtttttgcttgcatgtgtacttttcactttgtaacaaatcctcatactttcartatttccaaacttgtccttgaattcccttctttcagatggtgtcaagaacctggacaccagctgtggtcaaggtcctaccagcatttgaggatctcctctggcagtatgaat

SEQ ID NO: 628953 - DNA, 603 bp, Homo sapiens
aacatgcgcctattaaaaatatattatttcccaaacattgtgttaatcacttacatgatatcttatttcattctcaaaacaaccctgmatactacatgttgcaagtattgttactccacaggaaagaaaacaaacctaaaaggcttcatgttagtttcacaagactacccagtttattggaagcaaaaaggagattctaatacacattgatccaacttgcaagtcatgtgttttcatcgaactagggttggccccacaatatattcagtgaacactttcccccacaaattgtgtcagctcagatgaatcaacatacctagggtgaagacagattggcttaagttattatgaagtacttaaagtacttaataacactgtactgttactgtacagtaatttcaacaacaacaaaaaatacacaacaattaacaactctaaccataagggtttggggtaaagagtttgttcattttaattattattagacccatcagttgtcttatttaatcactttgacctttattacttagaaaaatactctgtgaaaaataatgtaaaaggaacattaaggaagcaaattttttctcccaaggaggaaatttt

SEQ ID NO: 628954 - DNA, 536 bp, Homo sapiens
ttctctgtcctactggagaagttgggcacagaatatcctctgtttctccaataccttccatataactcccttaggatacctgtcttaagccagtgctcacctgtcttgacttccttcccaaactatcactgtgaatycttctaggacagtatttgtgtccaattatttttgtatcaccaggacttaatattggctaggtaaaagtaggtactcaatgaataattgctgaggtgaatgaaccttaaaacctccagttcgcagcctcatggtgctacaaggcaattttgtcttagttttttataacctcttgtatcaaagataaacgctgattaattgttgtatctggagccaaaggcacatagatacctcctacaagcttcaggcagcccaagttatagtgagctacctttgttcccccagcaattatggttgccttttttttttcttaatccctctggccctttcagttctgattgtgttatccagctgtgcaatgagcctgaataatatactgtcagcagtcactttttaagttt

SEQ ID NO: 628955 - DNA, 598 bp, Homo sapiens
ggttgccttttttttttcttaatccctctggccctttcagttctgattgtgttatccagctgtgcaatgagcctgaataatatactgtcagcagtcactttttaagtttctttatccacaggtctgggatgtatttttttcagggggtggtgcaggatggggaatgaagagtgttttctagtaaagtgtataaaggagttttataggtacacatttctgttcttacataaaaatatgcatgcatcctggtagtaattatcaaagtacttctgacttaattataattaaaacataagaacttcccaacttygaatataatagaccctgcgagcctgattttgccctgactctgtagtttcacacttaaagccacctactttctccaagtctgtttattccattaagaaaatggctttctaagattagaaaatcaacacaagattttggaagacagagaagggaatcatgacttgggctcttcaatgccaaagtctcctgtctcatctcaacatacatccatagaatgaaattaaaagactggttattaagtgcttgtaatacaatcaattctgctctaaagtttctggtccgaaggaga

SEQ ID NO: 628956 - DNA, 360 bp, Homo sapiens
aacaggtacttcaagatagttcataaaaaaggattttgtggtctcgaataaatttgtgagccattgaatattgaggattcaaakgttaaagactcaaaaattttacagaaaactttaatgttatttaacgaagtaaaatgtctcccatactttttttttttttttttttttttttttaaagaccaagtctcgctctgtcgcccaggctggagtgcagtggtgtgatctgggctgactgcaacctccgcctcccgggttcaagcgattctcctgcttcagcctcccgtgtagctgggattacaggcatgcaccaccacctccagcaaatttttgcatttttagtggagacactgattcacc

SEQ ID NO: 628957 - DNA, 559 bp, Homo sapiens
taattagtattaataaaatggaaatttgttatagcattttcattaccaaaatatagtaagtaccaacatttataaaagattttgagcctcactaaaaaatgaggtgaggtagcaactttttatcaccatatgaaatgttttckgtaaaatacaaaaaattaaatctttaattactagaatcaaataaaaaattcacttgtcaaggagtttctttaaaagatactagaaataaagtctacaatattgcatcttctcatctctcttttgaaaactaatttcaagaaaaatataagcctattattattctaatttatatcataacaacttcactctatagatacatgtttattcaatacattagacatctttaaaatgcccagctccaaatgatatataaaatattacaaaagagaactgaacacagtttaagatattgatttctaagtaagagaaattggccaggaatggtggctcatacctataatcccagaactttcggaggctgaggcaggaagattgcttgagctctggagttcaaaatcagcctgagcaatatagc

SEQ ID NO: 628958 - DNA, 533 bp, Homo sapiens
aacatgcatggattactcccaacactttgggaggccaatgcaggaggatcagttgagcacaggagttcaagaccagcctgggcaaaatagcaagaccctctctccacaaaaaaagttagccgggcatggtggcacatgactacagcccgagctccttgggaggctgaggcaggaggatcacttgagcccgggaggccaagcctgcagtgagccaacatcacaccactgcactccagcctgggcaacaaagcaagatcctatctcaaaaaagaaaagaactgactagaaagaggacccaaaaaaagcagaggtcacatcaaaaaaaaaaaatttaaagraaagaagaagtcccctttgtccatttatgaccatttagaaaaggaagcaaagggaaaggaaactaagtttgaccaaaagcaacttaatggcttctcaagcagaagacttagttttcaatatctggaatgtttacatgacagtgtaatattttcttctctttacattcataccaacgtctctcaattcaacaccca

SEQ ID NO: 628959 - DNA, 605 bp, Homo sapiens
tctgaagaaaaaaaataaagttttattatacatagatgctatggagtggaactcaattgtgggtgatcataaaagtatcttttacttgctgtcccaagcatttggaagtgtaacaaattccaagattgggctgcagagcctctttaaaaagggtatccacatagtcacatggaatgaaggctaatgactggggtctcataaaaaaaaaaactagctatttgaatgttttctcagatgagggttatactaggaaaatgagaatctacctgaaaagttatcctatttggaaaacgaatcagagagctgggcaggtatagggtatttgtctctaagctaccagagacatatttttaattgacttacaaccactaaaatctggcatattattagaggaaatacttgtatgagagaaaatgggaagtgggggggtagggaagaattgagtaaggctagaagagctgccratatgcagtgcaagtctgagggaaggttgagtgctgtgcaatctaaggaagatccagcaaagccatcacagatccctcaagcctaagttggctgttaaggtgtccttatctcccaggaattgaactgttttaatattcctg

SEQ ID NO: 628960 - DNA, 581 bp, Homo sapiens
agttaccctagtgtccaccaatttaatggaatttcaagatatttacccaagtatgtgtaattactsttgtgattcatttgccttttgtgaacacactgtttttaaagttttaaaaaagacagatgagaaaaccagtccatctaaaattagaatcccagcaccataaacatacacattttgtttctctggtcacacaagtacaagaattccccacaaactccaaaataatcattatattgatatttcattaacactcactgacctgaaatagcttcaggaaaatgtaacaccatttttaatacccaaagtatgcaaatagcttatacttcattgaatctcctcataattcaacagtgatctaaacagaaattcaatacagacacacaaaaaatgcagagaaaataaataaaatcccagtaatttacaagatgcaacaaaaggagaaatcggtatatgatgatgaaaagagagaaccatatgcctcaaatatagctagttagtataatctgaatggttcatcagatttttagattagtatcatttatttgttgagctaaaaggaagaagctgaagcaaaatta

SEQ ID NO: 628961 - DNA, 581 bp, Homo sapiens
agttaccctagtgtccaccaatttaatggaatttcaagatatttacccaagtatgtgtaattactgttgtgattcatttgccttttgtgaasacactgtttttaaagttttaaaaaagacagatgagaaaaccagtccatctaaaattagaatcccagcaccataaacatacacattttgtttctctggtcacacaagtacaagaattccccacaaactccaaaataatcattatattgatatttcattaacactcactgacctgaaatagcttcaggaaaatgtaacaccatttttaatacccaaagtatgcaaatagcttatacttcattgaatctcctcataattcaacagtgatctaaacagaaattcaatacagacacacaaaaaatgcagagaaaataaataaaatcccagtaatttacaagatgcaacaaaaggagaaatcggtatatgatgatgaaaagagagaaccatatgcctcaaatatagctagttagtataatctgaatggttcatcagatttttagattagtatcatttatttgttgagctaaaaggaagaagctgaagcaaaatta

SEQ ID NO: 628962 - DNA, 597 bp, Homo sapiens
tgatatggtttggctctgtgtccccacccaaatctaatgtcgaactgcattcccaatgtgttggaagaggggcctggtggaaggtgattaaatcataggggcagacttctaccttgctcttctcatgacagtgaatgagttgtttaaaagtgtgtagaacttcccccttcactctttctctcctgctccaccatggtaagacatgcttgattctcctttgccttctgccatgattaagtttcctgaggccttccagctgtgttcctgtacatcctgcagaactgtgagtcaattaaacctcctttcttcataaactacttagtctcaggaagttctttatagaagtgtgagaatggactaatacaatgagacattacttaatcggtacagtgtacattatttaggtgatggatacactaaaagcccaaacttcaccactatgcaacatatccgtgtaagaaaattgcattagtaccctttatatttacttaaaatatgaccacataacatgaaatctaccctcttaacaaaatcttcagtatacagtrtatataaaaaattgacatgttttttctaagtaaagcaggtgtatggctc

SEQ ID NO: 628963 - DNA, 566 bp, Homo sapiens
tgtttgaggtgtcagtcggcccctacttggagctgtctccaagttaggctacacggggttcagggagccccttgaggagtcagtctgtctgttctcagagctcaaacaccatgctgggagaaccactgctctcttcagagctgtcagacggggacgtttaagtctgcagaagtttttgctgccttttattcagctatgccctgcccccagaggtggagtctccagaggcaggcaggcttagttgagctgcggtgggctccacccagttcgagcttcctggtggctttgtttacctactcaagcctcagaaatggaggatgcccctcccccagccaggcttgcggccttgaaattcgatctsggactagcagtgagcaaggctctgtggccgtgggacccactgagccaggcacaggatataatctcctggtgtgctgtttgctacaaccgtttgaaaagcacagtgtttagttggcagtgtcccaatttttccggtacagtctgtcatggcttcccttggctaggaaagggaaatccgctgacctcttccacttcctgggtgaggc

SEQ ID NO: 628964 - DNA, 566 bp, Homo sapiens
tgtttgaggtgtcagtcggcccctacttggagctgtctccaagttaggctacacggggttcagggagccccttgaggagtcagtctgtctgttctcagagctcaaacaccatgctgggagaaccactgctctcttcagagctgtcagacggggacgtttaagtctgcagaagtttttgctgccttttattcagctatgccctgcccccagaggtggagtctccagaggcaggcaggcttagttgagctgcggtgggctccacccagttcgagcttcctggtggctttgtttacctactcaagcctcagaaatggaggatgcccctcccccagccaggcttgcggccttgaaattcgatctcggactagcagtgagcaaggctctgtkgccgtgggacccactgagccaggcacaggatataatctcctggtgtgctgtttgctacaaccgtttgaaaagcacagtgtttagttggcagtgtcccaatttttccggtacagtctgtcatggcttcccttggctaggaaagggaaatccgctgacctcttccacttcctgggtgaggc

SEQ ID NO: 628965 - DNA, 566 bp, Homo sapiens
ggctgcaggctagagctgttgctatttggccatcttggaacccacctcaagaatgtcactttctaacaggttcaggagctccaagtttatcttgagatcttaagatcacccaactcacagttatttgaggataatctcatgggtgggctcagctttaaaaggtcttatatgagattccttgtggaacagacttccattaaagtcagtcctaaaggcctatatagaaatagttattcttgctgcactttatgcaaattagcgtrtaaaatctttagcaaagaaaaaggcaaaagtctattttgcacaccactcagtcctatgatgatttgtttttttaacaaacatgaggactggagagagagaaatcatgtttcaaaacttacatagttgtcactaaattctaaactcactagttgtttttaagttttcacctacatttaagactaatcctgtttgtttctgtgaaccaaccagcaatctctgactgcagctcagaaagaacaagagggatgggtaatgtaaaaatctggatcagtattctagttctgagtaattatcctgcaaat

SEQ ID NO: 628966 - DNA, 566 bp, Homo sapiens
ggctgcaggctagagctgttgctatttggccatcttggaacccacctcaagaatgtcactttctaacaggttcaggagctccaagtttatcttgagatcttaagatcacccaactcacagttatttgaggataatctcatgggtgggctcagctttaaaaggtcttatatgagattccttgtggaacagacttccattaaagtcagtcctaaaggcctatatagaaatagttattcttgctgcactttatgcaaattagcgtgtaaaatctttagcaaagaaaaaggcaaaagtctattttgcacaccactcagtcctatgatgatttgtttttttaacaaacatgaggactggagagagagaaatcatgtttcaaaacttacatagttgtcactaaattctaaactcactagttgtttttaasttttcacctacatttaagactaatcctgtttgtttctgtgaaccaaccagcaatctctgactgcagctcagaaagaacaagagggatgggtaatgtaaaaatctggatcagtattctagttctgagtaattatcctgcaaat

SEQ ID NO: 628967 - DNA, 567 bp, Homo sapiens
gtctttgtccttatccttaatctaatggcagttagacatacttctttacaggggggaatgagatagtctggtggaagggagggtccctggagaaacttccaccagcctgcccactggggtggagccttgggaagtcctcaccctctgcagccaggaggagcctggcccctccttttcctgggtggaacctgggattcaagctgcaggcaggaagcgttctagcagggactctggccttgcaagagtccctttttcccccttttcttccttttcatccaatacaaccctgctttactcacccttcaaaccatctgcaagcmtaaattttcatggccatgggacagacaaggaccctgtctttagctgaactaaggaaaagtcctgcaacactactgcctagaattttctattcctttgcaaccaccctgtattattcctgtctcaaaatcatgtcttttgcagcaacatgggtgacactggaggcccttatcttaagtgaaacaactcaaacacagaaagacaaataccacatgttctacatgttctcatttataagtgggagctcaa

SEQ ID NO: 628968 - DNA, 586 bp, Homo sapiens
acaacagttaactaggtcaatatttataccaacatataacttgcaattctttctccaagaattaaaatacaaattcattgaaaactgctaaaaaactaatcgatactttccaacatatttatactgttataagacctatttcatcasttggaccctccttttctaacatagctgtcaaaagaatgaattttactagagttaatattgggtttttgctattgattgttattttagccagggacacaggaatagtaaaattctgcgctgtctatattcctaatccaccttcaccctcagtctgtctagaggtttctgatagagattagtgcaaagacatcagtgatacagaagaagaagtaacattttattaatatttaagtctgtgtctgataaagattaatatagggctctagtaaatcttggattgagcatgtagctttggttcgagttgaaactgcagtaccctaccttccttcaagtctgagtccaacacttgcatctttgttactacttgctgatggctggaaagaataggaactagatgcaaaaaccaacatactcaactgtgaggaggccctgaatacag

SEQ ID NO: 628969 - DNA, 314 bp, Homo sapiens
tcttaggttgtataataaggcaaggcaataaaacaaaaggcatacagattggaagggagggggaatatttctccttatttgcatattataggatcatgtacataaaaaatcctaagaaattcctaaraaaaaagctgttagaaataatgcagtggttttcatatatccataaattgtctgatactcctctcttcaagagatggcacctaattttccttcccttgcatgaggtatatctatacattcaccgtgtccagcagttgagtacttactagctgccaggcaacatggcatgggttttccattactgtacc

SEQ ID NO: 628970 - DNA, 314 bp, Homo sapiens
tcttaggttgtataataaggcaaggcaataaaacaaaaggcatacagattggaagggagggggaatatttctccttatttgcatattataggatcatgtacataaaaaatcctaagaaattcctaagaaaaaagctgttagaaataatgcagtggttttcatatatccataaattgtctgatactcctctcttcaagagatggcacctaattttccttcccttgcatgaggtatatctatacattcaccrtgtccagcagttgagtacttactagctgccaggcaacatggcatgggttttccattactgtacc

SEQ ID NO: 628971 - DNA, 478 bp, Homo sapiens
agttctgtatcttgatgggagtagtggatacacaaactacatatgtgataaaataagccataactacacacacactttgcaccaatatccaagtcctgattttgatgctatattgtatctcataagaagtaatcatggggaaacctactggaagggtacacaggatctctctgtacaatctttgcaacctcctattaatctacaatatttttttaaagtttgtggaaaagcttctgatttgatctgatacatgctgtgaagagtaaaaggattgggctatttaattatgagctcgaggggcacattatttgaaaatgtttgaacacaacaaaagtaaaaggtaaaaataaatagaagctagttatataaaagaaagagacacttctyctcccgagttctttcctggagccactgtgcaagaacagccaggcagcatacagccctcaggaccatgatgtgcgtgctgcccagggtcagg

SEQ ID NO: 628972 - DNA, 606 bp, Homo sapiens
aattcaaatctgaccctgcaacatacttcctgtgtgatcttggccaagttactggacttctttgagcctcagtgtcctcatctgtacaatgggcatgataatagtacttgcttgtggagatgctctgagatgcctgagaggcatgtaatattatcccagtgcctgccctgtggtttggggacttacatgtcrgttcgtggtgtagactgagaagctgaaaatgggacccaaaggcacattgtaaagcccatggaattgtattaaggagtttggactctatcctcttgctcagtgactttcaaatcttgacagtacataagaatcacctgggagtttgttaaaacacagatttcttagtctttccctggtattttttgtttcagctggcctggggtagggctaaggaatctgtttttagtggttctgatgtaagtggtgcagatcacaccttagactagatcattgggagggtataagtcttcttgtaatatctgtgcaaaataaatcaagagtttacagaggcagagagaggtctgaggctttttgacagtcgggctgcaaatcgctccgtggagctagagccaaaaccccaggcaggcttcctgg

SEQ ID NO: 628973 - DNA, 588 bp, Homo sapiens
aatcagttgtataaaatttcatacagaagtaactaaatcttaatgttagttaccaaaaagcagacatgactccttttaaatgtgctttcttcattttgaaaaataattagcactagaatgttttaggtgkattattccaaaggaagcagtatagcatggtgatgaagttcaaaaagtgctcttcagtcagattgctttttgcaaagccatgctctgacaattctaatgttttctcttgggactgttttctatatatcaaatggaaaaaaataataatgccaatctcacagagtggattgagaattaaacactccatttaagctgagcattgtgcctggcacatggaaaatgctccatacatttttgacattagaataataacaccattaaaatcgaggtagtcgtagtataaaaataaattagactttatcactttggggtttcaaatttttacttacaattggtttggggtgtttgctttaagaaatgttgacagtatgtgtgtgggagagcatatttctgacttctttctttcctgtaaagttaaatgtgggatttcagttgtttgcatagcattcgaacaatcat

SEQ ID NO: 628974 - DNA, 565 bp, Homo sapiens
agaagtaactaaatcttaatgttagttaccaaaaagcagacatgactccttttaaatgtgctttcttcattttgaaaaataattagcactagaatgttttaggtggattattccaaaggaagcagtatagcatggtgatgaagttcaaaaagtgctcttcagtcagattgctttttgcaaagccatgctctgacaattctaatgttttctcttgggactgttttctatatatcaaatggaaaaaaataataatrccaatctcacagagtggattgagaattaaacactccatttaagctgagcattgtgcctggcacatggaaaatgctccatacatttttgacattagaataataacaccattaaaatcgaggtagtcgtagtataaaaataaattagactttatcactttggggtttcaaatttttacttacaattggtttggggtgtttgctttaagaaatgttgacagtatgtgtgtgggagagcatatttctgacttctttctttcctgtaaagttaaatgtgggatttcagttgtttgcatagcattcgaacaatcatt

SEQ ID NO: 628975 - DNA, 588 bp, Homo sapiens
aatcagttgtataaaatttcatacagaagtaactaaatcttaatgttagttaccaaaaagcagacatgactccttttaaatgtgctttcttcattttgaaaaataattagcactagaatgttttaggtggattattccaaaggaagcagtatagcatggtgatgaagttcaaaaagtgctcttcagtcagattgctttttgcaaagccatgctctgacaattctaatgttttctcttgggactgttttctatatatcaaatggaaaaaaataataatgccaatctcacagagtggattgagaattaaacactccatttaagctgagcattgtgcctggcacatggaaaatgctccatacatttttgayattagaataataacaccattaaaatcgaggtagtcgtagtataaaaataaattagactttatcactttggggtttcaaatttttacttacaattggtttggggtgtttgctttaagaaatgttgacagtatgtgtgtgggagagcatatttctgacttctttctttcctgtaaagttaaatgtgggatttcagttgtttgcatagcattcgaacaatcat

SEQ ID NO: 628976 - DNA, 599 bp, Homo sapiens
tattcctactataccttttctatatttagagtgtttagattcacaaatacttaccattgtgttacaatgggctacattattcagtatagtaacatgtggctgtacaggtttccagcctaagagcagtargctgccatacagtctaggtgtatagtaggctataccatataggtttctgtaagtacattctaggttgttactacaatgccaaaattgcctaaggatgtgtttctcagaatgtatccttgttgttaagcaacatatgtacgaggagcatgcttcacgattgataagttggttgaacccacagtgcaaaatcaccttctcaaacccctaaattgttagcattgcaagtaacccagatgtggcagtggcagaccacaatgcaattttcataaatagcacaacagaagtgaacagggttcaattgcaaaattgagaattttactttgattctgccctaatccaagagctgatctgtccctgtttatttaacaagatatctttgaacatttaaaaagtgaagtaaaagtaaatataattttaaattgtatattaaaatgtgattttatttctgttatttggtatgagaacatcat

SEQ ID NO: 628977 - DNA, 599 bp, Homo sapiens
tattcctactataccttttctatatttagagtgtttagattcacaaatacttaccattgtgttacaatgggctacattattcagtatagtaacatgtggctgtacaggtttccagcctaagagcagtaggctgccatacagtctaggtgtatagtaggctataccatataggtttctgtaagtacattctaggttgttmctacaatgccaaaattgcctaaggatgtgtttctcagaatgtatccttgttgttaagcaacatatgtacgaggagcatgcttcacgattgataagttggttgaacccacagtgcaaaatcaccttctcaaacccctaaattgttagcattgcaagtaacccagatgtggcagtggcagaccacaatgcaattttcataaatagcacaacagaagtgaacagggttcaattgcaaaattgagaattttactttgattctgccctaatccaagagctgatctgtccctgtttatttaacaagatatctttgaacatttaaaaagtgaagtaaaagtaaatataattttaaattgtatattaaaatgtgattttatttctgttatttggtatgagaacatcat

SEQ ID NO: 628978 - DNA, 513 bp, Homo sapiens
agttgagacaagagcttaaaatcagccattgggtttgtcgataggagagtgctagaaaatgtgattctcaactaatcactggaactaatcactgggattttgtaatacgtcctttgaygagctgggtgtcagtctatataaggcaagtgcctaaacccaaaacttagcaacatatccagaagtagaaatctagcatgagagactaacagggaattaattgtgctgagtttcattacaggtttcctaattgcaagtgcttcctgctgatagggcaggcttaatagatattaaagggaaaaaatgaaaataagatatttccattgtgattctttaccaattaaaaattccaaacacagatgcatttgagaatgcattgattcacttaaagattaacatcttctcacactgaaaatgttaatataaaaaaagataaaaattgtttcagataaaagtatatgtctttgatatttctatttcaatattttattgcttcaaatgtttgtatttttctat

SEQ ID NO: 628979 - DNA, 616 bp, Homo sapiens
gagaaattttcatgtttaaaaactgcttgtatttttattactgagaattactcacatccttttctaattgcttattgtattggtggtctttttcttctccatatcttaaagcttgttatttatgtaggggtttagttttaagtttctgacatcaattaacaattttttccgctttgccctttttatgtgtgtacattttattttgatgtgttttgccttgtggacttctttaaaaaatgtaatgcarcttcttagtctttttccctcatagtttctggatttttgagttacaaatagaatctgctcttccaaggctatgaagaaatgtgtctattttttttctagtacttttatggtttcccttttacatttatgtctttggtccacttagtgtttactgataaggatcagaatttgtcttttgatgcttatccatttgttatagcaccattactaaaaactttgtccttgactcactgatttgagatactaccttatcatataataaattgacgtttctacttgaatctattttttatttggtttcattcacatgtctgcttattccagtgccaataatttactgttttagttgttagagctaggctgtctaata

SEQ ID NO: 628980 - DNA, 613 bp, Homo sapiens
gctttttggtcattgagttttatgcctatcctttctttgtaatggtgcagttgtcactgaatggatgcagttaattccctcgtatgtttttggatacaattctcagagctgatgaaaaaacaaagataatatctaaattaatatactttaggagtagaaattagtagaaacatttttaggggcaatatacaagtcgatttaagcctcagaagtcctagtactgggttataaagctccttcttacagccataacagagtaaaatttgtctcccaccattctattctcattaaacctatagcttatattacaagtaacaatgatgatgtgcatattttaaaaatatattttatgtgtacaaagtcatatctaaattattaaaaagtacacaataaaacttgttttagtgttaaaacatttttattaaaattcctgtatcatagacgtgggcaaacttagtagcataaggccagttggacacttktgaagttatctgccttaatatacaaacacctacactagcccatcttttattttatagcaagggatgaacttgctgagaaaaagcaacttgtatattcaaaagaactaggatgtctttcagagtaaatcatt

SEQ ID NO: 628981 - DNA, 534 bp, Homo sapiens
gggtccagcacctcactgttactgccttgatccacacaaacaacctggataggtgccttgcatcctgcttctctccttgtttccctgcataactcccacccaaatcaaaggggaatccaaatcacatctggagcactagctacaaggggatatacaataagccatttttagtttctgagcctctgatgctgcaggggagtggaatggggtgtgaaaaagcctatgcaactcttataacgtcaaacaaaattaggattatgctatatagatagtgttacgtctggcatttttcagtttaaatatcacactcatttctcacatcgttaaataagttatgamatcacatatttgaatggcatgattgaatttattgaaataacatttaaatcattttgataaaataggtccagttttgtaaattattagaaccatatagtacctagtgcctagcaacgtatgatgcactcaatatatatttgttgaatgaatgaatatcatttgaggacctgggttgacaagaactataccatctta

SEQ ID NO: 628982 - DNA, 379 bp, Homo sapiens
aatgataacaaatcagttaaaatgtgtacctactctaaagtaagcaactcagtcttggggctatttacactgtcaaagggatagacttttcaaattatttatttttatgaaytaagaatagatcttacagaaataaagatgtatatggaatccatggcaaaattagattcatcttagcaaatgatcacttgattgataattatttgtttgatttagcaactaaactggttgaccaaataatctattggattaatttgtattcaattggccacagattatagttacttggaagattagatgtttagatctctttctagtgatcgatctaggcaaaattaggttcttttccccaaagacaataaggcagatcattatttcc

SEQ ID NO: 628983 - DNA, 379 bp, Homo sapiens
aatgataacaaatcagttaaaatgtgtacctactctaaagtaagcaactcagtcttggggctatttacactgtcaaagggatagacttttcaaattatttatttttatgaacwaagaatagatcttacagaaataaagatgtatatggaatccatggcaaaattagattcatcttagcaaatgatcacttgattgataattatttgtttgatttagcaactaaactggttgaccaaataatctattggattaatttgtattcaattggccacagattatagttacttggaagattagatgtttagatctctttctagtgatcgatctaggcaaaattaggttcttttccccaaagacaataaggcagatcattatttcc

SEQ ID NO: 628984 - DNA, 420 bp, Homo sapiens
agataatattaaatctattggtagaggakgacaattaaagatccacagactctctccatctttcttgggttctcgtttaccttgccagctccaaagtttggtatcactgggtttgcttttactgtttaccatctagtttgattagagtgccttcctctgtctcaggataagcatgtcctttccatctggcatacagctttacccttgaagctcagattgaagccattcttctcaaagccaactgagtcttggctcaaacaccatctcctatggtctgtccagagaaatttccttccagcctatccttggttcagagcatacagctaaaagaccaaattcatctgaacatcttactttctctttagccctctctttactttctcaagtcaataaagttttaaaatgaaggacgggaattaa

SEQ ID NO: 628985 - DNA, 576 bp, Homo sapiens
gtcatcctcctttgtagcatacaatgaaatcacatttttctttaatctgcaatggcatcctgacgaaaagtaaaaccatttctcatttccctcttaagaaaatgatcattatctcaattgttttgcatttttagttttcaataaagcctataggtagtgtagtgggtagttcattactttaaaaattatttgcaaacaaacacaacatcatcttcaaattaacccaagcagagatatcaatttctagtttcttagcttactgatgacagttctatcccaagataaatatattattcagtttctgttacccacacaaacacatatctaaaatgcacatagaactcaaattataagcatttgttgaatttcagtcccttctattatgctttatatccctatgatttagcaaatgatttattcaaaagawggtcttggggaatgtttaaatatcttcttaaacaattaatgtgcatcaatcaatataaaaacaagcttttttcctagttccggttgaatatgcttcttttcctaaaatagacattaccaaacaaaagctatagattcagttgctaagca

SEQ ID NO: 628986 - DNA, 584 bp, Homo sapiens
ggaaggaaacgggttcattaaaggcctttcatttactcattccttccacattcttttcaacttgatcctattatgtgcagaacactgtactaccatgtgtctggtgttgagcaaacttcatacatattaagtcaatacaattaattgataaacgttttccatacctatatttactcaattataaagcattgaaataaatatcttagawgtggtgtttaccatgaacataatcaccccatagaaaccatttaccttccactaactttagttatttggataaaattgagcagttaggcctgcttccaagttgtgcttatcctaagacattcctccattttcaaagttaccagcttggtgtcaatataaaaaaaacacaataatttctaggatgaaagcaaagatcttttaacaactccaagacttcgtttgaaagactctaagtgaaactaataaactcctgtttagtttccaaacattacatattcaagtcctccaaagtcaataatgtttgtaagaaggcatgtaaaatgtacattgaaaaaaaattcacagaaaaaaattgtttatactatacttgatgaatt

SEQ ID NO: 628987 - DNA, 584 bp, Homo sapiens
ggaaggaaacgggttcattaaaggcctttcatttactcattccttccacattcttttcaacttgatcctattatgtgcagaacactgtactaccatgtgtctggtgttgagcaaacttcatacatattaagtcaatacaattaattgataaacgttttccatacctatatttactcaattataaagcattgaaataaatatcttagaagtggtgtttaccatgaacataatcaccccatagaaaccatttaccttccactaactttagttatttggataaaattgarcagttaggcctgcttccaagttgtgcttatcctaagacattcctccattttcaaagttaccagcttggtgtcaatataaaaaaaacacaataatttctaggatgaaagcaaagatcttttaacaactccaagacttcgtttgaaagactctaagtgaaactaataaactcctgtttagtttccaaacattacatattcaagtcctccaaagtcaataatgtttgtaagaaggcatgtaaaatgtacattgaaaaaaaattcacagaaaaaaattgtttatactatacttgatgaatt

SEQ ID NO: 628988 - DNA, 519 bp, Homo sapiens
atttaaaaccttcaatgatttcacattgcctacaactcacaattcacctggatattctaacaccaatttacttctctgacttcactttctacccctccactccacgcacgatttgattcagttgcaccaaccttctcatcactcagagctctctaatccctgtgaacactctacaccttacgcatactgttcctactcacttcctggaaaggtcttctcccacttctcttggtaaaactcctactcatctccaagaaccagctcaaatggcacatcttttggaagwcttccctgaatcatccaagaaggaatagttatccttccacttgtgtttctggatcactttctttgcaaacataatagtatactactttcttgtgactttccctatatgagtttcagtttgctgaacaacaatagtaataattagcatttatagagtgcttactgtatgtatgatcttaaagaataaatttatcttgctcatctcatttggtcttcactacaacacagtgaagt

SEQ ID NO: 628989 - DNA, 557 bp, Homo sapiens
agcaaaatgaaacttaaaagtttgcaatcaatacaaaagtacatctattaaatatcaacaaaaaatttaaagtttgtaattagtctgggatgaataacttacatagatctgacttcacagttcacatataatcacatataataataaacatatataatcatagattccaatatyttatgtttgtgcacaaacccctttgagaatataataaaagtaaaagaaaatgcaattttcagatcatgcagaatttagtatacatcaggtagttcatggatcctctaaaacagttttatagacacttagaatgccattgatctaaagataggacactcttctttacagataaaatttttgattatgtaatctgatgaaaaagtattctcaagcttttttatttgaaaataacatttatggttaataactaattgcatattttctaaaagctaaaagagaattctgaatgttcataacagaaagaaatggtacacatttgaggtgatggatggactaattaccctgatttgatcattatacattgcatacgtatatcaaaatat

SEQ ID NO: 628990 - DNA, 622 bp, Homo sapiens
acattttcaatgaatgttcgagcagtccgccaactaatcacactagactgcttgtataagaaaacaaaagaaaaaaaaagaagagaagaaagaaagaaagatcgattgatcaagggaaagtggtactatcttttgagatatatccatagccctacaattttttttcagtgygactataaagtaatacattttctcttttttcttctactttttaattttacttattttcaaggttcttttttgaaacaaactatgaaatttacacagcaaatgtcatttcacctttcaaaatgattatatttattctgttcatgttgacattgctaagactttttttaagattgtcttctggaatcatttcgaaagtcagtctcattattttgttgccaggttactttttgttctcattttggttcattaaaaaaaatttaacccatgttcaaaatttgaagatttctaataattgaagcaaatcctaaatgccaaagaagggtttattggtttaaaaaatggcataaaattcttacagagaacattatgcagccaaaaatattatgacattatgataggaaattaggaaataatttacataaacattgctcattatcttttttgtatgtgt

SEQ ID NO: 628991 - DNA, 567 bp, Homo sapiens
gtttattggtttaaaaaatggcataaaattcttacagagaacattatgcagccaaaaatattatgacattatgataggaaattaggaaataatttacataaacattgctcattatcttttttgtatgtgttgcttgtgatartttttctgcttttattttaaaaattaagcctacaaagaagttgaaagaataattcaatggacactcagataccattcaccttgatttatcaatgttacattttatagacattttatctgcttgtctgtttctctttctgtttagattgatagagctgatgtgtgtgtgtgtgtgtgtgtgtgtgtgtgtgtgtgtgttgagtaaaccaacaagatttttcttcacctttacagtctaatggctaaaaaaaaaatactagttttattagagtttgtctaggtgatttcttcaggtacatatgggccttttaaaatatgggagtcatgtctttatctattttcaggatgtttttctctgattttaattttatatattaattctatttcattgttttgcttttttatttttcaggggattatattatt

SEQ ID NO: 628992 - DNA, 522 bp, Homo sapiens
ggtattttccttgcagaagtggtgctttcctagggacctacttcttgtttcatgcactttatccctttcctgttgatttcccagtctatggtgctctgatctatcagatctcagacttgttcttatatttcctcatctcaaggttggactttctttttctgggccaggggatggggggtaagagcattttaactgtgtaccacactggtyagctaatgctccctctgggtattcatgtgtagaatctgtgcttgatgtgggctcaggagcttcctctgctagatttgggcatttattttcatatttacacagaattggaaacttgtagtggtccttctatcctagttattctgcaggctgggggataagtggttttacttactttctttgttgttctatatgaccctttggacatagtgtggagaaatgaagatttactttactacattatactacaggaactgagaatgcctcttgtgacacatttgttcttttttgtttgttttggaatctatcagtggt

SEQ ID NO: 628993 - DNA, 569 bp, Homo sapiens
gttttcttcagaaggattttttatgatgtggtcaaaatgmcatggttgcctaataaatagcaggtcatgctaatcggtcccttatgggttcactgtgatttcacagcagactccacacaccagcaacttgaatgatgttgacattctagctctgaacaaggtaaatacagttcaggctgggctatgaaataagtggaagtatctatttggggatgctaatcagatttggataccggcccttaagtattctcatgattgtgttttggttttagtttttaaaaaaaatctatgggattttattgaaagtgagaaaaatgaaatctcccaaataaacatgggaaggatattaagtggcctgtgtactgatagaaactgaaatgtactgcagaaaaaaaaaagagctatgcaaaatccgcattgtgtccagtttccttgctctttgatgaataccagactttgacatatctgaaatggcttggaattaagtcaaaatgtcaatggagttcccaaacatatttgtatattcgctaaagaaggagcattggacttcgagtcaggagatgagttct

SEQ ID NO: 628994 - DNA, 586 bp, Homo sapiens
cataatctgctttttaaaggatgatttacacaatcaagctgttatctgaatatttaaatgaggatgggatttaaaagtggagtaagatatatctccacaactgaggtagatagggcaaattacttttcgtcatgaaaactgagtagccttggcaaatagctgacacgaatgaagatatgctgatctagattattaagaccaccactggacatatttggatcagtgctcaagcatgtgaattatgagttaatcagtaaataaaatgaacaaagttgtgattatatgtgggtagcagaggttgcaaattgcctgccagcagactcaatttggcctacaaatatgttgtttggccagcataatattttttaaaaatttaagccagtatttaaacatcaggatatttggtttttttacatgaatccctgagtttccagctttctcttgaaaatttggaagctctgacaatactgggcccacattctcacatggtgacaattggctagaactgaaagcagctgttycctctacacaagacatgtactttctagtacagcacaactcccagtagacccacttcacacatata

SEQ ID NO: 628995 - DNA, 394 bp, Homo sapiens
gaattcagcactgttttggcagaccctggctgcacccagtttaaaagtaattagtcctactcaaccagagtaatctggaaaytggctctcaaaccatatttgcaattttatgtgaaaagacatgattcaatatacagtaatggttaggtactttcagtgttcaacccttaggtccttgtgtaaagaggattgttgtcaaaatggaacgaagttttgcgtgcaaaataatggcaggagaagccccttaatcagatttacacagaaaaggaggggattgtgacatcatgtgaatgccaacaagtagatgcactgaatgtgaaaatcagttatttttaatgttagtgtacatattagcattaataactggacatagagttgtccttccagcctctgt

SEQ ID NO: 628996 - DNA, 609 bp, Homo sapiens
cttatagcttattacatcacatattatcctccatccagatattatctggaaggtggtcgaaggtattccgtagtctttcagcctcaggattccaggttttcaaaattttaaagagaaatccattccaaatttcctttgtttaaactattccagaaactgaagtgcctctaagtataaatgacaggataatagaactttaagtcttccttgcagtgactattatgctttcattttgcacagtagagctcaaaatgcctcactttatgctgatggtgagcacttttagagtttttcatcttcctacagttaaaacatatgacaaagtggccatttgaaaaagaaatgaaggggaaaagtgagcatgaaattcacagaaattgagaccataataaatactaagtaagtacacttccrtctacatctacttgtagataaaatttcaaatatgctacaccaagagatttgcattgacagattactttttgtttaaaactagatactctgggaaaaaaccaatattcatagtaaagacagattggaaatataataatcatcacaaatcaatgtaaatcaaatacatgtatgtatgtaaacatttaataatacata

SEQ ID NO: 628997 - DNA, 643 bp, Homo sapiens
aattgcaacagttttctattataaatagatattctggtaatacttcttaacctaatgcaatccatcatgcatttttgaatggtgatttattaaaaatatactaaatattgtcttttttaagtgtaagatttcacatactacaaactgcaaaactttacgtaaaaattagagttcaataagtataaaagaatacatttttaactgagtaatttagaatcttttctatcataaatctacttttataggcatattaaaaatctaaatagcaaaggtaacactctgcaaataaaatggttaagagatatgaataaatcaactgcgtaaaacatgttgagctttccagaagagaaatgttaaactgttaatgttttattgtgaataactaataagcycacatctgataagttttccagctcttaatataataacttgtgttatgggattatcagtgatataggcccacaactagacaaaagatgtagccaaaaaaacaaatctataaattcacttgagaaagatcacaatgggttttgtgatattaaacaactcttttcaaactttcctttataaaatgtttaaaataacacttgttaatataaaaaagaatatgtaaaccattaacagcaaaacaattactgagtac

SEQ ID NO: 628998 - DNA, 545 bp, Homo sapiens
tctgacaaactaatctaagctatccatgtgatatccatgaatctatatttaatcaatttttaacatcagatgcttttataatttaatgaatttgagaaaacgtccccaattcctgcttaatgtactgactccagcatgtgcattacaaatagaatgtgagacatcactcagtactataactatgagaaaatatgtaaaaatgcgtggtcagtctcaactcttcatggaaaaacacaatccacgtaatattttgagtggtctcttcacatggaccagcccaattgctggcaggtgagtttgatttccccacaagataagtaagttgaatagaaatcattaagctttttgactcaatgcctctggtggaatgtcgtgaaaagatgttttttagtgtttaatgcttttaaatgacgaaagcatgacctagcataggctttgtagtcaatcatgaagaggaactatcaatgatrttgaagttatgctgtgtcaggtactataccactcctcatgttggactcagttctaacagtagaactatgtggtag

SEQ ID NO: 628999 - DNA, 437 bp, Homo sapiens
agatctaagacctctgccccaactgtactcaggatgtcaattgtcaacatacacatagtcacaagtcgagaagtggagtaccacagaccttagcatctgcatgcaaagtagctagatatgacacaaaagtggtttctttcttggtttttcagctggtaaaggtagattttataaattaaaaagcacatcccttcatggttgtagtagactttttttagttcatcagtgtaataatatctccctatcataaaatattaattttattcaatccaattcatatgtgcttttctcattcatagctggaattcagctctccaggtggaaagagttaatatttgaataagtgattccacccatttaaacatgaagaagttgycttaatctctacattttcatggttgccaatattttgattaatttccatgacttctattgac

SEQ ID NO: 629000 - DNA, 623 bp, Homo sapiens
tggctcatgcctgtaatccaagcactttgggaggccaagacaggcagatcacctgaggtcaggagtttgagaccatcctggccaacatggtgaaaccccatctttcctaaaaatacaaaaaattggcygggcgtggtagtgggcacctgtggtcccagctactcgggaggctgaggcaggagaattgcttgaacccaggagagggaggttgcagtgagccaagatcacaccactgctctccaacctgggcgacagagtgagactctgtctcaaaaaaataaaaaataaaaaaataaaaaagcaaacaaaaaacaaacaaaacaaaacaaaaaataaacaaaaataaaacaccataggaatttattgatcagtttatgagttaaaataacactaaagttaactttcttgaaagaacaatatgatttacatatgccaggaactctagagacattaatttttttacccaactcttaggagaaatcagttgtataaaatttcatacagaagtaactaaatcttaatgttagttaccaaaaagcagacatgactccttttaaatgtgctttcttcattttgaaaaataattagcactagaatgttttaggtggattattccaaaggaa

SEQ ID NO: 629001 - DNA, 623 bp, Homo sapiens
tggctcatgcctgtaatccaagcactttgggaggccaagacaggcagatcacctgaggtcaggagtttgagaccatcctggccaacatggtgaaaccccatctttcctaaaaatacaaaaaattggctgggcgtggtagtgggcacctgtggtcccagctactcgggaggctgaggcaggagaattgcttgaacccaggagagggaggttgcagtgagccaagatcacaccactgctctccaacctgggcgacagagtgagactctgtctyaaaaaaataaaaaataaaaaaataaaaaagcaaacaaaaaacaaacaaaacaaaacaaaaaataaacaaaaataaaacaccataggaatttattgatcagtttatgagttaaaataacactaaagttaactttcttgaaagaacaatatgatttacatatgccaggaactctagagacattaatttttttacccaactcttaggagaaatcagttgtataaaatttcatacagaagtaactaaatcttaatgttagttaccaaaaagcagacatgactccttttaaatgtgctttcttcattttgaaaaataattagcactagaatgttttaggtggattattccaaaggaa

SEQ ID NO: 629002 - DNA, 576 bp, Homo sapiens
tacacacacacacacacacatatatgagacaagggctcactctgttgtccagactgcagtgcagtggtgtgatcacagtcctgggtgaagggatcctcctgcctcagcctcccaggcagctgggacaacatgcatacaccaccatgtcctgctaatttttagtatttttttttgtagagatgcaggtcttgctattttgcccaggctggtctctaactcctggcctcaagcgatcctcctgccttggcttcccaaagccctggaattacaggtatgagccactgtgactggccatttcaaatattttgagtgaacaaagtttccttttaacagaaatctggatatcagccctggtaagattctagtgtttctgtttgttttgttttgtttgcttttcagctaagctgccagttattgaaagaacagatttttctttgcactaatcacaatagygtattttagaatttctggggcattttacttgtaatctgttgatgtccgtggctttctgtgcctcaggtgaactctcagtcatattatcattccctttggaggacacagttcttaaaccataat

SEQ ID NO: 629003 - DNA, 567 bp, Homo sapiens
  misc_feature 1, 2, 3, 4, 5, 6, 7, 8, 9, 10, 11, 12, 13, 14, 15, 16, 17,18, 19, 20, 21, 22, 23: n = A,T,C or G
nnnnnnnnnnnnnnnnnnnnnnnataaaccctaccatatcaagaaaataattttaatacagaactgattattctaccagaagactttcattgttactgatgaaatgaaaaacatatcaagatcaatcaaaataaccatctttaatataaaactaagtttatagactgtaagttcttactttgtcctcggggttccaatggagtttctgttctaaatcagtcccaaaattgccactgtgcaaaactgatgagcaagtcagcactataaaaacataagtcaaggaagaatctcagagacgatctcagagaacaaaaatcactttacagtctaaaaggattactcacacatttattgctaaggtctaaacccattttcttaaagacttaatgttacacagcagtgrtactgtaaaactaaaaatgtgctgctcagagggtcacaacaaaatggttctcacagtcaaaccccacctctttgctcagaaaattagcagttctatcataatctttaactagataatggttctcagaaagggcatttactcatccctcatttctttgaagtgag

SEQ ID NO: 629004 - DNA, 525 bp, Homo sapiens
  misc_feature 516: n = A,T,C or G
aatgtttgctgactcctggcatagaatatagtgaactgtagagcacatatttttcataaaaacattcatatttaaacaatggtcaagccagacaaaacaggccagattcagatgactggccagtgctagaaaaagagatgaagatcctgtgtcagcactgtcactaattttctgtgtgatatggagcaagtcaccaattctcctctagtaraaagggagtgtctccctttgctgaggttacagtgcataaggccaaatggcaaaaccacatcatctttaaggggaatgtgacactaagccaaagaactatgtccaaaataatcataaatgcaaggagagcctgaagtgaatattgggagcggaggcgcagagcctaacaggtcagagtttcaagcaggcaaatgaggatgatctaatctaatttaaatactcacaataacctacttaaataaacctagggctgtgttttcataaattaagtatgtctatgatttcacagactgagatacacaaganctgttaatc

SEQ ID NO: 629005 - DNA, 525 bp, Homo sapiens
  misc_feature 516: n = A,T,C or G
aatgtttgctgactcctggcatagaatatagtgaactgtagagcacatatttttcataaaaacattcatatttaaacaatggtcaagccagacaaaacaggccagattcagatgactggccagtgctagaaaaagagatgaagatcctgtgtcagcactgtcactaattttctgtgtgatatggagcaagtcaccaattctcctctagtaaaaagggagtgtctccctttgctgaggttacagtgcataaggccaaatggcaaaaccacatcatctttaaggggaatgtgacactaagccaaagaactatgtccaaaataatcataaatgcaaggagagcctgaagtgaatattgggagcggaggcgcagagcctaacaggwcagagtttcaagcaggcaaatgaggatgatctaatctaatttaaatactcacaataacctacttaaataaacctagggctgtgttttcataaattaagtatgtctatgatttcacagactgagatacacaaganctgttaatc

SEQ ID NO: 629006 - DNA, 535 bp, Homo sapiens
tcaactaataagaactttaatgtcatttggtatggataatacactaatttytgtttcagcttatgctatgtattgaaatacattctatatttttttcttgaaaaagtgtttggaattgtaatttttattataagtagaaactttgtagaagaattttatacaaactggtaaaactttgaaatgtaaattatttcctacaataattaccataaatatgggtaaatagctcagaatgtttctatatgtaaccactgagtaatgcactttcagtattccttgatataagttatgggaaccatgtagcttctaataatatcaaggcatatgctattttaagagattttttaagttaatttttaagacaaaatttctcaacgtaggaacctaaattttttttttagtcctctcaatgagctcttggttttgaggaagagatattctaggccaaagaaagtcatgtgcaaaagcggggagatgaatgagaaactgatgaactgtgcaggagggaaggagattcattggtgtgggagaaaac

SEQ ID NO: 629007 - DNA, 458 bp, Homo sapiens
tgtgtaggtttataaaatccaagtctgggctatcagctattgagaaagctcaatcatttgtccttgtctgacttcatgctgctctccaagactaatctgattataatgtttggcttcccatataattttctgtggagaaaaataatcaagtgatgcaaaatgtcaaggtcacatgacagatacttgtcattgtgaatccatagctcagcattctggtttggaatgtctaccatgtttaaggcactggagagtcygcagtgaccaattggaaataatctttcattaatggcactcatactgtcttgaggagataatctccaagtaaacaaagagtcaaaatcatatagagagcggtaagtgctatgatgaaaatcaaacacaataatgaaatggtataaagaagaagggagactattttatattgtgtgcatcggccttctgcatctgatgcatttggt

SEQ ID NO: 629008 - DNA, 455 bp, Homo sapiens
gtaggtttataaaatccaagtctgggctatcagctattgagaaagctcaatcatttgtccttgtctgacttcatgctgctctccaagactaatctgattataatgtttggcttcccatataattttctgtggagaaaaataatcaagtgatgcaaaatgtcaaggtcacatgacagatacttgtcattgtgaatccatagctcagcattctggtttggaatgtctaccatgtttaaggcactggagagtccgcagtgaccaattggaaataatctttcattaatggcactcatactgtcttgaggagataatctccaagtaaacaaagagtcaaaatcatatakagagcggtaagtgctatgatgaaaatcaaacacaataatgaaatggtataaagaagaagggagactattttatattgtgtgcatcggccttctgcatctgatgcatttggt

SEQ ID NO: 629009 - DNA, 581 bp, Homo sapiens
caaactctttcatattctgcctctctgacactgggcaaattacttaacctctcttaattcaatttccttacccataaatctgtgacagcagtatcagatttatayggtttggaacattagataatgtaatacatgtaaagcataatttctggtatatcacaagttttaataagaattggctattattattttcattatttacacaatgggagaagtgctgcaatataccatatttcattgactctaaggcgcatattttaacatttatgaaaatgttatgcatgtaaaaatctgtcacatcatctgtcccatgacaatgctggggttggggaaatcatgtgaaaagaatgagaggtattcagagtttcttttgcttgagtaacatttgtgattaggaatgcatttcacacttagttacttgttaagttttgcagtctaggacacactattgttattcctgtccatatagaacattaaaatgtactcagatgaagctactttagaacagatattaattggattctctgaatcattaatgtttggggaaatattttaccatttgaagtttttcatctacatct

SEQ ID NO: 629010 - DNA, 621 bp, Homo sapiens
tttgtgttggagaatagtagaatatacagctctttgttaagttttgaacattggttgctgacagtccgtacctctcctcccagctcctagcctttcccagccactcagccttgttgatgccctcagtattctaagtggggcaagaaagaggtaggcctctaagacaatgtcccacacagttgggcaagcctcactcactatatttttactttcccctgtggggacaattgtgagttgaaggagtttctcctggcattgagctgtgctagcttgagggtggggtgaaatgggtaaaatgaaactattctccgtactatcttcaatgagtctactctcataagctttgctccaatgatatgctggaatttgtccgctggactcccaaactcccacaaaaatactctcatctgcaggtggttgccaaaatcagtaaactgtgagatgttagaaaactcctattctgccatcttgcttatgtcactgaaaatatctttattccacactcattttcatagtttkggaatattagtttggtggtgtataggattttagttgaaaatcattttccttcagaagttggatatagttctgtataattttcttattccaaatatttttgag

SEQ ID NO: 629011 - DNA, 620 bp, Homo sapiens
aacctgataagaaacttccaaatcactttcccaaagctattcaaatgtgtgttacaccagttcaggtgttcagagttcagttgttcttcatctttgccagaatttggttccatcagttttttatttttttccattttagccagtgtagtagaaatggtatttcaattatggctttaatttatatttctaatgtctaattagcacctttccatgtatttatttataatctgtattgctttatacattaaagggagaaataatgatataagtttgcagtgttgttaaaacaattaatagattagaaagaaataaatgaaatgataatcatggttgtgctaaggaggtaaaattatgagttacacttttatctttattttccaaatgttctctaacattatgatgttcgttttataattttaagctgcataaatgaagatgttttgatgtaaaatgcctttccagctagaatagaaacttctacgttgtgttcttattcacaacatataaaacttagaattttatatggtttaactgttctattagaggtcagatgcttrtaatatgttttcatcaaacttctagagtaaatgcaattagaaaagaaaaaaatgttgaaataa

SEQ ID NO: 629012 - DNA, 594 bp, Homo sapiens
aagaaacagaaataaatattccattcactagagcaacaaaacctatgtaatatttargaataagttttacaagaaaggcatatgcttctgaaataaaactataaattcttattgaaggacataaaagaagatttgaataaatgaaaagacatacataacttcttatatggaaagatttaatatgataaaagtgttatctcttcccaaattattcattaatgaagttaaatatttgtctaaccaactttccttagaattccaaaggcttttaattaactgaaataatcttagagtttataggagacaaaatacattataggttatatatttgggtcacttgaggctcaggtcaaggagagaagtaagtgaaagagtgtgagaaagaggaggaaaacactctcattttataagtataattgtaaaaattaaaattacaaagaaaaagcatatatgaaataattagttataaatttatgaaagttatattttaattttatgtatatacaaagcatttttaaatagaaaagttgaaaaggactgccatttaattacttcaattgctattggcaatttgtaaatttttgcattcttatc

SEQ ID NO: 629013 - DNA, 612 bp, Homo sapiens
taatgaaagaaacagaaataaatattccattcactagagcaacaaaacctatgtaatatttaggaataagttttacaagaaaggcatatgcttctgaaataaaactataaattcttattgaaggacataaaagaagatttgaataaatgaaaagacatacataacttcttatatggaaagatttaatatgataaaagtgttatctcttcccaaattattcattaatgaagttaaatatttgtctaaccaactttccttagaattccaaaggcttttaattaactgaaataatcttagagtttataggagacaaaatacattataggttatatatttgggtcacttgaggctcaggtcaaggagagaagtaagtgaaagagtgtgagaaagaggaggaaaacactctcattttataagtataattgtaaaaattaaaattacaaagaaaaagcatatatgaaataattagttataaatttatgaaagttatattttaattttatgtatayacaaagcatttttaaatagaaaagttgaaaaggactgccatttaattacttcaattgctattggcaatttgtaaatttttgcattcttatctgccacatcatt

SEQ ID NO: 629014 - DNA, 559 bp, Homo sapiens
ttaacttcctattcatttctgttcctgccaatcagtcaagtactcacaggattccatcaagtgcttggcatgagtctaggcactaaagcacttccttccatactacattgtaaacgttctttgcaagccttctgtatgccccacattgttgccaaaataaagacgaatgaataagatatatgtagtttttccctttacaagttacagtcttcttggggatatacacgtagacaacaaattcaacataatgtgaaaaatgctcccatcgagaaatgtgcaaaaggcaatgtaacaaagagaaaagaataattgtttgcctgaggtgtcatgagacactttgtagagagagtagcatttggattgcactttaaagacttacggtatatcaaaaaggagagaaagacaaataaaacatttyttcctgaccttttcatatcttcacatttacctcccatcttaaattttgtagttctagatcccagtcactatcccataaacaacctatgtttccttgtcccctcctcctccatctggctaatttggtaaactccagctgtct

SEQ ID NO: 629015 - DNA, 574 bp, Homo sapiens
tgagtgttcttactacaaaaataaatgaacacacacacaaaaacccagaaaacaaaaaagcaaaggtacacaaggaaacttttggaggtgatgtaaacctcctatctggatggtggcaatagaaacttgaatttataatatatacaaactcaccaaactgtgtatattaataatatgatatttttgtatactaataaactctaaataaaacagaaaaatgtgtagaattttacaagttttgaaatatatacataccagtgaaagcatcactgtaattaagataatgaacaaaattcatcagccccaacggtgtcccyaaggcactgttcaccccactccccacccagacaaatattgttctgctttctatcactatagatgagtctgacttttctggagttttatgtaaatgtaactatacagtatattctctttttctgcctggattctttcactgagcataattattctgggattgatccatgttgtaatgtttatcagtttttattgatgaataatattccattgtagaaatattccatggctgtttattctttcacctagtggtgaatat

SEQ ID NO: 629016 - DNA, 563 bp, Homo sapiens
gctcttggaattaacatctttggaggaagaaaagaagcaatattgtccagagagggaagttgaactgcaatgaagttgccacagaggcttcaatgaatccttctgggwgtagagctgggatgacctttccagagttttccaattaagggaattgtatctcacctcaatctctagtctgaaccttgggtgaggcagcttctttcagccaatggcaattcctggaggcaccaggagttatgagcagtcaacactctttctttgctcctgagaaaattgagtgccctctttggtcctgaaagcagctctgggcagcactccacagcatccactacagacttagtgagttcaccctggctctcccacttacagattgcaggtaagtttcttaacttgcctatgcccttatcatcactgctactaaaaacctacatatgctgccttctgttgtcattttaaaaatctaattatgactcacatcacaattgttcacaacacacaaccattgagaaccatggagctgggttatgaagtctctaagggaagagattgtatcattttcatct

SEQ ID NO: 629017 - DNA, 546 bp, Homo sapiens
tgtggtggtcactgtactgccaggataaaaagagccctcatctctaaggaccagcgcccttctagatattagatttgtttttgccagacctctgatatctactgctaaaattctgcagtttgcctctttggttatcattgttcatttttccttgtgaactagatagggaaaaatatggaagtcattggggtaatttcacaagtccatggtgcaacttagtcttgatgtgataaaagccattcaccaccaatcctaccatcgggacaataactggggtgaaacatctcaatttctatacccgagctcttgtaattcttcataaagaaggttgcggtgwcccatatgtgtcctttgggggaatttcctccgtacttctccttttccatacttcttttgcaaactgatctgtctaggcatcatgtaaaaatggggccaaactgaatttcccatccagtatgcaacatgatccccactcaaagtaaagtcaatctttatttgtcgtattccccaaaggcccaaaagactgtatcattacatttgcacaat

SEQ ID NO: 629018 - DNA, 537 bp, Homo sapiens
gtggctcatcccaggacggagccacagagtcacagctggccattgcttatgctccaactctaccttaaacactcttctttttttgtcctaggcaataagttgctttcccttcaaggacaaactcaaaggtgatttccttggagaagtttgcacagcattatcctacctgagtccaaagcaatagacttccctaatcactccagaagcacttttaaaatgacctcagttctaattcrtatcacagtctggcacattgtgtatgaggatacatttatccttgtcatatatctagcttggtcatgtttgtatccctagcatctagcaaggtgccttacatggtgcatatgaccaggacatattgcacagagtagaatgaattcagatgcagtctggtcctaatcaatccaaatatccaagtttgtactgtatactggccttgattcattatcattcacgtacaaggcttaaaatattttacacaactggccaggatcagtggctcacgcccataatcccagcactctgggacgctaaggc

SEQ ID NO: 629019 - DNA, 551 bp, Homo sapiens
aatattcagaatccattaggaacttaaacagattaacaagcaaaaaaaacaagcaaccccattaaaaagtgggcaaaggacrtgaacaaacacttttcaaaagaagatatacacatggccaacaaggatatgaaaaaatacctgatatcactaatcattagagaaatgcaaatcaaaaaaatgccatcacactaatcagaatggctgttattaaaatgccaaaaaattacagatgctggcgaggttgcagagaaaggggaatgcttatacactgctagtgggaaaataaattagttcagccattgtggaaagcagttgggtgatttctaaaagaacttaaaacagctaccattcaagccagcaatctcatgactgggtatatgtccaaaggaatataaattgttctaccataaagacatgcacatatatgttcactgcagcactattcacaatagcaaaacatgaaatcaacctaaatgcccatcaatggtagactggataaagaaaatgtgacacatatacaccatagcatactacacagccataaaaaa

SEQ ID NO: 629020 - DNA, 551 bp, Homo sapiens
aatattcagaatccattaggaacttaaacagattaacaagcaaaaaaaacaagcaaccccattaaaaagtgggcaaaggacatgaacaaacacttttcaaaagaagatatacacatggccaacaaggatatgaaaaaatacctgatatcactaatcattagagaaatgcaaatcaaaaaaatgccatcacactaatcagaatggctgttattaaaatgccaaaaaattacagatgctggcgaggttgcagagaaaggggaatgcttayacactgctagtgggaaaataaattagttcagccattgtggaaagcagttgggtgatttctaaaagaacttaaaacagctaccattcaagccagcaatctcatgactgggtatatgtccaaaggaatataaattgttctaccataaagacatgcacatatatgttcactgcagcactattcacaatagcaaaacatgaaatcaacctaaatgcccatcaatggtagactggataaagaaaatgtgacacatatacaccatagcatactacacagccataaaaaa

SEQ ID NO: 629021 - DNA, 669 bp, Homo sapiens
tggtggggacagggtaaataaaatctgcactcctgcgggcttttattgttgaaaggggcactgacgctctccctggaaacttaaaaagaacagccaagtgaacggatgtgtctttcttttgcagtgcccaagcctgttctaatttttaaaaactgatgtctattaagacccaatgttaactttatgaaaatggttcctaaggagattcacatctctgtgtccgaattctgtgtgcagcaaacatcatctcaagtgcgttttcccaactacgcttctttccaggataaaatactctaagtgacaaatgttgagtacattatcaggtatgttcactattgtgagaactgaagccatctacactcacatagcttgccaactacattaacctgacttcttattccattattttcatcaacatacatttactatttcaagaaacttttgccagggaccggaaagttgcaaatatctttattgcttaatccagtatcttcttcaaagatccaaccactcttcaatggaaaacatcaaagaacagtttacattctaagactttgaacctttacctcaaaatcctagccttgttttatctaccaatcctaaactkttacccgtagctgactcaattctaaccaattcccctcattaaatattagacttacaatggga

SEQ ID NO: 629022 - DNA, 599 bp, Homo sapiens
cagcaaaaaaaaaaaaaaatcactgatctttttactatctttatggttttgcatcttctagaatgctatataatcagattctgtttatatagttagtacattttccacatttttcttttttgttgttggtggtgatttttctgcttaagtgcttaaatgggtcccatgcataaaactgaggttctgtcgagtgttccctaccaaaagatggctgcaatatgccttataaagaaaacatatgtattagataagcttttcagacakgagttatggcattttgggctgtgagttcaatgttaaggaatcaacaatatatattaaataagctgtatttttaacagaaacacacataaagcaagtttatttactgactttgatgaaaatgttgtgaccagaagataatatgaatttaacactgtgttactcctaaaggcaatgcttcagtatttgctaattcaatatttgcagcatctttatagaccataactaccacaaataatgagaactgactgtatcatttcaaatatggtttcaagtctaatgcctgcctaatcgtcacagagacttaaacttacgtggctttactgtttattaaataa

SEQ ID NO: 629023 - DNA, 560 bp, Homo sapiens
taccttttgggccctggtagggagcacctaaccatgagacattaagtgactctgcatccaaatctcgccattttttagtgagttctatcagaattatcaagtcataatgtcaagtgtggccaaaaaaccagtctctcgtatgatggagttggaatgcctagcattgtgcagcatgagcaggaaaggagaccacaagtgagttgtatgacaaatgtgtggagcaggctcccaaagatgttcacaccataatccctggaatatgacyatgtaggttatatgggaaaagggaattaagaccgctaatcatctaagtttaagatagcaaggttatcttggatatctggatagcctgatgtaagcacgatgattcttaaaggtgagaaaagggagaatcagagattcagagggaaacgtgaccatgaaagaggcacagagagatgcaacactgctggctttgaagatgggggaaggggtcatgaaccaagaaatgtgagtgagctctaggagaaagaaaaggcaaggaaacagattctcttctaaaccttccagaagagaactga

SEQ ID NO: 629024 - DNA, 647 bp, Homo sapiens
agcttgttcagtcttttcagatttatgcyccagctgtctcttcccagtggagttgtatagatagtgctatttctcccagccacaatgtgtgacaatacacatgaagtatcatcagccagggaagctcacctgagcttcagtgtcagggtttttactgggggctattcatgtagatatggctgaccttagtctccagatcctccagaagtggtgctgataatgtgtggtccaagtccaccactataaatattaaataaaatagacttcagatcagagaaaattaccagagacagagagtgctattatataataataaaaggattgatcacctaaaagacacagtaattacaggtgtgcaagcacaaaacaacaaagtgacaaaatatgttaagcaaatcctgatataactaaaaggataataggcaaatccacaattatagttagagaactcaacatcctcctctctcaacaacttatagaacaactatacagaaaatcagcctggatatggaagaacggaacaacatgataaaccaacagggtctactggtcatttatagaacacttcatccaacagtagagtacacattcttttcaagcacccacagagtgaatacaaagatagatcatatcctaggccatgacac

SEQ ID NO: 629025 - DNA, 471 bp, Homo sapiens
ctttgttcactgatactttccagattttccataacaaagtttactgcaaagtctttaaaagccatagttctctgatctacttagtaattatttaacyatcagttttcacactggtttcctagattcctgctgaaagggaattgtcccagcaaatgcaactagactttcctccccattttagaccacaggtgaaatgcagaagtaggaaacacctggattagttccaagcccacacagaagcgaacctcagatatgaatcacggtttggcgctgaatgagatggtgtcagaaggttgcacgggatcaaacagagaaagaaagcagatgtgggacttccttcttgcctctttttggaggaagtgaaatcgccgttcagcaacgcagatgcaaagtttttgtagacaagatgcctctttcttttagagatcagtgttagccacaggccattactcctcaagtgtggccatctgg

SEQ ID NO: 629026 - DNA, 630 bp, Homo sapiens
ttggcgtacatccctctagttatgtacatagttggggtcatgctgaatgtttatcattcttttttttcataacattattgtcagagatatttgaaycagaataactccatctcgaataggggctgggtaaaagaaggctgggctgcattcccagagggttaagtattctaagtcatgggatgagatagaagattggcataagatacagatacagatcacaaagatctttctgataaaagagcatgcagtaaagaaggcagccaaaacccaccaaaactaagatggcgacaagagtgaactctggtcatcctcattgttcattatacactaattgtagtgcattcgcatgctaaaagatgtttccaccagtgccatgactgccaatttccagaagttaccctgtatagtctaaaaaggagaggaacccttagttctgggaattgcccacctctttcccagaaaactcatgattaatccaccccttgtttagcatataattaagaaataatgataagtatccttaatcaagcagcacatacttctgctctgcctatggagtagccattcttttgtttctttacttctctaataaacttactttcaccttactctgtggacttgccctggtcc

SEQ ID NO: 629027 - DNA, 547 bp, Homo sapiens
tggtggcctccttggagcaaatcaccaggttgcctaaggagggctaaacgggtccaggttggaaatggagcaggtcaaaactcctatgctgattagtagtgggaccatgcctgtgaatagctactgcactcaagcctgggcaataagcaagaccctgtcttggaaaaaaaaatatacccggaatgcagtatttctagatttatagaacaccatcatggttttgataataactggtgaagcccagcctgggaagcaagataactagcctcattctttctaaaaacacttctttgctgcattaataaccaacagaggaattcaactccttggaaccttccttccaggatgcatacaggtgatggtgtagtgatacctgtgaattgcaacatgactttttcagtctcagtactgtatctagttcatggtataatcttgggaatgttaaggatgcaaytgggagcttcactaagtcctctggattccctggctaccactaagcatactaagacatagcctaattgtcccaaagaattaacagagttgggtt

SEQ ID NO: 629028 - DNA, 671 bp, Homo sapiens
tatggttcataacagtgaaacccacaggacaagtgtccaagagtttcactcctttcttttgtggaaacagcctccaccctcaggcaaagaggaaacccagggttggccttgactaacagcttgcataggtatggtggagccagggtgtttcagtaagggtggtgtggtcmtttgcctctgcatttatagtaaaagaaaactgataatggagtcccaagagacagcagtcagggaaaatatgaaacatcaagtccaagagaatgagcaaaaagcaaagccaaactttctggtggaggaagcagtagggtgtggggtcgggatttttttctaagtgcacacccctgcagcagagtaaccagccagagctgggggaaaaattaggatagctacctgttaggcatgtaggggtgtgtttgcatgtttagtacggcataaattcttcaaagacctgatggtctttaatattccaaccaactctcgtttccccattttgtcattaaattagcttaaagaggaacttgtagcttttagagaactcatgagttttccgcttcatcatctgcttctgttttctccatcttagtttgcccaaagcttgctggccgctgtgtagggctggtgagtggctggggctgtctgagccatgaacaacttcagggccaccatcctct

SEQ ID NO: 629029 - DNA, 574 bp, Homo sapiens
tcaaatccatgttttcaaatgaactgaaaaaggcatccagcaccacttataacacatttatttcagttccaggctgacagccctggggcatctagcaggatgcataattgtcatctggtgagagttgggactttgctcaattttaataccaatctctcctgattgtaattacctccactactttcatgatccccctacaatatttttttaaatgatatatttattcactgaatcaaatgtcattaatgagttatcttctgtggaggatgactgttctctttgttaatgttcacaatcaagatcttgggctgagaagaggcccttcacccaaggagtttgaagtatcacagygtgtgggaaggtgggaaccaggatacccattcatttccaaccgagacacagagaagtgagtcacagaatttgagcccgctctcttgactgcccagccagagacactgatttctgtaacctcttcacttgatcctgcctcttaagcattaaaacattctcctaaacctctgagtgttttgtgggttctgggtgttttgtacattttagccaagctaaccacttg

SEQ ID NO: 629030 - DNA, 578 bp, Homo sapiens
gaggagaaacaggatccaagacccatgcaaaccataatctcgccacttctccacagggcggccatgctgtgctagcctcagtcacctcagacacttcagagcccaaaggcagcagcagccaactccaggaaatggcaaagacggcagcctgtccctccctctgtctcaaattaaaaaaaaaaaaagaaagaaatatgggattatgtaatgtgaccaaatgaatgaattattgacatttctaagaaagaagaagtaaacaacctggaaagcgtatttgagcaaaaaaattaagatttctctattctkggtagaggtagacatccagttacaagaaatccagagaacacctgtgagatactatacaaaataaacatcatcaaggcatatagtccttagaccgtccaaggttaatgctaaagaaaaaaaatcttaaaggctgctagagaaaaaggtcaaatcacatacaaagggaaccccatcaggataacagtagacttctcagcagaaactttacaagccaggagagattgggggtatattttcagcattcttaaagaaaagaaatttcaaccaagaat

SEQ ID NO: 629031 - DNA, 546 bp, Homo sapiens
cagttgttcattgtgttttcttatgtttatttcagtggtagtgtcccattttcatttctggttttagtaatttgggtcttctcttattaaccmaaagtttgttgattttgttatcttgtcaaagaacccacttatttactttattctgctagctttgggtttactctgctccttttttcctagctcttatgggtatgatgttaggttattgattcaggcatgtgatttttttttttttctattttaatgtaggcatttatatctagaaattttactctgagaactgctttcactgcatcccctaggttttgggatattttgttttcattttcagtcatctctaagtattttgtaattttccttgtgatttattctttgatccattggtttaacagtgtgttaattttcatgtatttgtgagttttctagttttccttctgatattgatttctagtttcattcaattgtggtcagagagaacgtactttatatgactgcagccatttgaaatttattgagacttttcaatatgtctgtgaatttttt

SEQ ID NO: 629032 - DNA, 632 bp, Homo sapiens
aatctaagtatttggttttccttcagtacttttgacttagcaaagacaagtactttcaggaagccttaattttttttttttcgcccctttcrctttctctgttttagcaccacattaaataccagcatttgctgaagaagaaatatgtatgtccccatccctcctgtggacgactcttcaggcttcagaagcaacttctgcgacatgccaaacatcatacaggtacttttaaaatgtgtttatcaagtaggtaattgcactgtgctttagttttgcatgttggtaatgataacgtttttctaacataagtcttaaaagattctatagtcaagtgcggggaaaaggtgtgaaaataaaatgtagtaagacaaattttacaagggatgggcagactaggacttttgaatttttatcctttgacttcttgaacttctatgaccgggataatgatcttctattgagcatttattctgtatcaactgtggactaaatacgttatgtatattattgctaattagtctattcaacaccactaaatttgtttatattgatcttattttacagctaagaaactagaagcttggcaggattaagtaacctgcccatggtcacatagctagtttttaggagaa

SEQ ID NO: 629033 - DNA, 599 bp, Homo sapiens
gggaggggctgccatgaagacttctgacataccctggaggcattttccccattgtcttggcaattaacatttggatccttgatacttatgcaaatttgcaaatttctgcagccagcttgaatttctcctcagaaaatgagtttttcttttctatcacattgtcaggctgtaaatttcccaaacttttatgctcagcttccctttaagacacaagtttcaatttcaaaccatgtctctgtgaatgaataaaactcaatgcttttaagaatacccaagtcacctcttgaatgctttgctgcttagaaatttcttctttctctggtgcctccttgattagcttaataatcaawgttctgatttctttttctggcaattcagagatttcttcttggtttggatccattgctggtgtgctagtgttatattttgggggtgttaaagtactttgctttttcatattaccagaattgtttttctgattccttcttattttggtagactgtgtcagaggaatgctatggggctcaaggatactcttcagattcttttgtcccaagggggtgatcccttgaagcccttccactagggatggggcttcc

SEQ ID NO: 629034 - DNA, 599 bp, Homo sapiens
gggaggggctgccatgaagacttctgacataccctggaggcattttccccattgtcttggcaattaacatttggatccttgatacttatgcaaatttgcaaatttctgcagccagcttgaatttctcctcagaaaatgagtttttcttttctatcacattgtcaggctgtaaatttcccaaacttttatgctcagcttccctttaagacacaagtttcaatttcaaaccatgtctctgtgaatgaataaaactcaatgcttttaagaatacccaagtcacctcttgaatgctttgctgcttagaaatttcttctttctctggtgcctccttgattagcttaataatcaatgytctgatttctttttctggcaattcagagatttcttcttggtttggatccattgctggtgtgctagtgttatattttgggggtgttaaagtactttgctttttcatattaccagaattgtttttctgattccttcttattttggtagactgtgtcagaggaatgctatggggctcaaggatactcttcagattcttttgtcccaagggggtgatcccttgaagcccttccactagggatggggcttcc

SEQ ID NO: 629035 - DNA, 520 bp, Homo sapiens
ggtgtgctagtgttatattttgggggtgttaaagtactttgctttttcatattaccagaattgtttttctgattccttcttattttggtagactgtgtcagaggaatgctatggggctcaaggatactcttcagattcttttgtcccaagggggtgatcccttgaagcccttccactagggatggggcttcctgagaggtggactgcagtgattgttattgttattctggacctagccacctagaagagctamtgggcttcatgctggtactggggagtgtctgcaacttgtcctgtgatgtgatctgtcttcaggtctctcagctgtggataccagcacctgctctggtggaggtagctggggagcgaggtggactctgtgtgggaccttgattatagttttatttagtgcactgtttgtttgaaatgctagttaatgtagcagtgaagttgtcacatggacagactcaggacctctggttagccaggatgttacaggtgatagaattagctgttgttt

SEQ ID NO: 629036 - DNA, 520 bp, Homo sapiens
ggtgtgctagtgttatattttgggggtgttaaagtactttgctttttcatattaccagaattgtttttctgattccttcttattttggtagactgtgtcagaggaatgctatggggctcaaggatactcttcagattcttttgtcccaagggggtgatcccttgaagcccttccactagggatggggcttcctgagaggtggactgcagtgattgttattgttattctggacctagccacctagaagagctactgggcttcatgctggtactggggagtgtctgcaacttgtcctgtgatgtgatctgtcttcaggtctctcagctgtggataccagcacctgctctggtggaggtagctggggagygaggtggactctgtgtgggaccttgattatagttttatttagtgcactgtttgtttgaaatgctagttaatgtagcagtgaagttgtcacatggacagactcaggacctctggttagccaggatgttacaggtgatagaattagctgttgttt

SEQ ID NO: 629037 - DNA, 520 bp, Homo sapiens
ggtgtgctagtgttatattttgggggtgttaaagtactttgctttttcatattaccagaattgtttttctgattccttcttattttggtagactgtgtcagaggaatgctatggggctcaaggatactcttcagattcttttgtcccaagggggtgatcccttgaagcccttccactagggatggggcttcctgagaggtggactgcagtgattgttattgttattctggacctagccacctagaagagctactgggcttcatgctggtactggggagtgtctgcaacttgtcctgtgatgtgatctgtcttcaggtctctcagctgtggataccagcacctgctctggtggaggtagctggggagcgaggtggactctgtgtgggaccttgattatagttttatttagtgcactgtttgtttgaaatgctagttaatgtagcagtgaagttgtcacatggacagactcaggacctctggttagccaggatgttayaggtgatagaattagctgttgttt

SEQ ID NO: 629038 - DNA, 561 bp, Homo sapiens
tgcttcttctactttgatatttcacttggctctctaaatttgtttcagcactagataaagttaaactcttcttccacgatctggattttcaggttccccagtgaggatatgtgttcagaggtagactctccccctctcacactctgggcattcacaatttttyagctgtctcatggtgtttgcagcagcaagcttcttctttcaaagggtcagtgaattcttttggtttttctactatgcttctgtggtagttcttgaagcaactgttcacaatgtgagtttccacatgctgttctgtctgtctaagtgggagctacaagttattcctgcctcctatctgccattttttttttccaatttgagttgggaatggtcttttaaatgtgttgttgaatttggtttgctggtattttttcatatctaaattcatgagagatgttggcctgcagtggtctttttgttgtgttcttgtctgattttggtatcaaggtaatgctggtctcatagaatgagttcggaagtattcttttatctgtaattttttgaatagtttgagtgaaa

SEQ ID NO: 629039 - DNA, 561 bp, Homo sapiens
tgcttcttctactttgatatttcacttggctctctaaatttgtttcagcactagataaagttaaactcttcttccacgatctggattttcaggttccccagtgaggatatgtgttcagaggtagactctccccctctcacactctgggcattcacaatttttcagctgtctcatggtgtttgcagcagcaagctwcttctttcaaagggtcagtgaattcttttggtttttctactatgcttctgtggtagttcttgaagcaactgttcacaatgtgagtttccacatgctgttctgtctgtctaagtgggagctacaagttattcctgcctcctatctgccattttttttttccaatttgagttgggaatggtcttttaaatgtgttgttgaatttggtttgctggtattttttcatatctaaattcatgagagatgttggcctgcagtggtctttttgttgtgttcttgtctgattttggtatcaaggtaatgctggtctcatagaatgagttcggaagtattcttttatctgtaattttttgaatagtttgagtgaaa

SEQ ID NO: 629040 - DNA, 561 bp, Homo sapiens
tgcttcttctactttgatatttcacttggctctctaaatttgtttcagcactagataaagttaaactcttcttccacgatctggattttcaggttccccagtgaggatatgtgttcagaggtagactctccccctctcacactctgggcattcacaatttttcagctgtctcatggtgtttgcagcagcaagcttcttctttcaaagggtcagtgaattcttttggtttttctactatgcttctgtggtagttcttgaagcaactgttcacaatgtgagtttccacatgctgttctgtctgtctaagtgggagctacaagttattcctgcctcctatctgccattttttttttccaatttgagttgggaatggtcttttaaatgtgttgttgaatttggtttgctggtattttttcatatctaaattcatgagagatgttggcctgcagtggtctttttgttgtgttcttgtctgattttggtatcaaggtaatgctggtctcatagaatgagttyggaagtattcttttatctgtaattttttgaatagtttgagtgaaa

SEQ ID NO: 629041 - DNA, 592 bp, Homo sapiens
tcttctttgtctcttattagtctttgacttgcagtctattttatctgacatacatatagctactcatattcttttttggtttccagatgcatgaaatatctttttccactccttcacttttagtctatgtgagtctttataggtgatgtgggtttcttgtaggcagcrtatagttggttctatttctttattcatttagctacagtctgccttttaattggagaattgagcccatttacatttaatgttattattgataagtaaggactttctatggccttttttcaggtttcttttctggttgttttgagactcctctcttcctgttttctttctttattgctttcctttgtgagtaagtgattttctctggttgtatgttttaatttgttgctttctatttttagtaaatttattataggtatttgcatgtggttacatgaggctcacaaagaatgtcttatagatagatataacaagttattttgggctggacatagtcactcacacctgtaatcccagcactttgggaggccaaaacaagaggactgcttgaagccaggagtttaagaccagcctggccagcaaagtg

SEQ ID NO: 629042 - DNA, 592 bp, Homo sapiens
tcttctttgtctcttattagtctttgacttgcagtctattttatctgacatacatatagctactcatattcttttttggtttccagatgcatgaaatatctttttccactccttcacttttagtctatgtgagtctttataggtgatgtgggtttcttgtaggcagcatatagttggttctatttctttattcatttagctacagtctgccttttrattggagaattgagcccatttacatttaatgttattattgataagtaaggactttctatggccttttttcaggtttcttttctggttgttttgagactcctctcttcctgttttctttctttattgctttcctttgtgagtaagtgattttctctggttgtatgttttaatttgttgctttctatttttagtaaatttattataggtatttgcatgtggttacatgaggctcacaaagaatgtcttatagatagatataacaagttattttgggctggacatagtcactcacacctgtaatcccagcactttgggaggccaaaacaagaggactgcttgaagccaggagtttaagaccagcctggccagcaaagtg

SEQ ID NO: 629043 - DNA, 555 bp, Homo sapiens
tttctttctttattgctttcctttgtgagtaagtgattttctctggttgtatgttttaatttgttgctttctatttttagtaaatttattataggtatttgcatgtggttacatgaggctcacaaagaatgtcttatagatagatataacaagttattttgggctggacatagtcactcacacctgtaatcccagcactttgggaggccaaaacaagaggactgcttgaagccaggagtttaagaccagcctggccagcaaagtgacccctgtgagacattgtctctgtaattttttttaattagccaggcatggtggcatgtgcatgtagtcccagctatttgggagtgtgaggcaggagaattgcttgagcccaagaggttaagactgtggtgagctatgattatgccattgcaatccagcctgggtgacagagcaagaytcccttttttaaaaaagtattttgaagagatgacaacttattttagattaccaggaaaaaaaaaacaaataaaaagtgaaagaaaacctttacactttaactccattgccacc

SEQ ID NO: 629044 - DNA, 555 bp, Homo sapiens
tttctttctttattgctttcctttgtgagtaagtgattttctctggttgtatgttttaatttgttgctttctatttttagtaaatttattataggtatttgcatgtggttacatgaggctcacaaagaatgtcttatagatagatataacaagttattttgggctggacatagtcactcacacctgtaatcccagcactttgggaggccaaaacaagaggactgcttgaagccaggagtttaagaccagcctggccagcaaagtgacccctgtgagacattgtctctgtaattttttttaattagccaggcatggtggcatgtgcatgtagtcccagctatttgggagtgtgaggcaggagaattgcttgagcccaagaggttaagactgtggtgagctatgattatgccattgcaatccagcctgggtgacagagcaagactcccttttttaaaaaagtattttgaagagatgacaacttattttagattaccaggaaaaaaaaaacaaataaaaartgaaagaaaacctttacactttaactccattgccacc

SEQ ID NO: 629045 - DNA, 520 bp, Homo sapiens
tcagctaatttttgtgttttagtagagacagggttttgccatgttgaccagactggtctcaaactcctcttctcaagcaattcaccccctttagccttccaaagtgctgggaataccaggcatgagccaccatgcctggccagcaatgggttctataccttcaaatattttctttttgtatgtyagtgttttttctttttctatttctgattgaagacctccagttgggatttcttgcaagacaggtctggtggtggtgaattatctcagcttttgtttgtccagggaaaacttcatgtcttcatatttgaaagatagctattttggatacagtattcttggattataggtttttttctttcaagactttgaaaatatactactctctttagtccttcttttctttgagaaatctgttgccagatgaattggagttcttttgtatgacatttggatcttttctcttgctgcttttaggatcccctctctctttgatctttgagagttttactattatatg

SEQ ID NO: 629046 - DNA, 566 bp, Homo sapiens
atatgtcttggtgtagtcttacttggawtgaatctgtttgtttctctgatcttcttatacctggatatttatatcttttttttaagttttagaacatcatctttttgttattatttctttgaatatgctttctacctcttattgaattcccttttaaactccaataattcttagatttggtcttttaaaattattttgatcttgttaaatttctctgataaatttctaaattattttttgtgttatcttggagatctctgagtttccttgaaactgctattttgaattgttcatcagagttcacatatcctcatctcattagggttagtcacttgtgttttgctttgtctgtttggggaggtcatagttctgttagatgttgtttcttgtggatgtatatctatgtctttgcattaaaagattatttatttatttcagtcttctctgtttggcttgttttgtcttttactatatatgtatgtttagagattctttgtaatttacctgttgattgtcttttcttttcttctttctttcattcttttgttttctttctctctctttct

SEQ ID NO: 629047 - DNA, 566 bp, Homo sapiens
atatgtcttggtgtagtcttacttggattgaatctgtttgkttctctgatcttcttatacctggatatttatatcttttttttaagttttagaacatcatctttttgttattatttctttgaatatgctttctacctcttattgaattcccttttaaactccaataattcttagatttggtcttttaaaattattttgatcttgttaaatttctctgataaatttctaaattattttttgtgttatcttggagatctctgagtttccttgaaactgctattttgaattgttcatcagagttcacatatcctcatctcattagggttagtcacttgtgttttgctttgtctgtttggggaggtcatagttctgttagatgttgtttcttgtggatgtatatctatgtctttgcattaaaagattatttatttatttcagtcttctctgtttggcttgttttgtcttttactatatatgtatgtttagagattctttgtaatttacctgttgattgtcttttcttttcttctttctttcattcttttgttttctttctctctctttct

SEQ ID NO: 629048 - DNA, 566 bp, Homo sapiens
atatgtcttggtgtagtcttacttggattgaatctgtttgtttctctgatcttcttatacctggatatttatatcttttttttaagttttagaacatcatctttttgttattatttctttgaatatgctttctacctcttattgaattcccttttaaactccaataattcttagatttggtcttttaaaattattttgatcttgttaaatttctctgataaatttctaaattattttttgtgttatcttggagatctctgagtttccttgaaactgctattttgaattgttcatcagagttcacatatccycatctcattagggttagtcacttgtgttttgctttgtctgtttggggaggtcatagttctgttagatgttgtttcttgtggatgtatatctatgtctttgcattaaaagattatttatttatttcagtcttctctgtttggcttgttttgtcttttactatatatgtatgtttagagattctttgtaatttacctgttgattgtcttttcttttcttctttctttcattcttttgttttctttctctctctttct

SEQ ID NO: 629049 - DNA, 590 bp, Homo sapiens
attttggactttgggattttgaatgctctgctataccaggtacagagtaaaacattaaattctttttatcttaaagrtaatctttgacaacactacacatttttgcctcctgaattcattcttattttgtgtctggtagaaatttcccctattagatattaagccctgtatatgggcagcgactgtgtctctcacagtcataatgatgagtttggctcatcattatatccccaaacttataaaaatgtctagcccataataagcactctgtaaatatttatcaaattaatgaataaatacattgataagatggacattttcaaaattaacagcaaagaaaagcatgaaaatgtcttactttatcacactttggctttattctgggcattactgtacagctgcttaattaatttcatgttttaggtaacttagaatcatactgaaaaaaatgtatagtaggaatagtggccattgatttttctattaacatggttacaaaaaactcaagcagaaaatttgaatataaagataaaagttgactataataataaataaaatagtgatattttcaaacttttgataccaaatta

SEQ ID NO: 629050 - DNA, 540 bp, Homo sapiens
cgtgtgtgtgcgtgtgtgtgtgcatgtgtgatatttgacggwtgcaggaagcaaagtaataggaaggtaattgaatctaatgtgtgctaatgactcccctggttctggcctaggatgagtcacagttgctccttaggcaatgaacatgcctatatacttagtactctataaatgatacaacaaagtttctcactaccacctcttatggaaaaattacttctgagatactcattttagggttaggttttccaaaaaaatgaacttcatagctatggccagggttgtctacattttcatttctttgaaaatggaatcctttgatatgttctccacagtccctccaggaatttgcctgtggccctgaatcccacctactgtatttgggtttgttacttactttcagactctcagagcagcccacctgcctctctacctctttgtctcttatcagcttccagaatttctgtatatggattttatatcaccttcaggaacttgttttctgcatactctaaacctccatgatgacaacttgacttc

SEQ ID NO: 629051 - DNA, 570 bp, Homo sapiens
gttcattaaaaaccactgcattgaacaataccttcttttaagataggtactatgcctgattcacttttttatcctagaatataggtcaatgtctgagagtcaacatttaataaattcatgttgagttcctgaatagttctttgtgcttaaaagattttgtttaaaaaacatgatactgcatatagaatgtgcggtgagctttaggatacatgaattctttcttgacagmtctgagtgttcagcatgtaatataggcactcaggctgtgcctagttaagaaagtctgcaatctcttttgacagactttttttttttttgctatcacctcagttgtctacagaagacattcatttttgaatagtcatacccaactctttccaggttttgcagagtagaataggagcaatctcaaaccccctagaaaatgtgacaaagacaaataaaacttacagatgggaattgctgatttaactttacaggttaaactttaggtgacatttcttagaaatagctctttcattatgagattacagaatgaatggcggtggggaaacacatgtgaactgcttc

SEQ ID NO: 629052 - DNA, 570 bp, Homo sapiens
gttcattaaaaaccactgcattgaacaataccttcttttaagataggtactatgcctgattcacttttttatcctagaatataggtcaatgtctgagagtcaacatttaataaattcatgttgagttcctgaatagttctttgtgcttaaaagattttgtttaaaaaacatgatactgcatatagaatgtgcggtgagctttaggatacatgaattctttcttgacagatctgagtgttcagcatgtaatataggcactcaggctgtgcctagttaagaaagtctgcaatctcttttgacagactttttttttttttgctatcacctcagttgtctacagaagacattcatttttgaatagtcatacccaactctttccaggttttgcagagtagaataggagcaatctcaaaccccctagaaaatgtgacaaagacaaataaaacttacagatgggaattgctgatttaactttacaggttaaactttaggtgacatttcttagaaatagctctttcattatgagattacagaatgaatggcggtggrgaaacacatgtgaactgcttc

SEQ ID NO: 629053 - DNA, 577 bp, Homo sapiens
acttttcttcttaagagatttagtgaccatcactggtttatactttggcaggttttagaatcaatcccaggcctggggcaagctacgaggaattcaagcttaaaatccgggagtcttccgtatttttcattcaagctataaaacacatgtatgtaaaaagaatcaatacggggtcatggtaagagcttggaataaggttcaggtgagagagagctcagttatactcytggctctatcactaacttgtgtatttgggcaattatgtttcttgacttgtttggaaaatgtgggggttagattacaagtaaattgtttttaatggtaattccagtacatttctttctttatcaaaaataaaacagagattatttgccaatatttatgtcagctgttcggaagaataataaatgccatattttatatagctcctagctctacagctcaatgagaaataaactgtatagaatttaaagtccatgaggagtggtaataagagaagatattcattatgctactcattattattttaagtaaaaatagagttacagaatctcaaggagaacagttaaattaattt

SEQ ID NO: 629054 - DNA, 395 bp, Homo sapiens
agcattaaacttttaaagatttgtggtaagaaaacatccactgattatgaagcaggggagaaattcattgatgagtttgccaaggtcattactgatgaaaatctgatgccagaacaagtctaaaatgatgatgaagcaccactattttggcatttttgtttcagaagacgtggacgacagttgatgagatagctttgtaattaaagatgccaagtaaataataattgtgtggagatgtgctaatatagcaagtatgcataagtgtaaacttgctgtgataggcaaaatttgcattctctctgtattcaagtagtgagtttcttrtattattatgctaacaaaaaggcatagatccctagggacatcttttttgactggtttcacaaatattttgt

SEQ ID NO: 629055 - DNA, 603 bp, Homo sapiens
gaggaagccaagattcagtagagttcaatcagctacccaagttctcatagatggttagtgacagggtaaggatccagatctactctactccaaagctgcattccactactagcccagtgattctccaagtgtggttcctgcatacacagcatcagtatcaactaggaacttgttaaaaatgcaacttttcaggccccatcccagaccttctgaatcaaaagctctctaaatggcaatctgtgtcagaaagccctccaggaagcccttatgcatgctgaaatttgacaaccactagtgcaagccaggggtctgcaaaccgcaagccgagagacaaatccagcccacaacctcttactgcctgaattagtccgctttcacgctgctgataaagacatacccgaaactgggtaatttataaagaaaaagaggtttaatggactcacagttccacgtggctggggaggcctcacaatcatggtgaaaggtgaaaggttcctcttacatggtagcaggcaagagmgaaaacatgcgcaggggaactgccctttataaaaccatcagatctcgtgagacttactcactaacaaaagaacagcacaggaa

SEQ ID NO: 629056 - DNA, 545 bp, Homo sapiens
acagtaacttttatgatttttctgaatttgttttttaatgggattttaaaacatgtcaatcacctaagacttctacccattttgccttaactttttgtaatacaaaaattacttttaaaaattatgttttaaacattttatttgcttaaaagtttgcttgccaatggattaaagcaaggctcaacacattttttctctaaagggcaagaactaaatatattgatctttgcagatccagtctccattgcagctactcaactctgatgttataacatgaaagcagctgtaagctggatagtatgtaaaagaatgaacatggctgtatttcagattttctttacaaagcaggcagcttttcccaytccctgcttggtttgagaattaaagtaaaactttagaatcaccatatctggtgggtagtttctgttagcacattcacaatagagaacaaagaatagacagatttaggaacacagaacagaggactttagacaggagaaatgcttcctaattgtaaagtacagtataggaagaaaaggattatt

SEQ ID NO: 629057 - DNA, 603 bp, Homo sapiens
tccttaatttctgcatgactttatgctaaggcctttaaatactatctctcaatggaacttccaaggaacactcaggaggtaattcacatactcttttcaatttgtggtagtacagtgaaggcttggataaatcctataacctaaccaagtgacaaaaccaggatctgagcccagatcgacctgatgccaacgcctagttcttaacctttaargcaaaagtgaattcaatgggacatttgaattagcacagcagaggccatttacaggaaataatagctctggacagagccagacgtgaaaatatttagatattcatccctagaaatgtccttataggacagaagtttttaattatctgtgaaactctcaaaagacaattattttatttaagcactcttttaccctggctgcttctagcctcacagccactggggccctctcccccagatgctctaagcttctttgttgcctgctatgaagctgtaacaggccactcacttgggctgcactggtttgagctgaaggtcaacctgctccccagcaacttcctatgcaaagttcccttccgagcctgagaatgatgactaaacaacttccagtcta

SEQ ID NO: 629058 - DNA, 568 bp, Homo sapiens
ctctgggcatcgcctgcacaactctgtcttctgtcctgagctttacatttggtgtgtaaatttagggcccagacaggccatgttcttcatatccttccttgggtgcctcatgggtacttgagaaccaggacaactggggaagatataaggaagagtacttgtgtaatagtttcaaaactatttttagtaatttaaaatcctaaaatcatrttatgttaagtaacatattaccgtaaagtgtatgaggcatctctaagtaaattaaattactgaaccattaatttttaaatgtaagtttatatatgttggaatctaatttcttatggtatagaaaagctaaatatatttagatctaataaacataaaaaatgagaaaacatttataaaattacatctacaaatttcaaattgatggaataaaaagaaatataggtaaaacgattaatatataaagttgggaaaataaaaagaacagataagaattatgtttatggaaatctcaatatggtcaaaagctaactgacattggatgaatttgtttataaaattttattaaaattagctaata

SEQ ID NO: 629059 - DNA, 587 bp, Homo sapiens
catctcatgctgttgttattgggtcttttaattgtttggaaaactgagtctccactctgtaaaagagtaaaaatatttgcttttaaaaaacttttttagttatcatttggctaaataaattatattactttacattgacctgtgatttgatttggattaagtattaacctttgatgtatttaacagactttccaaaatcaaattttaaytctaaaattgtttattgacctcaaactaactttgagatgttcccaagggcccctgaagcatccaaaagactgataattaacaggtttatttgatatgttatgttacatgggaggcattgcagtaagaaataatatttaatttttaagttatatttgtataaatataacttaatatgtgtttcaaaattgtatgaggtttctaaaactctgatatgttttggtatatgttatcgcacataattatggctattattttaaatcattgaaggccacagaaattactgaatttttcatcaattgtgtctatagtcatgaaaatttatcttgtccaagttaattgcttaattctgatgattttgctacaagctgtttgcaagc

SEQ ID NO: 629060 - DNA, 583 bp, Homo sapiens
atataacagtagctaaaatgttgttaggaactgtatttctttcatgagacttatttgaaaaatatccattgatagaagtacttgttttactagacatgctgtaaaacaattaaawaaggcattacagatacgattgtattaggcaaaactaaatgaattgaggattgccttggtgagaagtcttacagatttgtagcaattagatccactttcagtgtaaagcagaagttgacctcttataaaatagtcagtggaagactatttatgtatcttctatgtatcttcccaagtatcttccactgctaaactctgctatggctagatgttgtgaggctttaatgcattatgacaaaatgtattttcagtaggtaaaggaagcttttgatcatctacggactgagagcaatcaaacccttcatgatccagaacttagagattggatattctgaaaaccaagagaaaaactgccttttccacacacccttccacaaacctttgggacttcaaaccttaggtttgtaatctcaaaactcagaagggtttctccaaactcttggaatatggcacacccttggaaacctta

SEQ ID NO: 629061 - DNA, 653 bp, Homo sapiens
cagtaacttaaattttactattgtttatatttgtgctctcatttgttcatatatgaatacaaagtaaaatatagttaataaaaattgaatatatcccacaatgtacycatcttaattaactggaactctgtcagcctatatttctgcttaaaccctatgtagtgttattggaaatttattaaatagccttgaagcacttaaataaatgaaaaaaagtggaatcagtcacaaatttttaaaggtaaaacctgcatttatttgataaacttttaggtctgaatacatttgaacaattgtaaactggtaatttttttagtgatgtgtatagacattttctgttaactgaaatatttgattaaatcctgatatatcaaaacaagagtgatggtcaaaatattcaacaacttgtatggtacagacaacttcatcggcatgggcattagtcataaacaaccagtttgacccatactactgagtctctattataagtctttttgggagttttgaccttaatttttctttttagctttaatagtaggccatcttcctcaccatcatgctgtttatattaggctttaaaaatattacttaatggcaatatgctgaaacctgtcaatgagaacatttcagatggttcaagatattttatataa

SEQ ID NO: 629062 - DNA, 653 bp, Homo sapiens
cagtaacttaaattttactattgtttatatttgtgctctcatttgttcatatatgaatacaaagtaaaatatagttaataaaaattgaatatatcccacaatgtactcatcttaattaactggaactctgtcagcctatatttctgcttaaaccctatgtagtgttattggaaatttattaaatagccttgaagcacttaaataaatgaaaaaaagtggaatcagtcacaaatttttaaaggtaaaacctgcatttatttgataaacttttaggtctgaatacatttgaacaattgtaaactggtaatttttttagtgatgtgtatagacattttctgttaactgaaatatttgattaaatcctgatatatcaaaacaagagtgatggtcaaaatattcaacaacttgtatggtacagacaacttcatcggcatgggcattagtcataaacaaccagtttgacccatactactgagtctctattataagtctttttgggagttttgaccttaatttttctttttagctttaatagtaggccatcttcctcaccatcatgctgtttatattaggctttaaaaatattacttratggcaatatgctgaaacctgtcaatgagaacatttcagatggttcaagatattttatataa

SEQ ID NO: 629063 - DNA, 553 bp, Homo sapiens
aatagtaatcagtcttcagaaaatataatgtagagagagcatgtacctggttgaggggaggtgttagtagtaggtaacattaaatactaatacttttgtcagacaaggcattgctgaatatgggatatttcaaatgatactaaaatgacccaaagaaattagctgtgcaaatatcctctcwagcaattcccaggtaggaggagcaaccagtacaaggctttgtggcaggaacaaatgatgatctgaaaatgaagccttgctaactgacaagctccatccattgtttcagtcagttttagtatctaatccttaagtatatatgggcaacctaacatcaactattatttgaggaaaggttgcaacatgaaaaaaaatacacacacatatagaagaaaatgattccaaatggaataagagctaattcagggtgtgagagggagcatcactttatatgagagtaactcaaattagtatctctagacagattaagaagattattgcatccataaaccaagaacacgatgctaagtaaaggataatcagagaaagagat

SEQ ID NO: 629064 - DNA, 657 bp, Homo sapiens
tttttgtacttgttttaaaaatcaaaatgtgcgtctacaatgaaaagcaatgacagtttgagttaccaaagtgctaagggatttgctactaggatgggtaccaacaatgttagtaaagtcagtggagctgccctctgtaggctagtcctgccctccatagacaaaagatactgctgaaggactggcttccctgagagcaatgtggtggtatgctccccagatgaaagagactgtctggtagcacctgatcatcagaaacaagcaaaatgcaatgatcactgtaagtgtcacgtttggagataaaaggcaatcctgtactttctacctttaaaaactacagactttaaaaaaaattgaagacacacaagaaatggaaagatatttaatattaatggatcrgaaggatcaatattattaaaatgttcatactagcccaaagcaatctacagattcaatgcaatcactatcaaaatactaatgacattcttcacagaaatagaaaaaataattctgaaatatatatggaaccataaaagacccaaaatagccaaatccattatgagcaaaaagaataagactggagaaattacattacctgacttaaattatactacagagctatggtaaccaaaacagcatggtactggcataaaaata

SEQ ID NO: 629065 - DNA, 594 bp, Homo sapiens
acaaatttagaattcacaagttagggcaaaataaagacatttttacatgaagatgaactcatcacaaaaagctacttaagaatatatttctgaaagaaattagaaaaatatctcagaaagatgatctgagacgtaggaagaataagaagtaagatactaatgcaggctttggtaaatccaaataagcactgactatatacataaataaaaccacagtgctaatttaggagattacaaaaatcaaagtgggataatacagaaaataacaacatgtaaaatgagaataagtgatcagagttaagttttttgagtcttgttcttgagaggaggatataaatgttgattaacattagactttctacatcagttatgcctgttacaatttaaaagtaaactcaacagaaacagaaataaattgtaaactttcaaacacaaaaagagaaaacaaagaaaaaataagtgtgtggaaagaaactaaaaaagcttcaattaatacaaagaaacagaaaaagagaatacatmggcatggccaagaagaactacaaaatagaatgtgtataagagtaatgacaataatgtcaatcaattaatgtt

SEQ ID NO: 629066 - DNA, 596 bp, Homo sapiens
gagtatatttaacagtttcaagaaatttaaagaggctttacaataagaacaaacagcaatcaggatataaacagagctgacaaaatttatagaaatgaataaatataataatgtaattaaaaactccatctataagcctaacagcagactggacacaattagaaaagaatagtgaatggaaagatagaatttataataagggaaggcatattaggtaaataaagagatagaaatgtgaaataaagataaagaggaatggaggataaagtcagaaaagctaacacaggtttaactgagatgccacgaggaatagaatgacggtggtgggggagaatgcggcaggggtaatatttgaacagataacagttyagattttccagaaaacttagaagccaaacaacatcaaagtaaaacaaataaaaagaaatccagaactatgtatattataactgcagaactttgaatctgaggattttaaacctagtgagaataaagacagattcactattaaaatagtgaaaaatggactaacagtaacaatagatgccacaagacagtgagatggtttgcagagtgtgttaaagaaaataaatgtt

SEQ ID NO: 629067 - DNA, 596 bp, Homo sapiens
gagtatatttaacagtttcaagaaatttaaagaggctttacaataagaacaaacagcaatcaggatataaacagagctgacaaaatttatagaaatgaataaatataataatgtaattaaaaactccatctataagcctaacagcagactggacacaattagaaaagaatagtgaatggaaagatagaatttataataagggaaggcatattaggtaaataaagagatagaaatgtgaaataaagataaagaggaatggaggataaagtcagaaaagctaacacaggtttaactgagatgccacgaggaatagaatgacggtggtgggggagaatgcggcaggggtaatatttgaacagataacagtttagattttccagaaaacttagaagccaaacaacatcaaagtaaaacaaataaaaagaaatccagaactatgtatattataactgcagaactttgaatcygaggattttaaacctagtgagaataaagacagattcactattaaaatagtgaaaaatggactaacagtaacaatagatgccacaagacagtgagatggtttgcagagtgtgttaaagaaaataaatgtt

SEQ ID NO: 629068 - DNA, 596 bp, Homo sapiens
gagtatatttaacagtttcaagaaatttaaagaggctttacaataagaacaaacagcaatcaggatataaacagagctgacaaaatttatagaaatgaataaatataataatgtaattaaaaactccatctataagcctaacagcagactggacacaattagaaaagaatagtgaatggaaagatagaatttataataagggaaggcatattaggtaaataaagagatagaaatgtgaaataaagataaagaggaatggaggataaagtcagaaaagctaacacaggtttaactgagatgccacgaggaatagaatgacggtggtgggggagaatgcggcaggggtaatatttgaacagataacagtttagattttccagaaaacttagaagccaaacaacatcaaagtaaaacaaataaaaagaaatccagaactatgtatattataactgcagaactttgaatctgaggattttaaamctagtgagaataaagacagattcactattaaaatagtgaaaaatggactaacagtaacaatagatgccacaagacagtgagatggtttgcagagtgtgttaaagaaaataaatgtt

SEQ ID NO: 629069 - DNA, 601 bp, Homo sapiens
caaaagccatacccacgtatctctgtaagacaggtctctttctatgttggattaagtaactgctatggcagaatattatgaaacagtacctttaggattttaaaagccctacatctagctgagggggcctttggggcaccatcttcattttttctgagatcttaaaaaaaggatcttgagatatttaccctgagatcacattttaaatgaaaaacactgggtttgatattccccctaaggccctttcttccttttagagtattttgccagggacccagaaagtcttgacatggaaatgtttatcttgttgaaaattgaatagttcctaatctttttctgtattcgtatctgattaagtacggctaaaggaaaattgttggcacttttaacattatgcctagcaatctccttaaccaaatatgcacaatttattagatatattttctattttctatgttaccacagatgacagtgctgccaaactattcgtccttgcattccaagggtcaccattattgcagcctccttgtccttgcagcctcctttaacagtaaggcttaggccttctggcctccaaatgytgcccattaccaaagccaat

SEQ ID NO: 629070 - DNA, 561 bp, Homo sapiens
gagattccacaattaattaagaaaatagaaagcaaaaaaaagtggataaattaaaaaatgcattggccacataaaacaattattataatattttgggattatcaactataaaactaaaccagaatatatgataacaatatcatacaggttgggacaggctggtcacagataatataaagcatatttatatatccttagatgttttaagaatagaccttgtgtcatttgccagaggctaaaggtattgattaatgtgagattttggtaagttgcatatgtattttaaaatttatagatatatattaaaatggtataaataaattatatccagattagtagaggaaaaatataatgaaaaatgaaatagtcactcaatccaaaataaagcaagaaaacaaagaaaaagaaacagaaaatactgggagaaataaaagcacaaaaacatgttagtaataaatcaaaatatgtcattaaattataatwaaaaaagacaaatttagaggttaaatttgttagaggttaaatagatgttaaaaaaggaaaaattgtcagactgggggg

SEQ ID NO: 629071 - DNA, 589 bp, Homo sapiens
  misc_feature 297: n = A,T,C or G
caggtacagttggccctccatatgtggaagttctaggatccccccacagaaaccaagatcctcagatgcttaagccttttatacaaacagtgtagtaaagttggmcctccatattttcagcctccacatttcaggattaacaaattgcagacagaaaatacatgtagttggtcctccacatcctcaggttttgacatgtggtgggttgaattcaaggatgcaaaacccatgaatatggagggctggctgtaggttggtaggtaggtaggtagatagatagataagcatatgtatatnaaccatatatgtaccaataaaaattggcagaaaggagaagtaaaataggcaaatcaacaatcctagtgaaaaatactttttacatgctttactcagtaattgatagatcaagcagatataagagtcatacgtatgtgaaatatttgaacaacacatttaacaacatgtatggaacattttacctaacggctgaataccctcccttttcaagcacacaaaatggtttgaaatgtttccattttgtactatatgacacatctgaacaaattccaaaggattgcttttttttcag

SEQ ID NO: 629072 - DNA, 548 bp, Homo sapiens
atcaaccacagggactgaaataactttggctatcaaacattctatttgattaatacttgtgacactaaagaagacaagaggcacagagtagatattattttacatcackaccatagaatgttgtgtctgaaaatgagtcaagctcaatattgaagtggacgtacacaaatgtacccacaggccccataagaaagggaactgggacatgctgtgcatatgatgtgttcagagaatctttgttagcatggtctttgcataaaaacatttttaatgacaaaatctttgagggtacactaaattgtccatttgtcaatttattctcctgtggggagaaaatgatatataataaatgttcattataactattctgttctcccaaaagcatttttcaggtgtctgaatgctattttgaggaccagacactggagccaattttcatacagagtgctcactgtttctaaatacctctactgcctgattagaagaagaaataaaaattttagccttatttaaaataagcctgtaatggtgatgattagggaaatgct

SEQ ID NO: 629073 - DNA, 519 bp, Homo sapiens
cttgcattttaatattcttttaagctgctgtttggaagaaggcaccttataactagccattagcaccaaagcatcacgttggtatcaggattattttgatggagagaatgtcatcatttgcaaataaatcagttatctaacaaaatcagaatcccccaatatgtactcagaatgtactaccctgtatcttctttgtggaccttaatcattaggtaacattggccataataaaaaataataatatgcttcagaaacatagtagttggatctcttgtctatataacgtagagaaggggaagaagacatagcttccaggtaacatgggacccaattgcgtacmatctgcctttatattcatctcttgctctatattttaagtaatttcagattttccttttaatatctgattatgtggaatcaagtgagctttgatctgggactctgagacagacattgatgcctgagacttgagagtgggtctgtaggttcagcacttcaaatgttgtttcttacagtctt

SEQ ID NO: 629074 - DNA, 480 bp, Homo sapiens
aaatcaaaccggattgttgatttactgaggctttgacaattatcctcttgtatatcactggatccttaaatccttagtaagaatggttttgggttaaataaataatggaaaatatttaatttgaatctattaaattacactgaagttatccttccagttaattcagctagttgctgatcagatcattctttatattagacttaagtattgttgcttattatttaaaagcagaaaagaaaaaccaaatggcaggtctgagtaatagttactttttgattcttttgatacatatttttaaactgaagaaatcactttatattcagtcttcttctgtggactttttgctatttgcagataaagaaggaattctacttaatatatttttactgtrgtctattaaatgtcattaaacctatatctaagaggaaagtaataactgaaataaaatcaggaatgtgcaaaattgtttcttcatacctc

SEQ ID NO: 629075 - DNA, 598 bp, Homo sapiens
gcagagtgctggagtgcagcaggggactggcagatctcctgtagagcatggagacatgggatgtgtattagttcattcttaggctgctatgaataaatacccgagactgggtaatttataaagaaaagaggtttaattgactcacagtttcaatagctggggaggcytcaaaaaacttacaattatggcggaaggcacctcttctcagggtggcaggagagagaatgaatgccagcaggggaaatatcagatgcttataacatcatcagatctcgtaaaaactcattcactatcatgagaacatcatgggggagactgcccccagtgatcaattaccatccaccaggtccctcccatgacatgtgggaattatggggattacaattcaagatgagatttgggtgggacacaggcaaaccatatgagaatggatgcatagaaaaggaaactaaacactgtgtttttgctactccatctccctagttggggtcagtttggaactaggagagactcttcctgtgggggaaaaggtaagcaggaggtcaccagaagtcctaattaaaactgtcaaaactcattgtctttgttggttgagaat

SEQ ID NO: 629076 - DNA, 538 bp, Homo sapiens
tctggggtggggctgccaagagttcacatgattgcattgctccaaagtggaagtctacattgtgcttcctctacctcatgacatgatccaagctgctgctgtaaggtgttatcttgagactgaagccactgctagtgtgtcctgcattgggggccagtagccactgtaactccccaaacctgaggctctgctgccactacacagtgctcatacataacacaccaccccctagccaagcagctacagctgtaccttccaagaataaactgtataggaggcactgtatctttcccattcaagttgctgcaaaatcctgaccctgctattcaaagcctaggcccagaagaatagccataatctgggcactcaatcttacaaggtgtcgtgtcctrccttgcaaggaataggcagtcctgctcacattgaggttgtgactgaactggtggtggagtagcccccaggcacctttcaccatggcacagctctgtgctgccatcaccagcagggaggtcatggcagacccagtggtcaagcagcc

SEQ ID NO: 629077 - DNA, 569 bp, Homo sapiens
gaaaaaagaaacatgaaaaagcaaagaaacttcaaaccaccaaagaaacaaaataactctccaataactcaccccaaagaaaatttataaattgcctgaaaaggagttcaaaatcatgatcttaaggaaactcaggcaagataaaaaaagaacacagacagacaattcagtgaaatcagaaaaacaattcatgatctgaatgaaaaatttaacagagatagatattaaaaaaaacaaacctttgagctaaagccttcgatgaataaaataaaaaatacaattgagagctttgagaacagactagatcaagcagaaaaaaccatttctgaactcgaaacasgtcttttgaaatagcctagtcagagggaaaataaagaaagaatatgaaaaagtgtgaaaatatccttcaagacctacggactcataaatatttatattatgggcattgcaaagggagaatagacagagaaaggtacagatagctatttagcaaaataaaagctaaaaaattgccaggtcatgagagagacatggacaatgagatacacgaagtttaaaggttgcaatta

SEQ ID NO: 629078 - DNA, 583 bp, Homo sapiens
attattttatttcacataacagtcccttactgtctgaatttgaagataagaaacatttttaacaataagaaacattttgttggccaggcgcggtggctcacgcctgtaatcccagcactttgggaggccgaggcaggcagatcacctgaggccgcgagtttgagagtagcctgggaaacatggcaaaaccccgtctctactaaagatacaaaaattagccgggcatggtggcgcacgcctgtagtcccagctactcggtagatcgaggcaggagaattgcttgaacgcgggaggcagagcttgcagtgagccgagatcacgccactgcactccagcctgggtgacagagcgagactctgtctyaaaaaaaaaaaaaaaaaaatttgcaaatatgtcctttttattggtggagaagcatatgacttacatttttaaataaatttttgattttagaatgtttttcgtttttcagaataatttgcaaagatagtccatagaatacccaagtatcccacacccagtttcacccagaactaatatggtacaattgttacaataacaaaccagtatcaatacattatta

SEQ ID NO: 629079 - DNA, 437 bp, Homo sapiens
tttttattaacaaaagtcccttactgatgactgtctaaatcatagtcatatgattaaaaattggctgtgtacatgggaaattcccaaatttaagctaaggtacataattaattcaattaatcacatkattaattgaattatgtacctctgcttaaatgtgggaatcatatatgtatatctatatacatatgattactaagtaatcattacttaataagtaatcatatatatgtatgtaatcgtatatatagtatataattaatctaattagtaagtaatcatatatatgtgattgcttactaattagattaattacttactgttggcttcaacaacacaaacattattttatagttctatagggcacaagtctgacacaggtctcacctagctaaaatcagcgtgggcgtcatgaggccttcattctttgctgaaag

SEQ ID NO: 629080 - DNA, 563 bp, Homo sapiens
aattgtatttcttttggaaaggaactttctcagataaagaaattccaggtagatttcctcycagtgcttcaagaaagagaatcagagagacagggaggcagggaaatgttggcgagagagcttgaggctgcttcttcagttcagcatgtcaaagcattatatttggggctgtcgttttctgaaccccaagatttccattgtgcagattttaaatgtagctttgtcagcagcccagagagttaacatgtgataatgagcatcaatagtgatctgagttctgagggagaaaaaaatgccaaagccctcagtaggatatttaggatctcaagctatgctcaatatgtgccctaatgtagacataatgtgaagatcaaaaggaaataaaaattgaattctaactttagagatagtaaaaccatctaatataatgtggcggtgcccccacccaaatctcatcttaaattgtagctcccataattcccttgtgttgttggagggacccagtgggagataaatgaatcatgggggaagtttcctccatactgtgctcctgttagttacta

SEQ ID NO: 629081 - DNA, 543 bp, Homo sapiens
ctaatattctgacttcagctgtgagaatgtcatctgtgggttgcctggtagggaaaatacaagacgaaggagcaagaaacgtggatctagacctagagctgccattgagattttgatacagtctctcttcctctctaggacatcaagtttcttaatctgtcaaatgaggggggaatagctctctcataaggattttctagacctttaaatccagctccscattagacatctatactcctcagcagacatctatgcccaaattgatctcaaatataacaagtatcataccaaactcattatatttacttcttctttatttgtattgttataattgaacccacctattcttatgagctagtaatctagaatcttactcaactcttctatttccttctgttccatcatctgtactgtgatcagattctcagtattttgcctcagaaatttgtttccattctatctgcactgacactgtgttggtcaagaacaagaatataagtttagttttttttttcttgtctacatggtaagtgttaagtgatc

SEQ ID NO: 629082 - DNA, 561 bp, Homo sapiens
gataaaaatcttttgtttctgaggctrctgctgaggccttcattttgggatagtgtttttgaactccaacaactacaaagctacagtaattaaagtagtgatactggcataagtattgacatataagcaaatggaataaaataggaagcccaaaaataaatccttgcacatataatcaaatagttttcaatgacgatgccaagatcatttaatgggggtaaagcagtcttttcaaaaagtggttctgggaaaactgggtattgaaaatcgtgtgaaaaaatgaatttggacccttatctttcatgatacataaacattaactcaaaatgaatttaatacctaaatgtaagagctaaaactgcaaaactcttagatgaaaacctaggagaaaggcttcgtgacattagatttggcaatgatttggtggatgtaacactaaaagcataggcaacgacaaaaaatgattacataggactacacgaaaatttataacttctgtgcatcaaacgacaaaaccaacagagtgaaaaggcaaccatggaatgggagaaaatgtttgca

SEQ ID NO: 629083 - DNA, 561 bp, Homo sapiens
gataaaaatcttttgtttctgaggctactgctgaggccttcattttgggatagtgtttttgaactccaacaactacaaagctacagtaattaaagtagtgatactggcataagtattgacatataagcaaatggaataaaataggaagcccaaaaataaatccttgcacatataatcaaatagttttcaatgacgatgccaagatcatttaatgggggtaaagcagtcttttcaaaaagtggttctgggaaaactgggtattgaaaatcgtgtgaaaaaatgaatttggacccttatctttcatgatacataaacattaactcaaaatgaatttaatacctaaatgtaagagctaaaactgcaaaactcttagatgaaaacctaggagaaaggcttcgtgacattagatttggcaatgatttggtggatgtaacactaaaagcataggcaacgacaaaaaatgattacataggactacaygaaaatttataacttctgtgcatcaaacgacaaaaccaacagagtgaaaaggcaaccatggaatgggagaaaatgtttgca

SEQ ID NO: 629084 - DNA, 543 bp, Homo sapiens
acaccccccaaaaatggaaaaatattccattttcatggattggaagaatcaatgctgttaacataycaatagtacctaaagcaatctacagattcattgcaatccgtaccaaattccaattacattcttcacagaaataggaaaaacaatcctaacatttatatagaaccacaaaagacccagaatagccaaagctatcctaagcaaaaaagaacaaaagtggaggaatcacattacctaacttcaaattatactacagagctatagtaaccaaaacagcatggtaatgacataaaaacagacacaaaaatcaatggaacagaatagagcacccagaaacaaatccacacacctatagtgaactcattttcaacaattgtgccaataatgtacactggggaaaagacagtctctttcataaatagtgctgggaaactggatatccatatgcagaagaattaaactagatccctatctcttgccatatacaaaaaatcaaatcaaaatggattaaaaatttaaatctaaaacatcaaactatga

SEQ ID NO: 629085 - DNA, 652 bp, Homo sapiens
catttcacagtatttctagtttttcattattgtatctgttgtggtttgtgatcagtgatctttaatgttactattgtagttgttttggagcaccaggaaccatgttcataaagacagcacacttaataaatgttgtatatattcctactgttccactgaccagccattcttgtctctcttcctcttctcaggcctctctattctctgagacaaaaatgttaagatgttaataatcctacaatggcctctaaaygttcacaggaaaggaagagttgcatatctcttactttgaatcaaaagccaaaaatggttaagcttagtgaggaaggcatgtcaaaagccaagaaaagacaaaagctaggcctcttgtgcccgacggtcaagttttggatgaaaggaaaagttattgaaggaaattaaaagtgctactccagtgaacacccaaatgacaagaaagcaaaacagccttatttctgatatagagaaagttttagtggtctggatcaaaccagccataacatccctcatgccagagcctaattcagagcaaggctctaactcttctcaactctataaagaccgagaggtgagaaagctgcagaagtgaagcttgaagctagcagaggttggttcatgagctttaaggaagaag

SEQ ID NO: 629086 - DNA, 652 bp, Homo sapiens
catttcacagtatttctagtttttcattattgtatctgttgtggtttgtgatcagtgatctttaatgttactattgtagttgttttggagcaccaggaaccatgttcataaagacagcacacttaataaatgttgtatatattcctactgttccactgaccagccattcttgtctctcttcctcttctcaggcctctctattctctgagacaaaaatgttaagatgttaataatcctacaatggcctctaaatgttcacaggaaaggaagagttrcatatctcttactttgaatcaaaagccaaaaatggttaagcttagtgaggaaggcatgtcaaaagccaagaaaagacaaaagctaggcctcttgtgcccgacggtcaagttttggatgaaaggaaaagttattgaaggaaattaaaagtgctactccagtgaacacccaaatgacaagaaagcaaaacagccttatttctgatatagagaaagttttagtggtctggatcaaaccagccataacatccctcatgccagagcctaattcagagcaaggctctaactcttctcaactctataaagaccgagaggtgagaaagctgcagaagtgaagcttgaagctagcagaggttggttcatgagctttaaggaagaag

SEQ ID NO: 629087 - DNA, 627 bp, Homo sapiens
tgagaagttgcttcttatggatgagaaaaaaaaagtgttttctttagaggaaatccactcctaatgaagatgtcataaacactgttgaaatgacaaaggatttagaatattccataaacttagttgatcaagcagtggcaggatgtgaaaggattgactccaattttgaaagctctactttgggtaaaatactgtcaaacagcatcacatrgtacagagaaatctttcatgaaaggaagagtcaatcaatacagtaaatttcattattgtctaattcaagaaatttccacagccaccccaaccttcagcaaccaccactctaatcaatcagcagccatcattactgagacaagaacttccacctgcaaacattatgactgctgaaggttcagatgatcttttgtatttttagcaacaaagtacagcatttttaaattaaaattaatatctttttagacataatgctattacacacttaataatctgcagcgtagtcaatacatatgtgcaccgtaaaattgtaagaaatttgtgtaactcactttattttggtggtctggaaccaaactcagaatatatctgaggtatgcctgtactcaattctgccaatgtagcatatgaactgtc

SEQ ID NO: 629088 - DNA, 577 bp, Homo sapiens
tctgaggtatgcctgtactcaattctgccaatgtagcatatgaactgtcaatatctaaatgaatgtacccatgctccaataaaacttataaacatagatggctagctgaatttaatycactggccataattgccaatcccagatatgagctattatttgtgaatgagaaatcacagtacctacaacataaataacaaatagaagtatctctaaagaaaaacaatagaagtatatataagcatacctccatagtagtagataacatggaaagtacaagcaaatatatgtgcatctcatatactataatttaaatattcatgttatagaattggaaaatgccagtgtcaaacggagataattcaactctttcatgcagtcatagtcaatatttggatatgtttcaactttaaatacacattgtatatgttaaaaacatggtattcaaggatgtttgctagtacttcagattgctaaagttcaaatatcacttttggcatttcctgtttatgtaacaataaggaataactaaccccaagattttcagtctataaaatgactgtagtgagagtgtgtaggg

SEQ ID NO: 629089 - DNA, 652 bp, Homo sapiens
tgtttcaactttaaatacacattgtatatgttaaaaacatggtattcaaggatgtttgctagtacttcagattgctaaagttcaaatatcacttttggcatttcctgtttatgtaacaataaggaataactaaccccaagattttcartctataaaatgactgtagtgagagtgtgtagggttgagcattatccaggacagtatttaccacacataagagacattcaaagtaatctaaatttagcacaaattgatcaatgttcctgaggagtcccaaggtaatcttgctttaggaatagctggataatagaattccaaccacgttgtcaaatacctgtctctctgccctacctccactgccctccacaaactcctatctttttcatcccatgttagcctctttttcaggcaaggtctctcctcaggggtgacaaatagaaatctcagcacttacttgcttcaagattatctatttataatcccagtgaaaaagagtaaactacgtccctagaaatctctgaaaagttcttagtgtaattccacttgacctgcaacaattatctaacccgacaattggcatgactttttcatttatttcacaaatattaactgagtgcctatattttatctaaatagcagttgtatagtgctc

SEQ ID NO: 629090 - DNA, 554 bp, Homo sapiens
tatgggtctctgttttcaatttctaatcttgggatgtgtgtgtgtggcctggcttggttgagtcatagtccattcagcatagatagaatgtttgtcacatctaacaatcattttgctcttcaaaacttttattgaccccggagcctcaaagtcaagtcaaggatcaattctggatcaataagtaccatcctattcaaggttctgttacaaactctttatttagatttactgagctactttgcctttcctccacaagtcagttattttgggttatcacttataaygaacctatctaatacatatttttcccacaaaaaatctgtacagctattaatcctgtgcttttcttttgtttgctctgcatttaggcttaaattcccctctgtgatgcattttggaatgagtgggtttgatgcccacaccttgaaagaaatccctcaaaaaacaaaaggacaagagtcaccaactcccacacaaagtaaaacatggacacttaattttaacagtgttaataaggtgagaatattaaggttgtttattttatagttaaccac

SEQ ID NO: 629091 - DNA, 554 bp, Homo sapiens
tatgggtctctgttttcaatttctaatcttgggatgtgtgtgtgtggcctggcttggttgagtcatagtccattcagcatagatagaatgtttgtcacatctaacaatcattttgctcttcaaaacttttattgaccccggagcctcaaagtcaagtcaaggatcaattctggatcaataagtaccatcctattcaaggttctgttacaaactctttatttagatttactgagctactttgcctttcctccacaagtcagttattttgggttatcacttataacgaacctatctaatacatatttttcccacaaaaaatctgtacagctattaatcctgtgcttttcttttgtttgctctgcatttaggcttaarttcccctctgtgatgcattttggaatgagtgggtttgatgcccacaccttgaaagaaatccctcaaaaaacaaaaggacaagagtcaccaactcccacacaaagtaaaacatggacacttaattttaacagtgttaataaggtgagaatattaaggttgtttattttatagttaaccac

SEQ ID NO: 629092 - DNA, 623 bp, Homo sapiens
tgatccacccacctcggcctcccaaagtactgggattacaggggtgaggacacttggcctaatctttcatttcgataaaccctagtagatttttgactactcctggaaatataaatcccaattaaaagatatttttgggctcttataaaaaagttaaaaaaattacagatgcttgccaggttgcagagaaaagggaacaattacctactgctggtgggaatgtaaattagctcagcattgtggaaagcagggtggcaattcctccaaaaacttagggctatcattcgacccagaaatcccattattggttatatacccaaaggaatataaatcattctaccataaagacacatgtttgtcccagcactattcacaakagcaaagccatggaatcaatctaaatgctcatcaatagtagactgggtacagataatatggtgcatatacaccatggaactctacacagccataaaaatgaggcatgtcctttgcaacaacatggatggagctggaggccataatcgtaagtgaaataatgcaggaacagaaaacctaataccgcatattctcacctataagtaggagccagaccttgagtacacgtggagacaaatcagggaaca

SEQ ID NO: 629093 - DNA, 565 bp, Homo sapiens
ccatctgtggccctcattgcaataggatacatgcatttatttaacaatcactacagtaatgaggcaggtactcattaactcaacctaaaaagtctcaatggtgaattcaattgaccaaaatctctacatgtcagaatgaggttttgatccagatgcttttggttttagatcttaatttttgacatttaatgtctgatactttgaaaaatcttaagtttttaaaattaacttttaatgtaagtattcactaattccaataataatgatttcagggatatacagtgtatcaaagggagatcagatggataacaatctgttttatttttgacaargatttgtgcagctgtgaaattgaagaaacaatgtctctgggttaaagaatcttgttaatttcctggagacatagcagtaacaggctgaccagaaagttggcgaaaattgtttttgacttgaaaggttagagccaagggtcaagagaagtggtacaattgaggatatattttgcgggatattaaaacatacaaatggtttggacacagagtgtgagaaacacactggaatcaag

SEQ ID NO: 629094 - DNA, 441 bp, Homo sapiens
tgtgagaaaaacaaagctaatacacaatctgtattcttgtgcggggaacttatcacatttttccaacattttatgataatttgggattttcagattttacattccagtactaaatttatgccaaagaatgaattttgccartatcttagctctctaactttatttgcatttacattttttcttttggagcacatagtctaataattctttagaaggggatctgtattatttattgtaatccttatttgattttttgatatctttataccatcaggatatctaagatgaataatactttaagactatacatttaaatctttttcttctcacaaatgaaatctagttagcctgaatatggggggaaagattaaaataaatttgatcacaattgctattattctgtagacctttagcatccaagtttacagataaacctgtaca

SEQ ID NO: 629095 - DNA, 600 bp, Homo sapiens
caacactatttcttgtcattcttattattattgcatttgagccgttgtgaagtgatatctcattgtgggtttttacctacccattgcattaccctaatgactaatgatgttaagcaccttttcatgcacttattggtcattttaaaatcttctttgaagaaatgtatactcattcttccccattttttaaaactgagttgtttgtctttgtgttactgagttgtaaaatttatttatatattatggatcctaaaccctttacmgatatatgatttccaagtattttctcccattctgcaggttgtctcacttatttttaaaattgttctttggtacacaaaagctttaattttgatgaagtcaaatgaacaagagataaaatatgtgttcaaacatttatttaggccccagtgttatcatattggtggctaagttatcattgctattctttgatttaacacaggcttttttccatttttaagtgagagggtcactaagctctgttaccattcaggcaccataataagattatagattcttagtagaggatttaaatctaaaaacctttacatataagttgccgcaaaaacatcttcccag

SEQ ID NO: 629096 - DNA, 627 bp, Homo sapiens
taactcaggaatatttgggttgaaagacgagtagggaatatgtaacttttaaaatataggacattcatttacagaaagaattactgwaactcaaacagctaaaataaattgtcctcaatctggtagaaatgaatcacttatgatgttctagtgatttaatccccagagaaggaaaataaaaaataatttcatataaattgagattaaaaaccgtgttcttatattcagggttagagatattccacagtatgtcaatgaatcctctagtcagtattttgttagaaagggagagggggtgaagtagaaaataaacaagaaatagaggcaggaaagtagagctgaatgactagcactaggggaatgtatttatttactctattacccaagagggagccacacttgagatatatttctggactgtaactttcatctactttctcatgagagaattcaatctttatcctatttgcaaggtggaaaaaaagtcactcgacacttagctggtgttttgcttccccctccaccttggaatcttcctggcttccaggtctcacgcagtatgaaaactatgagacaggtgtcccatcctgggattgatttagtccacaaaagggcaggctttccaaa

SEQ ID NO: 629097 - DNA, 581 bp, Homo sapiens
agtggctaatatacaaagagagagtatagagacagatctaaaggcagattgccctattttaaatcttgaaccaacaccaacaagttatgtgactcaggcaaatgatttaacctctgtttgcttatctgtaaaattgggataatcatgatatatttcactctttaagaagattaaataatttatcgcaatgtacttgtaccataytctgacccttaggaagtcccatagaagtattacctcttagctgcatgttaactggtaaagacagatgttcactatgacagggtcaaattctttatctgacaagttaacagctacagacagcacttaattgaaaatggaatagtatcactttaattaaaaataataataaacagtatcttggcaaaatttgcttccaggaggatgtggcatccaaaacatacattcaataagctattgaatagccaatggcacagttcaattctcacccttgatataagaaatctaccaaatcagaagtattttttgatatattacatatttagactccatgtttaaagaaaggaagatagtataaagtaggtggtaataaataatca

SEQ ID NO: 629098 - DNA, 581 bp, Homo sapiens
agtggctaatatacaaagagagagtatagagacagatctaaaggcagattgccctattttaaatcttgaaccaacaccaacaagttatgtgactcaggcaaatgatttaacctctgtttgcttatctgtaaaattgggataatcatgatatatttcactctttaagaagattaaataatttatcgcaatgtacttgtaccatactctgacccttaggaagtcccatagaagtattacctcttagctgcatgttaactggtaaagacagatgttcactatgacagggtcaaattctttatctgacaagttaacagctacagacagcayttaattgaaaatggaatagtatcactttaattaaaaataataataaacagtatcttggcaaaatttgcttccaggaggatgtggcatccaaaacatacattcaataagctattgaatagccaatggcacagttcaattctcacccttgatataagaaatctaccaaatcagaagtattttttgatatattacatatttagactccatgtttaaagaaaggaagatagtataaagtaggtggtaataaataatca

SEQ ID NO: 629099 - DNA, 579 bp, Homo sapiens
tgtgacatcaattagaatattattttccccaaaaatagctccttcatatgcacaaagtgaatgaacccaaattttcaaactcacttgaaattactactatatagaaaagaaaagtgatacaaaaaggaacaaaagaaaactacagaaaagccagaagtaggaaatagaatagtctaatgttttcaaccttacagagagaatctgattttatctacttttatacatatcattagaaagaagtgaaatggcaattaatcaaaaaactatataccacagtataatagttaccgagtctcccmacccagattgttggttaacgagtacacctttacccttcacaaaatacaggtgcctagaaaaataccctgtaaggatttcagctttcttcacagaagagaaataactattcaaatattcaaaactttatttttaaaagtagccttccctacaaatttaaaagtctggggaagctcctttttaccccatccaaagagttcataagcatgtaaaatagagcaaattcatttttaaaacaacattattaaaacagcaaaagatagcatccatcagcattagtgc

SEQ ID NO: 629100 - DNA, 670 bp, Homo sapiens
cagttattatttcaaccaataatatatcttttgactgttttgggtccacaaaccaatgactaaaactgcagtattcacattttaattgtcagttaatttaatagttcatgtagtattgattattctcttcaacatttttggatgttgcttctatctgtaggaaagacaaataggatttgggattccaaaaactgtgtgttcctactttaaaatatttttttggcaacatatctcttttgcctgtgatagtgttttttttgttgttgttgttgttttttaaaatattctggttaaatctagtttgagagaaacatttcgttttgaaacagtaccacaaatacccaactcttgttgttgacctaaaattttgatgaaaatggggtatatcagtttatatagttcctgtattaataagagagaaatcaatctttccagtcaccagaaaactttttttttttttgctttatgttaaattgttgctatgtttkgtaattatagcctagtttttcatttttggtatcacatctatttctagtaaagattatttaggtgaactgattctatttttggatccaagtacatgactttatcatttgtttgctgctgtatctctagtctcaaaaaaaaaaagtctagtatttggcaaagtaactcaaatttagcatgaggc

SEQ ID NO: 629101 - DNA, 465 bp, Homo sapiens
ctgaggcaggagaatcccttgaacctgggaggctggaggttgtggtgagctgagatctggccactgccctccagcctgggacacacagtgagactctgtctcaaaaaaaaaaaaaaaaaaaaaaaaaaaaaaaaacggtaaaaaaaaattaaaaaaraattttaatctgtttgaaactgaaggtcccgattcaatcctttcatgtaacctttgggttactatcccctggggaagagcaatctccctttttttttgagacagggtctcactctgtcgccccggctggagtgcagtggtgtgatcatggctcactgtagccttgacctcctggactcaggcagtcctcctgcctcagcctcctgagtagctgggactacggttgtgtgccaccacacctggctaattttgtttattttttattttttgtagaggtgggggtctcactatattgcccaggctggtgtg

SEQ ID NO: 629102 - DNA, 465 bp, Homo sapiens
ctgaggcaggagaatcccttgaacctgggaggctggaggttgtggtgagctgagatctggccactgccctccagcctgggacacacagtgagactctgtctcaaaaaaaaaaaaaaaaaaaaaaaaaaaaaaaaacggtaaaaaaaaattaaaaaaaaawtttaatctgtttgaaactgaaggtcccgattcaatcctttcatgtaacctttgggttactatcccctggggaagagcaatctccctttttttttgagacagggtctcactctgtcgccccggctggagtgcagtggtgtgatcatggctcactgtagccttgacctcctggactcaggcagtcctcctgcctcagcctcctgagtagctgggactacggttgtgtgccaccacacctggctaattttgtttattttttattttttgtagaggtgggggtctcactatattgcccaggctggtgtg

SEQ ID NO: 629103 - DNA, 394 bp, Homo sapiens
tcgttttgctcaaattaatgctttagaataaaaaatcatgaagaaaaaattatggccttaatgaaatgatgaaataacagaatatatgtgtatgtgtgtgtgcatgctcatgaacacaaactttttacattataagtgcaatgtcttatatatttaccaactcttcctttttttcatattacaatagagatttttttaattcacatgtaaaataactcaaagtttactgatttcatcctggtaggtctaaccaatgccacagaactkcagatccccctctttatcttgttcatcctcatccacctcctcattctgactaggaacctggagatcatactgttgatcctgctggactcttgtctccaattcccatgtactttttcctcagtaacct

SEQ ID NO: 629104 - DNA, 610 bp, Homo sapiens
tctggtttttatgtcaagcttcaatgtctttttggctcttctagttatcttgacctcctacctgttcatattcatcaccatcttgaagatgcactcagctcagggacacttaaaagctttgtccacctgtgcctctcacctcattgcagtctccatcttctatggaactactatctttatgyacttacagcctagctccagccattccatggacacagatgaaatggcatccttgttctatgctgtgttcatctccatgctgaaccttgtgttctacagcctgaggagcaaagaagtcaagaatgcattcaaaaaggcggttgagaaggcaaaatttttcttagaactgtgatttaatgtggtagggtacacaataacccagtttcattcttttcagaacttccccatgaaattaatcacattgcattttcacaatgcatttaaattccagttgtgatagccttacttcttcagaaggtaatagccttacctttctttttacctgcctagtaaaaagaaaatacgtccagaatgtattacatgaacgaaaatactgctggaaaagcataagaacatttgggtcctttttgtcaaaacctttctaatggca

SEQ ID NO: 629105 - DNA, 586 bp, Homo sapiens
tcaaacccagacaatgtgtcatcttaatcattatcrgtaggctctgttgctcctcacaaaactgcagggaagctgtgttgcttgaggcactaagtgaaaggtagggcagcagaaggtggtgtggtcagagatgatgtcaaaaataacacagagtcaagatcacaggaatttataggccaaagtaaggactttgattttactctaagtaagattcaaagacactgaaaggatttgagcagaggaatagcactatcagacttacatgttaaatgaatcaccccgcctgcaaagtagaaaatatactattttagagaaatattgaatcagaatctttttacgcatctattgtaacaatctaggcaagtatagacagtcttacatttcctcaggtccatattgtggatccaaccaaccacaaattgaaatttaaaaagagagagagataacatacagaatgagaaaatatacttgcaaactttatacctagtaagaaaaaagaccaaaattacaactgaatcatcagaactgaaaccaaaaatcaaagggaaagtgccagagcctagcagagagctcagggcaagaagcc

SEQ ID NO: 629106 - DNA, 586 bp, Homo sapiens
tcaaacccagacaatgtgtcatcttaatcattatcagtaggctctgttgctcctcacaaaactgcagggaagctgtgttgcttgaggcactaagtgaaaggtagggcagcagaaggtggtgtggtcagagatgatgtcaaaaataacacagagtcaagatcacaggaatttataggccaaagtaaggactttgattttactctaagtaagattcaaagacactgaaaggatttgagcagaggaatagcactatcagacttacatgttaaatgaatcaccccgcctgcaaagtagaaaatatactattttagagaaatattgaatcagaatctttttacgcatctattgtaacaatctaggcaagtatagacagtcttacatttcctcaggtccatattgtggatccaaccaaccacaaattgaaatttaaaaagagagagagataacatacagaatgagaaaatatacttgcaaactttatacctagtaagaaaaaagaccaaaattacaactgaatcatcagaactgaaaycaaaaatcaaagggaaagtgccagagcctagcagagagctcagggcaagaagcc

SEQ ID NO: 629107 - DNA, 479 bp, Homo sapiens
cttttctgtgcctgagagctcactacttttggactgtgaatgattgtaccacttccagcagagatgtgggcccttggctcagctctgcgaaggaagagtgtagttccatctccccagccaagcagcctcaatgttccagtccagttgtaaagagggggatttctccttctccttcccaccctctcactgctgcagacacaggcaaagctgcttccacagaaaattgasacaggggtgctagaagacagcctttttaaggctattaggggtaacagcatccacagtggcagtgtgtcccccaggttcgggcttgcatgaaatacaggaccccttacccctttctagacaagagtggtagcgtttctgcagaatggagtaggagaacaaaaaagctgcgtgttttggattgaaaaaggaggttccacactgaagacattttagcagtgaattgtggggcaggaatcttttgtggcttttgc

SEQ ID NO: 629108 - DNA, 479 bp, Homo sapiens
cttttctgtgcctgagagctcactacttttggactgtgaatgattgtaccacttccagcagagatgtgggcccttggctcagctctgcgaaggaagagtgtagttccatctccccagccaagcagcctcaatgttccagtccagttgtaaagagggggatttctccttctccttcccaccctctcactgctgcagacacaggcaaagctgcttccacagaaaattgagacaggggtgctagaagacagcctttttaaggctattaggggtaacagcatccacagtggcagtgtgtcccccaggttcgggcttgcatgaaatacaggaccccttacccctttctagacaagagtggtagcgtttctgcagaatggagtaggagaacaaaaaagctgygtgttttggattgaaaaaggaggttccacactgaagacattttagcagtgaattgtggggcaggaatcttttgtggcttttgc

SEQ ID NO: 629109 - DNA, 595 bp, Homo sapiens
gtgataaaggtgtaaacaagggcaaactggcgatcctcatctgcagaggagctggactggggatgcaagtatgccaaggcacagcagccatactgcagcaggaccacggtgaggtgggaggagcaggtggagaaggcctggtggcggccctcagcagaacggatgctcaggatggcacaggtgatgaacacgtaggagacgcagatgagcaagaaggggacggtcagcacgaggatgctcacgacatagaggacagcctggtgaacacggatggcagcgcaggccaggcgcaggacgggaggtacatcgcagaggaagtggttaatttcctggcggtagccgcagaagggcaaggtgaagattaaggcggtgagctgcagggagaggaagagggccaggcccacagcgccgcccagcatctgcacgcacagattgcaggtcatgatgaggggtagtgcaaagggtggcagatggccacatagcggtcataggccacgatcgccaagaggaaacagtcagcaccaccaagtgtgagaaagaagaacatttgggccccacatccagccaayggaatgggcttctgggccccaaaaat

SEQ ID NO: 629110 - DNA, 676 bp, Homo sapiens
tttactttaaaatataagtttaagatagtagaacagtggttactaggggagagagggagaggarataggataggtaagtccaaaggtataaacttgcagctgtgtaggatgaataagtgcaggatctaatgcatatatagcatgaggattatagttaatactgtagtatgcactgaaaatttgtgaagagagtagattttagttgctcctaccataaaaaagtgccaactatgtgaggtgatggatatgctaatttgcttgaatatactacataattcactatgtatatgtatatcaaaatatcatgttgtacaccttaaatatacacaataaaatataaatgtaataaacatagatttatgagttaggtctctgtttctgctaaagtttcataattgtataacggtaaacgtctatagataaaatattagatgattcaatcattcttattaatcccagtgttttggtcttacagaggactgggaatacaactttattgcaattttattctgacgtatgttatttatttttatttattgaagtattttctgtaagacttcaactgtgtttggaaatcaaatagattgacacgtaaaggcatttagttgcttgataggcagtcacaagagtgaagctagctgaaataaggaaagatgatgaggaaactaaaaattcc

SEQ ID NO: 629111 - DNA, 474 bp, Homo sapiens
gcatttagttgcttgataggcagtcacaagagtgaagctagctgaaataaggaaagatgatgaggaaactaaaaattccatagcagaaaaaaaaactctgctttctaaaaaattactttcaggcaaatttttatctaaaatatctattttgtggcataaaaacccaggatgtgatgttttaagaaaaacgcattctgatcaatgaatcctatgctcaataaaattgtcggaattttttagatttgccaatgctctggaattctgtccttcatatctatgctgaaaacaactaaaaattttagttagttaaaaatatcaaaattaaaagtcaatattgggtatttgtaatagaaaagtggagagaattaaagcatagtaaaacacagttatatctaygtaattatttcaaatattgttttataaagagcaaaaatttcaagtatagttcttgaaaaatgcattatgggaaacagt

SEQ ID NO: 629112 - DNA, 649 bp, Homo sapiens
cttgccaatagggtttctgtgatgatatgatgaaaacaaataaaaggcacttaaagctagtgcctataaacatccactaaatgtatcttactgtttttcaaataaccacagctttggaataatgggctatatttgttttgacatcattttcctgttactataactgaagtttattttggatgatcaaaatttatattctcaaaaagagaaatcataaaggtaatagaagacttatgtatagttaaggacaaaactaagacctcattccagcaagcttaattattagaaggtggaatccaccttgcaatctttggttcttggattttgcacttttaatatatatcaattgctttgcaatttagtcatagacattgcaaaaatatgcgcagaaaagacatattagttgaacaattctgttgcagtgtctgaaacaaatacccaaactctgtctgggtctaaatttgtaggagagggaggcaatctyctatgaactgagagttgagaagcctccaaaaatatctcctgcctcagtatccctctaaaggcactggcactgtgaaggaatttcttgctatgcattccaacaagaaaacacgcaggctttaaactcttcccacctgcgtttaatcctgacgctgccccatgccag

SEQ ID NO: 629113 - DNA, 462 bp, Homo sapiens
ttttttatattgattccatatcttggctattgtggacagtgctgcaatgaagcacttcataaagacaataggattttcaaaatcctcataatcaaatatgcctaatcaaattttagtagcttgttgtttcagacatgctttcttccagcttcaagtccttcacaagttctattccctttcccctttgtttgaactgcttttctccataatttcatagctattttttttcttaatttacagakttcatcacaaatgtcacctcttcaaagaagatgcttttcatggcctcttcttctaatcattctctatcccattaacttgttgtattttctccatggagtttatcactgtctgataatatctcatgtacttatttaacctgttgatcatctgtttcactagatataatgtgaatcttgcctgttttattcatctttgtatccccaaaacttagaacagtga

SEQ ID NO: 629114 - DNA, 545 bp, Homo sapiens
atcacaaatgtcacctcttcaaagaagatgcttttcatggcctcttcttctaatcattctctatcccattaacttgttgtattttctccatggagtttatcactgtctgataatatctcatgtacttatttaacctgttgatcatctgtttcactagatataatgtgaatcttgcctgttttattcatctttgtatccccaaaacttagaacagtgatggacacatcatattacatataaatatgtttaatcatcagtcaacrgtgaaccaaactctaaataggtgaaccttaagattgtgtaattatcacctagagtcatagtcacatctcaaagagtacatatcaaacatatgttccattgtaaagatctactataccaaggaaaatgagaaaaagataaatataataagaacaaacattttttaaattagcagactttaatatggcaagataatatctgggcaggtacatgctcaaaacctatgaaatttttgtggcatgttgagtgaatatgtatgctttcttcaaattctggaaaaccat

SEQ ID NO: 629115 - DNA, 532 bp, Homo sapiens
tgtaacagcattctccctacccagtcacctgaaaataacttttgaaatcatgctacacgatttcctgttccatagtcwattctttagactcttacttgaagtcaggaagtagcagaccaagattttaacatcattattgtcatataattccatgttctacttatagaggtagaagattataggagaaattattgaagaaagtacaagaagccctatatattttcacagtcatacgtcctctatgttaccccctcagttgtatctaatttcatagcacgagttgtaggacccttcacttgttcccttattcccctaagcaagaacccacatagacaacttgcttctgaagaaaatttgcatacatacagaagttaatctatattattcaaaatggatagttggtaaggaggaattgttggtgtttcattagaattgatcaagaagaatgctctcattctaaattagattactattcttcatccatttaactgaagtatcactacaacagtaaagaaaatgcatcagtgtacca

SEQ ID NO: 629116 - DNA, 364 bp, Homo sapiens
cagaatgcctcttctccttcaaaggatcacaattcctcaccagcaaggaaacaaaactggacagagaatgagtttgatgaactcacagaagtaggcttcagaagatgagtartaacaaactactccaagctaaaggagcatgttctaacccaatgcaaggaagctaagaaccttgataaaaggttacaggaactgctaactagaataatcagtttagagaagaacataaatgacctgatggagctgaaaaacacagcaagagaacttcatgaagcatacactagtaacaatagcaacatcaatcaagcagaaagaagaatatcagagattgaagatcaacttaatgaaataaagcatgaagaca

SEQ ID NO: 629117 - DNA, 290 bp, Homo sapiens
tagttgcattctctctgcttgttttaaacttttacctagtcattgtccactaccaagcactcatctctcaacatatgtggccaggcaataagtcatatgatgacctttccatttgatgycttcctttccctgttttgacctagttacatttaaattaaccaacaaaaatactgccttcatgctatggctgcaccacctatgactacccccaataaaaatgctcacccatgagtcatctcctctgtctgttttcctgacaaccaagctcaacccacagcttttggtgaatt

SEQ ID NO: 629118 - DNA, 575 bp, Homo sapiens
aaacttttacctagtcattgtccactaccaagcactcatctctcaacatatgtggccaggcaataagtcatatgatgacctttccatttgatgtcttcctttccctgttttgacctagttacatttaaattaaccaacaaaaatactgccttcatgctatggctgcaccacctatgactacccccaataaaaatgctcacccatgagtcatctcctctgtctgttttcctgacaaccaagctcaacccacagcttttggtgaattatgtgaccctctggtaatactgtgcctcttctttaagacctgtgagtataataaaattttaagtttttatgtttctctcagtgcttttgatctgtgtagaagtgatccttgaaggaccccaacaagggtgcttagccctgtttacacaatactgaccctaatgtaatggagatctataactttcttgtcaaaaaagataatgatcttagaggagctaagtgaattagaacacagaygataaaagaaaatcagggaaatgatacaggaacaaaataagaatataacaaaaagtaatgataaaaaggaaaca

SEQ ID NO: 629119 - DNA, 542 bp, Homo sapiens
tggacttgaactacattttcaaccaaatggagctaacaaatataaacaacatttcatccaacagtagcagaatacacattaatctcaagcacatacagaacattctccaggggtagatcatatcttaggttacaaaaaagtattaataagtgtaagaaggttgaaattatagcaggtatctttccaaccacaatggtatgaaactagaaatcaattatgggcagaacttcagaaagttcacacatacatggaaattaaacagcacgctcctcaacaactaattagtcaaagaataaattaaaagataaattataaaatatcttgaggcaaataaaaatggaaaaacaatttaccaaagcttatgggatataacaaatgcagttctaagggggaagttcatagcaacaaatattttatttcatccaaaaaagaagaaataatttaagtaaacaatataattttacacctcaagaaattagaaaraagaagaatactataagcccaaaattagtaaaagcaaggaaattttaaagatcagagca

SEQ ID NO: 629120 - DNA, 597 bp, Homo sapiens
cttgagtccaagagttcaagacaagcctgggcaacatggcaaaaccccctctctacaaamaaaacaaaacaaaacaaaaaaaccaacctgaactcaacacttgacaaaatggactgaacagacatctaaagagctcttcacccaaaagcaacagaatatacattcttgtcatctgcacatggcacatattctaaaatcgaccacaaaatttgctacaaaatcatcctcagcaaaattaaaaaaaaagcaatatcatatagaacacattatcagatcacaacacaataaaaatacaaatcaacactaagaagattgctcaaaaccatacaattacatggaaattaaaccccatgctcctgaataacttctgggtaaacaatgaaattaagacagaaatcaagaaattatttgaaacctgtgagaacaaacatgtaacaccagaatctctgggacagaaataaagcagtgttaagagggaaatttatagcactaaatgcccacataaaaaattagagatatttcaaattaacaacctaacatcacacctgaaaagtgagaaaaacaagagcaaacaaatcctagagctagcagaaggca

SEQ ID NO: 629121 - DNA, 597 bp, Homo sapiens
cttgagtccaagagttcaagacaagcctgggcaacatggcaaaaccccctctctacaaacaaaacaaaacaaaacaaaaaaaccaacctgaactcaacacttgacaaaatggactgaacagacatctaaagagctcttcacccaaaagcaacagaatatacattcttgtcatctgcacatggcacatattctaaaatcgaccacaaaatttgctayaaaatcatcctcagcaaaattaaaaaaaaagcaatatcatatagaacacattatcagatcacaacacaataaaaatacaaatcaacactaagaagattgctcaaaaccatacaattacatggaaattaaaccccatgctcctgaataacttctgggtaaacaatgaaattaagacagaaatcaagaaattatttgaaacctgtgagaacaaacatgtaacaccagaatctctgggacagaaataaagcagtgttaagagggaaatttatagcactaaatgcccacataaaaaattagagatatttcaaattaacaacctaacatcacacctgaaaagtgagaaaaacaagagcaaacaaatcctagagctagcagaaggca

SEQ ID NO: 629122 - DNA, 597 bp, Homo sapiens
cttgagtccaagagttcaagacaagcctgggcaacatggcaaaaccccctctctacaaacaaaacaaaacaaaacaaaaaaaccaacctgaactcaacacttgacaaaatggactgaacagacatctaaagagctcttcacccaaaagcaacagaatatacattcttgtcatctgcacatggcacatattctaaaatcgaccacaaaatttgctacaaaatcatcctcagcaaaattaaaaaaaaagcaatatcatatagaacacattatcagatcacaacacaataaaaatasaaatcaacactaagaagattgctcaaaaccatacaattacatggaaattaaaccccatgctcctgaataacttctgggtaaacaatgaaattaagacagaaatcaagaaattatttgaaacctgtgagaacaaacatgtaacaccagaatctctgggacagaaataaagcagtgttaagagggaaatttatagcactaaatgcccacataaaaaattagagatatttcaaattaacaacctaacatcacacctgaaaagtgagaaaaacaagagcaaacaaatcctagagctagcagaaggca

SEQ ID NO: 629123 - DNA, 597 bp, Homo sapiens
attcaatgcctagtttgttcaggatttttatcacgaagggatgttggattttataaaaatcttttttgctatcaaattaatcatatggtttctgtttttaattctgcttttgtggtgaatcacatttattgatttgcatatatttaaacaaccttgcattcctggartaaagcctacttgattatggtgaattgattttttgatgaactggtggattcagtttgatagtattttgttgaggatttttgtgtccatgttcatcagggaaacaagtggaaaaaaaaatccatgctcctggattagaagagtcaatattgtcaaaatggccatattgcccaaagcaatctgcagattcaatgctattcctatcaaattaccaacatcatttttcacagaactagaaaaaacaattcttaaattcattggagccaaaaaagagcttgaatagtgaaagcaatccaaaacaaaaacaacaaagccagaggcatcatatttcccaactttaaactatactataaggctacaataaccaaaacagcatggtacagaaacagacacatagaccaatggaacacaataggaaatccagaaagaaag

SEQ ID NO: 629124 - DNA, 398 bp, Homo sapiens
gttgagtgcatctttaggatggtgataaacatcaataagtaggatatcaagayaactagaagggcaaagaggatattgagctggttacataaacaagaaccactacattcacatgtctatcagagcaagacagagccatgactgctggaacctcacagaaaaagtgatggacttcactggacatacagaaagagactgaatgtttccccagtgtgaatggaggcattcaggaaaccaccaacgtatcaacctatggccagacatgtacacacacttgtcatcatggtggtggtgtaatgcaggggtttgcacactgctgcatagtggccagaggccattaaggccaataataaatttaccacactggcaaaggaatcagaaaagaatgtctgagtagc

SEQ ID NO: 629125 - DNA, 597 bp, Homo sapiens
ggccagaggccattaaggccaataataaatttaccacactggcaaaggaatcagaaaagaatgtctgagtagcccacacagtataggaaatgattttgtcttctctaaggagcccagtcatgacctttggagtgacaactgaagagtaaaaaaagtctaccagagacagattactgaagaagaagtacattggattgtggagctgagagtaccagagaatcaaaatgatcatccccaagtttccaactacattgatgagatagatgagaacaaacatgataaagaaggggacctgcagttctgggacattgcttagtcctaggaagatgaactgtgacgcctctmtactgttctacatcagtgttatttggaatcaggagacaccctatatgaatgagaaataaaggaacagaacattaaaggcagtagagattgcagtgaaaataaaatgtttatgtacattatgtactatttcattatagcaataatatgtgtttcatgattttccataatgaaagcatgaacttaacaacaagatttagtggattaattatcaatagagccctagactgttgactgaaggatccatagaggtca

SEQ ID NO: 629126 - DNA, 597 bp, Homo sapiens
ggccagaggccattaaggccaataataaatttaccacactggcaaaggaatcagaaaagaatgtctgagtagcccacacagtataggaaatgattttgtcttctctaaggagcccagtcatgacctttggagtgacaactgaagagtaaaaaaagtctaccagagacagattactgaagaagaagtacattggattgtggagctgagagtaccagagaatcaaaatgatcatccccaagtttccaactacattgatgagatagatgagaacaaacatgataaagaaggggacctgcagttctgggacattgcttagtcctaggaagatgaactgtgacgcctctctactgttctacatcagtgttatttggaatcaggagacaccctatatgaatgagaaataaaggaacagaacattaaaggcagtagagattgcagtgaaaataaaatgtttatgtacattatgtactatttcattatagcaataatatgtgtttcatgattttccataatgaaagcatgaacttaacaacaagatttagtggattaattatcaatagagccctagactrttgactgaaggatccatagaggtca

SEQ ID NO: 629127 - DNA, 616 bp, Homo sapiens
taactggggcagtagaagaatgtgtaaaccgcagaggtgatgctgagggactggagggcatagcactatgtatggagcttgggctctgggaagaggtgcaygtcatttctacatgtacaacctaagaatcactggtcctaacctaactacctgaacaagaatttcttcatctacataaagaaggtggtaatgaggcctaccccaaggtattatttggagaatgaaatgagagagtgcattaaaaaaagtcaatgagtaaaatgctgattgtttagcacagcctgatgagtgctagttgtgcttctattattggaatgaaatgatagcctttatgtggtttgagaagataggtggcaacatgcagagcttcaagtatggataatgcttgaagtcttaagtatcccactttattttgctttttttccccacacaccaggttcatgagattttatgtgcccccaccccagtgatttacacttagttcatgctctgcccatatgattggctgctctgttcattccgtgtgagccattcttttgtttaatatttttttcttggaatccacaattttcttgagttgaaaatttctttttctcattactggcatccttataat

SEQ ID NO: 629128 - DNA, 616 bp, Homo sapiens
taactggggcagtagaagaatgtgtaaaccgcagaggtgatgctgagggactggagggcatagcactatgtatggagcttgggctctgggaagaggtgcacgtcatttctacatgtacaacctaagaatcactggtcctaacctaactacctgaacaagaatttcttcatctacataaagaaggtggtaatgaggcctaccccaaggtattatttggagaatgaaatgagagagtgcattaaaaaaagtcaatgagtaaaatgctgattgtttagcacagcctgatgagtgctagttgtgcttctattattggaatgaaatgatagcctttatgtggtttgagaagataggtggcaacatgyagagcttcaagtatggataatgcttgaagtcttaagtatcccactttattttgctttttttccccacacaccaggttcatgagattttatgtgcccccaccccagtgatttacacttagttcatgctctgcccatatgattggctgctctgttcattccgtgtgagccattcttttgtttaatatttttttcttggaatccacaattttcttgagttgaaaatttctttttctcattactggcatccttataat

SEQ ID NO: 629129 - DNA, 547 bp, Homo sapiens
ttccaatctttttgtcaccagaaaccagtctcatgaaagacaacttttccayggactgaggttggggagggtgatttcaggatgattcaagtgcattacatttattgtgcacttttttccaactcacttgccactataaaggctgagaccgggtgcaacttaattgtcacttgctactcacttacagggttttgatatgagtctgcaagtaatttatttattacggtctctgtgcagtcaaacctctctactaatgttaatctgtattgggagctgctccctagagctagcatcaccacctcagctctacctcagatcatcaggcattagattctcatatggagcacacaacctagatccctcacatgcccagttcaagatagggctggcactcctgtgagaatctaatgctgcttcttatctgacagaaggtgaagttcaggctgtaatgcaaacaatgggagaggctgtaaagacagacaaggcttcacttgcttgcctgctgctcgcctcctgctgtgcatcctggttcctaacaggccacaaa

SEQ ID NO: 629130 - DNA, 547 bp, Homo sapiens
ttccaatctttttgtcaccagaaaccagtctcatgaaagacaacttttccacggactgaggttggggagggtgatttcaggatgattcaagtgcattacatttattgtgcacttttttccaactcacttgccactataaaggctgagaccgggtgcaacttaattgtcacttgctactcacttacagggttttgatatgagtctgcaagtaatttatttattacggtctctgtgcagtcaaacctctctactaatgttaatctgtattgggagctgctccctagagctagcatcaccacctcagctctacctcagatcatcaggcattagattctcatatggagsacacaacctagatccctcacatgcccagttcaagatagggctggcactcctgtgagaatctaatgctgcttcttatctgacagaaggtgaagttcaggctgtaatgcaaacaatgggagaggctgtaaagacagacaaggcttcacttgcttgcctgctgctcgcctcctgctgtgcatcctggttcctaacaggccacaaa

SEQ ID NO: 629131 - DNA, 432 bp, Homo sapiens
atgcctacatcaaaaaactagaaagacttcacataaacaagctagtgatgtgcctcaaggaactaaaagagcaaaaacaaaacaaacttacaattaggagaaaaaagaaataaagagcagagcagaaatcagtgaaattgagactttaaaaaatacaaaagataaatgaaagaaaaagttgtttttwaaaaaaaataaacaaaatcaacacatttttagctagactaaaaaaagagagaagactcaaacaaaatctaagaagaaaaagaagccattgcaactaataccatagaaacaaaaagatcattagagtctattatgaacaaccataaccaataaattgtaaaaccttaaaggaaaataaataaggtcctggacaaattcaacctaccaagatttaaccatggagaaacaggaaatttgaacatgtca

SEQ ID NO: 629132 - DNA, 551 bp, Homo sapiens
aaaggcatttgacaaaattcaacatcccttcgtgataaaaacattcaacaacctaggtgtagaaggaacatacctcaaaacaatgaaggttatataagacaaacccatgctaatatcatactgaacaaggaaaaacaaagcttttcctctaacgtttggaataagacaaaaatgtctactttcaccactcctcctcaaagtaataatggaagtcctagccaaagcaattaggcaagaggatgaaataaggggcatccaaattggaaaggaagaattcagattatccttatttgaagatgaccttatcttatattttgaaaaacctaaggattccaccaaaaaactgttagagctgataaatgaattcagtaaatttgcaggctgcaaaattagcatagaaaaatcagtaatatttctatacatcaatagcaaacgctctgraaaagaaatcaagaaagcaattccatatacagtagctaccttaaaaaaatacttaagaataaacttaaccaaagaagtgaaagatctctatcataaaaaatacaaatgct

SEQ ID NO: 629133 - DNA, 494 bp, Homo sapiens
cttatcttatattttgaaaaacctaaggattccaccaaaaaactgttagagctgataaatgaattcagtaaatttgcaggctgcaaaattagcatagaaaaatcagtaatatttctatacatcaatagcaaacgctctggaaaagaaatcaagaaagcaattccatatacagtagctaccttaaaaaaatacttaagaataaacttaaccaaagaagtgaaagatctctatcataaaaaatacaaatgcttttcagtcaggctgagttgtctttgtatcatgtctagtgactccatggattataacagaaaacatggcagcccaaagggaatggayccaatgttgtcatcaagagcaactgaaatgagattgttaactttgatagtatgaatttaaaggagtctcttttaggggtattccatgtttgtggttttgagaagcctccagctattcagcccagagctattgttccttgtattaaagatccaaaacgt

SEQ ID NO: 629134 - DNA, 494 bp, Homo sapiens
cttatcttatattttgaaaaacctaaggattccaccaaaaaactgttagagctgataaatgaattcagtaaatttgcaggctgcaaaattagcatagaaaaatcagtaatatttctatacatcaatagcaaacgctctggaaaagaaatcaagaaagcaattccatatacagtagctaccttaaaaaaatacttaagaataaacttaaccaaagaagtgaaagatctctatcataaaaaatacaaatgcttttcagtcaggctgagttgtctttgtatcatgtctagtgactccatggattataacagaaaacatggcagcccaaagggaatggatccaatgttgtcatcaagagcaactgaaatgagattgttaactttgatagtatgaatttaaaggagtctcttttaggggtawtccatgtttgtggttttgagaagcctccagctattcagcccagagctattgttccttgtattaaagatccaaaacgt

SEQ ID NO: 629135 - DNA, 540 bp, Homo sapiens
taattattcaataaaacatttaattagtgctaagcgtgaactgcaccctgctgctaacccccagcaagcaatcatcctagkttgggcttaatccccagtaaaattgccatattgcccatgtcttaatgaagtttgaatgttaaataaattgtaaattcactttaaaaaaaaaccacaaaacactgatgaaggacattgaagaggaaacaaaaaaatggaaagctatctcatgctcatggatgggaagattaatattgtcaaatgcccatactgcccaaaatgatttatagattcagcaaaatccccatcaaaatactaatgacattcttcacagaaagagaaaaaaatctaaaatgtatatggagctgataaagaccctgaagagccaaagtaatcctgagcaaaaagaacaatgttggagccatcacattacctgacttcacaatataccataaaactataatactcaaaacaggatgagagagattgacataaaaacaaacacatagaccaatggagcagaacggaaaatccagaaat

SEQ ID NO: 629136 - DNA, 540 bp, Homo sapiens
taattattcaataaaacatttaattagtgctaagcgtgaactgcaccctgctgctaacccccagcaagcaatcatcctagtttgggcttaatccccagtaaaattgccatattgcccatgtcttaatgaagtttgaatgttaaataaattgtaaattcactttaaaaaaaaacyacaaaacactgatgaaggacattgaagaggaaacaaaaaaatggaaagctatctcatgctcatggatgggaagattaatattgtcaaatgcccatactgcccaaaatgatttatagattcagcaaaatccccatcaaaatactaatgacattcttcacagaaagagaaaaaaatctaaaatgtatatggagctgataaagaccctgaagagccaaagtaatcctgagcaaaaagaacaatgttggagccatcacattacctgacttcacaatataccataaaactataatactcaaaacaggatgagagagattgacataaaaacaaacacatagaccaatggagcagaacggaaaatccagaaat

SEQ ID NO: 629137 - DNA, 600 bp, Homo sapiens
tggccacactttagctcccatgatagtgatcagttagcataattttgtgttttttcatcataggtaactctcaggataattcccaaatgactttgatggataacatttcagaagtgacagaattcgttctcgtggggttaacagatgtcctagagcttcaggtccctttatttaycatctttactgtcatttatctcaccactctggttgggaactttgggatgatcatgttgattctgttggactcccggctccacattcccatgtactttttccttggcaaactctctctggtggacagtgtttgtcctgctagtcactggctcctacatctgtggactctttcaatcctccatccatgttgcttttactttccatctctccttctgtcattctaatgtggttaatcactttttttgtgatattccaccactcttagctctttcttgctctgatatttacgcacatgagattgtgctcttcatattggcagcatttaatatctttttcactctcttgattatcttgaactcttatgtttttatttttattgctatcctgaggatgcattcagctgagggacaaaagaaggtcttttcc

SEQ ID NO: 629138 - DNA, 600 bp, Homo sapiens
tggccacactttagctcccatgatagtgatcagttagcataattttgtgttttttcatcataggtaactctcaggataattcccaaatgactttgatggataacatttcagaagtgacagaattcgttctcgtggggttaacagatgtcctagagcttcaggtccctttatttatcatctttactstcatttatctcaccactctggttgggaactttgggatgatcatgttgattctgttggactcccggctccacattcccatgtactttttccttggcaaactctctctggtggacagtgtttgtcctgctagtcactggctcctacatctgtggactctttcaatcctccatccatgttgcttttactttccatctctccttctgtcattctaatgtggttaatcactttttttgtgatattccaccactcttagctctttcttgctctgatatttacgcacatgagattgtgctcttcatattggcagcatttaatatctttttcactctcttgattatcttgaactcttatgtttttatttttattgctatcctgaggatgcattcagctgagggacaaaagaaggtcttttcc

SEQ ID NO: 629139 - DNA, 453 bp, Homo sapiens
tgttttttcatcataggtaactctcaggataattcccaaatgactttgatggataacatttcagaagtgacagaattcgttctcgtggggttaacagatgtcctagagcttcaggtccctttatttatcatctttactgtcatttatctcaccactctggttgggaactttgggatgatcatgttgattctgttggactcccggctccacattcccatgtactttttccttggcaaactctctctggtggacagtgtttgtcctgctagtcactggctcctacatctgtggactctttcaatcctccatccatgttgcttttactttccatctctccttctgtcattctaatgtggttaatcactttttttgtgatattccaccactcttagctctttcttgctctgatatttacgcamatgagattgtgctcttcatattggcagcatttaa

SEQ ID NO: 629140 - DNA, 592 bp, Homo sapiens
aactcaagtttttccccaaactattaactgtgactttgacatctaacaagacactgaagtcaagwtcaacggtgaggggacatcttttcaggtgggatacagggaaatgaaataatatcattagtcaccaagaggggttcaatcaggcacagtcaaactcacagccaagatggagtcatctgtaagttaaaaaatgatctctagaactggtaactagagggagttgtgcactcttgaggactggcatcaactcatatatcagccctctcattcttcaccaagcttggttttttatactatcaaagtcattaaatgcccactcaatgaaaaaataaaataaatcgaaattattaaataattacataaatgaatgagggaatatatgagtggatgataatatgggtgagtaaatgaatgagtatgtgagtgagaggaagtggaactgagatggaaaagaatgagtcagcagcaaactggatccctaatagctaatcacaggattcaagagctactcattctatgtagccagagagaggacacctctcagatcacaaatatgttcaaattttaggaatctttctgtgcttcagtt

SEQ ID NO: 629141 - DNA, 611 bp, Homo sapiens
ctgggcctggtaacaggcacctgtaatcccagctacttggaaggctgaggcaggaaaatcgcttgaactcaggaggcagaggttgcagtgagctgaaatcatgccattgaactccagcctggacaacaagagtgaaactccatctaaaaaaagaaaaagagagaaagagagaaagaaagaaagaaagaaagaaagaaagaaagaaagaaagaaagaaagaaagaragaaagaaagggagagaaagagagaaagaaagaaaaaaatggccatattgtgtagaacaaaggaacatttagaagttgcacagaggcaggcttcagtttattacagaaatgactttcagagaatccagtctttccacagcagagcaagcaaaccaggagataatgggattccctgggcattgaaggtgacccagtgtctacacactgtattggaaattcaagtatctaataactggggatcaaattggccatttttgaggtcccttcttgcagttagaatttatgacttataatagctctgatgtaaatattttaaatattttattataggtggagtgttcagattacaaatattatagagagcagtattcagatgataactatat

SEQ ID NO: 629142 - DNA, 604 bp, Homo sapiens
aatctcttaataccgtcttggtttatctccataaccagtcctcatgccttcctcatttgcttgatgaaaaacaggatcaaaccatcagtgccaaaactctgatacactaatgtaagatctgtgaatattaggaattttggccattgaaactacaaaaccaattgacagagagagagggcttattcaataaagagaaaacaaagtacaccaatatgaaatgagctcttaaataaataggggtatattaaatgtaggggaatccgaatctcaataataaaacacagtcaagagactcaataaacataaaagataagacccacaaaaaaatattrtgtgcaaagggaaaataaatcatagtgtaagacataaactttaaaataagcatgcttaaaatacccactagttattaagtaagtacatccataaaatcagagcaataaacaaataaaacaaaacataagtggctactaatctgcacaggaaaaatgaagaggaaacaaataagaagacttgaaaataaaatttactttatcaaaaatgttgcaaaattcttcaatgaatggcatatatacaaacgtagacaaaactgaatttggaattagca

SEQ ID NO: 629143 - DNA, 495 bp, Homo sapiens
acagatgtcgataccttcggtgtttaatggaactaatcccccagggacactgagagatgactgtaattatattctggatatattttgaaggtaaattgagtacaattttatacagactagatatggggcatragtaaaacagaagagtcaagtgtaactctaaaactttttttgatctaagaaagtagaatgagatgtcacttactaaaatgaagaatcatgtgagaaaatcaaatgtagtggagaaatttaagaattatgttttgggtatgttgcatttgaaatatcttttaaatatttagctcaagagttcagaagagctataactaccaacaaatttagaaatcattagcatattgatggcattttaaattccctctcttcatttttatcctctcaatattcttggctagactctcattactgttctgacacccaaatgttgatatgcaccagggctcagtccctgatccttttcttttttctgtctttact

SEQ ID NO: 629144 - DNA, 495 bp, Homo sapiens
acagatgtcgataccttcggtgtttaatggaactaatcccccagggacactgagagatgactgtaattatattctggatatattttgaaggtaaattgagtacaattttatacagactagatatggggcataagtaaaacagaagagtcaagtgtaactctaaaactttttttgatctaagaaagtagaatgagatgtcacttactaaaatgaagaatcatgtgagaaaatcaaatgtagtggagaaatttaagaattatgttttgggtatgttgcatttgaaatatcttttaaatatttagcycaagagttcagaagagctataactaccaacaaatttagaaatcattagcatattgatggcattttaaattccctctcttcatttttatcctctcaatattcttggctagactctcattactgttctgacacccaaatgttgatatgcaccagggctcagtccctgatccttttcttttttctgtctttact

SEQ ID NO: 629145 - DNA, 495 bp, Homo sapiens
acagatgtcgataccttcggtgtttaatggaactaatcccccagggacactgagagatgactgtaattatattctggatatattttgaaggtaaattgagtacaattttatacagactagatatggggcataagtaaaacagaagagtcaagtgtaactctaaaactttttttgatctaagaaagtagaatgagatgtcacttactaaaatgaagaatcatgtgagaaaatcaaatgtagtggagaaatttaagaattatgttttgggtatgttgcatttgaaatatcttttaaatatttagctcaagagttcagaagagctataactaccaacaaatttagaaatcattagcatattgatggcattttaaattccctctcttcatttttatcctctcaatattcttggctagactctcattaytgttctgacacccaaatgttgatatgcaccagggctcagtccctgatccttttcttttttctgtctttact

SEQ ID NO: 629146 - DNA, 543 bp, Homo sapiens
ctgggtccaatattcttggttggtagttttttttttttttcttcagcaatttgaatatagcaccctaatctctcctggcttgcaggatttctgctgaaaaatctgctaaaagtcttaytgaggctctgttaattgtgctgattgtttcttttttcttcctgctttgagtattatctttgtcattaattttcacttagataattactctttgggtagaatttgattgctgacttctgagcttctttttactggatgctgttgtctttctctagatttgggaagttttcaaccataattttattaaatatgctttcaagatctttttctctctcattttctttgggaatttcagttatgtagaggtttgttcacttggtggtatcccataattcttgcagacctccttcactttttaaaattctttttttctttctgatctgctgattggctaattttatatgttctgccttgaaggtcactaattcttttctttgtttcatcaagtttttcatttactattgtattctttatttctaagatttc

SEQ ID NO: 629147 - DNA, 582 bp, Homo sapiens
agtttaaaaaaaaaagaattatctctgccttttaattctaatatattattattctaatatagttatttaccatttataaattgtcatatgaacaagctgtaccaaatacmtaaaattattaatgcctgaaatattagtttattaagaaacagtaatgactcatagttggctaaaatatgacaagagacaacacatatttcattaaactccatgagaaattgtcatcgtatttttctaactcgtggatacttagaactgtttctcaactaaagacaaaaataatattagatgaaattttacattctatataccatatagcattttaacatttgagttattgtataaagtagatctaagtgagataaaataacattgtgatgattttgcatcattaaaagactgaatctagagaatattttgccttctcaacaaccttcatgaatgcattcttcacgtctttgttcctcagggtatagactataggactgagcatggggatgatcatagtgtagaacacagatgcaattttgtctgtgtccatggaatgactggaacttggtcgtatgtacatgatgatgacag

SEQ ID NO: 629148 - DNA, 582 bp, Homo sapiens
agtttaaaaaaaaaagaattatctctgccttttaattctaatatattattattctaatatagttatttaccatttataaattgtcatatgaacaagctgtaccaaatacctaaaattattaatgcctgaaatattagtttattaagaaacagtaatgactcatagttggctaaaatatgacaagagacaacacatatttcattaaactccatgagaaattgtcatcgtatttttctaactcgtggatacttagaactgtttctcaactaaagacaaaaataatattagatgaaattttacattctatataccatatagcattttaacatttgagttattgtataaagtagatctaagtgagataaaataacattgtgatgattttgcatcattaaaagactgaatctagagaayattttgccttctcaacaaccttcatgaatgcattcttcacgtctttgttcctcagggtatagactataggactgagcatggggatgatcatagtgtagaacacagatgcaattttgtctgtgtccatggaatgactggaacttggtcgtatgtacatgatgatgacag

SEQ ID NO: 629149 - DNA, 612 bp, Homo sapiens
gaataaatgcagcattaatgtcatgtgcaaccaacaaagccaattctgcagagaagatatagcattgggtataaaatctaggactctaagaagaggtagatttgtattaactcataagccctaacatttactacttgggagacactggtcttaatctaacttccttgaatctcattttatccattagtcaaatgaagatgatattaggacttatgtcaagagattattttgagagttaaatgagataatgctcagctgttggcaaaatgtgggcactcagcacagtcctgatgagtgctagctataatattattattaggatggaatggtggtgcatatgttggtgtagaacacatagaggtgacacacagggctgaargtgtgggtgggttttcaagttggcagttttactctgtctgatctgtattttcttacacactatgtccagtcttttgtttccttcagcatttctcactctatccattctttgccaggtgaatgactgtgtcagccaactagcatgagaacccagggatcttcaagtcctgttgtgtttaatttctccctttcaaactacattttaccttgtgttgaaacaatccccttttatct

SEQ ID NO: 629150 - DNA, 612 bp, Homo sapiens
gaataaatgcagcattaatgtcatgtgcaaccaacaaagccaattctgcagagaagatatagcattgggtataaaatctaggactctaagaagaggtagatttgtattaactcataagccctaacatttactacttgggagacactggtcttaatctaacttccttgaatctcattttatccattagtcaaatgaagatgatattaggacttatgtcaagagattattttgagagttaaatgagataatgctcagctgttggcaaaatgtgggcactcagcacagtcctgatgagtgctagctataatattattattaggatggaatggtggtgcatatgttggtgtagaacacatagaggtgacacacagggctgaaagtgtgggtgggttttcaagttggcagttttactctgtctgatctgtattttcttacacactatgtccagtcttttgtttccttcagcatttctcactctatccattctttgccaggtgaatgactgtgtcagccawctagcatgagaacccagggatcttcaagtcctgttgtgtttaatttctccctttcaaactacattttaccttgtgttgaaacaatccccttttatct

SEQ ID NO: 629151 - DNA, 581 bp, Homo sapiens
ctttgtacttatgaaccagtttgtttcatgaatgatagagagatgatagattgacagacatagatatcagagcatggagagagagagagagagagtatttatacagacagatatataaccccatttgctgttaaatattgggagattagaggagttttgtaccttcctcatattctacacttagtaagataaattcaagattcaaacccatgtctaacctattccaatttctgtgcctttaatcactgcaatgtcagattttctagattagcaagtaatgaaaaagtgagattgtgaggaaatgatagtaaaaatggaatagggatcttggtagtgtcataataatctttctgaagtctattgaagagttgttgcaccctgtttgggggagctattccttcagcgacaaaccaacacataataaaccagatacatttaccacctactcaatcagagcatcatccagcctagggttttactaycatcttagggagagcagcacggcatttcataaatatcactgtatctgctggttaagttttcttttttttttttaaacaatgaatgctagacccacttcc

SEQ ID NO: 629152 - DNA, 542 bp, Homo sapiens
cctgcgcagatcagggagagacgtctcctcagcagtgctgccctgtgggccaatagcagcttcaatgagaattagaagccctgtgccagggcacgtggtgtggtgtgctggatgcacctgtgcaacaartagccacgaggaaggaaaggaggcacttcccatgttggggccatctcactgagaaggctttggaaagagccgggtcacactgctctgggacattttagttccttccctgcaagctcttggtgggatttcctgactggccagggtctggctgcagatcctgaaggcaagaggcctgctggtcaatgggagtgagttctcagctcaaagggcagctgcaaagggaaatccctctgggggcctggagccactggcatttggggatgctggaggtagaagggcccccccaatggaggtcagggtcctgggcaccttcttgctgtgagatcctgggactcgacagtcccaagctctgagacactggagtttttcattctaaaatttgccaacgcctggcacattggctcacacctgta

SEQ ID NO: 629153 - DNA, 433 bp, Homo sapiens
tccatggacgcttgaatggctcccaactttttggctattgtaaataatgctgctacaaacatgggtatacaaatacttgttcaagtgtctgctttcccttattttcgtatatacccagaagtggaatygctagatgatatggcaattctatgtttaattttttgaggaactgccatactatttgccactggctataccattttacattcccaccagaaaagcacaagcgtttcaatttctctacatccttgtcaacacttattatttactgttgttgttttttttcaatagccatcctaatgggtgaagtggtagctcactgtggtattgatttgcattccataatgactagtgatgttgagcatcttttcatgtgcttattggtcatttgtgtatcttctttgaagaaatatctattcaagtccttcaccca

SEQ ID NO: 629154 - DNA, 433 bp, Homo sapiens
tccatggacgcttgaatggctcccaactttttggctattgtaaataatgctgctacaaacatgggtatacaaatacttgttcaagtgtctgctttcccttattttcgtatatacccagaagtggaattgctagatgatatggcaattctatgtttaattttttgaggaactgccatactatttgccactggctataccattttacattcccaccagaaaagcacaagcgtttcaatttctctacatccttgtcaacacttattatttactgttgttgttttttttcaatagccatcctaatgggtgaagyggtagctcactgtggtattgatttgcattccataatgactagtgatgttgagcatcttttcatgtgcttattggtcatttgtgtatcttctttgaagaaatatctattcaagtccttcaccca

SEQ ID NO: 629155 - DNA, 422 bp, Homo sapiens
agcaggttttgagaaagggcattgmcagaatttttattctttttttttgagacaagtctcactctgttgtccaggcgggagtgcagtggcgcgacctcggctcactgcagcctcctcctcctgggttccagtgattctcctgcctcaacctcccaagtagctgagattacaggtgtgtgccatcatgcccggcaaatttttgtatttttagtagagacggggtttcaccatgttgccgggctggtctcgaactcctgacctcaagtgatccacccgcctccgccaatcaaccagtatttttcttgttagtggcagcattttccccctgccggctctgttcccgccacactggtctgcttgctgttctttggcgatgaccagtcactcctgccctagggcctttgcactggctattccttgtg

SEQ ID NO: 629156 - DNA, 422 bp, Homo sapiens
agcaggttttgagaaagggcattgccagwatttttattctttttttttgagacaagtctcactctgttgtccaggcgggagtgcagtggcgcgacctcggctcactgcagcctcctcctcctgggttccagtgattctcctgcctcaacctcccaagtagctgagattacaggtgtgtgccatcatgcccggcaaatttttgtatttttagtagagacggggtttcaccatgttgccgggctggtctcgaactcctgacctcaagtgatccacccgcctccgccaatcaaccagtatttttcttgttagtggcagcattttccccctgccggctctgttcccgccacactggtctgcttgctgttctttggcgatgaccagtcactcctgccctagggcctttgcactggctattccttgtg

SEQ ID NO: 629157 - DNA, 464 bp, Homo sapiens
aagaaaatgagtggaagggtagagctggaggggtccaaaggctaagcctttgtagtgcaggtggggaagacccaggcaaggcacaggactctccccagctcccggggaagtgtgtggtgggtgaggtttagtgtgggctggaattttytgagccttttcctgagaactgatgtctgtcctttattcttctgccccctataggatgctctggagttttggctgcaagctggcgtggatgggttccaggttcgggacatagagaatctgaaggtgagttccctttccacattagggacaaagcttgggcgagaacagagggactcagctagagcctcgtaatattctctggtccttgattctgcttttttctttctaggatgcatcctcattcttggctgagtggcaaaatatcaccaagggcttcagtgaagacaggtgggtgcaggagccattctgctgactca

SEQ ID NO: 629158 - DNA, 464 bp, Homo sapiens
aagaaaatgagtggaagggtagagctggaggggtccaaaggctaagcctttgtagtgcaggtggggaagacccaggcaaggcacaggactctccccagctcccggggaagtgtgtggtgggtgaggtttagtgtgggctggaattttctgagccttttcctgagaactgatgtctgtcctttattcttctgccccctataggatgctctggagttttggctgcaagctggcgtggatgggttccaggttcgggacatagagaatctgaaggtgagttccctttccacattagggacaaagcttgggcgagaacagagggactcagctagagcctcrtaatattctctggtccttgattctgcttttttctttctaggatgcatcctcattcttggctgagtggcaaaatatcaccaagggcttcagtgaagacaggtgggtgcaggagccattctgctgactca

SEQ ID NO: 629159 - DNA, 609 bp, Homo sapiens
cacggcacccagccaaattatgctttttattttatttttttgaaacggagtttctctgttatttcccaggctggagtgcaatggcaggatctctgctcaccgcaacctccgcctcccaggttcaagcgattctcctgcccttagcctcccaagtagctgggattacaggcatgcgccaccagtgccctggctaattaattgtgtgtgtgtgtgtgtgtgtgtgtgtatatatatatatatatattttttttttttttttttaaaaaaaaaacggggtttctccatgttggaagggttgtttttgaactcctgacctaaggggacccacccccctgggcctccaaaagggctggaattacaggcatgacccagggggcctggccaaatttttgtttttaaattgcccttgaggaaaaaggraaagcacagggacagggccaccctgggaatactatggggtacagagttgtgtatggttaggtcagcagctctcaattttttcagacggtcttgctctgtcacccaggctgtggtacagttgtgcgatcacagctcactgcagcctcaacttgctgggctccagtgattctcccacctcagcctcccaaa

SEQ ID NO: 629160 - DNA, 626 bp, Homo sapiens
atgagcttgttggggagacaaaatgattttgggaaaggtattagggcacagtggagcccatgcatttcccaggaacaggataaaaaggtgagggaaggtagaaggatggtcagtagacgctggccctatgcagagggtgcaggcctgcccaggaagggtgatctggttttggaggttgtgtggtatgtcagggcgccagactgagtcaagtcgcggggccctgtctagcgccttgtagaaggagtcatggcctctctctcaccctcagtctattctgtacttggagtggagatggaggcaaagtcggacctggtagcctcagtgggctctcccagctctgatgttccttgaagatgggacacctggggcttgactctgttctgtggcctggcagatccctccgttctctgagcttcagtttctctgaaagtaaaatgggaactcaggctagcccagtgttcctcagtctattttgtggaagttagtggrtgttatttatttatttttttaaaaagtcctctgtgatgaaatgggaaattaattaggctttctttactgcaggaacctctccgagcaaataaatggcaaacatgtgttgagagtctctgagaggcaaagagaacgat

SEQ ID NO: 629161 - DNA, 558 bp, Homo sapiens
gagctacctacatggaacatagtatttgcaatatgcaaatggagacctaaaggctcatgacgggaacagaaggtggctgtatacagaggaacagacacgaaggggagttatgggaagttcaatcaacaattggcaacaagctaggtcagtagtttacgaaagtggtcatctatacagtgcctgagtttgggttctgggcctggatcatgtaagaaaggcagcaaagtctgggtgccatgaatcacacctgcaatcccagcactttggaaatctgtggtgagaggatctcttaaagctatggccttgaaaccagcctgggtaacaaaaccaagcccttgtatctaaaaaacaaaagggcaggtagattccagataaataatgttgcaggaagggggtgataaaatacagaaatgtgatacacascaaaccctcaactgctgtttcattggctcccagtgtcttaatctgtgtctgctaacactttaaggtacatctgaaataccccccaaacccagaaagcttttcaacagctaggttgtccaagaacttggaaaattc

SEQ ID NO: 629162 - DNA, 593 bp, Homo sapiens
taattctgtcaaacatttaaggaagaaataataccaactctacacaaacacctacagaaaggtgaaaagtaggaaagacttcacaactcattctatgaggccgaaattaccctgatactaaaaccagacaaaacattacaaaaagggaaactagagacaggtatctctcatgaacatagatgtaaaattcttaatataattttatcaaattyaacaaaaattataaaaaggataatacttcttgaccaagtggggtttattccagaaatgcaagatttgtttaacattaaaaaaatcagttaatataattcaccatactaatagactaaaaaagaaaaaccatataatcatctcaatagatgcagaaaaagcattcgataacactcaatatccattcatgataaaacttctcagcaaactaggcataaagggaacttctcaaaatagataagctgggtgtggtggtacatgcctgtagtcccagctactcaggaggttgaggaaagaggatcccttgagcccaggagttcaagaccagcctgggcaacacagaaggatcccatctcaaaaaataattgataaaagacaactat

SEQ ID NO: 629163 - DNA, 692 bp, Homo sapiens
gatgactgctgctcttccctcctaaggatttggtaccctacccatgcccagggataacagtgcccagttcagcccagactgaggtccaggcctcctggcagggggatgcaggaagtggagcagtttctgcacaaaaacatcaaggattcgagcagagcccgcggccagctcaacaagcctggcactggcacatccattcatttgttcagtacttatgtgttcagcacttgtgtattcacagccggccacgtgccaggctctggacacccaggggggcacagtgcttctatgtgctaaatccagcatgtagaaactgggagaagtctgggtggggcyctgccagcatcctgagtcctggtggagatggtcggcatggtcagccctggccactcatgtcagctccctcccacggccccatgctgcccacacttacagggaacccaaatagcctgacaggcccgcctctccaggtagcccacacgtaacgtatcatgccactcagaatacccaaatgagagattccagttttcaacttgcttctcaaagttctgccttcctcatctgagcatgtccagcggcctgtccttgcccgactgcagtggctggtcccgagctaagaccccggggaccttcttcaggagcgtatttaccatctgggaatggggtatctggcaagcccccaggagagagcc

SEQ ID NO: 629164 - DNA, 692 bp, Homo sapiens
gatgactgctgctcttccctcctaaggatttggtaccctacccatgcccagggataacagtgcccagttcagcccagactgaggtccaggcctcctggcagggggatgcaggaagtggagcagtttctgcacaaaaacatcaaggattcgagcagagcccgcggccagctcaacaagcctggcactggcacatccattcatttgttcagtacttatgtgttcagcacttgtgtattcacagccggccacgtgccaggctctggacacccaggggggcacagtgcttctatgtgctaaatccagcatgtagaaactgggagaagtctgggtggggctctgccagcatcctgagtcctggtggagatggtcggcatggtcagccctggccactcatgtcagctccctcccacggccccatgctgcccacacttacagggaacccaaatagcctgacaggcccgcctctccaggtagcccacacgtaacgtatcatgccactcagaatacccaaatgagagattccrgttttcaacttgcttctcaaagttctgccttcctcatctgagcatgtccagcggcctgtccttgcccgactgcagtggctggtcccgagctaagaccccggggaccttcttcaggagcgtatttaccatctgggaatggggtatctggcaagcccccaggagagagcc

SEQ ID NO: 629165 - DNA, 520 bp, Homo sapiens
ataatgtaatcgaaagggccttcataagaggaaggcagygggaatacagttagtagtaggagatatgaggacagaagcaggtagtcagagtggtgggaggaaggggccccaggctaaggaatgtaggtggcctctaaaagctgaaaaagatatttttccctgaagtcttcagaaggaatgtgtagccctgccaactccttgattttaaacttctgatgcccagaagtgtaagagaataaatgtgtgttgttttaagccaccatgttggtggtaatttgttacaaactaatgtagaaggtttttgataatggattcaatttttaaaaatagatatagagctcttcggattttctgttttttcttgtgtctgttttggtaagttaaattttttgaggaatttttttattctatcattgtcacacattttttgacataatgtcattcataatatcattatattgccttttcctttttaatatctgtaggatctgtaataatggcccctcttttcattcttgcc

SEQ ID NO: 629166 - DNA, 520 bp, Homo sapiens
ataatgtaatcgaaagggccttcataagaggaaggcagcgggaatacagttagtagtaggagatatgaggacagaagcaggtagtcagagtggtgkgaggaaggggccccaggctaaggaatgtaggtggcctctaaaagctgaaaaagatatttttccctgaagtcttcagaaggaatgtgtagccctgccaactccttgattttaaacttctgatgcccagaagtgtaagagaataaatgtgtgttgttttaagccaccatgttggtggtaatttgttacaaactaatgtagaaggtttttgataatggattcaatttttaaaaatagatatagagctcttcggattttctgttttttcttgtgtctgttttggtaagttaaattttttgaggaatttttttattctatcattgtcacacattttttgacataatgtcattcataatatcattatattgccttttcctttttaatatctgtaggatctgtaataatggcccctcttttcattcttgcc

SEQ ID NO: 629167 - DNA, 541 bp, Homo sapiens
ctgtgtgactccgggtgacttccttgccctctcygtgccttccttttctcataaacaaaatgggtaaagagagtaggctttttatggggagagaacaagaaagggcagataaagcccagggaaccagcgcagcctctgctacccttaggattctgcaggggcagaagactctctgctccttagaggctgggcaggcagaggcccctggggttgtctgtactccaggagtgggaatagccacaggctgagacaaattgcagaatggtctcgggaaccaggcgcctgctgtgtgccggggccagccacagatccctgcggggcctctgtttccccacctgccctgctggggggagtgggactggccctgcaggagggtgaggctgaggccagaagggaagaagtgaagccttgaagctgtgccggcccccagcagctggcctgtgtgtgatgatttggggcggggggatggctctgggggtttctggcttcagccctctaggcttcccctcctggtgcccagcctgacctctgttgtggagga

SEQ ID NO: 629168 - DNA, 541 bp, Homo sapiens
ctgtgtgactccgggtgacttccttgccctctccgtgccttccttttctcataaacaaaatgggtaaagagagtaggctttttatggggagagaacaagaaagggcagataaagcccagggaaccagcgcagcctctgctacccttaggattctgcaggggcagaagactctctgctccttagaggctgggcaggcagaggcccctggggttgtctgtactcsaggagtgggaatagccacaggctgagacaaattgcagaatggtctcgggaaccaggcgcctgctgtgtgccggggccagccacagatccctgcggggcctctgtttccccacctgccctgctggggggagtgggactggccctgcaggagggtgaggctgaggccagaagggaagaagtgaagccttgaagctgtgccggcccccagcagctggcctgtgtgtgatgatttggggcggggggatggctctgggggtttctggcttcagccctctaggcttcccctcctggtgcccagcctgacctctgttgtggagga

SEQ ID NO: 629169 - DNA, 541 bp, Homo sapiens
ctgtgtgactccgggtgacttccttgccctctccgtgccttccttttctcataaacaaaatgggtaaagagagtaggctttttatggggagagaacaagaaagggcagataaagcccagggaaccagcgcagcctctgctacccttaggattctgcaggggcagaagactctctgctccttagaggctgggcaggcagaggcccctggggttgtctgtactccaggagtgggaatagccacaggctgagacaaattgcagaatggtctcgggaaccaggcgcctgctgtgtgccggggccagccacagatccctgcggggcctctgtttccccacctgccctgctggggggagtgggactggccctgcaggagggtgaggctgaggccagaagggaagaagtgaagccttgaagctgtgccggcccccagcagctggcctgtgtgtgatgatytggggcggggggatggctctgggggtttctggcttcagccctctaggcttcccctcctggtgcccagcctgacctctgttgtggagga

SEQ ID NO: 629170 - DNA, 528 bp, Homo sapiens
tcatcctcagcccagcaaccctggccaacacccggcaaccaggtttgcacatgagacagacccttctctgctatccctgggccaggtgctgcccctcagcatcagtgtctgcagatggtccccagcctccagtgggtgtagagctggtgccgttccyatcgacagcagccatgctgtcactgtgcgggttatccatgctctggcctcccctgggctgagcgtccctctgccctcccagccagctggactcaccagtgagtctgcatagagctgcttttctcaagctctgtgcccgggaatcctgcagattcatactctgcagacttggagctagcctcagatcctacctctcaaaccagctccccaggcaatgccactgttgctggttggagaaccacactgggacagcaagggttcagacaacactgaaataatgaaacaggggtgaagagaatggaagaagaaaaatgccagacaccatagaatggagccaaggcttgcattttgattggatgagatgtttttcca

SEQ ID NO: 629171 - DNA, 504 bp, Homo sapiens
gcaaccctggccaacacccggcaaccaggtttgcacatgagacagacccttctctgctatccctgggccaggtgctgcccctcagcatcagtgtctgcagatggtccccagcctccagtgggtgtagagctggtgccgttcccatcgacagcagccatgctgtcactgtgygggttatccatgctctggcctcccctgggctgagcgtccctctgccctcccagccagctggactcaccagtgagtctgcatagagctgcttttctcaagctctgtgcccgggaatcctgcagattcatactctgcagacttggagctagcctcagatcctacctctcaaaccagctccccaggcaatgccactgttgctggttggagaaccacactgggacagcaagggttcagacaacactgaaataatgaaacaggggtgaagagaatggaagaagaaaaatgccagacaccatagaatggagccaaggcttgcattttgattggatgaga

SEQ ID NO: 629172 - DNA, 504 bp, Homo sapiens
gcaaccctggccaacacccggcaaccaggtttgcacatgagacagacccttctctgctatccctgggccaggtgctgcccctcagcatcagtgtctgcagatggtccccagcctccagtgggtgtagagctggtgccgttcccatcgacagcagccatgctgtcactgtgcgggttatccatgctctggcctcccctgggctgagcgtccctctgccctcccagccagctggactcaccagtgagtctgcatagagctgcttttctcaagctctgtgcccgggaatcctgcagattcatactctgcagacttggagctagcctcagatcctacctctcaaamcagctccccaggcaatgccactgttgctggttggagaaccacactgggacagcaagggttcagacaacactgaaataatgaaacaggggtgaagagaatggaagaagaaaaatgccagacaccatagaatggagccaaggcttgcattttgattggatgaga

SEQ ID NO: 629173 - DNA, 611 bp, Homo sapiens
tcacccaggctggagtgcagtggcgcgatctcggctcactgcaagttctgcttcctgggttcatgccattcttctgcctcagcctcctgagtagctggtactacaggcacctgtcaccacgcccggctaattttwtgtatttttagtagagacagggtttcaccatgttagccaggatggtctcgatctcctgacctcgtgatccgcccaccttggcctcccaaagtgctgggattacaggcgtgagccaccgcgcccagctgagtctgagtaatttataaagaaaaagatttaattggctcacagttctgcgggctttacacaaatcatggagctggcatcttcttggcttctggggagacctagggaagcttacgatcatggcagaaggtgaagcaggagcaagagagagagagagtgaagccggtgccagataaacaaccagatctcacaagaactcactatcacaaagacagcaccaagccatgagggatctgcctccaggaccccgacacctcccagcaggcctgacctccagcattgaggattacagttcaacacgagatgtgggcaaggacaaatatctgaactatgtcaccacagaactcagg

SEQ ID NO: 629174 - DNA, 595 bp, Homo sapiens
ggaatgcccttccaatatggctagagccagactgtctgggcccaatccccagctttgtatgtattacctaacctstctgtgcctcagtttaccaagctataaaatgggcataatgacagcacctgcctggtgatgctcttggagggatgaaaggaggcaacggtgtgggcatctggacggcaccaggcattgccctgagagctggccatgcggggaatgctccatccttacgccagccaggtgttgccacccctctcttgctgatggagaccaggagggtcgggacagaaggccttgcccaaggtctcacagccaggagcctgcctccactggtccctgtgtggccagtgctgccctgggggctgctgctgtgcactggagggtcagctgcatggaggagccagaggagatggtgccgaggacagagcttgcggccctgtacctggctcccagaggaatgggtcttggagctgctctgcacagacactgaccttgaggagagacaggggcgccactccctcctccactcgctcaggtgagcattcaaagcgtcataggtaaccaggagcactagttggcatggcgatttcagagg

SEQ ID NO: 629175 - DNA, 535 bp, Homo sapiens
caagcttgtccaacccacggcccgagggccacatgtggcccagaatggctttgaatatggcctaacacaaattcataaactttcttaaaacattatgaggtttttttgtaattttttttagctcatcaactatcattagcattagcgtattttatgtgtggcccaagacaattcttcttcttccaatgtggcccagggaagccaaaagattggacacccctggtctatgtatatytttataggtgaagtgtgttccctgtaagcaacagatgattttttttctttttttttaaccacttagccactctgtgtcttttgttggagagcttagtccatttacattcaatgttattattgataagtgaggacttgctcctgccattttgttatttgtttctgattgtttgtagttttatcttccttctttccttctttcctgtcttccttttagtgaaggtgattttctctggtggtatgatttaatttcttgcattttattttttatgtatccactgtatgttctttgatttgaggt

SEQ ID NO: 629176 - DNA, 560 bp, Homo sapiens
attccctgtgtctaaaatggttccttttacttattgaaaggtattttagtgtggtttatgtgtaatatcaaataaggattatttaacacttctcacattttatagatgatctataaggtcaaatgctttaaaaatagtagcaagttaaacctcactcttgaattctttacaatctaagtcagactaagttgtaatttaggattgtctttaaacagccattcagaaacctaaaactgtagaactcttgtgtatttgtgatcgggaatggtgcttttgctgacttaaaaggattaaagtagaggagatatacacaaatttaaaaattatgtgtgatcataagacttaattaaaaacaaaatcacagatgatgaaaaaaagtatacaaaatkttgtccacatattagaagtacataaaaatatgtctgctcatgatcaaatactgaaaacacacatcagtgaaaaggattgtgttagatgtgagtacaagtttttttaactttatagatattataaaatggtatgataatattataaaaatttggttgaaaaatcagatttag

SEQ ID NO: 629177 - DNA, 533 bp, Homo sapiens
cctcagcctcccaagtagctggaactacaggcatataccaccacacctggctaatttaaaaaaaaattttgtagagacagggtctcactatgctgcccaggctggtctcgaaatcctagcttcaagcaatcctcccaccttagcctctcaaagcactgggattaaaggaatgagccaccaagccctgccaaatggatgtttttaaactggagggtagcaaagacacacctgggttttttaaaggtctctggctgtagtgaggaaggtgaaggaagtgggtgaaacaggctggagggaagtagctgccacttctgcatgggcttaggacctcactggaccaacttcccctgttgagatctaacggtaaaaaataagacaggtttattagaagtgacttaaaggctgagacaggaaggcagaggccaagatggtgatcttttagatgccctaactcgcttcaggcagacctgttctgctttatataatggttaagatttcatggagaaagscttcattactgaaaatgaattcca

SEQ ID NO: 629178 - DNA, 595 bp, Homo sapiens
ttcacccaacacccacagtgtgtactacatggttactgctgctggttattcagggaccaagggctctttagtcagcagatgatggatsctgccaggactgggtccttctcttcaagacagcaggttcccttctggcccagggtgtgtctagaaatgtcatccaggagctagggcctggaatggggatctcacaactctgaccaatgctctatcttgctgtggctgagctggtcctctttactcttccctcctcaagcaggagaaaggggtctcttttggagccaggggatatgctgcctggcagtggggcggggtggtactaacagtcccttagctgcccttgctgatgtctaagtatgtcatgccccccaagcccagctcagcactaggatttgtagtccttgtggcctagactgcctttcaagtttatattaggctccagagaacttcagcccatggtggtgaggcttcctggaactcacgttcctattgctgagatgggtgataccccactggctagggttggtctgaatgctcccttcataggcagatgtcagctgagcccagcctggttttgctttctgctgtgagaggg

SEQ ID NO: 629179 - DNA, 595 bp, Homo sapiens
ttcacccaacacccacagtgtgtactacatggttactgctgctggttattcagggaccaagggctctttagtcagcagatgatggatcctgccaggactgggtccttctcttcaagacagcaggttcccttctggcccagggtgtgtctagaaatgtcatccaggagctagggcctggaatggggatctcacaactctgaccaatgctctatcttgctgtggctgagctggtcctctttactcttccctcctcaagcaggagaaaggggtctcttttggagccaggggatatgctgcctggcagtggggcggggtggtacwaacagtcccttagctgcccttgctgatgtctaagtatgtcatgccccccaagcccagctcagcactaggatttgtagtccttgtggcctagactgcctttcaagtttatattaggctccagagaacttcagcccatggtggtgaggcttcctggaactcacgttcctattgctgagatgggtgataccccactggctagggttggtctgaatgctcccttcataggcagatgtcagctgagcccagcctggttttgctttctgctgtgagaggg

SEQ ID NO: 629180 - DNA, 592 bp, Homo sapiens
tttatttgagaaaattggacactcatatgcagttgtaaggaataatatggacagattatatgtaccctttacccagcttcccccaatggaaacaccttgcaaaactgtagtacaatatcacaaccaggatactgacattgataaagtcaagatgcagaacattttcatcaccacaaggatccctcatgttgctctttgtagttacactgcttcttaattcctggcaaacgtctgtgttgtatagatggaatcatacagagtgcaaccttttagaatttttttttcactcagcataattatctggagactcatccaagttgttgcatgtatcaatagcgcrtttctttttattgatgagtagtagtccatagtatgaatgtaccacagtttgtttagccattcactcactgaagaacacctgggttgtttccagttttcagatattctgagtaaaggtactgtaaacatttgtgtacaggtttttgtgtgaactaagttttcatctctccggaataaatgcccaggagtgcagttgctgggttgcatggtagttacatgtttcgttttttaagaaactgccaaaatgctttcc

SEQ ID NO: 629181 - DNA, 571 bp, Homo sapiens
ttaacacctttgctttctgatggttcagtgtatccacactttgtttcatgccaaaattatttaaaatattgtatgaaattaccttcaggctatgtgtataaagtatatatgaaacataaatgaactttatgtttaaactgggatcttatcctcaagctatctcattgtgtatgtgtaaatatttcaaactaaaaaaaaaaaaaatctgaaacacttctggtcccaagcatttcagacaagggatattcaacctgccctgcagtcttgattactrtaactgtataataaatcttgaaatcaggtagcctgatcccactttatttttttctcaaaatggttttagttattctagttcctttgcctttccacacaaattttagaatgatatgtatgtctaaaaaatactgttggggctgggcgtggtggctcatgcttgtaatcccagcactttgggaggctgaggcaggtgaatcacaaggtcaggagatcgacaccatcctggctaacacagtggaaccccgtctctactaaaaatacaaaaacaaaattaggtgggcgcctgtagtcccag

SEQ ID NO: 629182 - DNA, 562 bp, Homo sapiens
tatatttgtagatcctatcccatattaaagtctgtctgtatcccacatcaagtattattttttttgctgaaaaaaatattgaaaggatttaaaawtttttttctttagaaatcatttggctacatgcactctagtcattataggatttgatttcatggcaattgcagtgcatgggtggaatgtttccaaagtgagaaacatgaacttacaaattattttcaaatgtaataaaatgtttataaataccagtgtattacttcagtacagcctaagctgctataacaaagagacttcttagtacagtgagagtacagggctggtacacaggcttccacctcagcatccactccagctcttgccttaaggtctgcatcacagggacaaagcagccacattgacaatgacaaacagcatcctttgcacagactgcagtgctaatgtgccccctggagttgtccatagtagtagctctcacaagtgtgtagggagaaagatgaagagctcatcccctactgcacaaccagaagtggcaggtatcacttgtactcacttcccatgttca

SEQ ID NO: 629183 - DNA, 562 bp, Homo sapiens
tatatttgtagatcctatcccatattaaagtctgtctgtatcccacatcaagtattattttttttgctgaaaaaaatattgaaaggatttaaaaatttttttctttagaaatcatttggctacatgcactctagtcattataggatttgatttcatggcaattgcagtgcatgggtggaatgtttccaaagtgagaaacatgaacttacaaattattttcaaatgtaataaaatgtttataaataccagtgtattacttcagtacagcctaagctgctataacaaagagacttcttagtacagtgagagtacaggrctggtacacaggcttccacctcagcatccactccagctcttgccttaaggtctgcatcacagggacaaagcagccacattgacaatgacaaacagcatcctttgcacagactgcagtgctaatgtgccccctggagttgtccatagtagtagctctcacaagtgtgtagggagaaagatgaagagctcatcccctactgcacaaccagaagtggcaggtatcacttgtactcacttcccatgttca

SEQ ID NO: 629184 - DNA, 553 bp, Homo sapiens
attggaatgacttcatcatacagcagcacttgtgcatgtgctgttctgctgtttccccttttctctacctgaagagcttctacttattgagtagattcttcatctggaagcctctcctggcctcctcaagctgagcaggtcttacccacgctgcacccctaccataccctgcatgttcagaccccagttcatagcccttggtaacataatcactcagttaccttcctccctcacccccaggttccctagattgagagctccaggaaggtaaggaatgagtctgatccatttttggtcctcacttccctacacagagccaggctcaagtaggaatactgagtgggtagatggataaacrgatggatggatggatggatggatggatggatggatggatggatggatggatggatgggcgggctgggtgatctctcagattctcttccaactctgagacagtcagttccaccatccagctcagcattttctttcctcaccaactcccattgttctttcaagggcttgaaaagagtatatcctagaatcatgagta

SEQ ID NO: 629185 - DNA, 553 bp, Homo sapiens
attggaatgacttcatcatacagcagcacttgtgcatgtgctgttctgctgtttccccttttctctacctgaagagcttctacttattgagtagattcttcatctggaagcctctcctggcctcctcaagctgagcaggtcttacccacgctgcacccctaccataccctgcatgttcagaccccagttcatagcccttggtaacataatcactcagttaccttcctccctcacccccaggttccctagattgagagctccaggaaggtaaggaatgagtctgatccatttttggtcctcacttccctacacagagccaggctcaagtaggaatactgagtgggtagatggataaacagatggatggatggatggatggatggatggatggatggatggatggatggatggatgggcgggctgggtgatctytcagattctcttccaactctgagacagtcagttccaccatccagctcagcattttctttcctcaccaactcccattgttctttcaagggcttgaaaagagtatatcctagaatcatgagta

SEQ ID NO: 629186 - DNA, 474 bp, Homo sapiens
ggttggatctgccataggtaccatgtctaaaagttcttcaatgatatcaaaattctcagcaacaccatggataaacataattaactgacttgtattatttacatatgtgcactcatcaactgcaatagaaaatgtcacaaatgatctcactttttctcacaacttatcctgtaaattctcagccatatcttttactctctgagcaacagtttttctggttaggcttatgtctgcaaatgcttctttctgttcaggacacatgatttcygctgcactcaatagacagtcttttataaactcaccatctgtaaaagattttgaagcacggacaattttttcacttattatgtaactgcatttcacagcagcatcacttattttatttgtattcgatgattaatgctgtagaaagtttagtccttttctaagttcattgagtttttcatcatgcatcttttctgtaaactagtcaaa

SEQ ID NO: 629187 - DNA, 480 bp, Homo sapiens
gtccctggccagtgtgagtcctagcattgcaggaggggagaccctggaggagagagcccgcctcaattgatgcctgcagattgaatttccagaggcttaggaggaggaagttctccaatgttctgtttccaggccttgctcaggaagccctgtattcaggaggctaccatttaaagtttgcagatgagcttatggggggcaatcttaaaaagtccacagcagatgcatccggctcgaggggccatcagctttgaataaatgcttgttccagagcccatgaatgccagcaggcacccctcctttcctggggtaaaggttttcagatgctgcatcttctaaattgagcctccggtcatactagttttgtgcttggaaccttgcttcaagaagatccctaagctgtagaacattttaacgttgatgccacaacgcagattgatgccttgtagrtggagcttgcagatggagccccgtgacctc

SEQ ID NO: 629188 - DNA, 588 bp, Homo sapiens
tgtgtgcagaatccagggtcctctttctgcttgcaactcctttccctggatgccccagaaacaatccaggcctcctttcctatcttacccctttgctttgctttttaccccagcacctctataaccgccttctcttcttttcagaactccttgtttctcrtcctgttttttatgattacaaaactcttgcttccaccctggaagataactgctatagatgcctgtatgtaaatggtgctgtctccagcaactggcatgctgaagaagaattgattcacggggtataaatgttggggattggaagtggggatgaaatggcacttgttgatacaggagcagagaggtgaggccgactgctgaagacagctcgccaccctccttgcctccactccaatccaggggctggggccacattctttgccttcatttatcctcagatcaggtgagatcgacaggaggtgttgatggcagtgccagcaattattgctaatccgtttgcatccttatgcatagatctgaattcagactttgtgaatttccagaggtgtgggtaatataatagaattcagtgagtgggcatggctgatc

SEQ ID NO: 629189 - DNA, 460 bp, Homo sapiens
gtggatcagataattgctcctgtggggccctggcttccttctctgtttgtgcagtatttgtttttgttgtcttgttgagaaatatcccctgtgcaacccacccttggttgaggatcacaaattgaggtgccttccttgtatgctttttgttagtattttttgtttttgttccttaactgctgagcctcagccagcgtgggtcctgggggaaataccattccaaaggaagccatccctatggggaaattggttttactgggtaaattaatacttttatttcttcccctatcccttccttcctagttgtgataaacatgggagaggagtgactttgactgctggggaatttcctcctaagaaccttattcccaaaataagccagggrttatgtcaaggcttctttcaaggaggctcataaaagcagtgacctcatccggggctttggatagagtgagaattc

SEQ ID NO: 629190 - DNA, 596 bp, Homo sapiens
ggcatgatggtatgtaccacttaggaggttgaggctgaggctggaggatcccttgagcccaggagttcagggctgcatcagctatgatggtgccactgcattccagcctgggtaacagagcgagaccttgtctctaaaaagttaattaaatactttaaaaatagaataccatagaagctaccaacatgtgcttgtttctagaactctttttctattaaaatactgtactgaatgttaaccattttttcaacaaattcttcagtattaaaatgaattagctagaattgatttatagacattaaaatgaggcagcattgtaccatgttctcagttttcaacctggacagaagaggaagagtcatrccttctcattgacttccagagtgctatggacagtctttttttcctgagtttctattttttctcataagatgggaataatattgccttaaaaggatgttagagtgtccggaacggtattttatatgatgggaaagaagaaaagtgtacacgtgctgaaaaagccattaggtttacacagtaaaagaacaggtagtacaaagttaaggcaattaaatagcatatgattagcccac

SEQ ID NO: 629191 - DNA, 643 bp, Homo sapiens
taggtagggaggtagacagacagacagatgtgtatgtatgcatttcaaagtatttatctttccttggctctgtgtgtgtgtgtgtgtgtgtgtgtgtgtgtgtgtgtgtgagagagagagataggctctctctctgtcaggctggagtgcagtggcacaatcacagctcactgtagcctcgacctcctggctcaatcagtcctcccacctcagtctcccaagtagctggawctacaggcacaggcctccatgcccagctaatttttgtgttgtgttgtgttgcgcttttgtttttagtagagacaggtttatttatgttgcccagactggtctcttatctttcttttttgctgaaccatttcaaagagagttacggatatcataactcttcactcctacgtttctccaagttgtaaagatgttttcccccatgtccagcataccattattacaatgaacaaatgtaataactaacaacatctgataccagtccattttcaaatttccccaattgtctcaaaaatgtctaaaagcctgctttttcagaaccagaatccaattaagcatttgattgtatctctttaagttttttttcaaatttagaacaatcacccctgaccatttttatgacattgattttcct

SEQ ID NO: 629192 - DNA, 643 bp, Homo sapiens
taggtagggaggtagacagacagacagatgtgtatgtatgcatttcaaagtatttatctttccttggctctgtgtgtgtgtgtgtgtgtgtgtgtgtgtgtgtgtgtgtgagagagagagataggctctctctctgtcaggctggagtgcagtggcacaatcacagctcactgtagcctcgacctcctggctcaatcagtcctcccacctcagtctcccaagtagctggatctacaggcacaggcctccatgcccagctaatttttktgttgtgttgtgttgcgcttttgtttttagtagagacaggtttatttatgttgcccagactggtctcttatctttcttttttgctgaaccatttcaaagagagttacggatatcataactcttcactcctacgtttctccaagttgtaaagatgttttcccccatgtccagcataccattattacaatgaacaaatgtaataactaacaacatctgataccagtccattttcaaatttccccaattgtctcaaaaatgtctaaaagcctgctttttcagaaccagaatccaattaagcatttgattgtatctctttaagttttttttcaaatttagaacaatcacccctgaccatttttatgacattgattttcct

SEQ ID NO: 629193 - DNA, 643 bp, Homo sapiens
taggtagggaggtagacagacagacagatgtgtatgtatgcatttcaaagtatttatctttccttggctctgtgtgtgtgtgtgtgtgtgtgtgtgtgtgtgtgtgtgtgagagagagagataggctctctctctgtcaggctggagtgcagtggcacaatcacagctcactgtagcctcgacctcctggctcaatcagtcctcccacctcagtctcccaagtagctggatctacaggcacaggcctccatgcccagctaatttttgtgttgtgttgtgttgygcttttgtttttagtagagacaggtttatttatgttgcccagactggtctcttatctttcttttttgctgaaccatttcaaagagagttacggatatcataactcttcactcctacgtttctccaagttgtaaagatgttttcccccatgtccagcataccattattacaatgaacaaatgtaataactaacaacatctgataccagtccattttcaaatttccccaattgtctcaaaaatgtctaaaagcctgctttttcagaaccagaatccaattaagcatttgattgtatctctttaagttttttttcaaatttagaacaatcacccctgaccatttttatgacattgattttcct

SEQ ID NO: 629194 - DNA, 403 bp, Homo sapiens
aacactgcactccagtctgtgcgacagagcaagagatcaagacttcatctaaaaaaaaaaaaaaaagacagagagcttagcagagttgcacctcagatcctgcatcgtggttcttatggctgctccattttgcagcagaggaagcttctgcttgagccttgcagtggagcaaggctgcagctgccctctgagagtgtcttctctggagagctgactggccctgctttgcctccgtctcctctcctggcacctgatccatggctgtgcacaaaaacaagaagaagtgagtggaaaggcacgctgggccagagggaacagcragaacagatgctcagaggcaggaggtggggtgaggttttcagtggagggagcacagagcccagtgaggtttgtgagcccaggt

SEQ ID NO: 629195 - DNA, 621 bp, Homo sapiens
tttggtacgtgttggtgtagtgatcaaggtcatttgtcatctcctggatggctccaaaaagaaaaagaacagactttgaaacactagagaacttatgcagatagaaaagttgttcatcccaactctgacaaaaatatcaccaaaaaatgggctcatgtcccagttagagaacagtcactcctacctggtcttgtggccagatgaggactgtgttgaaattaggcacctgtccactcgcacctgaagcttgaatgcgttcctctgctttatatggaaaacagtacataatctgtagcataaatctgtagcagctcaaagaataggaagagtcaagaccctggaaaaagcaacaaagcattcttcaataaattcacagactcttatggctgccagtgttggagtctgtacagcatattcaccaactggtatctgctcgaagagcttgagttacagggaatttgttactttcaaaggcaaccaaatatgcccttgttcagctctaacaatttttaaaaacatttgtcatttgtaactggtattctacctctttcatttttctttttaatcacagtctggggccatggaraatcatcattcattttcaccctatggaacttgacg

SEQ ID NO: 629196 - DNA, 589 bp, Homo sapiens
tggctacaagtcttcaaaataatgttttaaatttatttttcttctttttttttcatttttcctaatttgaaataactgaaaactaagctgtgctttcttaaaaccctgmaaactgaagccaaacaacttaaacttcagaaaaaaataacagcaacctgtttacatacataagccactttcatacctgcctattaatgtatggattttagaataatgtggcctatatctatttttccaggattgttcttttgtttgttgttgttttttctccctttcaccctattttctcttcataggacatgagacttcacaacatgctaaaaatgagattttgggacctacccatctagaaataaactgtcctagccgtaagacattaaatgaaacctgagaccagagactcattttattgttaaatgctttctccaaaagattttacaaaaaggatggggggcatataaaaggaaaatatcttgggcccccccaaatccctaaagaaaacccaacctggaaactgctttgggtaaacttgtctcccattctattcaaagttactaagaaagatgtatatctgattgcctcctttgga

SEQ ID NO: 629197 - DNA, 571 bp, Homo sapiens
gacctgtcttagattttctgggttcacactaggtttggggtccagtaggactaaaaaggattttaataaattaggccacaacartgagaaaaaataagagtttcacatattttcatttttgcaatggataatattatagtgtaaatacattttaataggccccaggtacaaatgtgtaaaaatgtaaccactatattttgccaaaactgtactaaatttctatattaagcctccactcatggctgaaaacagaattaattcagataaactcagacttagtcgatttagagtttttttcaccttcattccctagtctaacatcagtatttcatgtggggtaggggcagcaggagggaaatatactggtatggttctatcatctatccttgatggaaagcattcaagtgcacagcacctttttggtgtatttccatgctgatatcagctgaaacttcatgttcacaatggtcacgagatctatgctgacatccactactgcataccacaaccccaaaatcataaggacacttactgtctgtggggtttactctcactcattctcacctcctac

SEQ ID NO: 629198 - DNA, 571 bp, Homo sapiens
gacctgtcttagattttctgggttcacactaggtttggggtccagtaggactaaaaaggattttaataaattaggccacaacaatragaaaaaataagagtttcacatattttcatttttgcaatggataatattatagtgtaaatacattttaataggccccaggtacaaatgtgtaaaaatgtaaccactatattttgccaaaactgtactaaatttctatattaagcctccactcatggctgaaaacagaattaattcagataaactcagacttagtcgatttagagtttttttcaccttcattccctagtctaacatcagtatttcatgtggggtaggggcagcaggagggaaatatactggtatggttctatcatctatccttgatggaaagcattcaagtgcacagcacctttttggtgtatttccatgctgatatcagctgaaacttcatgttcacaatggtcacgagatctatgctgacatccactactgcataccacaaccccaaaatcataaggacacttactgtctgtggggtttactctcactcattctcacctcctac

SEQ ID NO: 629199 - DNA, 571 bp, Homo sapiens
gacctgtcttagattttctgggttcacactaggtttggggtccagtaggactaaaaaggattttaataaattaggccacaacaatgagaaaaaataagagtttcacatattttcatttttgcaatggataatattatagtgtaaatacattttaataggccccaggtacaaatgtgtaaaaatgtaaccactatattttgccaaaactgtactaaatttctatattaagcctccactcatggctgaaaacagaattaattcagataaactcagacttagtckatttagagtttttttcaccttcattccctagtctaacatcagtatttcatgtggggtaggggcagcaggagggaaatatactggtatggttctatcatctatccttgatggaaagcattcaagtgcacagcacctttttggtgtatttccatgctgatatcagctgaaacttcatgttcacaatggtcacgagatctatgctgacatccactactgcataccacaaccccaaaatcataaggacacttactgtctgtggggtttactctcactcattctcacctcctac

SEQ ID NO: 629200 - DNA, 616 bp, Homo sapiens
caattactcttctggatattgtaagaaaatggtaggtacccatgcaaagattcctgtgaaagaacattctataaagaattatttatttgagtgaaaagttgaaaacagctgagatgtcatcaactggcaagtgattaactgtgatgcatccatgtaatgaaattttattcagccattaaaagtaattgaaaattattttgtatgcttgtgaatagagaaataggtacacaatatgttcaatgatgaaaaatagcaaatatcagtaattttattattgaacaaaaatctgtttaatctaaaggctctgatggacaagtggcctgattttaatacagtggttgtctgccctctgtgtacagattaaaaaatagcacacagagattctttgacttagattctccatttggctactttgtatcataaaatgtcatgattttataraaataatttttgtcctaatcaagcaagaaactttactgtttttttcaaataaaccaaccctgtcaatttcttgggatcctgcaggtttatggaactgtctttcacataaaccatggaaatccattcaatctgaaggctgtggtggacaagtggcctgattttaatacagtggttg

SEQ ID NO: 629201 - DNA, 571 bp, Homo sapiens
gatagaacttctatacacatttgaggaaacacttaaaattattgaaactaaacaattaacacatttcaagataaaaatgcataagcttatttcaaaacatcagaaaacacaaatatacttttaatgctaataaagttatttaaaaatcactttgttgtgagaacacttaaaatctactctctyagcaattttcaagaatacaatacattgttattaactatagtcaccgagttgtacaatatgtctcttgaacttattcctcctattataactattataactgaagtttcatatcttttgactaacaactacccaattcctctactttcccccaccttacctgctgataactaccattctactctctacttctatgagttcaccatttttacattctacatacaaaggagatcatgaggtatctgcctgtgtttggcttatttcactaagtataatgtcctccaggttcaacataggggaagcaatatgtatgctaattaccctgatttagccatttcaaaatgtatacatatttcaacacaacatattgttaataaatatatgcaatcat

SEQ ID NO: 629202 - DNA, 588 bp, Homo sapiens
gctctttccgtgtaagtggattgtttgtttctctggaactgcaactggtttaaccaacatattttttaaagaaggcattttgaattagtttttaatcttctttggtatcaatatcaagtttcatactgccatggtcatagtttgtgtattctgcaagtctttgaactgtagtaaaatttattcttgtgacataagctttcccttgtcaattgcctttctcttcttcctgttgaggatgatggtggtaagaagaatgctttctaaatggttatgtcttttatttgaaattttaacgtgatatgtggataatgaatagtattgttctggaattttccaacataaattgaatatttgatctttatctcattatttaaakaattcagaaataattatatgcatacaaacccacagttagataaaggaaataagttctaatgtttaacataggatgactatagttaacagcaatgtattgtatatttcaaagtagattgaaggaggacttgaaatgttctcaacacatggaaataataattattctggatgatgaaaactatgacttgatcattaaacattctatgcacataa

SEQ ID NO: 629203 - DNA, 588 bp, Homo sapiens
gctctttccgtgtaagtggattgtttgtttctctggaactgcaactggtttaaccaacatattttttaaagaaggcattttgaattagtttttaatcttctttggtatcaatatcaagtttcatactgccatggtcatagtttgtgtattctgcaagtctttgaactgtagtaaaatttattcttgtgacataagctttcccttgtcaattgcctttctcttcttcctgttgaggatgatggtggtaagaagaatgctttctaaatggttatgtcttttatttgaaattttaacgtgatatgtggataatgaatagtattgttctggaattttccaacataaattgaatatttgatctttatctcattatttaaagaatwcagaaataattatatgcatacaaacccacagttagataaaggaaataagttctaatgtttaacataggatgactatagttaacagcaatgtattgtatatttcaaagtagattgaaggaggacttgaaatgttctcaacacatggaaataataattattctggatgatgaaaactatgacttgatcattaaacattctatgcacataa

SEQ ID NO: 629204 - DNA, 588 bp, Homo sapiens
gctctttccgtgtaagtggattgtttgtttctctggaactgcaactggtttaaccaacatattttttaaagaaggcattttgaattagtttttaatcttctttggtatcaatatcaagtttcatactgccatggtcatagtttgtgtattctgcaagtctttgaactgtagtaaaatttattcttgtgacataagctttcccttgtcaattgcctttctcttcttcctgttgaggatgatggtggtaagaagaatgctttctaaatggttatgtcttttatttgaaattttaacgtgatatgtggataatgaatagtattgttctggaattttccaacataaattgaatatttgatctttatctcattatttaaagaattcagaaataattatatgcatacaaacccacagttagataaaggaaataagttctaatgtttaacataggatgactatagttaacagcaatgtattgtatatttcaaagtagattgaaggaggacttgaaatgttctcaacacatggaaataataawtattctggatgatgaaaactatgacttgatcattaaacattctatgcacataa

SEQ ID NO: 629205 - DNA, 590 bp, Homo sapiens
agggaactatagtataattccttggtaccaaggatttatgacatattttgcagctgtatccagaccttttagggtgattggatgctgaagaagagccttccctctggacttctattcctgtaataaaaatratagcttatttggccatagaatacttcccaggtcaccaagaacaactatcatggttccaactatgctctctggagattctctaggatggcatttgcctattacttgctgtataatcttagttaagtgatttaatctctctgagattatgttcctcatatataaaaatgaggaaaataatgttacctaaaacacaaggcactgaaaagattaaatgaaagtgactaggaagtgcttagcataatacttagacatattagttaatgtttgctgcatagcaaacctaataattctgtgaatcaaccatttgggctgagctttgcaaggcagttcttccactggtcttatctgggtttactcatgtagctgtagttgatgggtggaccatggctgattgctcttacacggcctcactcacatgcctgaatgagagttctgctgttagttcatgacagctggtg

SEQ ID NO: 629206 - DNA, 590 bp, Homo sapiens
agggaactatagtataattccttggtaccaaggatttatgacatattttgcagctgtatccagaccttttagggtgattggatgctgaagaagagccttccctctggacttctattcctgtaataaaaatgatagcttatttggccatagaatacttcccaggtcaccaagaacaactatcatggttccaactatgctctctggagattctctaggatggcatttgcctattacttgctgtataatcttagttaagtgatttaatctctctgagattatgttcctcatayataaaaatgaggaaaataatgttacctaaaacacaaggcactgaaaagattaaatgaaagtgactaggaagtgcttagcataatacttagacatattagttaatgtttgctgcatagcaaacctaataattctgtgaatcaaccatttgggctgagctttgcaaggcagttcttccactggtcttatctgggtttactcatgtagctgtagttgatgggtggaccatggctgattgctcttacacggcctcactcacatgcctgaatgagagttctgctgttagttcatgacagctggtg

SEQ ID NO: 629207 - DNA, 590 bp, Homo sapiens
agggaactatagtataattccttggtaccaaggatttatgacatattttgcagctgtatccagaccttttagggtgattggatgctgaagaagagccttccctctggacttctattcctgtaataaaaatgatagcttatttggccatagaatacttcccaggtcaccaagaacaactatcatggttccaactatgctctctggagattctctaggatggcatttgcctattacttgctgtataatcttagttaagtgatttaatctctctgagattatgttcctcatatataaaaatgaggaaaataatgttacctaaaacacaaggcactgaaaagattaaatgaaagtgactaggaagtgyttagcataatacttagacatattagttaatgtttgctgcatagcaaacctaataattctgtgaatcaaccatttgggctgagctttgcaaggcagttcttccactggtcttatctgggtttactcatgtagctgtagttgatgggtggaccatggctgattgctcttacacggcctcactcacatgcctgaatgagagttctgctgttagttcatgacagctggtg

SEQ ID NO: 629208 - DNA, 553 bp, Homo sapiens
catgacagctggtgactgtggtgacagcatgatggcaacatgtgtcgctagcaggctggcccaggcctatcttaatggtattggtcttaacataattggtcttaaccaggagcaaaaacaaagggaaagccccaatggggcaggcacttttaagcctstccttgcattaaatttgctctttccattgatgaaagatggtcaatgtggccaaggtaagttgcagcagaggaggggactatctggggaatggattccaggagatatgtgcaaatcatgggtcattgcctcatattattacactaggaatgtagcttagtagatgttacctaccgttttttaaatttacctactaggattatcaaaattgctacacaattacgcagcccagaaaacttggttccagtgcagatactgctgttaataacacaatcataactgaatccatccctaagcatgtttttgcttaggtaaaacagaaaaaattacacaaatccttactgtttgaaatgcttcttccccagtgctgtaaagaaatagcacttgaacataaatt

SEQ ID NO: 629209 - DNA, 571 bp, Homo sapiens
  misc_feature 1, 2: n = A,T,C or G
nntctgtcttatataaatatttctctttagcttttttacctaaaaaaaccttgttaaaatagctttttcatatctttttttagtcctagtcccttttacctgttttatacataacctttaaataagcttgaattggaaaaaaacttgttcacctctttaaaaaacacacacacagtttkgtttattttttagcaagaatattttcctacaatatatttttatgggaagatacccaaataatgaaatgtctattatttaatttaatataatttcatactctaaattatgaccaatttgcctacaaatatttatccaattacattaccccaattattttaattgtttacctggattatttatgaaaactgtgatattcatgatttaaagttataaaactgacattgcaagattataactgagacagtgaaaacggatttgacctaactgactccatctggcttttaacgtccaagctgtcctcattcattcctggacgtaggcctaactaactttgggaggaacttggtttatagtttagctttgaaacaaagaggataacagtcttttcccc

SEQ ID NO: 629210 - DNA, 588 bp, Homo sapiens
gatttaaagttataaaactgacattgcaagattataactgagacagtgaaaacggatttgacctaactgactccatctggcttttaacgtccaagctgtcctcattcattcctggacgtaggcctaactaactttgggaggaacttggtttatagtttagctttgaaacaaagaggataacagtcttttccccaaacaaacctccttattgactgtggaccagactgcctaaacccacaggattagaagttatggtgatcttactaaattaaagatgcagctattttcattaaacccatatcaatgcmttatttattaaaaattacacaagcaatgattatcctgtttggggctgggttcatagttatgtaacctgtatgccaaacattgacaacttatagtatttggcagggataagtatgaaatttgcttgattaataaatgcaaacaaaatgtatgctggtaattcttaagacatttctactattactttaccaaaaattttaaagctagcttatttattaaagattttatttaagttacataaacttgaaaaaggattttaatagtcttttcttttttagtatc

SEQ ID NO: 629211 - DNA, 644 bp, Homo sapiens
gaagtactttggttcggtttggaaaggtgggacatattgaagaagggacattttgaagcaatggcaggaagacttgaagcagggagaaagctttcaggtcacagatatgtgagacaaacaattcattcttttgagtttctgattagcctttccaaagaggcaatcagatatgcatctatcttagcaactttgaataaatagaatgggaggcaagtttgccctaagcagtttccagcttgagttttctttagtgattttgggggcccaagatattttcctttcacactagtgaacagaacatagygaggcagctgttatcagttgaatcagttgtagtggacatctttatgcattttatatctaacactcagaagaatggatggacattttcttaactaggcctcaagtaattgttgagtaacagtgaattctaggttagacacctccattaaaagcaactggcataaaaaattttagagttccattaggggaaaatgtatgtcttttagtatacaacaaaagaggaggaatgctatttcctcatgaaagggaggagtcatgagggcctccttatctcaccatagaggggtcccaagaaggaatccttgggaaacacctagagttttctcaaaatgtttaggatc

SEQ ID NO: 629212 - DNA, 645 bp, Homo sapiens
tcttctaaaacaatacaaatgtaaaaataattgtccactaaagagatacacacacacatatacatgaacaattgtacttgggttccattggagtgagccatatccatttggttgctaaatatatacatacagacaagaatctgactctatcattggaactgctcttgcatagttctggatgtaggcatttatatatatccatttatatatatatatttatatttgttttatttaattcttagacctctaattattaataccaggttaagagagatactgggagctagccctaaagtaactcgacctgccttcaattcagagcaattgggaaatttacaytaaaatagaaattgatctgttattaatttcaaagaagactcattctagttaacctctcactggcaagtgtccttttgtaataaacaagttaaacattaatatgcagcctcagccaactttgtagaactctgggcaaatttcaaatgttattataaaatgcttcttggaaaggagcaaggaagtaattttttgagttagcacagagcaaaaggcagtgtttagactaaggcataactatgttcatatcatagcattgcaactcagtatttgtgatatattgagaaaatcagttaactgagtcttcat

SEQ ID NO: 629213 - DNA, 352 bp, Homo sapiens
ggggcagaaggcagaaggagagaccaaggcaagttttggggtagcagtaaatgtttgttaaaaacatcagagcaggagggaaaagaagtaaagtgcatttggaagggggccaagtgggygacctgagagatcaagtgtgcagttggaccttttgactgagttttatatgtaggcataattttggggtcttgtgtccattctcccctgattcttcccatgggggtgggctgtccacatgttcagcagcctgctagcatgtgggaggtgagcatgtgtagtgtgagcatagagttgtatgcatgctaacttaaggcattctcccttaccagtcaaatgtccctagaagttcata

SEQ ID NO: 629214 - DNA, 352 bp, Homo sapiens
ggggcagaaggcagaaggagagaccaaggcaagttttggggtagcagtaaatgtttgttaaaaacatcagagcaggagggaaaagaagtaaagtgcatttggaagggggccaagtgggcgacctgaragatcaagtgtgcagttggaccttttgactgagttttatatgtaggcataattttggggtcttgtgtccattctcccctgattcttcccatgggggtgggctgtccacatgttcagcagcctgctagcatgtgggaggtgagcatgtgtagtgtgagcatagagttgtatgcatgctaacttaaggcattctcccttaccagtcaaatgtccctagaagttcata

SEQ ID NO: 629215 - DNA, 352 bp, Homo sapiens
ggggcagaaggcagaaggagagaccaaggcaagttttggggtagcagtaaatgtttgttaaaaacatcagagcaggagggaaaagaagtaaagtgcatttggaagggggccaagtgggcgacctgagagatcaagtgtgcagttggaccttttgactragttttatatgtaggcataattttggggtcttgtgtccattctcccctgattcttcccatgggggtgggctgtccacatgttcagcagcctgctagcatgtgggaggtgagcatgtgtagtgtgagcatagagttgtatgcatgctaacttaaggcattctcccttaccagtcaaatgtccctagaagttcata

SEQ ID NO: 629216 - DNA, 415 bp, Homo sapiens
tccttcccactcccacaagccacctatcaggtagtctctcagtagacagagaacctaaaactggtgatcagcagcttcctgataagatctcaggagctgggcaagtgggctcaagcatgtgcattcagagacaaaaaggtgaagtttaattggtatgtgaccttctagggatatttgattggtaagggaagaacaccttaagtgagcatgcatacaattccagtaaacacactgcacatgctcacctctcaagttctagcagrccactgcacatgtggacaacccaccacaagggaagaatcaagggagaatggacacaagagcccagaaataagccaacatataaaaccccaaggcaaaagttcaaactactcacttggtctctcaggtcacccactttgccctcttccaagtt

SEQ ID NO: 629217 - DNA, 575 bp, Homo sapiens
atggacacaggaaggggaacatcacactctggggacagttgtggggtggggggaggggggagggatagcattaggagatatacctaatgctaaatgacgagttaaggggtgcagcacaccagcatggcacatgtatacataggtaactaacctgcacawtgtgcacatgtaccctaaaacttaaagtataataataataaaattaaaaaaaagaaaaaaattcataatgagtttaatatactgatctttttaattcaagtttcatattatataacttttacttaatttctttgttttttacttataatttttctattttacagtaaaaatcttggttcctaatgacataaatacaattgtttaaattattaacatttttgcttaattacctaatcatgtgtataaatacatagtattatacacatagtatttccaaacaacaataacaatcttattattaacagtgttattactgacaataatattttagttttctttttatttatttttatctttaagatatatcacactagggacatatattaaatttttgtgctttaaattcaattgtaata

SEQ ID NO: 629218 - DNA, 575 bp, Homo sapiens
atggacacaggaaggggaacatcacactctggggacagttgtggggtggggggaggggggagggatagcattaggagatatacctaatgctaaatgacgagttaaggggtgcagcacaccagcatggcacatgtatacataggtaactaacctgcacattgtgcacatgtaccctaaaacttaaagtataataataataaaattaaaaaaaagaaaaaaattcataatgagtttaatatactgatctttttaattcaagtttcatattatataacttttacttaatttctttgttttttacttrtaatttttctattttacagtaaaaatcttggttcctaatgacataaatacaattgtttaaattattaacatttttgcttaattacctaatcatgtgtataaatacatagtattatacacatagtatttccaaacaacaataacaatcttattattaacagtgttattactgacaataatattttagttttctttttatttatttttatctttaagatatatcacactagggacatatattaaatttttgtgctttaaattcaattgtaata

SEQ ID NO: 629219 - DNA, 637 bp, Homo sapiens
tattttttgtagagaggagttttgtcatattggccaggctggtcttgaactcctagtcttaagcaatctatccacttcagcctcccaaaatgctgggattacagtcatgagccacygtgcctggagtcagccatttattttattctgcttaagaatcattgatggggatctagtgtcatcatttaaaagtaaaaaggaactctggcttttagagttgccagagttcttgcactgatttttttctcatttttgtgggctaaagttcctttacctgtggcataatttgagtgtaatcagttggtttcaattttgaatgttttcagcaggctaaggctttgtgcagggtcttatttgaggctgaattcttgaccttggtttcacagaggggtatattagcaaagtatatttggtattctagtttgggctgtaatctagcagatggtgcttaagtgtaatggctggtagataggctgttagcctggtgtctcctctgtacttcctcatgcttgcagccatgctcccacttagtgctctgaaggtatggactcctcttccacttgaatgctgtccgtagatcctggcttggaactcctaggctgcacaccctctttttgtttatttctgcctggagttcatt

SEQ ID NO: 629220 - DNA, 637 bp, Homo sapiens
tattttttgtagagaggagttttgtcatattggccaggctggtcttgaactcctagtcttaagcaatctatccacttcagcctcccaaaatgctgggattacagtcatgagccactgtgcctggagtcagccatttattttattctgcttaagaatcattgatggggatctagtgtcatcatttaaaagtaaaaaggaactctggcttttagagttgccagagttcttgcactgatttttttctcatttttgtgggctaaagttcctttacctgtggcataatttgagtgtaatcagttggtttcaattttgaatgttttcagcaggctaaggctttgtgcagggtcttatytgaggctgaattcttgaccttggtttcacagaggggtatattagcaaagtatatttggtattctagtttgggctgtaatctagcagatggtgcttaagtgtaatggctggtagataggctgttagcctggtgtctcctctgtacttcctcatgcttgcagccatgctcccacttagtgctctgaaggtatggactcctcttccacttgaatgctgtccgtagatcctggcttggaactcctaggctgcacaccctctttttgtttatttctgcctggagttcatt

SEQ ID NO: 629221 - DNA, 571 bp, Homo sapiens
tgggctgtaatctagcagatggtgcttaagtgtaatggctggtagataggctgttagcctggtgtctcctctgtacttcctcatgcttgcagccatgctcccacttagtgctctgaaggtatggactcctcttccacttgaatgctgtccgtagatcctggcttggaactcctaggctgcacaccctctttttgtttatttctgcctggagttcattgagtttattctaaaggtttagaatcctcaattttttagtctctctaaatagatacttaaccaatgtttaagaaaagagttgcagttctaaacatcaaatcttaacaatagctgatttttgcttctgctgcaggtrcctataaaagcagagggaagaaaattgatattgccttagagacccatccacagcccagctcttgacctgttggtttcacagctcagagtttctgattaaagttaggacctttggaagtagaaagcagttcagccttccggacaaagagcctcaaaacgcaccttgccaagctgttgatgttacagagccatctcccagaatgtgggacacagagggagg

SEQ ID NO: 629222 - DNA, 571 bp, Homo sapiens
tgggctgtaatctagcagatggtgcttaagtgtaatggctggtagataggctgttagcctggtgtctcctctgtacttcctcatgcttgcagccatgctcccacttagtgctctgaaggtatggactcctcttccacttgaatgctgtccgtagatcctggcttggaactcctaggctgcacaccctctttttgtttatttctgcctggagttcattgagtttattctaaaggtttagaatcctcaattttttagtctctctaaatagatacttaaccaatgtttaagaaaagagttgcagttctaaacatcaaatcttaacaatagctgatttttgcttctgctgcaggtgcctataaaagcagagggaagaaaattgatattgccttagagacccatccacagcccagctcttgacctgttggtttcacagctcagagtttctgattaaagttaggacctttggaagtagaaagcagttcagccttccggacaaagagcctcaaaacgcaccttgccaagcygttgatgttacagagccatctcccagaatgtgggacacagagggagg

SEQ ID NO: 629223 - DNA, 554 bp, Homo sapiens
ttttcaacctcctcattttataatcaactgcatttgttgaacatcayatttgtgttttcagtctgtgcgtgtacatatgcagaaggttgtaccaaatgtacttggcaatatactactattatattcccagtaattgggcattaaactatttttttgtttcatttcctatatttttattattttttttatttcagtagtttttggagtacatgtggtttttggttacatgaatgagttttttagtagcgaactctgagattttcatgcacccatcacctgaacagtgtacactacacccagtgtgcaccaccagtatttctcactgccttcccaacctctcccacaagtccccatagtccaatatattgctctgtatgtttttgcttcctcatagattaactaccacttataagtgagaacatacggtatttggttttccattcttaagttacttcacttaaaataatggcctccagttctatccaagtttctgcaaaagacattatttcattcttttttatggctgagtaatatttcatggtgtatatatacca

SEQ ID NO: 629224 - DNA, 554 bp, Homo sapiens
ttttcaacctcctcattttataatcaactgcatttgttgaacatcacatttgtgttttcagtctgtgcgtgtacatatgcagaaggttgtaccaaatgtacttggcaatatactactattatattcccagtaattgggcattaaactatttttttgtttcatttcctatatttttattattttttttatttcagtagtttttggagtacatgtggtttttggttacatgaatgagttttttagtwgcgaactctgagattttcatgcacccatcacctgaacagtgtacactacacccagtgtgcaccaccagtatttctcactgccttcccaacctctcccacaagtccccatagtccaatatattgctctgtatgtttttgcttcctcatagattaactaccacttataagtgagaacatacggtatttggttttccattcttaagttacttcacttaaaataatggcctccagttctatccaagtttctgcaaaagacattatttcattcttttttatggctgagtaatatttcatggtgtatatatacca

SEQ ID NO: 629225 - DNA, 631 bp, Homo sapiens
ttaaaataatggcctccagttctatccaagtttctgcaaaagacattatttcattcttttttatggctgagtaatatttcatggtgtatatataccacattttctgtgtccacttgttggttgatgggcasttaggatggttccatatcctttcacttgtgaattgtgctgctataaatatgcatgtgcaatgtccttttcatataatgacttcttttgctttgggtagataaccagtagtaggtttgctggattgaatggtaggtctacttttagttctttaaggaatctccatactgttttccatagtggttgtactaatttacattcccaccagcagtgtaaacgtgttcccttttcaccacatctataattaaaaagtcaaaaaaaaaaaacaatagatgttggtgtgacattaaactcttacttttcttattttcattaatcttctgagatgtgtctagctgaggtgccaaatatgccttcagaaatgttatatatatgctattttgaggctgagacttgacatggctgtctatatttttgtctgagccttttttcaaaggaacatctggtacaaatttccatgctcaacatataattggccttcaataggtactttgtcttagtc

SEQ ID NO: 629226 - DNA, 589 bp, Homo sapiens
aatgatcagaaaagcagaaagtagcaaagagataaatgaattgggacaacagtgactttttttctgataggcaggattttgcaaatcccaaatttgaattgaatcaccatctgaatctaacaagaacacatcttcccatagttcctaatacaaagacttaaccagttgtgttactctattctaaagacatgcacaggactgggtaatttatttttaaaaagaggtttagtggactcacaattccatttggttggggaggcctcacaatcatggcagaaggtgaaaggcatgtcttttgtttttgtttttgttttttgagatggagtctcactctgttgcccaggctggagtgcagtggcacgatcttggctcacttgcaagctccgcctcccgggttcacgccattctcctgcctcagcttccttagtagttggractacaggtgcttgccaccacgcccggctagtttttttaaatttttttttagtagagacggagtttcactgtgttagccaggatggtctcgatctcctgaccttgtggtccgcccacctcagcctcccaaagtgctgggataacaggtgtgagc

SEQ ID NO: 629227 - DNA, 643 bp, Homo sapiens
ataatcataatcactcatgggatgcttactatgtcccagatgctattccaagcaccttgtaggtcttgatttatttaattgtctcaactactctatgcaacagatactaaagtcattgccatttatagatgaggaaaccaaggcactgaggaagtaagtaattgctcartgtcatacagcttctaagtggcacagtcagacttgtcttggatggaaacctaattcaaaagatgcttgtgcatagagaatgtatttgttaatctcagtacacccttgattattggaattctgggcaatataaacattttgtaagtatttttaaaagttttaaaaatgatattaaaataatttatgaaagaggtacctgtactttccaccagtcttattttttcttggagtttgtgagaagtttagtgaatagggcaccaataaaatagtaggaatggaggccaggccattcactagaactgcctattgtgcctgtgtatcttccagctcttctcattccttgatgttttttgatcctctgtttagttaaggtacctgccaagatgttccatttgcagagtccccatgtactgcagatgctagagaaatccatgaggaagtgcctccctgaatccctaaagatgagagtggaaca

SEQ ID NO: 629228 - DNA, 540 bp, Homo sapiens
agaactgcctattgtgcctgtgtatcttccagctcttctcattccttgatgttttttgatcctctgtttagttaaggtacctgccaagatgttccatttgcagagtccccatgtactgcagatgctagagaaatccatgaggaagtgcctccctgaatccctaaagatgagagtggaacaattttagggaacaaaggactaataactacctattaaaaatgtgggaaagagaacaagcattcactgagcacctattctgaattccaaacatatactgtcaacaaatttttgacmaggatactaagaggacacaaagagaaaaaaaatagtctcttcaatgaatggcattgagagaactctggattttcacaccccaaagaacaaaattggatgcttatcttacaccatatacagaaatcaactcaaatgaattaaatatataaatttaatacctgaaactataaaattattagaaaagaacacaggagaaaacctcctggacattggctttggcaaggatattttgaatatcacaccaaa

SEQ ID NO: 629229 - DNA, 558 bp, Homo sapiens
ctaatgaagactatacataataaaattgtgctgtatttgggattcctgctcaatgactagattttagctgctctygccgcaaaaacaaaacagaacaaaagttaactatgtgagatgatggatatattaatttacttcactataataaccattttactatccacatatgtcccatatcatgttatataccttaaatatatataaaatttattttttaaaaaatcaccaaataaaacaatataaaaatgaaatatttcaaattaattattaaaatctagaaatggaataatattagatcttaacaaacacaaattgttactggtattcttgctgagtcgtgagtgcctatctgtgcaaaatttttccactattctaccctatctgggtagttgtcctctgggtcttctttcatcttcaaatcatcctaccttatatttgttaactttgagaagacctttttgaacaaattttatgttttgattttgttggatatgtaattttttttaacaatagtgcatcatagtctacgttttaaagacatcatgtgtattcattttt

SEQ ID NO: 629230 - DNA, 619 bp, Homo sapiens
cgttttgtaagccagtgcacatttagttgacctaaaattgtaatccaacttataaatatttgactcagcaggatttttttccacataagttgaataatcgatctcccaacttagtttcatgacatacataattcagaaataatgattgcacatcaaaaattgatatttaagtttgcaaatagcaaagtataataaaatactgaatacaaatattgcaatcacttggtataagcaatttggtataagcaatttgatttattccatgttgcccaaacaggagatgacagatgactttgatcactacaccaacagctaccatatctattctaaagatcccragaactgtcaagaatgccttgacatgtcaggtatcatcaactggaaacaacatttgcagatccaaagtaagatgactaagatatattctggtttctgggactacctgtgtctacattgcaggttcactttcgtctggagagaattctcttacaaactttactttcttctaccaatctccaaactcttagcttgatgttcattccttttatcagctgccaccacctcttcagtagagcaggattcaaatattgcaaactttggggttgatataaggaactat

SEQ ID NO: 629231 - DNA, 552 bp, Homo sapiens
ttgctcttcttcttacttcatttgtgatcctttgcaagtgtcttaactattactcagtttcctcacatataaacatgaggatagtaaaagaccctaatgcatagggtcaatgtaaggaataaaagtattagatcagtacctgggcatgtagtatgggcacaatcaaggtgggcaactgttttttctttaaaaaatactacttttcctttgatttcacaacgatacagtcagggtttctagtactatctctggcctaaaagaaaatttgctcagggagtcacttgcttatagtcacacagttagtggcaacatccaaagcaagactgtctcactctaaattccatctacttccatcaggcaacttcctgtagcttctaaatgggcatttacttcactcctgtctaggctcacagtccagactgaatgaggtaawacaaagtcttgtagctgctaaattggtcaaagtcaaaagatcacaatgccagctttatgaaatgcctgagacagcaaagaaactggttccctttctgctagagacaaagaacttatgtt

SEQ ID NO: 629232 - DNA, 611 bp, Homo sapiens
ttgtgcatgcatcacgaagttctcgtgccacggttttcagctccatatggtcatttgaggtcttctctacactgtttattccacttasccattcacctaaccttttttcaaagcttttagcttccttgtgatgggttagaacatgaccctttagcttggagaagtttgttattaccgaccttctgaagcttacttctgtcaactcatcaaagtcattctccatccagcttttttctgttgctggtgaggagctttgatcctttggaggagaagaggagccctggtttttagaattttcagcttttctgctctgatttctccccgtctttgtggttttatctacctttggtctttgatgttggtgaactgttacagatggggtttttggatggatgtcctttctgttgatgttcatgcttttcctttctgtgtgttagttttccttctaacagtcaggtccctcagctgcaggtctgttggagtttgctggatgtccactctgtgctctgtttgcctgggtatcaccagtggaggctgcagaacagcaaatattacagaacaacaaatattgctgcctggtccttcctcaggaagatttgtcccagaggggc

SEQ ID NO: 629233 - DNA, 620 bp, Homo sapiens
tggtgtctatagaggcagtaggccttgctgagctgtggtgggctctgcccagtttgagcttcttggccactttatctactcaagactcagcaatggcagacacccctctccccaccaggcttcagcctcattggttgatctcagactgctgtgctagcagtgaacaaggcaccatgggtgtgggacctgctaagccaggcacaggagagaatctgacagttgctaagacagtgggaaaagtgcagtatttgggcagaagtgtcccattttttcaggtagagtctgtcatggcttcccttggctaggaaagggaaatcccctgaaaccttgtgcttccagggtgagacgatgccctccccagcttcagtttgccctctgtgggctgtacccattgtccaaccagccctaatgagatgaaccaggtacttcagttggaaatgccaaaatcacccatcttctgtgttgatcacactgggagctgcagactggagatattcctattcggccatcttgaaayagacctctatggagttgttattaatatatccatgttatgtcagaagaaatggtggcagagagattctaagttacctgttcaagatcacacagacagtcatatt

SEQ ID NO: 629234 - DNA, 565 bp, Homo sapiens
aacaatttgcttgtttcaataacagcaataaatattaactgattgccaagcactgttctgggcattttggatacatactgaacaaaatatagatcgcttgcagggcttacattctagtgatcacctattaatataaaaataaaacataccagtaatatgatataaacactgagggcatggggcagcatattacagtgattaggatggagctaaactccctggatgaagatcccagatcttccttttatcaactataaagttgggcaaattatttaacatcactgtgctcatagcttctttatgtacaaaatgaagtattatttattgaaaggatcaaatgaatgagaaaatataaataaaaacttagagcaatgcctggcacatgttaaacattccaaaaatgttacttaaaatatttgttataaaacatcaggacaggtgcaatatgaagtgaagattattatatagtgtatccgtgagaggagcagtcaacaaattcaaactaagctataagatttycagattataatttacaaatcggattcaaaatagtcttgtaccaatt

SEQ ID NO: 629235 - DNA, 639 bp, Homo sapiens
tacttactgatggaagttttcaggttgaagttcagggatatggaatctaaccagagcacaaggactgtcactgattgagcttacggaggttttggagcttaaggaggccaaggtggagcttcgttgagagagtaaacagagagatgagagagagagagagagaaagaaaaagaaaaagaaaaaaaggaaagaaagaagaaagaaagaaagaaagaaagaaagaaagaaagaaagaargaaggaaggaaggaaggaaggaaggaaggaaggaaggaaggaaggaaggaaggagagaataaaagaaaagaaaggaaggaaggaagaaaggaaggaaggaagttcctagagtctggctaattactgatctgagcatatataaaaagaaactaccttaataccttagcccatggattctacctctaccatctgagtctagtctacccttctagcctcttctgttgctaccatccaccatgtaagaccacagtggatttcttcaacacagtgtctgcttagcacctctggtctttctacatttattctcagtttgaaatttcctacttcagttctgccttctaaattaggcttccacttaccccttcaagtttacccgaatagcctgttatccctagtgctctt

SEQ ID NO: 629236 - DNA, 604 bp, Homo sapiens
gtaatttttctggtgtctccacacactcagtattctattcatccacctgcttccaagaagctctcagatctttctttattcatttattagtcsagagcacaaacttctaaggattttcatggtagctagcaaactgccattgacaaaatagttgtcagatatgtgtttcttaagtggaagttactccttttccttgagcatagttgtctgcatattctgagcataacacaatacgggcactttaatttgactcacttaagtggaagaggtgtcacaaagcaataattacattaaaaaaataaattttattgtggatatttaaagtatacaatatgatgttatgagagcatacagatagtgaaaacattaccattatgaagcaaattaatatatctattacttcacatagttacttattttttgtcgttgtttttatgtaaagagcagctaaactccactcatgtagcatggatcccatatacaatgcaattctattaactatagttctcatgttgtacattagatctctagacttgttcatcctatgtatctgatactttgtaatgagtcctcacctgaaaagctagtctctgcagatgtttcc

SEQ ID NO: 629237 - DNA, 604 bp, Homo sapiens
gtaatttttctggtgtctccacacactcagtattctattcatccacctgcttccaagaagctctcagatctttctttattcatttattagtcgagagcacaawcttctaaggattttcatggtagctagcaaactgccattgacaaaatagttgtcagatatgtgtttcttaagtggaagttactccttttccttgagcatagttgtctgcatattctgagcataacacaatacgggcactttaatttgactcacttaagtggaagaggtgtcacaaagcaataattacattaaaaaaataaattttattgtggatatttaaagtatacaatatgatgttatgagagcatacagatagtgaaaacattaccattatgaagcaaattaatatatctattacttcacatagttacttattttttgtcgttgtttttatgtaaagagcagctaaactccactcatgtagcatggatcccatatacaatgcaattctattaactatagttctcatgttgtacattagatctctagacttgttcatcctatgtatctgatactttgtaatgagtcctcacctgaaaagctagtctctgcagatgtttcc

SEQ ID NO: 629238 - DNA, 629 bp, Homo sapiens
aaaccaacaggccagatactggaaggagggtcagattatgtaggcactaccctcacctctttcccattcaagtatctgtaatagaagcaaggcagtgggaaagatatgaatgatatctgatttgcagaatgcaataaaatagcaaattacttgcatggagtgatgaaagctgttagaatcttcctttttaaagacaagttgtgccccctcccatgcccattttgaagctgcagtgaaacattctgacaatgattcaatgtgagcacttcttagtctcacttttatagagaaggaccattgagatctcagcayggttgaactggttagatgttaagcccagagctttttcactccgaagtcctaattactatactttccacttgctcagaaaagaaaggagggttcacagcaaagataatttgagcctcaatttcactgtgtaaaacagccaagatggggagtttgacactctccaggtccttgttctcaccacctcattcccaggttagtaaatatctttattgtagaggaagcaacagacactctaatcagaggagcagggacacaagaggctaggttgagaaagagggacaaaaagtgtgtgtgtgttccttcacttaatggatcag

SEQ ID NO: 629239 - DNA, 583 bp, Homo sapiens
tgaataaaattttaactaattttaaaaatttacttgcatggaagccaccttcttcttgtactctaccacagttgagaaagtacatgtatcctttcttatttcagaaattcctgcctcttttttttttgaaatttagaaacttggttaccctgtaccttcttatacctaaagagtttcagaacatgtgtggtttttgtagtttgtccagccttgtcttatcatcagggtgaaaacaatgctttttccaccttttaaatcctaggaagaaacagtattaaggctgtattttcttaattgagacatgcattcttccatcttactggtgccattaatccaggtatgacatgaagggttagcaatgattggaaaaaattgttcaattactcataactggttagactatataatttacactgattattctgatcggtaaggggacagtttatggtctcagttatttattttgtcaactaaattaaaggataaaataacatgaccatcctacatggacactttmtatgtgtaggatcattcattatcatgaatccattctgccagttatgctgcatacttaaaggttttc

SEQ ID NO: 629240 - DNA, 630 bp, Homo sapiens
tcccgtgattgtaaagaagatctcagatgcttcacaagagagtaatcaactttagtggggctgcaagattattttttctgggttttgacatgacaaacactctcagttacatcccaagaatatgtgtatctcattttctcgcacaaggacatttcctgtacttayattggttacaaaaggtgcattgatggtaaggttaatgtaatatactattgtcttagtctgttcaggctgctgtgacaaaaatactataaactgagtggcttagacagcaaacatttgtttctcacagttctggaaactgaaaagttgaaaatcaaaaggtcacaatactgtctgtctggtgagggtttgcttcctggttcatagactgccatcctcttgatgtgttctcccttgacagaaagaatgagagagagagagagagctctggggtctctttaataagtccactaattccattcacaaggactccaccttcatgacctaattacctcataaaagtcccacctcctaataccaacttattggggtttacgattacaacatataaattttaagaaaaacaaatattcagtccataacagccattatttcattctcagggttttctatgcttaatatgttgca

SEQ ID NO: 629241 - DNA, 560 bp, Homo sapiens
aatatctattgaggttgaagtgattcatatgatgaggttgagtcatgttatttgcataaatagagttgtagcaaccttaccctagatgtttatctatagttatattaaggcaatttttgattaaaatattcttaatcaaaatttattttagaagcgtcaattgcaaatatggccattaattgttttttcccattgttgtcctattccataattttctaaattggctgtatttacaatagtttgggatatctaaattatagactggtcatattgaagtcattaatattagtatgtataacaytgtaaaaaaataaaaattgtatgacttcaaatcagtaaaaagtttaaaagactcagaaaattaaaaaaataaacaacaaagtatgtaaaggagagtgtgacaatcagtgtttctgcacaactggaataatctgattctgggtgaaatctgtcagtttcaatgaaggtgtctttctgttgttggaaatgttgggtctacagtcaatttctatgaactattctctttcagagattctgtggagaatcttatattaagattt

SEQ ID NO: 629242 - DNA, 389 bp, Homo sapiens
attgcaaatatggccattaattgttttttcccattgttgtcctattccataattttctaaattggctgtatttacaatagtttgggatatctaaattatagactggtcatattgaagtcattaatattagtatgtataacactgtaaaaaaataaaaattgtatgacttcaaatcagtaaaaagtttaaaagactcaraaaattaaaaaaataaacaacaaagtatgtaaaggagagtgtgacaatcagtgtttctgcacaactggaataatctgattctgggtgaaatctgtcagtttcaatgaaggtgtctttctgttgttggaaatgttgggtctacagtcaatttctatgaactattctctttcagagattctgtggagaatctt

SEQ ID NO: 629243 - DNA, 614 bp, Homo sapiens
taatattagtatgtataacactgtaaaaaaataaaaattgtatgacttcaaatcagtaaaaagtttaaaagactcagaaaattaaaaaaataaacaacaaagtatgtaaaggagagtgtgacaatcagtgtttctgcacaactggaataatctgattctgggtgaaatctgtcagtttcaatgaaggtgtctttctgttgttggaaatgttgggtctacagtcaatttctatgaactattctctttcagagattctgtggagaatcttatattaagatttctagttgatgtaactttccaattacttttcatggaggataatgtcattttagttgagaaacatgtatttagggattacttaattgcagtttaacagccatacttacagaaaaattaccctgataaggccacttccatcaaagctcaagggctgtctttttctaatgcattttccacctgatttcaggtgatgtcagggctaaataaatggttracaagaaaatccatctcatgcctgttgatgctggggctgagtatattgggctagttatcttacatcagtttatgtcatgggaattaagtatggttagagatatttctagataaattggttg

SEQ ID NO: 629244 - DNA, 577 bp, Homo sapiens
gggttgcctggagaatctccaacctgccctacaagtatttacaccagatgtttttgtgcagataagggaacccacacagggtcttgcctgaacattcccacaaaagacaggaggyccacatgcagtgggggaatgggatggagccaccagaaattcacaccttatgcggaggaggagcctggctccttcagctgttgtgtggtagcctggtattcaatctgtgaggtggaaacctgcatgcaggacccctctctttgctgagagctttcctttcacttaataaattccaccctcctcacctttcaatgtgtccacatgcctaatttttcctagtcatgagacaagaacctgaatttagctgaactcatgagcaaaaaatcctgcaacatttttgtggccagtacaggaatacatcagaagagtgaaaaaaatgcaaacccaaaaatctctttcactttgttttctgagctttcttgtcctcagactttttctgaagtcaggggaaactacccccaccccaacccctgttgctctcggggatcaggaatgtcagcctcagtgcaacccagtgttttct

SEQ ID NO: 629245 - DNA, 577 bp, Homo sapiens
gggttgcctggagaatctccaacctgccctacaagtatttacaccagatgtttttgtgcagataagggaacccacacagggtcttgcctgaacattcccacaaaagacaggaggcccacatgcagtgggggaatgggatggagccaccagaaattcacaccttatgcggaggaggagcctggctccttcagctgttgtgtggtagcctggtattcaatctgtgaggtggaaacctgcatgcaggacccctctctttgctgagagctttcctttcacttaataaattccaccctcctcacctttcaatgtgtccacatgcctaatttttcctagtcatgagacaagaacctgaatttagctgaactcatgagcaaaaaatcctgcaacatttttgtggccagtacaggaatacatcagaagagtgaaaaaaatgcaaacccaaaaatctctttcactttgttttctgagctttcttgtcctcagactttttctgaagtcaggggaaactacccccaccccaacccctgtygctctcggggatcaggaatgtcagcctcagtgcaacccagtgttttct

SEQ ID NO: 629246 - DNA, 622 bp, Homo sapiens
actgtttatatttgctgtaaagttttgattaatgaaaatggatttatgaggtttgtcttaagctgtagccaatctggtgtgctttgtatgtccttctgtatagttctgtcagaaagactggtatcttaggataagatgtgggcctaggaccctgtaagcccactgctcaagtcagcctggcaagtggtcagcacaattttgctgcaggcctccatcttgttttacttccttgggagcatgacctgtatgacatggcagtactttgttttagcctctgccatttggcaatagtagcctggttcattccyggcttagggaatgagtacttactagttaatacctgtgtgactttgccatttgctgattctattcccctccatgaaccatttctagcctcctttcttgaatctttccttctctgagctacctttaaagcttctagattttgtaaaaactgcttgccacctctttgagaatgtcttacacactcccagttaagtcataatcttagttgaggtttgttggtttcgcctctgaggttacttctggtaaagttcaaaagccaaaaatatcggctgcttggtgtggctaaagttgggtaataaggaatttaaaagggctt

SEQ ID NO: 629247 - DNA, 645 bp, Homo sapiens
tttgtgcagataagggaacctgcacaggttcctgcccacatgcagtggggaaatgggatgcagccaccagaaattcatgccttatgcaggggagaagcctggcctcttaagctcatgtatggtggcctggtattcaattcgtgaggtggaaacctgtgtgaaagaccccagtctttgctaagagctttcctttcacttaataaattccacctttcratgtgtcctcatgcctaattttaattttaatctacatctttcaatgtgttctcatgcctaattttaattaatttaattaattgaattaattaattatttaattgattatttgattattaaataatcaattaaattaattaattttaatttcaatttcaatttgtcctcctaatctaatttgtcctcatgcctaatttttcctagttgtgagacaagaactcagatttagctgaaccaaggagcaaaaaatcctgcatcaattacacaaaaaagccattaagaaatgtatcagataaatttgacagatattgaaataataaaaacaaaatcaaacagaaatcttgaaactgagaaatacatttgctgaactgaagaggtatttagaggctttcaacagcagaataaaccaagcataggaaaggatcactg

SEQ ID NO: 629248 - DNA, 615 bp, Homo sapiens
aatctgtctcagatttctttcctagaattacctacttttaggttatgtgggaactaatcctctgtctgatgggacaagacaggctgtacttaatgaaaaataatagagtgcagtgggttagtcttttaaaatatttatctacatcagattataagatgttggaatccagcattggtggagctgtcacttgtgatgtgggcctgctggtgagcagatcacaggtgtattcatataatggcataagactcagaaaaaaattgaatgaaatactgatatattgaacagcatggatgtgtttcacaggtattttaatgaatagaaatatcagacactaaaaagaatacccactataagatgctaatcacaaaataaatcttaacagttgtagggatgtgaattgattgaagtaagtttcagagattatgttgttgtaatttttaaagtaatgcaaattacataaatgcaarcttgttttaatcccatggaactgtaaattaagatctctgtgtgtataaaatatatctcattaaagagagaaagaataagaaagattctcgccagacacgttggctcacacttgtaatcccagccctttgggaggctgaggcgggcgat

SEQ ID NO: 629249 - DNA, 615 bp, Homo sapiens
aatctgtctcagatttctttcctagaattacctacttttaggttatgtgggaactaatcctctgtctgatgggacaagacaggctgtacttaatgaaaaataatagagtgcagtgggttagtcttttaaaatatttatctacatcagattataagatgttggaatccagcattggtggagctgtcacttgtgatgtgggcctgctggtgagcagatcacaggtgtattcatataatggcataagactcagaaaaaaattgaatgaaatactgatatattgaacagcatggatgtgtttcacaggtattttaatgaatagaaatatcagacactaaaaagaatacccactataagatgctaatcacaaaataaatcttaacagttgtagggatgtgaattgattgaagtaagtttcagagattatgttgttgtaatttttaaagtaatgcaaattacataaatgcaaacttgttttaatcccatggaactgtaaattaagatctctgtgtgtataaaatatatctcattaaagagagaaagaataagaaagattctcgccrgacacgttggctcacacttgtaatcccagccctttgggaggctgaggcgggcgat

SEQ ID NO: 629250 - DNA, 592 bp, Homo sapiens
ccattttctggcagatctactcccactgaaagtgagcctgtgcctactcaagcattcttgaagggtaggatccagcttcctctccctgtacagagcagcagcacgctggcaatggagggaagtctatggagttgcctcacctggactgtgggaagaagctctgccccagcccccatcctagtggtagccatcggagagacagatctatgaccaayggctacacatgagacttacaaaagtctcatgacctttataaacagaaggtcatgagacccaagacaggggtgtaataaggaaatggagcacaatcctgatggcttaggataaggagagggtgaccactcccttccccttcccctgagacttcagcacttgcccatcacaatttcttcctgctaccctcagcagtgctggtgcatacactgggcaccaggctacctgctggctcttactattaaagagtgtagcctgaattgcataaacaaacaaaaaaaattgctattacaaacaacatctgtgatagtcacctcatgaatttatttgccactgaggaacatgtacagaatattggccctctgaaagcccccagaaa

SEQ ID NO: 629251 - DNA, 601 bp, Homo sapiens
aatacacagctacagaatactccacccaacaaccacagaatatacattatttttatctgcacatggaatgtactctaagattgaccacatgtttagtcataaagtgaatttaaaaaaactgaaagtcataccaagcatcttcttggaccacactggaatataaatacaaatcaataccaagaggaattctcaaaccacacaaatacayagaaatgaaagaagttgttcctaaagaattttggataaacaataaaattaaggcagaaatcaaaatattctttgaaactaatgaaaatagagacaaaacataccaaaacctctgggatacagccaaagcagtgttaagaggaaagtttatagcactgactgcctacagcaaaaagttagcaagatctcaaattaacaacctaggaattgagattaagatggcagatagggggcaggactagcttgcagctcccactcggatggacagagccgtgtatgaagactcacatcctgaaattctgctccaagaactaccgtgggtacataccaggaaagctgagagaatccacagaccatttgaagaaactggattacctctgcaggctccctgaga

SEQ ID NO: 629252 - DNA, 621 bp, Homo sapiens
tttggtacgtgttggtgtagtgatcaaggtcatytgtcatctcctggatggctccaaaaagaaaaagaacagactttgaaacactagagaacttatgcagatagaaaagttgttcatcccaactctgacaaaaatatcaccaaaaaatgggctcatgtcccagttagagaacagtcactcctacctggtcttgtggccagatgaggactgtgttgaaattaggcacctgtccactcgcacctgaagcttgaatgcgttcctctgctttatatggaaaacagtacataatctgtagcataaatctgtagcagctcaaagaataggaagagtcaagaccctggaaaaagcaacaaagcattcttcaataaattcacagactcttatggctgccagtgttggagtctgtacagcatattcaccaactggtatctgctcgaagagcttgagttacagggaatttgttactttcaaaggcaaccaaatatgcccttgttcagctctaacaatttttaaaaacatttgtcatttgtaactggtattctacctctttcatttttctttttaatcacagtctggggccatggaaaatcatcattcattttcaccctatggaacttgacg

SEQ ID NO: 629253 - DNA, 621 bp, Homo sapiens
tttggtacgtgttggtgtagtgatcaaggtcatttgtcatctcctggatggctccaaaaagaaaaagaacagactttgaaacactagagaacttatgcagatagaaaagttgttcatcccaactctgacaaaaatatcaccaaaaaatgggctcatgtcccagttagagaacagtcactcctacctggtcttgtggccagatgaggactgtgttgaaattaggcacctgtccactygcacctgaagcttgaatgcgttcctctgctttatatggaaaacagtacataatctgtagcataaatctgtagcagctcaaagaataggaagagtcaagaccctggaaaaagcaacaaagcattcttcaataaattcacagactcttatggctgccagtgttggagtctgtacagcatattcaccaactggtatctgctcgaagagcttgagttacagggaatttgttactttcaaaggcaaccaaatatgcccttgttcagctctaacaatttttaaaaacatttgtcatttgtaactggtattctacctctttcatttttctttttaatcacagtctggggccatggaaaatcatcattcattttcaccctatggaacttgacg

SEQ ID NO: 629254 - DNA, 468 bp, Homo sapiens
taatgatacacctagcaagtggataaaataataactatttamtagcttaaaataatgataacagttcacatgtatggaacatcacatatatgccagcactatactgagctttatatacatttatcataaatcccatcttagagactgaaaaactgagacagagaggttaagtgattggccctagcttcaaagtcaggaagtgacaaaaccaacctggaaacccagagctctcggactcaaaactcatgctcttcctggtaggaggaagtttggagatcataatccaagttttccgacagtcaagctcccagcccacatctctactgtagttggtctccatccagtctaggaccggctgcttaacagggatgaaatgaaatgttttttctcctttaaagatttaccatgtataaatgtatgagaatattaaaggcaacaattaactttattggaaaccttatattctcc

SEQ ID NO: 629255 - DNA, 576 bp, Homo sapiens
catgggctgggtacctggcttgagggacatgctatatgaattctccagttctggacttcccttggggacggttttaccctgaaatggcagtcaagctacctggggattgctcttctgtgccacagtaccagtaagattttacaaacccacctacacccaggcaacactagcagtcagttgtgccttctgcctgtgacccaggaaaggctattctacctctcacttttaatttacaacaaagtgtctaacatgcccaasagtaatcactgagctcttactgttgagtatagttttgagctttgggaagatggaaggaatgcagaaaacactatctcttttgggagatctatagtctaactgggagaggacacacacacaaggcatactatttaactacttaagagcatgggctacatcagaccagacagactcacatccaagtcatcactcagctgcttcctatttgggcaattgtgttcaaccattgaagtctcaggtttcccatgtgtgcatacacaatggtgcacgcgtccctcacagcactattgtgagagtgaatagcaaagtacttcatga

SEQ ID NO: 629256 - DNA, 576 bp, Homo sapiens
catgggctgggtacctggcttgagggacatgctatatgaattctccagttctggacttcccttggggacggttttaccctgaaatggcagtcaagctacctggggattgctcttctgtgccacagtaccagtaagattttacaaacccacctacacccaggcaacactagcagtcagttgtgccttctgcctgtgacccaggaaaggctattctacctctcacttttaatttacaacaaagtgtctaacatgcccaacagtaatcactgagctcttactgttgagtatagttttgagcttygggaagatggaaggaatgcagaaaacactatctcttttgggagatctatagtctaactgggagaggacacacacacaaggcatactatttaactacttaagagcatgggctacatcagaccagacagactcacatccaagtcatcactcagctgcttcctatttgggcaattgtgttcaaccattgaagtctcaggtttcccatgtgtgcatacacaatggtgcacgcgtccctcacagcactattgtgagagtgaatagcaaagtacttcatga

SEQ ID NO: 629257 - DNA, 576 bp, Homo sapiens
catgggctgggtacctggcttgagggacatgctatatgaattctccagttctggacttcccttggggacggttttaccctgaaatggcagtcaagctacctggggattgctcttctgtgccacagtaccagtaagattttacaaacccacctacacccaggcaacactagcagtcagttgtgccttctgcctgtgacccaggaaaggctattctacctctcacttttaatttacaacaaagtgtctaacatgcccaacagtaatcactgagctcttactgttgagtatagttttgagctttgggaagatggaaggaatgcagaaaacactatctcttttgggagatctatagtctaactgggagaggacacacacacaaggcatactatttaactacttaagagcatgggctacatcagaccagacagactcacatccaagtcatcactcagctgcttcctatttgggcaattgtgttcaaccattgaagtctcaggtttcccatgtgtgcatacacaayggtgcacgcgtccctcacagcactattgtgagagtgaatagcaaagtacttcatga

SEQ ID NO: 629258 - DNA, 527 bp, Homo sapiens
taatttttgcttcaactgttaaatgtaatttagaacacaagagaaggaaagcccattgaattaatctatatttttgcttactgagttccttttttatttcctgatattccaaggttccttcgttttatcatttcttttctgtttagagggcttccttagtcgctgttttaggttaggtctgctggctgagcacagtgacttacacctgtaatcccagcaatttggaaggctgagacaggcagatcacctgaggtcgggcgttcaagaccagccrgaccatcatggagaaaccctgtcgctactaaaaatacaaaattatctgggtttgatggcacatgcctgtagtcccagctactccagacgccgaggcaggagaatcgcttgaacccgggaggtggaggttgcagtgtggtgagatcgagccattgcactccagcctgggcaataacagtgaaactctgtctcaaaaagcaaacaaacaaacaaacaaacaaacaaacccgaaattttcttagttttattttttc

SEQ ID NO: 629259 - DNA, 527 bp, Homo sapiens
taatttttgcttcaactgttaaatgtaatttagaacacaagagaaggaaagcccattgaattaatctatatttttgcttactgagttccttttttatttcctgatattccaaggttccttcgttttatcatttcttttctgtttagagggcttccttagtcgctgttttaggttaggtctgctggctgagcacagtgacttacacctgtaatcccagcaatttggaaggctgagacaggcagatcacctgaggtcgggcgttcaagaccagccggaccatcatggagaaaccctgtcgctactaaaaatacaaaattatctgggtttgatggcacatgcctgtagtcccagctactccagacgccgaggcaggagaatcgcttgaacccgggaggtggaggttgcagtgtggtgagatcgagccattgcactccagcctgggcaataacagtgaaactctgtctcaaaaagcaaacaaacaaacaaacaaacaaamaaacccgaaattttcttagttttattttttc

SEQ ID NO: 629260 - DNA, 595 bp, Homo sapiens
gctattgtatctgtccacatcctccccctttctaaactgctggaaggcagaaaccatgtctttaacaccacagagacaaaaatagccaagattcacacactcactgtaagccagatgttgatttacatcctttaaccctcacagcagccctggagatggcagagattaaattagtagttagttcaaaggccagccacccagtaaatggagtaggaagaaaaagaaggtccaaactcaggcagtcaaagtccacagcccaagggctttaccctgttggatgctatttctcaagaactggcaggtccagaaactttagctgaatgagtaagtggggttcagaagtgctgggaggctcagttgccagaagagaaccctgaatcagccccagaggtaacccaactttkgggaacactgaaacctcactatatccaatcacagatgtgattaggttaccaagtccggccaggcagtcacagaggtacaaacgaggccatgctcccaacataatatttacttctaaaaccaaggcagaccagattcctgccctggactctaaggccacagctggtaccaagttcagggaacggccaggttc

SEQ ID NO: 629261 - DNA, 479 bp, Homo sapiens
gtgagttgggtcccgtggctgccactgattggttgcgataagttacgcggcccaataagaaaaagaatgtacctttgctggcctatagaaaggggaaagcaggtgagtggttgttaggggcggacagctgcgttgcctaggccctggtcccgctccagttggctgagagtagggaaagctcagtccttgggcgagtgatccctggctggcctccgggaacgyttgccgcgccaggacagggagggacaaccaggtgtacccgagactgggagattaattcctgctaatcttgggacggaagtgttctgtttgttcaaaggaattgacttcagcgtcgcaggcctgcccgcatctcagtgtctgattttgctgcccatgtgttgttcagctctgagccataagcaagacccccactggtcctgggctgcactgtattttagttcgtgtctgggtcgcagccaactaagcctgctgattaa

SEQ ID NO: 629262 - DNA, 623 bp, Homo sapiens
ccataagcaagacccccactggtcctgggctgcactgtattttagttcgtgtctgggtcgcagccaactaagcctgctgattaacaaaatggagctaatgcatccactttgtgccttgcgttttcctccgtcatctcatttaatcatcaatcactaaggtttatgagctagggggtgctaccccctcccccgaaacgtggggcaattgaaattcaaaggcttaccaaaacctgtcctaggattggcgccaggtctgtctgcctctaaatctctgtgctgttggtctcagccatcttccctgccacctgttgacttgacagtttcagcttataaccagtcagagttggcttccccgtaaggccacgtataactttttttcccccttttctttttatttatttatttattaatttttgcgacagggtcttgctctgtcgcccaggctggagtgcattggcgccatcagggctcattgcagcctcgacctcccgggctcaagcgatcctcccacctcagccccacaagrtgttgggattacaggcgtgagccacaacaccttgcctatctgtaactttctagtgactgcatccaatggttggctttcagcccttgcttgactcaac

SEQ ID NO: 629263 - DNA, 553 bp, Homo sapiens
cggggcccctgggcacacgaggggctatgcacgaggtcgcccgcatcctgctgggcgagggcccgaccaaccagaaaggctacacgctggcagcactgggggacctggcacagaccctgggccgtgcccggaaacaggccgtggctagagaagagcgagatcatctttaccgggcccggaaaaagtgccagttcctcctggcctggaccaacgaaaatgaggcggccctcacacccctggctctagactgcgccagggctcaccaagcccatgctgtggtagccgaggaggtggccgccctcactggggagctggagcggctttggggaggccccgtgccacctgccccaagaactctcattgaggagctccctagctgaacgggttaccctggtcattaataaagctgtgactggtcagccctgttgcytgtttctgagggatagctattgtcccaccagaccccagattcctgggcccacaagccactgctcagcttctccctgatcagtgctgacccagccagtcctaggggagagaagtgcaccaaggg

SEQ ID NO: 629264 - DNA, 343 bp, Homo sapiens
ggctgagctcagtgtggacgtggtgacctcctgctccccacctgagcccaggcccacagacacttggtgaagctgaagcttagcttccaagtttatttctgggatctagggaggagctggctgaaggagcggcctcccgaggaggtgtccgacctctggcctggggcctggccaggcctgaccctggtctctgtggtcgtggggcaggtcaggcagcttgaagaggagacctgccttccgggrgtttgggtcactgcaggcagagacagctcgagtgagcagcatggggcagccgcctcttccctccccgctgccatggctgcccgcacacctgagcagagcc

SEQ ID NO: 629265 - DNA, 586 bp, Homo sapiens
agtcactggatggagggggaaatcccagaacagaggcagagaaggtcatgccgcaatttctgagtatgaactttgcttagatctctagctgacccctgaggcacacctgtggggtagacccaaagcaatctgcagctagtcagaactcaactgagatgtgatttacttataaccacaggttgggtcastttgcagtttgagttgaaccaagttaatcgattgcctgccatagcaaaaacatcgacactattctgaggagtaaaacggaatccgtggtttccacaacataacagtcacaattcaaaattactcagcataggaggaaccagaaaaaggcagtcctttgcaaaagataagacaattaatggaagccaaccctgagataacatagatgttggcctgatcagacaaggactatgaaacagctattataactatgctcaatgaggtaaaagaaaatatgttgtaatgaatggaaagataagaaatctcagcaaggatggagaaatatttagaaatgtcgatgaaaagagtcaaactctgtaaaatatttgaatagatttattctgagccaaatatgagcgac

SEQ ID NO: 629266 - DNA, 471 bp, Homo sapiens
gaattcaagttgctttgcacagtacacactgaggtatattgtcaggataagagcccttaaagctggctcccacgcagcatgattccctacttttaagtgtcaaattccctctagtttctgccagtttttggcctttttctagtgctttcatatcattttttaaaatgtatttttttccagagtttaatactgttctatgagaaatattagtctcatctaagccactctgacattttttgcagctggaacttcctagtccatttatatttcatattatcgttgatatatctatgtaattttatcttactatttggtttttatttgtcccaccttctctatttctattccattttctcccyttttgacttttttttttttttgagacagagtctcactctgttgcccaagttggagtgcagtggcactatcttggctcactgcaacctctgtctcctgggttcaagcaattat

SEQ ID NO: 629267 - DNA, 391 bp, Homo sapiens
actggggattgtggatgtcattccaaacttgcatttctctttcattgcaactgtttcttctgccaaagaatcaatgagataggatcttccaaaacatcaaattacccgtcagtatgtattaagagccctctatcctctaagtatcctaagagggggtaaggtggtggtaatggtggaaaaagtattactgaagtattctcttaatggaacagctgtttttttaataaaaatttttctctgatgtgaatttcctaaataatgttcattaatgttcgttataagagtatatgtttcttcccagaaaaaaaatggctttctggaggaaaatttaagtattttccagcttttctatgraactaaagtcatcaattcttgcataggaatggaagct

SEQ ID NO: 629268 - DNA, 577 bp, Homo sapiens
ctggggtgaccaatcttttttgccctgtgtaaatcagacactacctcctcaagctcatctataaaatctyctgcacttcactgtggaccaaaagacccacttaaatcccctgtctctacagaagagagcttttctctttcttttgcctgttaaacctctgctcttaaactcactccttgtatgtccatgtccttgatttccttggagagagacaatgaacctcgggtattatcccagatgaaaaatgccatttcattatgggagcccacctgggatccgaggaagattcatagaagggggagtatagaagtggaccccaactccttctttttatttcaaggccttctgctctccatttaaaaatcaaaccaaatactgggcccccaatcagccatttaaaaagttagcgtggctaccagccttacaagactcaggggacaggcttgccagggagaacttagctaatccccccatgtcctcagggtgctgggaatgttggctttgtttctaattggtttccttttacagagagcctcgctgtcatgtggggctggaagaggttgagaggcactgaagg

SEQ ID NO: 629269 - DNA, 407 bp, Homo sapiens
gggcattggactatgaactgtgattattggcaaataaatagaaaatgtattatctcctgctgcccccaaaaaactggataaacatatttaagttgccctattgtaattgtttttttccagrtgcaagtactattgccattcttactattgggtcaggggcctggtggtatctggggcatgatgaagggtacaaaattaaggaagaatatggtaccaaactgcttgacaataatcacattgctctattcaactgaaattctcatatccaacactcttttttgatcaagtcttgggaaggcctattaaaatgcaaatgaaagtgattaaaatgttaacctacatgtgtagattatagggaccattgttattgattatctacttaatagctttcagacaatagtggctcg

SEQ ID NO: 629270 - DNA, 578 bp, Homo sapiens
gaattgcctcacaagacttctcttctgacttggaaattcatctagagcttgtctttagtgatagaaataaacaaacaggactgctttctccaaatttttattttaaaattactttatcactctgagttttcatgcatcagagagaacttttacccataggtgtcttgacttcccattggtgaagaggggtatggctctgatcaagaagggtaggctcttttcatgagtatttttagttttatttttaagtggaagcccagattagaaacatctcatttagctgaattggtggcttatggatcagccataatgtagattctctgctcttgctagttgggaattcagagccaaacacagcatctggcctgctagtagacagtcaataaatttttttacttaagtgaatgratttcagacttttgtgttatttaacaaatatagtttaataatatattaatctgatttccgactacatgttgaggtgggtgtacattatttgtgccatatgcaattgttatatcccaggcatcaatgatactcacactgagatcctggaaaatgtcctttatgatgagata

SEQ ID NO: 629271 - DNA, 627 bp, Homo sapiens
gcattctactgtggtattggtcttacgtcagtcccaccagatttgactcatcccactcacaatcgttcagccctcttcaggaagcccagtttcagtactatgagtcataacaacagatgtaacagcaggaggttcttcaccttgcaaacaaacaaaataaacggcagtgaaaattattcatgaatgtattatgacaatagaaagcaaatattttgcaagatgttctctttaactcctctgagagctctgtgtgactccgttcattcaccaatcccagtcacctggcattgctagacattgccctcctttagttgcaaagctgtcctcccccaacaatttagacagccatattgtaggggttgattcttgctttgagctcaaacagcttctaacactcaccaaatctcaggttaatctttgcattgtmgttctactccaaactccaataatcctccatgattgacaaagactcttcagtcaatgcttcctcacttgaatgcacaggggctgacccagacccgctacccagacattctgatatcatctgtgctcatgctgcccttgagttctccctggtaggacttgaaacaattagcacttgatccacaagcatcaaatccccatact

SEQ ID NO: 629272 - DNA, 534 bp, Homo sapiens
gagagaatcaattctcagcacagcaaacaaatgattcttgaaatcagaccaggtccttcctgtgctcaagggctcaagggctcccatctcacctgggaaacaaccaagagccttttccatgatcwaggccctactcctttatttctttagcctcatttacagattttctcctcaccagacagtaccctccagctctagtaatctccgtcctgtgcttctaacatataccagaaacagtactaccttctcactggaattctcttctttcagatatccaaccacgtggctcgcttctttaccttcttcaagtttttgctcaaatgtcatctcagtgagatattctctgttcaaaccaatttaaattgcacttcccactctacctgtatcctccttcctcctttatttctttctatatttatcactaatgtgctgcatagtttatttagttatgttatttattatctgaaatcccttccggaatagaagctccagaaagttggataattttgtctgttgttttttttttttttcctt

SEQ ID NO: 629273 - DNA, 534 bp, Homo sapiens
gagagaatcaattctcagcacagcaaacaaatgattcttgaaatcagaccaggtccttcctgtgctcaagggctcaagggctcccatctcacctgggaaacaaccaagagccttttccatgatctaggccctactcctttatttctttagcctcatttacagattttctcctcaccagacagtaccctccagctctagtaatctccgtcctgtgcttctaacatataccagaaacagtactaccttctcactggaattctcttctttcagatatccaaccacgtggctcgcttctttaccttcttcaagtttttgctcaaatgtcatctcagtgagatattctctgttcaaaccaatttaaattgcactycccactctacctgtatcctccttcctcctttatttctttctatatttatcactaatgtgctgcatagtttatttagttatgttatttattatctgaaatcccttccggaatagaagctccagaaagttggataattttgtctgttgttttttttttttttcctt

SEQ ID NO: 629274 - DNA, 543 bp, Homo sapiens
ttcctttccaatcaatatccactcactgtcyaggagccagagtacctcatggcttgtctaactcagagaggtcacttcacctataaagagaacatcttgcaaagttggatggtgggtaggagagaatggttatggtattttcttcaggagtctgagtccctgatctttgaagcctcctcaagattcctcttagtgatgttaatcaaatcctcttagcagaactcctggccattccccctaaattcattgactaatcaaaagaattttcatcacttcttctcccttccaactcttaactcagcataagctaatttggacagagatattataaggtggagtggtggatagaaggtactctcttaagcctaacagtaggaaaaatctgaggtctagtttgctttaaacacctagctatattgacctgtctatgaactaacgtggcagatatctgagcctttcaaaactttctgcacctcttcttgtaacacaagctatcatcaccagctgaaccaaagcgagaacttggagacagggaagaacaca

SEQ ID NO: 629275 - DNA, 543 bp, Homo sapiens
ttcctttccaatcaatatccactcactgtctaggagccagagtacctcatggcttgtctaactcagagaggtcacttcacctataaagagaacatcttgcaaagttggatggtgggtaggagagaatggttatggtattttcttcaggagtctgagtccctgatctttgaagcctcctcaagattcctcttagtgatgttaatcaaatcctcttagcagaactcctggccattccccctaaattcattgactaatcaaaagaattttcatcacttcttctcccttccaactcttaactcagcataagctaatttggacagagatattataaggtggagtggtggatagaaggtactctcttaagcctaacagtaggaaaaatctgaggtctagtttgctttaaacacctagctatattgacctgtctatgaactaacgtggcagatatctgagcctttcaaaactttctgcacctsttcttgtaacacaagctatcatcaccagctgaaccaaagcgagaacttggagacagggaagaacaca

SEQ ID NO: 629276 - DNA, 576 bp, Homo sapiens
aaaactttctgcacctcttcttgtaacacaagctatcatcacyagctgaaccaaagcgagaacttggagacagggaagaacacagttcttgttctcctgactgtgcttaaagaagagggcagggcatcaccagctaaggaagccagtaaggtgagactcaactaggttgacaataaagttaccataagagccagggaagccagagggctctcatgtaaatccaagagacttctcctattccattcaccataaattctcctaaagtcccttcctcatatctctagaggccaatctagagaggtgtgtggagaagaggcatctgaaatacagggtttttgagatcagcagtgcaattgcatttaacaaactgaactcagtgtagtagcccctgctactcagcattatatgggctcataataaagatgcaattaattatagaaaaaaattagaagtacagattatttgcatatctaagtataatacgcatgagtttccctccctgttacatttgtagtttgcagtctaataccaacagcctgtatttctcagggggatcctgatggatcttctgtccgg

SEQ ID NO: 629277 - DNA, 511 bp, Homo sapiens
acaaatacaagcaaatacagtattatactatatcctccccttccttatatagtatactatatatactgtactaaattttccttgttttatttaaaaatatatcctagacacatttccatgacagtgcctagagtttcycattttaccacatactactttcctgtagaagtgaacaatagtttatatgatcaatcctctattgatggaaatctagctggtttctaggtgtttgccagtataaacaatgagtaaccttgtatgtattccattttgcattggaaagctcactgccttagaggaactgataaaatttgctttattcccttcctttgtggtagtaaacttttactcctactagtacttcatgaggtgttttctcaaaaatccatcagaaaagtattttataaacttttggatttttgcccatctgattggtttgaaatggtatctctgtgttggtcttaattgtggcacttcctttttatttatttatttattcatctatttattt

SEQ ID NO: 629278 - DNA, 510 bp, Homo sapiens
agtgactataaatggaataatacaaaaaaaagtcttcccagccatatcattggcaagctgtgcaaacttgggcaagttactaaaactttctatatttacctcataaaattgtggtgagaattaactttctagtggaggtgaagttaatttttaaagtagtgctggaatgtcttgaattcttaataaatttttaggtattaatgttttattattatatttaataatgttttattattgttatcatgatcattatcatcattatttcaaacaaatatgtgactccaagatatgyttctaaaatttttacttgtgagaggagagtttattttgtttatcatcatatcacggagattgtgatttggacttggcccagggtacaaagtagtgtaataggaaaataaatcttgggaccccaaaatcactaagccagagggaaaagtcaagctgtaaactgcatagggcaaacttccctcccatattattcctaaataacatagctacaaagataag

SEQ ID NO: 629279 - DNA, 510 bp, Homo sapiens
agtgactataaatggaataatacaaaaaaaagtcttcccagccatatcattggcaagctgtgcaaacttgggcaagttactaaaactttctatatttacctcataaaattgtggtgagaattaactttctagtggaggtgaagttaatttttaaagtagtgctggaatgtcttgaattcttaataaatttttaggtattaatgttttattattatatttaataatgttttattattgttatcatgatcattatcatcattatttcaaacaaatatgtgactccaagatatgtttctaaaatttttacttgtgagaggagagtttattttgtttatcatcatatcacggagattgtgatttggacttggcccagggtacaaagtagtgtaataggaaaataaatcttgggaccccaaaatcactaagccagagggaaaagtcaagctgkaaactgcatagggcaaacttccctcccatattattcctaaataacatagctacaaagataag

SEQ ID NO: 629280 - DNA, 559 bp, Homo sapiens
gacatggagtcaaaggagaccatttggagctttaagatttgactgccatgctggatttcagacttgcatggggcctgtaacacctttgttttggccaatttctccccgttggaacagctgtatttgcccaatacctgtaccccattgtatctaggaagtaactagcttacttttgagtttacagtcttataggcagaagggacttgccttgtctcagatgagattttggactttggacgtttgagctaatgctgaatgaattaaggctttgggggacttttggaaaggcatgattggttttgaaaaatgaagacatgagatttgggaggggccagggacagaatgatgtgatttggctctgtgtccccacccaaatctcatcttgtagctcccataattcccacatgttgtgtgagggacccagtaggagatggttgaatcatgggggtaggtgccactcacctattttgagatgttctgttttctttgtggggtttcaagagtcatagaaagatwtttcttaggtctaaagctctgctcttctctactgtattacctg

SEQ ID NO: 629281 - DNA, 595 bp, Homo sapiens
gctgacaactgcctagggtaatgaaaaaggttatcaataatttgcaagtttaagataagaaaaagaagaggtcttatgaatctgtaagatgcgcttctattggcgtgcctaatacgtttatgtatttatgtgttgtgtacacaatgtttcactactgaaaatatataaaatacctctaattggcttaaagaaaaataaaagcacttaaatcaaatactctctttaaaaaaaagtcaaatgcttttccaatatcacatgacttaagtaagcttttaataaataagctggctttaaaattattggtaaaataacattagaactgtcttaagaactgttagcatttttatttgcatttattggtcaagcagttttttgcttattcctgcagaatactatgagattgaccttaaaggttacaaaactataaaacacagcccaagacagaatgatctttgcttgtgtaatttttgataaataagacatgaaatattgttggtttaatgaaaacatctaaatcctgaattatcrtttaaaaatatacctttatatttaaccttaaagttcttgagtaacacttgaaattcacagctataaa

SEQ ID NO: 629282 - DNA, 563 bp, Homo sapiens
taaatgtaacagattaaatgcttgtaaacaaacttgtcatgtaatttaggatctaaagttattaatagatattaagtgtttgagaaattttcaaatttaaaaattatttttaaaactttaaaaagatgttcttattaaaacgtaaatgtcttgttctaattcagagcttatttaaaggttatatataaaacaaagtaaaaggaaccargaaataagagagatatagagaaagttatagaaatgaagaggtatttttggtaagaatgcttaaacaaaaataattttatatgagacagaatcttgtacagtaaatcttatcctagaataaaatgactggttgtttcagaaacagagacatttaggacaaactagaaagttcaagcatgccatgaatgctctgtgtaaatcataataagaggacttatttaaaaaatcttttatatgaccaagttttctataattaaagggaagttacaatcatttttctgaagatttggttttgattaaaataattatacactaaataactggtttgaactacaaaattttcttaagatattgct

SEQ ID NO: 629283 - DNA, 536 bp, Homo sapiens
taactttatccttcaactcattttcagttcctgtaagtttttttcccccctttgagttctaactgttgtggtttgatgctttaaaaaaaaaaagttatatcttaaaggtctaaaggaaatgtttccttccaatataatattcctcatagggaagagcaatcacactacagaaggtcttttcttttgcctttgggtaactggcctaataaacagatcttatgctttattgaaataattcctatgtcattattcctaagtttggtttgcttatgaaaaactgcgattaaaaaaaawttaattcaggttattgcatacatataactttctgtatgtgcctttaagtctttgtgccattaagttacagggctttgacgcctggttctaaaaaggacaccaagtcttgctaaatcttaacactgatggcagttaaaccctcatcttcagacccagtaaaagatgcaaatcaaagtaaattgtgttcataagacaccaggccagaaattaaagctattccacttctcatggcctgggaacta

SEQ ID NO: 629284 - DNA, 551 bp, Homo sapiens
acactttcatacctgcctactgatgtacggacttcagagtaatatgacctattacagttttccaggattgtttcttttttgtttgttgttgttgttctcccttcttctcttatgttctcttcatagaacgtgagacttcacaacctgctaaaaatgagctttccttatacagtgggacctactcatctggggataaaccatcctagccatgagagattagacaaaacctgagaccagagactcattttcttctcaaatgctttctccaaaagattttaaaaagaaaagcgtggggggaaatgtgaaagaaaaataaatcttcgatgccccaaatcactaagtcaaagggaaaagtcaagctggaaactgcttagggcaaaaacctgtcccccattttattcctaartaagatagttacaaagataagaagctacgttcctcccacacaatttgcccacagggaaatcccttgtggacaaaggacagacagaaatcaaaagtcatcattctgacactcacctgaggcaaattcataactgattgtttcctct

SEQ ID NO: 629285 - DNA, 551 bp, Homo sapiens
acactttcatacctgcctactgatgtacggacttcagagtaatatgacctattacagttttccaggattgtttcttttttgtttgttgttgttgttctcccttcttctcttatgttctcttcatagaacgtgagacttcacaacctgctaaaaatgagctttccttatacagtgggacctactcatctggggataaaccatcctagccatgagagattagacaaaacctgagaccagagactcattttcttctcaaatgctttctccaaaagattttaaaaagaaaagcgtggggggaaatgtgaaagaaaaataaatcttcgatgccccaaatcactaagtcaaagggaaaagtcaagctggaaactgcttagggcaaaaacctgtcccccattttattcctaagtaagatagttacaaagataagaagctaygttcctcccacacaatttgcccacagggaaatcccttgtggacaaaggacagacagaaatcaaaagtcatcattctgacactcacctgaggcaaattcataactgattgtttcctct

SEQ ID NO: 629286 - DNA, 560 bp, Homo sapiens
aaggacagacagaaatcaaaagtcatcattctgacactcacctgaggcaaattcataactgattgtttcctctgccctactgtttatgtaaaaatgcagatttgcctaactagacwaaattgtgtatatagtggaaggctgatcaaggactcaaaagaatgcaactttctatctcttatctacttctaacctggaaaaccctactttgagttgccctgccttattgaaccaaatgaatgtacatcttacacatattgattgatgtctcatgtctacctgaaatgtataaaagcaagctgtaccccgaccaccttggacacatgtcttcagggcctcctgagggctgtgtcatgggtgcgttcttaactttggcaaaataaacttcctaaactgactgagacctgtctcagatattcaggtttcatggtattaagttcagagaacacatgcactaggttgctgacaaggtcatggtggatctcacaggattagcagaggaaattccattgcagtgtaacctccctcctcatgaaatgcaatcccacacagcagcaggccca

SEQ ID NO: 629287 - DNA, 535 bp, Homo sapiens
ctatgcttgtgttttcacgctgacaggacatgtgtatctcaacaagtatcttcatcttctgaacctatttcctcatctataaaaggtcactaacacccattttgaaaaaccacatgtaggttaggaggattcaatgtatgtgaaagagttcttcaaactcctaagcacttgctgtgctgatggtaaaggtgataatgaggaggaaggagtgtctgctatgggaaaaccactgtcctaaaacttttaaatacattgttaattaatctgcaccaataagtctaygaattagattctatcataatctcaattttacagatgaggttcagagagatgacaaattttccccaatatcacacagtcattttaatggtggaacagaaattttaacccaaatctatctggctccatagttaacactcttaactaccatattatatggccccaatctaactcccttatctttgggaaatacttttatttataggtcaatgacacagagttacagatcctgggtacagcctgggtctgtaactta

SEQ ID NO: 629288 - DNA, 548 bp, Homo sapiens
taacacccattttgaaaaaccacatgtaggttaggaggattcaatgtatgtgaaagagttcttcaaactcctaagcacttgctgtgctgatggtaaaggtgataatgaggaggaaggagtgtctgctatgggaaaaccactgtcctaaaacttttaaatacattgttaattaatctgcaccaataagtctacgaattagattctatcataatctcaattttacagatgaggttcagagagatgacaaattttccccaatatcacacagtyattttaatggtggaacagaaattttaacccaaatctatctggctccatagttaacactcttaactaccatattatatggccccaatctaactcccttatctttgggaaatacttttatttataggtcaatgacacagagttacagatcctgggtacagcctgggtctgtaacttactcaatgtataatgctgggtaagtcttaacctctctgtgcctcatctgttaaatgaaagagttgaactctaggatctctcaagttcattccctttgagttcat

SEQ ID NO: 629289 - DNA, 608 bp, Homo sapiens
agtcttaacctctctgtgcctcatctgttaaatgaaagagttgaactctaggatctctcaagttcattccctttgagttcatctaacattatacggtcttcgttcttgttggtacaatagtttattaggtaattgtttattagataattaacagtccatgtcaccttggctatctgccaaatgaatagaagcacactacagatattagagagggagggttgaagggaaaagatttccaagggctttggcaggtggagaaggctttttggagaggataggcctgaaccgtttcaccattaaaagcacttttattatttttctccatagtcactatatttacaaagattttatgtttacttaacattgtgtcatggtctggcaaaagagagcwtctgcagcccctccaggaaagaagagaaatcctgtaatccctagagagagtcaggcaggaggacaaaattagtggctgcatgcttactgcagaccagcacggtatgagaacagtattttgtcatcagctgtgagtcagctaaaagttgaagccaaatgttcaagcattgttaggagttgagtcttttctttgatgaagcatatgggagcctcattca

SEQ ID NO: 629290 - DNA, 600 bp, Homo sapiens
cgcacgcttccttcaaccccagtctctaataaacactgatctgttctttattactgtaatttagtcattccaataattgtatataaatataattttacagtatattgccctttgaggttttgtttactgttttatttttcattcagcataatgcacttgagtcatctaagttgttgtatgtatcaatagtttattccttattactgatgaataggagcccattgtatggatgtaccaaagtttatttaacaatttacttgttgaaggatatctggattatttccatttcttggctgttataaataaagctgctatgagcttttgtgttcatctttttgtgtgaacataagttttcatttctttaggagaaatgcccaggaatgtgattgctggatcattcatatggtaagtgcatatttacctttataaaaaaaaaacaccaaactgtcttataatgagactgtaccattttacattcccattarcaattcatgagagatccatttataaggctgttttaaaatagaagcactatgtgaaaataacccaaatgagattgtttcaataactaaaatgacttcacagctaagatatctgagt

SEQ ID NO: 629291 - DNA, 425 bp, Homo sapiens
catcaagcagattctcctcagtcaaacatattatatcattaaayaccattttctttgaaaggtaaatttctgttttcagtttttatttctaaagaatataagtcactgttatttggagcttccaattaccatgtgataacacatagcattatcctgagataaactaattccagccaagtgcaaagaaccagacttcctactgagactagttgacctaatatgaaaaattagtatttttaataaacctggaagcaactggatctgtcagttaatgatatggctataatatccagtaaaggacttaaccttcccagtctgtcataaattatagcaaacaacagttcttatctcatacacttttttaaatttgataaggtatgcaaaacatttaacacaatatctgagacatagtgaatacttagctc

SEQ ID NO: 629292 - DNA, 425 bp, Homo sapiens
catcaagcagattctcctcagtcaaacatattatatcattaaataccattttctttgaaaggtaaatttctgttttcagtttttatttctaaagaatataagtcactgttatttggagcttccaattaccatgtgataacacatagcattatcctgagataaactaattccagccaagtgcaaagaaccagacttcctactgagactagttgacctaatatgaaaaattagtatttttaataaacctggaagcaactggatctgtcagttaatgatatggctataatatccagtaaaggacttaaccttcccagtctgtcataaattatagcaaacaacagttcttatctcatacacttttttaaatttgataaggtakgcaaaacatttaacacaatatctgagacatagtgaatacttagctc

SEQ ID NO: 629293 - DNA, 574 bp, Homo sapiens
cactcctttggtgttgcagttattaagcctttaatgaaacttttaatggcagcataaatgctgaaaggtaatttgataagaagtgtcaataactttagcataaattctgaaaggtaatttgataaaaggtgtcaataactttaaaaacagtcaaaccctttaacgcagcattgcctactcaaggcatttatcctacagaaataacacaaataaatactatcaaaaagggtttcattaagcattattaatagtggaaacaattggagattcacgtaaccaataataatggtatttctaaatagaggatggtacatacttaatttggaaaaytatgtagccatttaaattgtgtttttttaaagaatattttacatagagaaaaattaagaaaaagatgttaagtggataaaagcaggatacaaaacagcaatactattaaatgtgtgcagttttatttcaaacatatgaataaatgtgtgtatatttgtaaatatatatgtgtgtgtgtgtgtctgtgtgtgtgtgtgtgtgtgtgtgcgcgtctaatgatctccctaaaagggacaaggccatc

SEQ ID NO: 629294 - DNA, 625 bp, Homo sapiens
tacatacttaatttggaaaattatgtagccatttaaattgtgtttttttaaagaatattttacatagagaaaaattaagaaaaagatgttaagtggataaaagcaggatacaaaacagcaatactattaaatgtgtgcagttttatttcaaacatatgaataaatgtgtgtatatttgtaaatatatatgtgtgtgtgtgtgtctgtgtgtgtgtgtgtgtgtgtgtgcgcgtctaatgatctccctaaaagggacaaggccatcagtatgtgatagaattacaggtcatttaaaaaaattctttatatgtcctatagagtcagaaaaatatagaaagatgattaataggtttctatcctcaaaaagagttaacatcccagcasaaaagatataatttacacatggcataataaaaaaatatacaaccgaatatgagaactagacttctgctgtctcatcctctgttcctcctttgggaaattacctctccctcaacgtgattgtgtctctagtaaggcaacctcatcaggtagacttgcaatttcttgggctcagtcacaagtggggtctacaatccaggccagctcacctggtatcgctctttgtcgggccacagaatgagtg

SEQ ID NO: 629295 - DNA, 555 bp, Homo sapiens
taaattccattttctcttaaatccatttgatctatgttactgtctttcaactcacatggtcattattgatataaacacatctttcaaagacatagcatgagttattgaatcaggggagaaacaggtcacttccagcctgatgactgggaaaggctactcagagaaggggcaatccgagctggaccttggaacaaaagagagagtaagcataaggaccaaagaaacctggaatttatagaggtataaatgtaaggtatttggtaagatgcttttactgaaggagagactttgtgttgggaagcaggaagtgatgggctggggacaacactgtaattatcaggctagtggttttagaaattatcctataagcaatgaaatatccattaargaattttagtaagtgtgtgacctgttgaaaatcatccttccagaaaaataattagtgtgagagttatacctaatgaaagtataaaattggcaccctcttcatccttttcctcctgtaatctcttcccagggaaattcactagctaatctcctggtcttcagttttcc

SEQ ID NO: 629296 - DNA, 555 bp, Homo sapiens
taaattccattttctcttaaatccatttgatctatgttactgtctttcaactcacatggtcattattgatataaacacatctttcaaagacatagcatgagttattgaatcaggggagaaacaggtcacttccagcctgatgactgggaaaggctactcagagaaggggcaatccgagctggaccttggaacaaaagagagagtaagcataaggaccaaagaaacctggaatttatagaggtataaatgtaaggtatttggtaagatgcttttactgaaggagagactttgtgttgggaagcaggaagtgatgggctggggacaacactgtaattatcaggctagtggttttagaaattatcctataagcaatgaaatatccattaaagaattttagtaagtgtgtgacctgttgaaaatcatccttccagaaaaataattagtgtragagttatacctaatgaaagtataaaattggcaccctcttcatccttttcctcctgtaatctcttcccagggaaattcactagctaatctcctggtcttcagttttcc

SEQ ID NO: 629297 - DNA, 595 bp, Homo sapiens
gttttgctttgggaaaacctctagtcataaaagaacttaaaaaaaaatccttccctgtcattctttggtagggattactatgtctacctagattacaattttaaggacttagggttcaactgaaatgcttcaattaggaatccaggaagtgggtaaaaaatggagatgggcaaattttttttgcaaagagctcgtcttattcaactatttcaacttttttttttcacatttgcttaaaaacaccccagctgcaagaaatggggcatgatgtcataatctaatctctcttaaagctaatgacaaatagctctgatagggaaaggatgaggatcttctggattactggaataaaatagtattcttacttgaccaaatatatgagcaacatggtcccgaagattccatagtaaaggccaaatgtgatgaaatatcagatgtaaaagctgctaacccaggygatgtcttgcagagaaaagcacttgaaagttatacaccctgaacatgatttcatttcctcttcatgggcctgggatcccttcatgttctggctaaatcttatgccctgttattcaaggaagctgtatctggagaggac

SEQ ID NO: 629298 - DNA, 589 bp, Homo sapiens
atctccaatatgaatcaaaatccaactctgtgttatctgattgacttaaggctcaaactgctcaatgggagagagggtagataaaagtagatgattccaggtaccttgcaacttagtgatgatgtgatttatttccatcttcttaatacttcaacgattaaatatttttcttattgattctgagtcttcattttgattatggaaagactgttyctagtattaataacaattaacaattattaagcatttcctgtatgccagacactttgttgagcatgacacatgagtattgcgtataatcctaacaacatccttatcaggttgaagccatcatctatcatcattttacagttgaagaaactgtggttcaaaatcattaagtaatttgttcaaagtgactcagctcatgagtgcctgaattctcacagaaggcaggttcatttttgtaggttagaatcacctggggaactttccaaaaatactgatgtctagactctactggggatgaatttagaatatctagagatggtacttaggcattaggactttaaaaaataacttctttaggtggcttcaaatgatagccagc

SEQ ID NO: 629299 - DNA, 589 bp, Homo sapiens
atctccaatatgaatcaaaatccaactctgtgttatctgattgacttaaggctcaaactgctcaatgggagagagggtagataaaagtagatgattccaggtaccttgcaacttagtgatgatgtgatttatttccatcttcttaatacttcaacgattaaatatttttcttattgattctgagtcttcattttgattatggaaagactgtttctagtattaataacaattaacaattattaagcatttcctgtatgccagacactttgttgagcatgacacatgagtattgcgtataatcctaacaacatccttatcaggttgaagccatcatctatcatcattttacagttgaagaaactgtggttcaaaatcattaagtaatttgttcaaagtgactcagctcatgagtgcctgaattctcacagaaggcaggttcatttttgtaggttagaatcacctggggaactttccaaaaatactgatgtctagactctactggggatgaatttagaatatctagagatggtacttaggcattrggactttaaaaaataacttctttaggtggcttcaaatgatagccagc

SEQ ID NO: 629300 - DNA, 533 bp, Homo sapiens
cagtgcccataggtttttcctaagggatcccggtttgaatgcaaggatttggtttagtggaaggctcagagacatttgcttcccttctaggccagagtacatagtcaccaaaccctagaaagttctagaaaagtagakatctagtttaactcctagtactactgatgggaacactgaggaccagggatagaatgtgatttactaaagatctcacaatgagcactgtcagagccaggcctggaagccatgcttggaagtcctgcactgttaactggttcattcattcactctttctttctttctttctttcattccttccttcaacaaaagcttattgaaggctcccccccgccgccatgcaccaagcactctcctaggtgctgcactgcagtggtgcataggacagtgtacctgcttcctggagcccaagtaagaggggataagaccagctgtcatatcactacctgctttttccagcagtctggattttgcaatcctgcactcttgaacagagccatctggcttttcctgac

SEQ ID NO: 629301 - DNA, 461 bp, Homo sapiens
aatcttgtgggaaaatacccatgccaccttaggatttacctatgtctaggaagaaaatcataaattggtcagtaacgtatcttagactttaggaaaatagataaaaaatgtccagaggaaagattctcctagagaaaatggcttaagaaggaacagggagtgctagaacaatccacagtactccatgactcagagtacagggagcctgagctttggaataggttatgtgaacctargaatgttattgggatgttctgagcctcagcttccccaactgcaaaatgaggctgacattacccacctgagtgatttatggcaaatagaaccaacgcatgtaaagtgcttggcattagtgccagatacttagtaaaagttcattcagtcttatctattatcagtcttatcaccagcatctttatcctcagaaatataattattatttcttgtttgttcaccactag

SEQ ID NO: 629302 - DNA, 600 bp, Homo sapiens
cagaaatggagtataaatatgattcwtggcataagcaccccaccagaatgggcatctcagcctggacacttcctttacttagcacaatattggccgaaactacatgctaactaatggtagtggttatgacagaggaattcactggctaagagaaaaggagaagacagatagaagatgaagagagagaagagatagaggaagagaaaagagaaagcagagggagagaaaggatcttgtgtgctgagctaaggagtttgcattttatccttactgcattgctgcctctcttcctactatacatgagaatgtgtccctagcacagcatccctcccaccttcatcctcacaacacaatcacctggcatttctaagctgttggtaaaagaaaagtaataatcagtgataattacatctttcctgcgtcatcaaaacttttaaaattatctgattctcgtggaaatgatagttctagttgtaaaatagatggaggagaggagagagaaagaagttcaagtgctaagagatgaaaatgggccatgaggagacagtgcctttctggaagttgagtctggcagttaagtgaaggatgaaatccaaaaga

SEQ ID NO: 629303 - DNA, 564 bp, Homo sapiens
tagcatctccctcttggaaaatctttcttctttccagaaacaatttaaatccctggaagagaagactctctttcttccaaacataaacaggatataggaaccatcactgcttctcatagccatacggaattgctacttaacatgcacctgaggtggaaaaatatagtttgtcacctctattctgtttctggctgtcaccaagtctctgcacaggccacsacagcatttttttaatagagagtgaggagcctccttcagtgacaagcttagccaaaggtgtactattttagaccacccagggctctagggctgtgctcttataatctctcatgcctttgccttaaggaatcatcaactttaacctgtccttctctagaattaactaattcaaggggccttattcccctgggctttggccaagaaaccagagagagccctcaatggaagatataatttgcatagccaaacttggttgccgcactgtctcagatagtgtgagcaactttcacattaagactgatgctggacttttataaagatttatcccaacccataaactcaatt

SEQ ID NO: 629304 - DNA, 577 bp, Homo sapiens
ccatacggaattgctacttaacatgcacctgaggtggaaaaatatagtttgtcacctctattctgtttctggctgtcaccaagtctctgcacaggccaccacagcatttttttaatagagagtgaggagcctccttcagtgacaagcttagccaaaggtgtactattttagaccacccagggctctagggctgtgctcttataatctctcatgcctttgccttaaggaatcatcaactttaacctgtccttctctagaattaactaattcaaggggccttattcccctgggctttggccaagaaaccagagagagccctcaatggaagatataatttgcatagccaaacttggttgccgcactgtctcagatagtgtgagcaactttcacattaagactgatgctggacttttataaagatttatcccaacccataaactcaattatttcttctggtgataaataaaatagtgatctcatcaatgctccaggatcccctgactgtgttggtcatacctagagaagcagtamacgtagtaggtgggtctccagcaggaaactttcacagagatggttt

SEQ ID NO: 629305 - DNA, 359 bp, Homo sapiens
ggagaacttgccccaggagagcccagccaggaaagacacaaaaatgtaagtgagatgtcaggatccaggggtgtagaaggatggagacgaggcatattttaaagccaattaactgttttctgtgaagggtgggaccacagtagagtcaatggatggagtccacgtatttcaaaacaatgcctttttctttagatcatgggaactcttaaatcttagtgaagaaaaagaataaaattcttatcccttcatcaaacagtaatttcatgtctctaagcacctacctcatgccagggaacttacggatataatttccttttcaytgactgcttttaattatgttttatatctatgtctatgtt

SEQ ID NO: 629306 - DNA, 598 bp, Homo sapiens
aagcaaactaggcatggatgtcactccacaagaatacacaaagattgatcatggcaagagtgtgatgaacaaaaacagtcctcatatctagatttacagccttctcttctcagctccccagtccaggcaaaacatttagccgtggtcaatttaatgctatgcctcctttttctgtctccaaaaaagaaaggtcagaagtgggatgaacagacccttgcaagaaaatcggagtggaaaataaaccgccctctccggggagctgaaaccagaaaatgtatgacatctgagcagctcatcagatggaggggagaaataccaaaagacaagagagatcagggaaggtatgrgcagaaatgagaagaaaaatttttctaaagtagaaaagtgagtggctcctgtaagttgcgagtgctagaaaataacagaggacaggtggaaaataggcactttgaatttgcacttaataggcttttggtaaatgtaaaaaacagtttcttcctttgaaaatgtttttaaaaagcaagatattcaccaaagacatatgaatgcccattaacagatcaaaatgtgttgaaacaaaattgtgattaaaaaggca

SEQ ID NO: 629307 - DNA, 579 bp, Homo sapiens
ccgttgtcatttggcagtttgtgaggatgagcacatcatattttaaggtttagggtctttagacacatactcccttagtatactaaggacctggrggcaatcttgccagacttcctctgcaggcatctttaattttcttgtatcataaatttttatcttacattctatacaagggggaatcactgagctgatgagtgagcctaaccatttgcccgtaagtatgaggctttgttgttttatattcagtgtgaatatgataactcacataacctctcttatgaacctctctttttctctttttgggtggggggggggtgattttttaaatggccttgaaaagaaagccaacttctggtattggagatggaagcaaagaataataaagagtaaaagtaatcgttctcagattgaaaacaaaagatttgctgtaatgtaaaaatggaaaatcaaatttagtaaaagcttatatctacaagttgaataaattcaaatgctgcttacacagaaataggagaaaaatttaatagaactatttcaggagcattgccaacgctgaaaaagctacttgtcaagtgagag

SEQ ID NO: 629308 - DNA, 593 bp, Homo sapiens
tctgtctgccccaccacctttcaaatcagagactttaagatgctggatttcaaaatctcaagtttcttaggctctctgattctgagattcagtgtggtctctccctttcttggaggctgagagagtggagagggtcatggagtcaccttttccacgtagacatgttagctccctatggctgctgaaacagattgccacaaactcggcagcaattaaaacaacacagatgtatgagcttacagctctggaggtcagaagtcccaaaacaggtctcagtgggctaccatggaggcgtggcagggctggctcctctggaggccctcggggagcgtccaccttttccagcatkgctttccttggctcacagtgccttcctccattgtcaaagccagcagtggccgttgagtcttttgtacatcccatcactgtggctcagacatttctgccccctgcttccacttctaaggactcttgtgattatactaggcccaccaaaatcatccaggatacggtccccatctcaaggccttaattggatctgcaaagtcacttttgtcattaaggtcccaggtttgggcgattagggtgtggac

SEQ ID NO: 629309 - DNA, 550 bp, Homo sapiens
tctcagtgggctaccatggaggcgtggcagggctggctcctctggaggccctcggggagcgtccaccttttccagcattgctttccttggctcacagtgccttcctccattgtcaaagccagcagtggccgttgagtcttttgtacatcccatcactgtggctcagacatttctgccccctgcttccacttctaaggactcttgtgattatactaggcccaccaaaatcatccaggatacggtccccatctcaaggccttaattggatctgcaaagtcacttttgtcattaaggtcccaggtttgggcgattagggtgtggacatctttggggaacattattctgccaaccacagtagacatcatagaaagatctatttaaaccattgctgcgaggactgggctgggccaaaccctttagataaagaaagctctttatctaaagagttttagatggggcatggcttggcatggtctgatgggatagacayggcctgtcccctggggcccttggtctgatgggtgtatgggagtgtctgggctgcaataca

SEQ ID NO: 629310 - DNA, 568 bp, Homo sapiens
gtgagtgacaaggagaggtctcctttgagtggggtaagtcatgaaagacccctctgagggcgacctaccctgaagaatgggaaggaacaagctatgcagagaatctaggaaaagttaatccaggcagaagcagcagcgagcacaaaggtgctgagaccaaatactcaaacatcaggtggaaggcaagttctggccactctactcctacacctccccacactgtccttagactcattccccacctggtcgcagcttggacttctctcatctgcatccctgycccagcttcctccctgttcccccagcctgcagcccccctctctggtcccacactgcagcccacactgcagtgaaaatgcgtgaatctgatccctctccttactctgcctaaaacctgtcccactgtcttctggataaaaacaaagatctttgaggccaggtgcagtgagtggctcacacatgtaatcccaacactttgggagactgaagcagaaggatcagaggacaggtgttggagaccaggctaggcgatatagcaagaactcatctctacaaaaaacaaacaaac

SEQ ID NO: 629311 - DNA, 541 bp, Homo sapiens
aaagcttacaatccaaaaggggatgctgacagttgaccatattcttatggggctatttccatcccattaacctatttgtctatccttagactagtactattcagtcttttgtgtgtgtgtgtgtgtgtgtgtgtgtgtgtgtgtgtgtgtgtgtgtgtgcgtcttgctctgtcacmcaggctggagtgcagtagtgcagtctcggctcactgcaacttccaactcctgggttcaaacgattctcatacttcagcctcccaagtagctgggattataggcatgtgctaccacgcccagctaatttttgtatttttagtagagataggattacatcatgttggccaggctggtctcgaactcctggtctcaagtgatctgcttgtctcagcctcccaaagagctgagattataggtgtgagccactgtgcccagccccattcagtcttcataatggtagcttgagaataaattttaaaatcaggtagtatgtgtcctccaactttgtctccccctcaccaccaagattgcttttgctatttcc

SEQ ID NO: 629312 - DNA, 593 bp, Homo sapiens
aagcttcacatttttatttttattttttattctgagacaaggtctgattctattgcccagactggagtgcagtggcacaaacttggttcactgtaaccttctctgcctcctgggtggaagccatcctcccaactcagcctcctgagtagctgggactacaggtgtgctctactatgcccagctaatttttttttttttttttgagacagaatctcactctgtcgggtaggctggagtgcagtggcacgatcttggctcactgcaacctctgcctcccaggttcaagcagttctctgcctcagcctcccaagtagctgggattataggcacccgccaccacacccggctaattttkgtatttttagtagaggcaggatttcactatcttggccaggctggtcttaaactcctgacctcatgatccacccgcctcggcctcccaaagtgctgggattacaggcgtgagccaccgcgcccagcctaatttttgtatttttagtagagatgggtggtggtggcagtgtctcaccaggttgcccaggctggtctcgaactcctgagctcaagggatctgcccgccttggcctcccaaa

SEQ ID NO: 629313 - DNA, 475 bp, Homo sapiens
ctttttgtgcttcccttacgtcacttatcataataaaacccatttccatccatgttgctggaaaaggattccactctttttaatggctgaatagtgtatgtgtatatatgtgtatgggtatttgtgcaggtatgggtacctatgggtgtgggtgtaggtgtgtatccagaaaacaaatagtacatataaacacatacatgtacatgcatgcatgtgcacacacacaytcacacacacacaccatttttcttgtccaatcagccattgatgaacacttaggttgattccatatctgttctattgggaatagcattgtgataaacctgtgagtcaaatgtatccctttgagaaaataatttcttttcttttggatagataccctgtagtgagattgctgcatcatgtagtagttctagatttagtttttctgagaaatatctatactgctttccataatggttgcactaatttacat

SEQ ID NO: 629314 - DNA, 519 bp, Homo sapiens
atggttgcactaatttacattcccaccatgtctaagagtacccttttctctgcamcctcaccagcatctgggtgtgtgtgtgtctgtgtgagtgtgtgcatctgtcaataataaacattctgtggtgagataatatctcattgtggtttttatttacaatccctgataattagtgttgagcatttttcatatactattggtcttttgtaagtcttcttttgaaaaatattgttcatttttagtgggattgtttggttttctatagttgaattgttattcttgtatagaatacatattagtcccctttggatgagcactttgcaaatattttctcccattcaagtgatttgcacttcccttgtaataggtgatgttgagcagattttcatatacctattagccatttgtacatctttttttaggtaagattttatttattatgatgggtgtgcttgcctgttcctaagttcattccagtctggaacataggaagataatgctacctgcatagctgctaca

SEQ ID NO: 629315 - DNA, 619 bp, Homo sapiens
actagacaggtcccacacccatggagccttgctcgctgctaatgcagcagtctgagatcaacctgggatgttggagcttggcagggggaggggcatccactactactgaggcttgagtaggcagttctatgcccacagtstaaacaaagcaacagggaacttcaaactgggcggagcccaccacagctcagcaaggcctactgcctctctagattccacctctaggggcagggcatatctgaacaaaaggcaggagacagcttctgcagacttaaacctccctgcctaacagctctgaaaagagcagtggttctcacagcacagagttcaagctctgataatggacagactgcctcctcaagtgggtccatgaccccatgattcctgatggggagacacctcacagtaggggccgacagacacctcatacaggcaggtgtccctctgggacaaagcttccagagaaaggatcaggcagcaatatttgctgttctgcaacctccactggaaatacccaggcaaacctggtaatactccagggtctggagtggacctccagcaaactccaacagacctgcagatgaggggcctgactgttagaaggaaaactaacaaacag

SEQ ID NO: 629316 - DNA, 584 bp, Homo sapiens
caagcctctgtttgacaccatccaggatgagaaaaatgagtgagtaaatagcccrgttgcccctcagaggatctgtgtgctataggtctgtgctgaggaaggcaaaataccatttagggccactgtcctctcaaaaggcttagacttaggattttcccatgtaatcagtgccttaggtctaggtacagccacatgccttcccacagtgacctcagacaccctctgaggctctccagatcacacagaccagctctgcccagcttgtcaaaggaggcttcatagtgaagaagccaaaattaggtctcctcttccctccctgccctagtgtgatatgcacactgttgaaggtattttacaaatatgcagagatccaaacaccagattttcatccctgggaaaccctcaaacaagtgggtacctgtaagctgtctgagattgccagtgcttacaggcctgactactaggccactgaagaatttgtggaagagtatgcagatgcaggggtatccaatcttttggcttccctggtctacagtggaataagaattgtcttgggccacacataaaatacactaacactaata

SEQ ID NO: 629317 - DNA, 584 bp, Homo sapiens
caagcctctgtttgacaccatccaggatgagaaaaatgagtgagtaaatagcccggttgcccctcagaggatctgtgtgctataggtctgtgctgaggaaggcaaaataccatttagggccactgtcctctcaaaaggcttagacttaggattttcccatgtaatcagtgccttaggtctaggtacagccacatgccttcccacagtgacctcagacacccyctgaggctctccagatcacacagaccagctctgcccagcttgtcaaaggaggcttcatagtgaagaagccaaaattaggtctcctcttccctccctgccctagtgtgatatgcacactgttgaaggtattttacaaatatgcagagatccaaacaccagattttcatccctgggaaaccctcaaacaagtgggtacctgtaagctgtctgagattgccagtgcttacaggcctgactactaggccactgaagaatttgtggaagagtatgcagatgcaggggtatccaatcttttggcttccctggtctacagtggaataagaattgtcttgggccacacataaaatacactaacactaata

SEQ ID NO: 629318 - DNA, 584 bp, Homo sapiens
caagcctctgtttgacaccatccaggatgagaaaaatgagtgagtaaatagcccggttgcccctcagaggatctgtgtgctataggtctgtgctgaggaaggcaaaataccatttagggccactgtcctctcaaaaggcttagacttaggattttcccatgtaatcagtgccttaggtctaggtacagccacatgccttcccacagtgacctcagacaccctctgaggctctccagatcacacagaccagctctgcccagcttgtcaaaggaggcttcatagtgaagaagccaaaattaggtctcctcttccctccctgccctagtgtgatatgcacactgttgaaggtattttacaaatatgcagagatccaaacaccagattttcatccctgggraaccctcaaacaagtgggtacctgtaagctgtctgagattgccagtgcttacaggcctgactactaggccactgaagaatttgtggaagagtatgcagatgcaggggtatccaatcttttggcttccctggtctacagtggaataagaattgtcttgggccacacataaaatacactaacactaata

SEQ ID NO: 629319 - DNA, 584 bp, Homo sapiens
caagcctctgtttgacaccatccaggatgagaaaaatgagtgagtaaatagcccggttgcccctcagaggatctgtgtgctataggtctgtgctgaggaaggcaaaataccatttagggccactgtcctctcaaaaggcttagacttaggattttcccatgtaatcagtgccttaggtctaggtacagccacatgccttcccacagtgacctcagacaccctctgaggctctccagatcacacagaccagctctgcccagcttgtcaaaggaggcttcatagtgaagaagccaaaattaggtctcctcttccctccctgccctagtgtgatatgcacactgttgaaggtattttacaaatatgcagagatccaaacaccagattttcatccctgggaaaccctcaaacaagtgggtacctgtaagctgtctgagattgccagtgcttacaggcctgactactaggccactgaagaatttgtggaagagtmtgcagatgcaggggtatccaatcttttggcttccctggtctacagtggaataagaattgtcttgggccacacataaaatacactaacactaata

SEQ ID NO: 629320 - DNA, 582 bp, Homo sapiens
atgatttgtgaatattgtctcctacactgtgggttgtctgtttactcttctgattatttcttttgttgtgaagaatttttaaaatttaattagatcctatttatttatttttgtttttgttgcatttgcttttggggtctcagacataaattctttgcccagaccaatgtccagaaatgtttttgctagattttcttctagaatttttaggacttaaatttaagtctttgatccatcttgagttgatttttgtagatggcaagagatagggattcagttttattcttctatatgtggctatccagttttccctgcaccatttattgaacaggatgttctttcccctatttatgtttttgtatgctttgttgaagataggttkgttgtaagtatggggctctatttctgggttctctattctgttcctttggtctatgtgtctacttttatacaagtaccatgctgttttggttactatagccttgtggtataacttgaagttggataatgtgatgcctccaatttattccttttgcttagtattactttggctatgcaggctctttttttttttggttccat

SEQ ID NO: 629321 - DNA, 582 bp, Homo sapiens
atgatttgtgaatattgtctcctacactgtgggttgtctgtttactcttctgattatttcttttgttgtgaagaatttttaaaatttaattagatcctatttatttatttttgtttttgttgcatttgcttttggggtctcagacataaattctttgcccagaccaatgtccagaaatgtttttgctagattttcttctagaatttttaggacttaaatttaagtctttgatccatcttgagttgatttttgtagatggcaagagatagggattcagttttattcttctatatgtggctatccagttttccctgcaccatttattgaacaggatgttctttcccctatttatgtttttgtatgctttgttgaagataggtttgttgtaagtatggggctctatttctgggttctytattctgttcctttggtctatgtgtctacttttatacaagtaccatgctgttttggttactatagccttgtggtataacttgaagttggataatgtgatgcctccaatttattccttttgcttagtattactttggctatgcaggctctttttttttttggttccat

SEQ ID NO: 629322 - DNA, 582 bp, Homo sapiens
atgatttgtgaatattgtctcctacactgtgggttgtctgtttactcttctgattatttcttttgttgtgaagaatttttaaaatttaattagatcctatttatttatttttgtttttgttgcatttgcttttggggtctcagacataaattctttgcccagaccaatgtccagaaatgtttttgctagattttcttctagaatttttaggacttaaatttaagtctttgatccatcttgagttgatttttgtagatggcaagagatagggattcagttttattcttctatatgtggctatccagttttccctgcaccatttattgaacaggatgttctttcccctatttatgtttttgtatgctttgttgaagataggtttgttgtaagtatggggctctatttctgggttctctattctgttcctttggtctatgtgtctacttttatacaagtaccatgctgttttggttactatagccttgtggtataayttgaagttggataatgtgatgcctccaatttattccttttgcttagtattactttggctatgcaggctctttttttttttggttccat

SEQ ID NO: 629323 - DNA, 592 bp, Homo sapiens
gtgaaaaaattatataatttataaaattttaagctgttgcatattccttgcttcaacttagaatacacttacaaagaagaaagttaaataactttgaggtctaccatgaaaatttaatgtttttaatcattttgttgtatatttttatagctttctcccataatttcttgggttttcttcacagaaggcttaaatgagtagtcaagtatatataygtttatttggaatttactttcctattaataacatgtttttcttttttgaattttggtagccaaggctcctttgaaagcatggtttatttgttccatttaacttgttctcagctatactgaagtatgattgacaaataaaacttgcatatatttgagatgtacagtgtgatgatacatgtatgtatacaatgtgaaatgattgtcataatcataatcaataattggtatattggtttaggaaatgtgatggttaatattgagtgtcaacttgattggattgaaggatgcaaagtatagttcctgggtgtgtctgtgagggtgttgccaaaggagattaacatttgagtcagtggactgggagaggcagacccaccctc

SEQ ID NO: 629324 - DNA, 592 bp, Homo sapiens
gtgaaaaaattatataatttataaaattttaagctgttgcatattccttgcttcaacttagaatacacttacaaagaagaaagttaaataactttgaggtctaccatgaaaatttaatgtttttaatcattttgttgtatatttttatagctttctcccataatttcttgggttttcttcacagaaggcttaaatgagtagtcaagtatatatatgtttatttggaatttactttcctattaataacatgtttttcttttttgaattttggtagccaaggctcctttgaaagcatggtttatttgttccatttaacttgttctcagctatactgaagtatgattgacaaataaaacttrcatatatttgagatgtacagtgtgatgatacatgtatgtatacaatgtgaaatgattgtcataatcataatcaataattggtatattggtttaggaaatgtgatggttaatattgagtgtcaacttgattggattgaaggatgcaaagtatagttcctgggtgtgtctgtgagggtgttgccaaaggagattaacatttgagtcagtggactgggagaggcagacccaccctc

SEQ ID NO: 629325 - DNA, 592 bp, Homo sapiens
gtgaaaaaattatataatttataaaattttaagctgttgcatattccttgcttcaacttagaatacacttacaaagaagaaagttaaataactttgaggtctaccatgaaaatttaatgtttttaatcattttgttgtatatttttatagctttctcccataatttcttgggttttcttcacagaaggcttaaatgagtagtcaagtatatatatgtttatttggaatttactttcctattaataacatgtttttcttttttgaattttggtagccaaggctcctttgaaagcatggtttatttgttccatttaacttgttctcagctatactgaagtatgattgacaaataaaacttgmatatatttgagatgtacagtgtgatgatacatgtatgtatacaatgtgaaatgattgtcataatcataatcaataattggtatattggtttaggaaatgtgatggttaatattgagtgtcaacttgattggattgaaggatgcaaagtatagttcctgggtgtgtctgtgagggtgttgccaaaggagattaacatttgagtcagtggactgggagaggcagacccaccctc

SEQ ID NO: 629326 - DNA, 509 bp, Homo sapiens
tttatatacacatatatactattatttctcttgctttagagaaccctgactaatacaggatataaagttgaattgttagtcatttatttctgattagttggctaatgctatttattccataattaggtgtttcctctaagaatgtacaatrctgaaattgttacacattaaatgttatacatactaaagtctacttttgaatttctttgttttgtaaatgcatctgctaataatgttatgaatattacaacttatgataaaattctgtgcatgctaccccacttacctgacagctacatttttcactccctgatcttcttttttctgaaccaaatgtctactattaattcctagataaatttgaatttattttaaagtttttgtaaaagtagcagatttttcattgtaattatcccaccagttactctatcaaataattgaagaagacacattgtgtttaatagtactcaatcttcctatccagaaacttgctagggacctataactac

SEQ ID NO: 629327 - DNA, 612 bp, Homo sapiens
tgatgagaaagttatataaagcttgaacagccttgaaaatatttttagaagcattatgtgatttttaggcagttgtgagtgagacttaaagcaatgtgaaaaacatggaaactggaggaaaggacttcttgttatgaatggcagatgtttagcaatattcttccatatggtatgtggaacgcagaaaacatgcctaatgaactgggtgttgttggggaatttctgggtaaagcactaaaaatacagcctgatttcataytgctgcttagagtaaaatgcaagcaaagagagaaaagaaggaaatgtcaaacatgaataagttgggagttgaatgttaaaaaaaaaaccattgttaaacggaactggagttcattatgctaagtgaaataagcctcagcaaggtaagcatcacatgttcccacttatctgtgagatctaaaaatcaaaacaattgaactcatggagatagagagcagaaggaaggttaccagaggctggggaatatagtgggaggactggggttgttgggaggtaggggtagttaatgagtacaaaaaatggaatgaatgaataagacctagtatttgatagcccaacagagtgactatagtc

SEQ ID NO: 629328 - DNA, 612 bp, Homo sapiens
tgatgagaaagttatataaagcttgaacagccttgaaaatatttttagaagcattatgtgatttttaggcagttgtgagtgagacttaaagcaatgtgaaaaacatggaaactggaggaaaggacttcttgttatgaatggcagatgtttagcaatattcttccatatggtatgtggaacgcagaaaacatgcctaatgaactgggtgttgttggggaatttctgggtaaagcactaaaaatacagcctgatttcatattgctgcttagagtaaaatgcaagcaaagagagaaaagaaggaaatgtcaaacatgaataagttgggagttgaatgttaaaaaaaaaaccattgttaaacggaactggagttcattatgctaagtgaaataagcctcagcaaggtaagcatcacatgttcccacttatctgtgagatctaaaaatcaaaacaattgaactcatggagatagagagcagaaggaaggttaccagaggctggggaatatagtgggaggactggggttgtkgggaggtaggggtagttaatgagtacaaaaaatggaatgaatgaataagacctagtatttgatagcccaacagagtgactatagtc

SEQ ID NO: 629329 - DNA, 509 bp, Homo sapiens
gacgtatagctgaagacatagttttctcagcctgattcttatcagtaatgtttgaagatccaatggtctgttttcattgcctgctctctctgtccatttctgtccaaactggtagtgtttctcctgatataattctattaaaaatttcctgggtctcctttgaatctttttggagggtctgctcattaaataaaagacatctaaaaatcttcccaagtaagcccatctcttcattatgcttctatcaagaaacaatgcccttaagcttcttaaaagtgatgtttttattgaaagaatctgtgagtcatgacatcgaaatatttagagaaccttttgaactgagtaataatctggggcatcatgtaagacagctttgatgttttaacaaaggttttttttaaatttgtgtgggtacatggtaggtgtatatatttatggagtacataagatgttttgrtacaggcatgaaatgtgttataattacatcatggagaatgacgtattcatcc

SEQ ID NO: 629330 - DNA, 623 bp, Homo sapiens
tttttttaaggtctgtcagaaggtaatccttggataatgcaagcctgataacatgttctgagccctaaagaacattccttaagaactcagattcctcagaaacacagtattatcattcctgaactactgtgataatttgtacacttctgtttagcttgaccctgaaggcctgcagtatctcagttgttgtactcagtattggatttaaaagaaattcatcaatgtattagtaaacacagtaaggctctcccatcttacacatctggtaatttaagactagcctctgaagaagatgcacagtgagggaaggtagatatagacatagtgataattttaccttctcttcccccttttctttctcatatccttaaaagctttctctagagcctcttttttaggaaacagatggtgcaaagttagtctgtttccatgtgtctttaagaaaattacttaattggccttatgcccacctaccttgtcatggtaacttttctgtgattaactcatttttttttctggtgactaactcattattttccccaatgtcaaaagcattkggtggtcaaaagttttaggaatgaactttgacttttaaattaaatgtctgctttcaaaagagatct

SEQ ID NO: 629331 - DNA, 568 bp, Homo sapiens
tttgtccctcagtggctactccattctttaaaaaatctacccagtctctgcctcctgcttcatacttayggatctcttttctcagtaaactcacccaacttgcaccctcccactgcagaacctcatcagtgtggggacccatttcctccaggctcacagtgggatcgtcccttctgctttcttgggacctgcttgcatcagttatcactgctgcaccttcagccttcccctgagttcctttccctcagcaggtcaagctctcatttcatcagaagaaaatctcccgtgaccttgaacttcctccacttatcctcaacctctctccctcacatctcagccaaggatctcaaaaccacaagctgcatgcaccctgtctccctttcttcctctcattctctccctcacttagggtacttgctttttctgtggcctctgaaacttctctcctcagggaaggcctcttaattaccaaattttgcatttaccttcattgtatctgaactatgtgcaaaatttggcactgtaaggctatgactcgcctggtttttccctccctgggcttttctct

SEQ ID NO: 629332 - DNA, 530 bp, Homo sapiens
ggatcactcatctgccctgggcttgcaacctagtcctctgtgttaacaatattaccaggtttcagagccgggagctctcggtacaaattctagccttgctatttactgactgtgattctgggcaaattatgaaagttctgtaatcagtttcctcatctgtaaaatgggaaaactatgacctaatttataacatctttgcagagattaaagtgaaaatctcggcacagattagggattcagtaagtgttccttctttccaagacctatgactactggtaagaccttgagttcactagccatatgccaaattaattgggctatgaatggccctgaggctatgagccatgactatagcaaaagaacagggtaaaagaggtcagatcttttttttttttggaaaaaaagtcttgctgtgtcacccaggctggagtacagtggcttgatcttggctcactgcaacctcctcttcccgggttcaagcrattttcctgcctcaccctcccgagtagctgggactacaagggtgtgcc

SEQ ID NO: 629333 - DNA, 530 bp, Homo sapiens
ggatcactcatctgccctgggcttgcaacctagtcctctgtgttaacaatattaccaggtttcagagccgggagctctcggtacaaattctagccttgctatttactgactgtgattctgggcaaattatgaaagttctgtaatcagtttcctcatctgtaaaatgggaaaactatgacctaatttataacatctttgcagagattaaagtgaaaatctcggcacagattagggattcagtaagtgttccttctttccaagacctatgactactggtaagaccttgagttcactagccatatgccaaattaattgggctatgaatggccctgaggctatgagccatgactatagcaaaagaacagggtaaaagaggtcagatcttttttttttttggaaaaaaagtcttgctgtgtcacccaggctggagtacagtggcttgatcttggctcactgcaacctcctcttcccgggttcaagcaattttcctgyctcaccctcccgagtagctgggactacaagggtgtgcc

SEQ ID NO: 629334 - DNA, 665 bp, Homo sapiens
ctgacaataatttaaagcattttagggctcttaacgttcatctcactcgctctagagtgaaggagagagcagagagtacagagcaggtcctaggtcctcccccagatatagaaaaaccgcagttggagagactgacagaagtgctgsagaggaagggaggcagcaggacgtggaaaatctgggattcaagaacagcttctgctattaattagctgtgtgtcatttcaggcaaatcacaaaatctccaggcccccaaatccccatttgcgaaacgaggtgacctgcctcagttttccttcatccagcgataaaattctactaaaaaatttccaaccccagagcaagcatcaggactgtgcctgaagggatccggctgcatctcagtaatattccactcttacaggcttaaaaataaaaaagaaaagaaaagaaaacaagaacagtttcaccagcgtcaattgagaacagctgcttcaacaggccctgctttatgtgggcaggtggggacagggagttggcccagaaaacaggaccctcatttcctggagcccccagggcagctccccaacaccgtacacaacctgcatcatttacaggagccaaaggagttttagaaatcaacttcatagagttgctgtatcattgtgttagttttgccatcctaa

SEQ ID NO: 629335 - DNA, 574 bp, Homo sapiens
aatgggagccactccagggttcacaaccaagcagggagatgaatttgtgttcagaagatctttaggggggcacaggaggaggaaggaaccccagttaagaggtcagttcagtaacccaggcaagaggtgtggaggcgtagacaggggtggcatcagcggagcgggatacgcgggccttagcatttggctgtgctttaacgatagacccagcgagaattgctagcagattagacacagcaagaggaaaagaaaggagtcaggatgattccaaggtttttggtgcctgcagcaggaagtatggagttgccttttattgaaacrggaaggactgagggaggttccttgactgcccgttagacatccaagcacctgctggaattccgtgtggggttcagggatgagacccaactgggaatgtaagtgttagaattgtaagcatgagttagacccatggattggattaaacccctagatgtgggtatttgcagactgggaagatggccaagggtgaaacccggggcatcccaggatttagaggtcagggagaagagaagagacccctaaagaagaccca

SEQ ID NO: 629336 - DNA, 469 bp, Homo sapiens
aagtagcatcttgagtaaaatttttctgtctagttcagaggactggctcttccaggcttcttagaagcacccatttatttatttatttaagttttttattttttggaggcaaggtcttactctgtcacccaggctggagtgcagtggctcaatcgtagctcactgcagcctcaacctcttgggctcaagcgatcctcccacctcagcctcccaagtagttgggactayaggtgtgcaccaccacacccagctaatttctaaaaacttcttagagacagggtcttgctgtgttgaccaggctggtctggaactcctggcctccagtagtcctcctgcctcagagtccctgagtgctgaaattacaggtgtgagccaccatgcccagccagaagcatccattgaaatataggtgacatactagtaagagatacttgttatcccaccgtcaaaactgatccctaaggaattt

SEQ ID NO: 629337 - DNA, 539 bp, Homo sapiens
ttccagctttttgattgaaagggattcatctccaaaattgccttcgatttcacattgacaaaatctgttattaaacaatcacgctggggagattgtatcttgaagcctgaatatgtagactcagggctacgggatgcaaggagacaagggatcaagaaggaagcctgccccgcgtgatggatgcagccaccgctggccgcagggaaaggtgcagtgtgctcaggccccagcataaacagaatcctgacagcccgtccaggctcctctcgcgtgtgcttgwcctcaatgtcttcttttgttctggaagtctctagcacatattcctcaagtcttaacgcagagatttcaattttttattttttttttagtttctggagtgggcaagttacaaataacttaagccgtttccccttcggtttggaatctgagtttaatctatttatttcctgagacagcgtctctctctgtcgcccaggctggactgtaatggtgcgatcacaggacactgcagtctccacctcccaggttcaggtgatcct

SEQ ID NO: 629338 - DNA, 455 bp, Homo sapiens
attaaaaacttgaatggtaaaagcaacctttacaatttttkgaaaaaaaaaaaaaaacaattatcctgtgaaaggtgttctaatggtataaaaagattaataaacttgacaacattaaaattaactcctttatgacacctgagaatgaaaaatcaagaagaaattcagaatagatgtttaacacatatgatgaataaacaatttgtgtctacaatatttaaaatactcctagaatcaataataaaaagaaaaataatccagtataaaaatgaacaaaagacataaacaagcattttagagactgaagtgtgaaaaagggttcaatttcattagtaattaggaaactactgtttaaaccctcagtaagatgctatttcacacccacaagattggtaaacattaaaatatggataacaccaagctttgataaagacatagaataatgagaactctca

SEQ ID NO: 629339 - DNA, 582 bp, Homo sapiens
cacactcattttttttttcccaaaatattttcaatctgcagttggttgaacccatagatacagaactcacagatactaaagcctgtttaccaatattagacttacctatccttggcattgggttttatagttcttcttgccaagaaattaccttgagtgttgggcatattaaataaactaaaattgtccttacttgttttatcctttctattttgggggcggcatggggaagagagttgtaatacaaatcttggctatatcaaagcagtctttaatgaaaaactatkgtaatatttctggaataacaacaaaaacttcaatacaatatgttacagtaaactatgtaataaaccaaaattaataccatttcatagcatgaaaacatataccattccaaacgtggctgatctattcaattgtaattataacctacatttgaatatagtttataaaacaatttttttaatatatttgttcttaccataaccttgttaggaagtcaggaaggattctgacaaatcttcaatttgtttattggagaagagggagaaagtgagttgttgcttaaggcaggaatgaagt

SEQ ID NO: 629340 - DNA, 582 bp, Homo sapiens
cacactcattttttttttcccaaaatattttcaatctgcagttggttgaacccatagatacagaactcacagatactaaagcctgtttaccaatattagacttacctatccttggcattgggttttatagttcttcttgccaagaaattaccttgagtgttgggcatattaaataaactaaaattgtccttacttgttttatcctttctattttgggggcggcatggggaagagagttgtaatacaaatcttggctatatcaaagcagtctttaatgaaaaactatggtaatatttctkgaataacaacaaaaacttcaatacaatatgttacagtaaactatgtaataaaccaaaattaataccatttcatagcatgaaaacatataccattccaaacgtggctgatctattcaattgtaattataacctacatttgaatatagtttataaaacaatttttttaatatatttgttcttaccataaccttgttaggaagtcaggaaggattctgacaaatcttcaatttgtttattggagaagagggagaaagtgagttgttgcttaaggcaggaatgaagt

SEQ ID NO: 629341 - DNA, 558 bp, Homo sapiens
gtttatgtatctaggaatttacccatttattgtagattatctaatttgttggcatataattggtcataatagtctcctgatttttttgtgatgtaagttgtgatgtctccttttgtttatgattaacctttttttttctgttagtctggataaagatttgtgaatcttatttaacttttcaaaagatcaaatttcaggggttttttttcattgttgtcatagtttctatttaatttaactgccctgatctttatttattccttcattctattaactttgggcttagtttattctttttatagttccttgaagygtaacattaagttgtttaagatctttcttctttttcactgtaaacgttttgaagcatctaacaagttttggtattttgagtttccatttttgctggtctcaacatattttttaatttccactttaatttcctctttaatccatctgttgttcagaagcatgctgtttaattttcatgtatttgtgagttttctaaaagttctcctgttattaatttctactttcatgtcattgtgatctggaatg

SEQ ID NO: 629342 - DNA, 557 bp, Homo sapiens
tttatgtatctaggaatttacccatttattgtagattatctaatttgttggcatataattggtcataatagtctcctgatttttttgtgatgtaagttgtgatgtctccttttgtttatgattaacctttttttttctgttagtctggataaagatttgtgaatcttatttaacttttcaaaagatcaaatttcaggggttttttttcattgttgtcatagtttctatttaatttaactgccctgatctttatttattccttcattctattaactttgggcttagtttattctttttatagttccttgaagtgtaacattaagttgtttaagatctttcttctttttcactgtaaacgttttgaagcatctaacaagttttggtattttgagtttccatttttgctggtctcaacatattttttaatttccaytttaatttcctctttaatccatctgttgttcagaagcatgctgtttaattttcatgtatttgtgagttttctaaaagttctcctgttattaatttctactttcatgtcattgtgatctggaatg

SEQ ID NO: 629343 - DNA, 543 bp, Homo sapiens
gcactccagcctaggtgacagactgagaccctgtcaaaaaaagaaaaagataagaggcagagaatgaccatggggaacaggagcattgcagagaaactaagggaacagttgtaattgttaataggatggtcacaggatgcctcatcgagcaagtggctttaaggtgaagacttaaataaggtaataaggttttctataggtataatgagaaaacagaatgcaagcagaagaaaaaggacagcaaagtgcctaaagcagagaaggcaaagagattgaagtcagggacatgactggagggatgtcagagaggtgactggattctaagtcatggaaaacttagagggctgttataaggcttttatatatctttctctgaatgagattgggagtgacagcaggagttgcacaacaaataacaaaatgtggcttttgttttaaaaagagcattctggttttacatagagaaaagactaaagacattctccatccagaaaagactgccgagaactstgaagcatctaaaagtttacaggggcacagatg

SEQ ID NO: 629344 - DNA, 222 bp, Homo sapiens
gcgacattaatctgtctttctgtatttcctctgtaggacttgtggagcaaagatgactgacacaaacacataactcattctgcctgktgaaggcatataaaatcctgcctttacctggaagcttgtgtcatctgccagcatttctgcatctgtgcccctgtaaacttttagatgcttcacagttctcggcagtcttttctgggtggagaatgtctttagtct

SEQ ID NO: 629345 - DNA, 222 bp, Homo sapiens
gcgacattaatctgtctttctgtatttcctctgtaggacttgtggagcaaagatgactgacacaaacacataamtcattctgcctggtgaaggcatataaaatcctgcctttacctggaagcttgtgtcatctgccagcatttctgcatctgtgcccctgtaaacttttagatgcttcacagttctcggcagtcttttctgggtggagaatgtctttagtct

SEQ ID NO: 629346 - DNA, 222 bp, Homo sapiens
gcgacattaatctgtctttctgtatttcctctgtaggacttgtggagcaaagatgactgacacaaacayataactcattctgcctggtgaaggcatataaaatcctgcctttacctggaagcttgtgtcatctgccagcatttctgcatctgtgcccctgtaaacttttagatgcttcacagttctcggcagtcttttctgggtggagaatgtctttagtct

SEQ ID NO: 629347 - DNA, 485 bp, Homo sapiens
cctgtgaatttcccaaagccgaattttatgactgctgcgacattactgcttactaccacttcctttatgacccagtcagctgttagtggcctctactgttagtggcctctaagtggatccaagccagttaattcccagatcaaattcattcctagacccagtccattttctgttgcaactccaaaaccagtttggatcacaaatttgcwcaaggaaactcagagagctcaaaacacaaatgtgtgaagctccaaaatgcaagagggagcttacctttgatcctcagctgctctgagagatcaatggacacaagtggatcctgcaggtaccttctgtgtttactcagtgctcctggggatactagaagctccacttcagattctgcttctgacacaatctgataaaataaaaacttcagctgacttaaatttaaaggagtttagttgagcaatgaacaattcatcgatccagcagccttcagaatc

SEQ ID NO: 629348 - DNA, 485 bp, Homo sapiens
cctgtgaatttcccaaagccgaattttatgactgctgcgacattactgcttactaccacttcctttatgacccagtcagctgttagtggcctctactgttagtggcctctaagtggatccaagccagttaattcccagatcaaattcattcctagacccagtccattttctgttgcaactccaaaaccagtttggatcacaaatttgctcaaggaaactcagagagctcaaaacacaaatgtgtgaagctccaaaatgcaagagggagcttacctttgatcctcagctgctctgagagatcartggacacaagtggatcctgcaggtaccttctgtgtttactcagtgctcctggggatactagaagctccacttcagattctgcttctgacacaatctgataaaataaaaacttcagctgacttaaatttaaaggagtttagttgagcaatgaacaattcatcgatccagcagccttcagaatc

SEQ ID NO: 629349 - DNA, 485 bp, Homo sapiens
cctgtgaatttcccaaagccgaattttatgactgctgcgacattactgcttactaccacttcctttatgacccagtcagctgttagtggcctctactgttagtggcctctaagtggatccaagccagttaattcccagatcaaattcattcctagacccagtccattttctgttgcaactccaaaaccagtttggatcacaaatttgctcaaggaaactcagagagctcaaaacacaaatgtgtgaagctccaaaatgcaagagggagcttacctttgatcctcagctgctctgagagatcaatggacacaagtggatccygcaggtaccttctgtgtttactcagtgctcctggggatactagaagctccacttcagattctgcttctgacacaatctgataaaataaaaacttcagctgacttaaatttaaaggagtttagttgagcaatgaacaattcatcgatccagcagccttcagaatc

SEQ ID NO: 629350 - DNA, 485 bp, Homo sapiens
cctgtgaatttcccaaagccgaattttatgactgctgcgacattactgcttactaccacttcctttatgacccagtcagctgttagtggcctctactgttagtggcctctaagtggatccaagccagttaattcccagatcaaattcattcctagacccagtccattttctgttgcaactccaaaaccagtttggatcacaaatttgctcaaggaaactcagagagctcaaaacacaaatgtgtgaagctccaaaatgcaagagggagcttacctttgatcctcagctgctctgagagatcaatggacacaagtggatcctgcaggtaccttctgtgtttactcagtgctcctggggatactagaagctccacttcagattctgcttctgacacaatctgataaaataaaaacttcagctgacttaaatttaaaggagwttagttgagcaatgaacaattcatcgatccagcagccttcagaatc

SEQ ID NO: 629351 - DNA, 615 bp, Homo sapiens
catatttaatttgctttaacactttgtagcaaaattcattgaaaggattgtctacaaatgctatttccaatcctcctcctaatcttctctaactgggtttttgctgctaccattttactgaaacattttttaaagccatcagtgatctctatgttattaaatccagtgatcagttattgcttctgttcttaatagatcattctttaagactttcctcacttggtttccaagaaaacacactctcttcgttttcctttaacttcactggttatttctcagtctcctcwgtggacccttcttttctccccaacttcttaattttgcatcactttagagttcaatcattggccttcatttgtatccacacttactccctggtaatcacatctggtcccatggctttaaaatcaatctgcttgccaatgactaatacatttatattagtattaaaactcttttccaaactcaagacatatgtatctaatggcctgtttcatatctcttggattccacccaatagccatctcaaactcattatgtctcagatcaaactccttatccaccctctccacccagcctacttcacctgtagtctttctcaattaagttgatggc

SEQ ID NO: 629352 - DNA, 558 bp, Homo sapiens
tcacaatgctacttcttccctaaaactccaccccttagttctctgcatctgcttcttttcctcaatcctgaagctagtattccaatatcacatcacttatgcatctgcttggtttctgttacctgaatgcttytgtatttcatctgtgaattttaaggaagggtacctatttcccagagggtcttcagatttcaattcactctaacactggctggacatgtgtttagtatctctgactctgtcagtaagtctctgtctatatctgtccttatacatacactgtatagaacgcacagccactttaagtcccctgatgtgccacactctgatccaccagagactcaggcttaaaagtatctgcacgttagaaaacaaaacaatgtagctacggttaatttctactaagtagaacacagatctttcttttatagcatctataaaaagtatcaatataaactattgctaaagcattcgaaggctaaaaagcaacttcataacataaaaattttatcaatgtggtcactagacttccccctaaatcccatattaatcctatgg

SEQ ID NO: 629353 - DNA, 625 bp, Homo sapiens
ctcactggttttaaagaacgtgttgtttcatttccacatatttgttaattttccagttttcttcctatcaatttctagtttcattccattgtggtcaaaaatacagttattatttcaaccttttaaaatatattgagacttgttttatggtctaacatacagtctatattggagaatgttccatgtgcacttgagaagaattcttcttgttgagttgatccttttatcattatataatgtatttctttgtcttttgtaacaatttttaacctgaagtctatattgtctgatattagtatagttactccagctctcttgtttactgtttgcatgaaatatctttccatcctttcactatcaacctatttctgtctttggatctaaggtgtgtctcagcatatatctcaatcatttcttttttaartccattctcccaatctcctcctcttaattgcagagtttaatcaatttacatttaatgtaattgctgataaagaaggacttctgctattttctaggtcttatacaggcaaccctttcttttttgtcctgtgctttattgcacattgctgatattgcattttttttacaaactaaagattcatggcaaccctgtatcaagcaa

SEQ ID NO: 629354 - DNA, 583 bp, Homo sapiens
acaaaactattttaattattaactggtcgctattatggcttgtgcctgtaatcccagctactctggaggctgaggtgggatgatcacttgaggccaggagttcaataccagcctgggcaatataaggagacccttgtctctacaaaagtaaaaaaattagccaggtatgttggtgcacacctatagtcccagctactcargaggctgaggtgggaggattgcttgagcccaggagtttggggctgcagagagctatgattgcatcactaaactctaacctgggtgacagggcaagactttgtctccaaaaaaaataaaatatacaaaattacctccaggctgtgtatataaggtatatatggtacataaatgggctgggcatggtggctcatgcctatgatcccaatactttgggaggccgaggtaggaggattgcttgaggccaggggttcgagaccagcttggacaacatcaagaccttctctctataaaataatttaaaacaaaaaacataaatcaatttcgtatttagacttggtttccatccttaagataattaattatgtatatacaaatactaaaa

SEQ ID NO: 629355 - DNA, 583 bp, Homo sapiens
acaaaactattttaattattaactggtcgctattatggcttgtgcctgtaatcccagctactctggaggctgaggtgggatgatcacttgaggccaggagttcaataccagcctgggcaatataaggagacccttgtctctacaaaagtaaaaaaattagccaggtatgttggtgcacacctatagtcccagctactcaggargctgaggtgggaggattgcttgagcccaggagtttggggctgcagagagctatgattgcatcactaaactctaacctgggtgacagggcaagactttgtctccaaaaaaaataaaatatacaaaattacctccaggctgtgtatataaggtatatatggtacataaatgggctgggcatggtggctcatgcctatgatcccaatactttgggaggccgaggtaggaggattgcttgaggccaggggttcgagaccagcttggacaacatcaagaccttctctctataaaataatttaaaacaaaaaacataaatcaatttcgtatttagacttggtttccatccttaagataattaattatgtatatacaaatactaaaa

SEQ ID NO: 629356 - DNA, 583 bp, Homo sapiens
acaaaactattttaattattaactggtcgctattatggcttgtgcctgtaatcccagctactctggaggctgaggtgggatgatcacttgaggccaggagttcaataccagcctgggcaatataaggagacccttgtctctacaaaagtaaaaaaattagccaggtatgttggtgcacacctatagtcccagctactcaggaggctgaggtgggaggattgcttgagcccaggagtttggggctgcagagagctatgattgcatcactaaactctaacctgggtgacagggcaagactttgtctccaaaaaaaataaaatatacaaaattacctccaggctgtgtatataaggtatatatggtacataaatgggctgggcatggtggctcatgcctatgatcccaatactttgggaggccgaggtaggaggattgcttgaggccaggggttcgagaccagcttggacaacatcaagaccttctctctataaaataatttaaaacaaaaaacataaatcaatttcrtatttagacttggtttccatccttaagataattaattatgtatatacaaatactaaaa

SEQ ID NO: 629357 - DNA, 587 bp, Homo sapiens
ggatcagatgggagggatggggctaccttggggggtagggggaggcatgagctccctgtcccaggagacatgcacgctggagctaaatgggtgtcatggtggctgcagaggagacaccagtgggatatggccctgtcacctgcctcactgggaccctgtggcggctccactctcctagcctttcagccaagccaatgtgggtctgcagggggtggccagtgtagcgcaaagcccagtccaccctggggacttttcaaactccacctccccaccctaagtgacccctcacacactgcccagccaygtgagaagttgtagctctgtgttcaccttgaacattggggtccaggcccttgaggagcccctggggctgcagcagaaacccaccactccaccatctctgcctgggcccaagccaccatcatctcttgtccagattattccagcagccttctgactggcctcacagcctccacctggccccttgcaatctatccacatggagcagccagagcagacctgtgaatgcttaagtcagaccaggccactattccactcagaaccttccaacagcacctgccccatct

SEQ ID NO: 629358 - DNA, 300 bp, Homo sapiens
gcctttgtcctctgacattctgggctctgttaatctaaatgacttcatgcctaccccctctaggggctgaggtggagtgagggagtaagcagactgcagggatattgcttcagtgatacaacaaggacggctagccagagccacaaaccrtcctctccttccctcacttcctcaccctaccccaccacactgcacccaggctgaaggctcctctacctgcagaagaggtggctttgacatgtacctacctgggcatacagattctgctgggggtaggcacttctgattggatacatggcc

SEQ ID NO: 629359 - DNA, 505 bp, Homo sapiens
tggggtgagggggtgagtgggaggcacttgggccagtgctagaagagaaggaggcctgttctccataggaccctggtgttctggtcctataccatgtctagggcttaccttttctctaggggtgggaagcactctgaacttctatcctgaccctctctctccatctacctatgaagattggaggtcagtatccaaagctcaggactacacatttttaaccagtttacatttttggatgaaagttgaaataaaatggtgtggaatgttttgcaaaaaaaaaataataataawaagtaaaataatgacataattctcaaactgggtacaggaactcctatggttactcaacactatgctgcaggttacaaaaaaaaaagtactgaataaataggcgcaccttcctggggtgttaattttaccagacggtaaataatttgaagtgtttgttttatagaaaacaagtatgactacataatggtgccttaaggcaaaatccttatgaatt

SEQ ID NO: 629360 - DNA, 599 bp, Homo sapiens
cacggggaggagagcagaggcaaagccctctctgcatcaaagctgcccctcactggaagcggcctgtgaagtggggctcagtgagtctgagtgtctgtatgcctggtgggctttgggttcagactgataagggttaaaatcacaactgactctgaccccttgccgggtgatattaacaagtcattggatcccaactctgagccttagtttmctgctctgtaaaatgggggcactaaggcgttattatgagggccaaagagagaatgcttgtggagcgctcagccctgggacgctggctccagacagctctcagaaatgtggccacttagctgtatgctttgtgagattgtcattctcagagtctagaatcctgtggtttcaagatgaaggattctgggttcttttccaagagtccagacctcttttttatttgtgattttgagattgtgacttcttggttctgacatcctgtgatcctgagactctggggtctggagaggtgcagcaggtcgggggccagtgggaaggcagtgggggcagtgtgatggaggggccagccgagggagcaagcacaaggttggtgtctgtttcctgtttat

SEQ ID NO: 629361 - DNA, 561 bp, Homo sapiens
tgggtgggagtggacatttagtttgtgtattagcctgttctcacgctgctaataaagacataaatgaaactgggtaatttatgaaggaaagaggtttaattgactctcagttccacgtggctgggaagtccccamaatcatggcagaagatgaaaggcaactcttatatggtggcagtcaagaaagaatgagagccaagtgaaaggggaaaccccttataaaaccatcagatcttgtgacacttattcactaccatgagaacagtataggggaaactgcccccatgattcagttatctcccactgggtccctcccacagcatgtgggaattatgggaactacaattcaagatgaggtttgggtggggacacagccaaaccatgtcagtttgtttcctctctcgggtattagtggcaataattcatctattttaagatcctgtgtctagagccctgctgcttaaacgctggtcctgggaccagcgccagtggcaccacataggagcttgatagaaatgcagaaccagaagccacttcatcttaacgagatgcgtagctgatc

SEQ ID NO: 629362 - DNA, 594 bp, Homo sapiens
tattcactaccatgagaacagtataggggaaactgcccccatgattcagttatctcccactgggtccctcccacagcatgtgggaattatgggaactacaattcaagatgaggtttgggtggggacacagccaaaccatgtcagtttgtttcctctctcgggtattagtggcaataattcatctattttaagatcctgtgtctagagccctgctgcttaaacgctggtcctgggaccagygccagtggcaccacataggagcttgatagaaatgcagaaccagaagccacttcatcttaacgagatgcgtagctgatctgacaacacattgaagctggagaaacactggtctgggatagggatcttaatatgtagattattttctttgtatgtactttcatattatttgactttttcccaaaagggcagagaaaacaatcattgggtttctggattcctagtgattcatgattaggcttcagtggttctatgaactctaaaattagaataaaaaatttatgtttgtatttctatggatgaggccagaaaatcattggattttcaaaatctttcccgatctcaaaaggagtagga

SEQ ID NO: 629363 - DNA, 496 bp, Homo sapiens
attggaaatagtttaatttcagggactggtttattatcttcagctatataatttttatatttccggaggacaataatgaattacagcaaaaaaaaatkgttcttgaaatactgaattcagcgataagctaccgcaatttattataagcattacatattaaacaaaatcattatttaactaatcatttggttataatgtagttatttgtaacaataaatactttgatttgcccagcatatatcatgaaaagaactctattttctctattacatcaactaatccccaaagtttataaaataaggaggaacaaacatgacttatctatccttttgatggagaaactaaggcacagaaagtttttcttgtagacgtcttttctagggtcacataataaccaataaataaagtgagtatcaaaattgcaattcccagtccaattatattttccactggactagtgtatacattcttttttgtaaactttatatttatgatt

SEQ ID NO: 629364 - DNA, 494 bp, Homo sapiens
ttcaataaacgaatggagtaggcatatggtgtactatgccctgttctaagtgcttttcatcaactatctcatgtaattcttacaaccctatgagataggtactatttgtctcattttactggcaaaagagcttgaacacccagggagattaaacttttactcaaggtcataaaactcagagaatatactttcaggactttttattatgaacaatttattagagaaaaaatgagagaatggtataatgaacttctacatacctatcacatagttaattgttcatttttttgccaatttatgtaacagtgaaacagtaaaagaactaacataaagaactctatttttgttcacggggyctttatccattcatgcatggaggggaggttaattttagagcagtgagataatatgcaaaaaaaatgtagttttaaaaactagctctgggattaaagggaaagtatgtaaacaactatggattgttaaaaatttacagg

SEQ ID NO: 629365 - DNA, 583 bp, Homo sapiens
gcctaaacaattttgaagaagaataaagtgagatgaatcaatctacccaatttacaataagacattacatagcttattaatacagcttattaatcaacattgtgcagtagtggtgaagggacagacatataggtcaatggaacagactagagaaaccagaaatagatctacacaaatatgccagactgatttttttacaaagactcaaaagcaattcaaaggaggaagaaaagccttttcaacaaatagcgctaggacatacatctataggcaaataaacacataaaaagacactcaaacctcactccatacaccaaaatttaactcagaatggattgtagatttacatggaagttgtaaaagtatgaaagttttagaaccaaacagaggaaaaaaatattcaaatcttaggactagccmaagagttcttaaaattaacatgggaaacagaagccatttagaaaaaaaaaatttggtaagttgtattttatcaaattaaaaaacttttgttttgtgaaagacgctatgaagagcatggaaaacataagctacagattgagaaaaaatattttcaaactatata

SEQ ID NO: 629366 - DNA, 595 bp, Homo sapiens
gtttcaagtgttgtgggggttccaacatcttttctatttattttaaaaaaccacagcagaggggttgtgcaccctttcatatttcttggctatttggayttgttcttctgagacatgtccattcctattttttgctcattttctattgtttttgccttttttctaattagtttttaagatgtatttgtatattacaggtattggctctttatcatgtatggcaaatattttttcctcatctatcattgtctcttgacttttatcagtgttaattttcggggtaatcaagtatatctttttacagtttgaggttcctgtctttgcagtctctcaacccctagaatacccttatagtctcctaaattatattctaaatgttttgttgtttaaatttaagattctacgccatttatcaacgaaatcatcttttcctgattgaaataaaatactacatttgtggtatttccggattctgttgcactaatgtgtctttcctaccaacaatatcatattgttttattattgtggttttttgtttttgagacggagtctcatgctgttgcccaggctggagtacagtggtgcgatctcagct

SEQ ID NO: 629367 - DNA, 542 bp, Homo sapiens
tgtgtcacccctcccacaacaccaggcagcagggcacagagagaggcaatctctgtgtcgaagaagaaaagtgaagtgagcactgaactttgccttggactccaacgcagagcctgcttcagtaaaatccagtaatgggtatgcgactattgcccgaaactccaggctagtacctgcacactaagccagaccagatcacacagcccaggctccaggcttgyctggtggacttggtttctgggtatatcctcatgccaggtctaccccagtgccttggatgtcagacagtctttgggaccaggccagccccagtgactccaggctccagactgctcccagaacaaggccggcctcgacaactccaggtttcaagccagccccaggaccaggctagctcctgcaactctagtcaccatgccagtgtccatatatccaacccctaatctggcccctgtggatacaggctcgaggactgcctagcacaaggctagcccctgtggtcgcagactccaagtccaccctaggttccagaccggcccaga

SEQ ID NO: 629368 - DNA, 463 bp, Homo sapiens
gtttcttgtttttcaaatgtgcagacactaatgcactgcctaaaaatcaagatcaagaacaatcagagaaaaatgataccaccaaaggaaaaaaaaaataaccaatagctgaacctaaaaaaataatagtttatgaactgtctcataatgaatttaaaataattgtcattgaatagcttggtgagctmtaagacaacccagatagatgactaaaaataatcagaaaaataatacatattcataactcagaaggaaatcattgtgaagcctgaagtattggatctaatctatataaatagaggaataagcctggagggagtaaaatcaggaaggacagctgggcttggatcatttagtaggtaggtacaatggaatgagctgagattataggaatagtgatttcctttttatcttgatgctctcccgtcacctcatgttttcaaatatttattgctcaaatcta

SEQ ID NO: 629369 - DNA, 608 bp, Homo sapiens
acagttcaatggcttatgacaaacacctacagtcatgtaaccaagaccaaattcaagaagcaaagcagttttatcacccttactaattccttgtgtggttccatcactctaaataattccctgtgctccccacttatcccmtattcaccccagtccctggcaaccactaatctcttcgttactctagtgttgccttttccagaacatcatgtaaatggaacatagactgaattataccctttgagcatggcttctttcactcagaacattccatttaagattcatgagtattgttgcatgcattgataggtttttcttttctattgctgagtaacattccactgtgtgaatgtatcaaaatctgtttatccattcactcactgaagaacatttgaattgtatccagtttgggggctttgtaaataaagctgttgggaacatttgcatacaggtttttgtatgaaggttaattttcatttctcttgagttcacctagcagtggaattgctttcatggaaagtgtatgtttaactttataagaaattgtcaaaatcttcaaaatgttttcaaaatggctgtataattttgcatcctcgctaccaatgtgt

SEQ ID NO: 629370 - DNA, 608 bp, Homo sapiens
acagttcaatggcttatgacaaacacctacagtcatgtaaccaagaccaaattcaagaagcaaagcagttttatcacccttactaattccttgtgtggttccatcactctaaataattccctgtgctccccacttatcccatattcaccccagtccctggcaaccactaatctcttcgttactctagtgttgccttttccagaacatcatgtaaatggaacatagactgaattataccctttgagcatggcttctttcactcagaacattccatttaagattcatgagtattgttgcatgcattgataggtttttcttttctattgctgagtaacattccactgygtgaatgtatcaaaatctgtttatccattcactcactgaagaacatttgaattgtatccagtttgggggctttgtaaataaagctgttgggaacatttgcatacaggtttttgtatgaaggttaattttcatttctcttgagttcacctagcagtggaattgctttcatggaaagtgtatgtttaactttataagaaattgtcaaaatcttcaaaatgttttcaaaatggctgtataattttgcatcctcgctaccaatgtgt

SEQ ID NO: 629371 - DNA, 609 bp, Homo sapiens
ttgaattgtatccagtttgggggctttgtaaataaagctgttgggaacatttgcatacaggtttttgtatgaaggttaattttcatttctcttgagttcacctagcagtggaattgctttcatggaaagtgtatgtttaactttataagaaattgtcaaaatcttcaaaatgttttcaaaatggctgtataattttgcatcctcgcyaccaatgtgtgagagttccagttgtttcatatacttgtcaacacaaagcttttctgattctttcattctcataggtatgtaatggcatctttttgtggtatttgcattacactaatgaccaataatttgagcatctttttatgttcttatatcatccacatatcttctttggtgaaatgtctattaaaatattttgcccatttttatactggttagttatatctgagttttgagagggctttacatattttggaaacaagtcctttgttatattgcttttctcataatatttgtgatatttgctgattcttatctctccatggcttgtcttttcatcctcttggttctgttttgggagggaaaagttttcaattttgatgaagtttactttatatgtttatt

SEQ ID NO: 629372 - DNA, 526 bp, Homo sapiens
gactgaggggaaggtagttgggggccatcaagggaaggtctcagagtagagaggagctaaggtagctgggcctggccagctgctctttgccttaactcaggaattctcaaagcctggcccctgggccagcaagatcaacacaatctgaagactcacctcagatatattaagtcatatcctgtgggttagggctcagcaatctgtgtttcaagaaacccccaggtgattctgatgcagaatgatggcaagaactcagacaccgattgggactgccaggcaggtggaatccttgctctccaatagatactgaatgtgagaggccatgagcaaagccctgctggaactgggcatcygtttctccatttgtcaagtcccaggatttttaccaggtctctgaagcagtgatagaatcaggtgaacatctcagtgggagatgcacacacaattgtaaccgtccctctttctcactctagagggaaacgaaacttaagttaagttgctttgaatgtctttaggtaaagtcaca

SEQ ID NO: 629373 - DNA, 508 bp, Homo sapiens
aaacccaccaccactaccacatactttcccacaaccttggaaaggaagagacatgttttagttggaatttgctgtccctagactctccttcctcttccagtcttttttggaatggggacttttctgtactgcctcctgtactgccactttcactcttttggcatggtgacttttctgtagtgcctccttaagatctcaggtcccatcaaactgtagaaagaagaattacatttgtttgacatgtttgcttctctgatagcttctgaggagattaggaggagkgcagatttttacatcctcctttagggctgaaagtacgattaccccatatggttctactgccttcacacttaccaagtctccccataagagcctggccttttacatatattatctcacttaccaagcacagctcagagatgttaaacaagtagcccaaggtcacacagtgggtggtaatagtagcagagcctggatgtgtgcttccaccctctggaccctgctacct

SEQ ID NO: 629374 - DNA, 571 bp, Homo sapiens
gcaaaacaggcagcaatggcagctctgccttctagagagaaagccttagctatgcctcccctctgggagatcctcctcccggagaccccaagctacatttcaaatgaaagggcctggtttgcccaaaaaactgggaaatacattgagggagaatggtggaaaacctttgatgggaagctagccatacctgaaatggtggcccccaggtttgtgaaacagttccaccgaggaactcatatgggaaaaatggcacaagaaacattgctaggatgacatttctatgtgccatggctcactgccattacctgagccatttgtgaacaatgtctaacttgtgccgagaacaaccctcagcaggggcctacccgaaccccgggaattcaagaaatttaagccacatcctgtgaaaatttgcttctggattttaatgagctgcttcargcaggaggctattggtacatgttggtgtttatttgtaccttttcggggttgtttgaggctttccccacccagacagagaagaaacgagaggtaaccaaggtgttgttaaaagacattattcccagatttg

SEQ ID NO: 629375 - DNA, 652 bp, Homo sapiens
cataattagccagccataaggaagaaaaatataaaagaatgttatttcatgctattcaaaaacatattttaaatagaatgaagattgaaatgtcaaaagtaaaaattaactcactgtaagacaaaataagaaaacacttgcatgatcttggagtaggaaaaatcttcctaattattaactaaagaaaacaaaacctctgaagtcatagtgaaaaatataacatatttgattacaggaaagttaaaaatttcttcatgtcaaaatctccatcaataaaatagaaaataattctaaattgggcaataaatttgtagcatacgccttgtgttagtatccctagtatcaaaaacacttacagaattttaagaatgacataaaaccccagtgtaaacatggtgaaacaatacaaacmgttcagaagtaaaccccaaattactgataaacatatgaaaatacaatatgttgactatcactagtcatggaaatgcaaattaaatctacaataagatgccaactttcactcaccagtttggcataagttaaaagagggaaaacattcagtgccggtgagaatgtggggaaacaattcttccacacattgctaatggaaataaaactggaatcctttgggaaggtaatctggcagggctta

SEQ ID NO: 629376 - DNA, 464 bp, Homo sapiens
cctgcacattgtgcacatgtaccctaaaacttaaagtataataaataaataaataaataaagtgacgacaggagagatcatcagtgtatgttaatatgcacaaggacattgattaccccaaagggtaggaaatgaggagaggaggggaggggaagtgagaggttattaacttcttaaaatcatgttaaatttttcccttgtataatcagcatatattatcattgtgattaaaaaccaacaaaaaaaatatttttttctagataaattctgtttctcaccctaaaaagttattattcaagatcaaattgactttcaacactgcacraaacatggtatactatggaatcagacaaggtgaatgtaattcaaagtaaattgcagcatatttcaatctttcctttttttttggtcatatatgtgtcctgtggaacttttatatttcaatatttttgtatattgactca

SEQ ID NO: 629377 - DNA, 646 bp, Homo sapiens
aatgtaaaagtattaattgtactgtgaggaaggaaggaccactccacaagacctgcgttttgaacgataacggctgttggagaatgcrcagtagcaaaaatcaagctggagttgggccaagggatgtattctatttacttgtgctcactgaattttttcttcaactaatccaatttctttagttgtctctggagttaatgttcttttactattcaattctggatcccctctcaagacagagaacaaatttgacatggcataagtagggatgcctagagttggccaaatccaattaatatctcctagcaatttttgaaagtcatttaatgtttttaatgtgtcttttcttatttctattttttgtggtttaattttcctatcctctacctgcactctgaaataatgaaaaggagtagaggtctcaatcttatcagatgctattgtcagccctgtgttttaaacctctgtttgcagaaatgtgtaacagccaattaatttgtctctggtttttgcagcacacaaaatatcatcaacataatgaatgatataatagtctgaaaatttgtctctaactggttgaagagcttgagctacaaaagtctgacaaatagttggactattaagccttccctgaggcaacactttc

SEQ ID NO: 629378 - DNA, 635 bp, Homo sapiens
ttggaccatggattaaataaactaagcattcatcttcaatccgaaattgtcaggaagccaggaaatcaaaagaacatccttagggaaggtgttaggctcagcctggctctcaccccctttacccctttgttcctcaatctagggtcactttgtcactttctgcattccaatcctgacccagtttgcacgctagtcttgaattcgggtggcttattactatttggaggctcagcgcctatactcgcatgaagttgggctggcaatgaggcttcagttcactaaccagatgtgcataaaatrcatacaaaaaggggaagtctttagggcaaaaaaatagacccaggtttgtattactatttcagcttaatagtttattccttatttcagcttaatagtttattccaattaccataatggctaattatggtaaatactatttaaaatcatgtgctatgtactaagtctttgatgtacaatatctcatttaaacctcttgtaatcctctgaagaaggtcctgttatttttcccattttaacacatgatgaaactcagagaagggcctatggttaccgtcagtcctttgaactttaattcagattgggcaatgctttaacgtctggtatccagcagctac

SEQ ID NO: 629379 - DNA, 573 bp, Homo sapiens
tgcattccaatcctgacccagtttgcacgctagtcttgaattcgggtggcttattactatttggaggctcagcgcctatactcgcatgaagttgggctggcaatgaggcttcagttcactaaccagatgtgcataaaatacatacaaaaaggggaagtctttagggcaaaaaaatagacccaggtttgtattactatttcagcttaatagtttattccttatttcagcttaatagtttattccaattaccataatggctaattatggtaaatactatttaaaatcatgtgctatgtactaagtctttgatgtacaatatctcatttaaacstcttgtaatcctctgaagaaggtcctgttatttttcccattttaacacatgatgaaactcagagaagggcctatggttaccgtcagtcctttgaactttaattcagattgggcaatgctttaacgtctggtatccagcagctacatgacttaatatttctcagtgtcatttccttatctctaaattggagacattaatggtcacttcgttagattgttctaatgataagtcactaacaagac

SEQ ID NO: 629380 - DNA, 636 bp, Homo sapiens
atttttgcaatatgtacacataatttacggcactttctgaaatgaatatcatcataaatagattattgaacagttgtataaatatttctgaaagatgaattaccagaattaaaactgttgagtcaaagactatgcataataaatgaatgatatttctaaactggatggtaagattttcataaatttaatgtgtgatatcataacttatgaaacaacctaaacatccagtaatggggaaatagaaaaaatcattatggtacattaaaacattagaatactatgaagccattacaaagaatgaagcagctctacatgacagattagaaaatatttccaaaatagtttgctatgtaaaaaaacatgaggtggatagaacaatgtatatagtatgctaccatttgtgaaaataaacaaatgtatgtacatatctaaaattgcatagatttatgggaaacttgtacaaaatrtattggtattagtggttgcttctagagaaagtaattgggtaataggagatcagagaaagaagagagatttgctttcctctagtaatccatttatgcttaataattttgttactaattgaaaaaataaatagaatttaaacacacattcacagatatgtttgatttagcc

SEQ ID NO: 629381 - DNA, 563 bp, Homo sapiens
ctgactctctcactgttccctcaccttcagggactcaggtatgctccaggccaagggtttgtatagaaccagcagcttctgggagttattcagtagaatcattttgtgggatgcttcagtccttgagccattcaagaagaaactctgaaaagataacaagggaagggrcaatgttaagggaccaaatgaatttaaaatgcactttatatttcttcattcaagtaacaatcatgatgtagaatctgttagtatcatcctcattctaaacataccaaagctcagagagaccaagtaaattcctcaagttcttacagaggtaaatgccagagtcaaattttgaaaccatatatgaatggctccaaaacacatacccttcctccctggtggaatgaattaaaagtgaatattaagagttctgtgaggttctcaaatgcctgtagcagaacattccaccaccaacatcataactttttccctgtcgtctggtcatcaaatgcctgagaagtctttttccatgtggaatagaaaatatcagccatctaagaatagttatggctgaaaaa

SEQ ID NO: 629382 - DNA, 606 bp, Homo sapiens
gctctggctgccataacaaagtttcatacactgagtagcttacacaacagaaattgatttctcactcgtttggaaaccgggaagggatatgacaaggttctggcgaggtaggtttcattctcagtcctcctctctcagcttgttgatggctgctctctctctgtgccctcacatggtgtagaggagggctcagactctcttccttttcttagaaggacttagtgtcatcatgggggctccaccctcatgacgtcatctaaactcaattacgtctgaaaggcccacctccaaatacatttggagttgggacttcaacatatgaatttggggatcacagtcagtacataagaaagcacatctgaaataaaaacacaaagsctaaaagaaaggaaaaagatatactaaatgattttgaaactgaaaaagcaaagtaataacatcaatactaagcaaaacagaacttaagacgaaaatctgctaaatacagaattctcccacaagataagtcatgaatcttcctcacaacacaactacaaaatacatatggcaaaagctgacatacaaaaagaaataggcaaatccacagtctcagtaggagaactcaaa

SEQ ID NO: 629383 - DNA, 423 bp, Homo sapiens
ggatctctgacatgagcctatcccctgtttaactctgctgttcttgcagttgtcaaaaaaaactggtcttttttttccccccacctccaagatatgtcttttctgtttatcacctgtcaactaaaattgyccataccctgtgttttactattgtattctcctttaaagttttagtaaagattttagaagtctcaattcaagatctaccatgctgtatcacttcctgcagaaaaaacttgtgttccatttgccctgagaactttgtagactgggctggtacatgagaacaactcccacacctatcagctgccacatctttgtccaaaatacctctcctatctattccctactccattcacttgcaatgaccttagttcagggcctccttctcctcatacttaatattgcttttataaccgcacc

SEQ ID NO: 629384 - DNA, 583 bp, Homo sapiens
gcactcctttggctgacccagctggtgtctcagtatgtcaaatatccccctagtccacaatttctgggacttattcagcactggactcacctaagagttgcagtccttatggcttagactgcctttcaagtttacttggaaacacagagaactgtaggccccctgtggtgaggttttcaggcactgaagttcttactgctgggattgctgattcctctcaggttaggactggcttaaatgctccctctgcctccaggggcaggtgtcagctgagtttgatctagttttcctttgtgtctaacataacarcaatgagttcagtgcctcataattgctgtgttcttccttcccccccgtgcccagagatagactgtgcaccacatgactgctactgaggttgggagggaggggggttggtgattcaggactgtttttttccatctcttcagtgcctcttttagggatatgaagtccaaaccgggtactatgagtgctcacttgatttttggttctcatgaaggtattttttctgtgtagttgttaacttggggccttgtggggtatggggaaatgattagtggag

SEQ ID NO: 629385 - DNA, 373 bp, Homo sapiens
tgcgtcctggggctttggctgctttgcacttgtaaaagcgctgctttttgcctgtgctggctccctcccgcaggcacccattggctgttcctggccagggtggaccccagcctccccttgggctgactttgttgtatgtgcctctcgcccctcccctgcaggctagctccaatggtggcttagctcttcgttgcctctgctgccatgtgggcggagttttagttttttctyactgcttgcttggcaatgcagctctagcttctaatgccctttttttaaccctttaggtatctgatcgctttgccaattttgcgttactgggcaggctaagagatcttcttttaattcagcctgcttaagacgggaactgata

SEQ ID NO: 629386 - DNA, 634 bp, Homo sapiens
tatgtctagcgttccttcttctgggaaccatggactttgggatttaacagtttgcattacagcaatttgtctagcatgcatgattaggtgccttaattgagcctgtgaaactgaagctccactagccttaagcagctgttgtaatacttttatataatgtttctgctgtgctaataactgttgtcccatgatgaaatctcagcttgaaccaactttccccagaacttggtaaccttgagtgggcaccaatgacttactagttactcactgacttgaccacgcggtttttcttcacctttgtttccygggggcccgtcgcattcctcaggcttcctttgcagctttcctcatgaaagcggtccttacacttccttcaaagcttgccttacaaggggctccaactgcggaaggtctgtttctgcagacccctgactgtcctcacacagctctcctcacatggggcaccaattgaggtattgcttctcacaacagggcagtagctacctgtgtctgcccgcagaccctgacccaaacgacggatgaataaaatgtacactgacacacagataatctgttttgccagtcctgctgagtgtctgaccgcctgtaaaccaaaagaggtttgtcactgcag

SEQ ID NO: 629387 - DNA, 634 bp, Homo sapiens
tatgtctagcgttccttcttctgggaaccatggactttgggatttaacagtttgcattacagcaatttgtctagcatgcatgattaggtgccttaattgagcctgtgaaactgaagctccactagccttaagcagctgttgtaatacttttatataatgtttctgctgtgctaataactgttgtcccatgatgaaatctcagcttgaaccaactttccccagaacttggtaaccttgagtgggcaccaatgacttactagttactcactgacttgaccacgcggtttttcttcacctttgtttcccgggggcccgtcgcattcctcaggcttcctttgcagctttcctcatgaaagcggtccttacacttccttcawagcttgccttacaaggggctccaactgcggaaggtctgtttctgcagacccctgactgtcctcacacagctctcctcacatggggcaccaattgaggtattgcttctcacaacagggcagtagctacctgtgtctgcccgcagaccctgacccaaacgacggatgaataaaatgtacactgacacacagataatctgttttgccagtcctgctgagtgtctgaccgcctgtaaaccaaaagaggtttgtcactgcag

SEQ ID NO: 629388 - DNA, 571 bp, Homo sapiens
tcctcacacagctctcctcacatggggcaccaattgaggtattgcttctcacaacagggcagtagctacctgtgtctgcccgcagaccctgacccaaacgacggatgaataaaatgtacactgacacacagataatctgttttgccagtcmtgctgagtgtctgaccgcctgtaaaccaaaagaggtttgtcactgcagcttgccctgagtagctcagactctaggagtttatttagtgtagaattaacaacagaagatttgagtaaacacacttgtggataattaacatggttaagagagtagttctaggaatgattaaaactcaggtaccctggtttaaagtaaataccattagggggcaatatccttggtcaaactacccccaaaagggccatctgtctcaaaggttacttaatggaggtagggtaaacagatctaactggggaagcctgtgttgtccctagtatttaccctatgacctaatgctctaaggtaagaaatggctgccttcagcctgttcaattattacaagctttataacctttcaacctttcaaaaaggtttgtgact

SEQ ID NO: 629389 - DNA, 571 bp, Homo sapiens
tcctcacacagctctcctcacatggggcaccaattgaggtattgcttctcacaacagggcagtagctacctgtgtctgcccgcagaccctgacccaaacgacggatgaataaaatgtacactgacacacagataatctgttttgccagtcctgctgagtgtctgaccgcctgtaaaccaaaagaggtttgtcactgcagcttgccctgagtagctcagactctaggagtttatttagtgtagaattaacaacagaagatttgagtaaacacacttgtggataattaacatggttaagagagtagttctaggaatgattaaaactcaggtaccctggtttaaagtaaataccattagggggcaatatccttggtcaaactacccccaaragggccatctgtctcaaaggttacttaatggaggtagggtaaacagatctaactggggaagcctgtgttgtccctagtatttaccctatgacctaatgctctaaggtaagaaatggctgccttcagcctgttcaattattacaagctttataacctttcaacctttcaaaaaggtttgtgact

SEQ ID NO: 629390 - DNA, 471 bp, Homo sapiens
ttgacaaaaaacaaaaccaaataataccctacacaaacaggattttaaagaatagtgtgacatatttggaaatcaaaaatacaaatgaaaarcaataacaaaataataattctcagaaatagaaaaggaaaaataatttaataatcttaacaaataatataaaataccgaaaagtaaacttaatggaaaatcatgtagtttactacaggaaaacacttaaattttacaagatggcatagaacagaaactgaaaaaagtgagaaaaagaccatatttctagatgacaagatgtagtaccgcaaaaatagtaatctttccacaatcgtcttttagacaatactaaccacaattgcaatagttagttggggtagttggtggggaactgggaaaattagttattgttcatatggctcttaagtgtataagaaataggaaagtaagaaaagtattggtgaagggtgatttgcttta

SEQ ID NO: 629391 - DNA, 610 bp, Homo sapiens
taggtttctctttttcaggcttatactcatgaatcttgtctgaagcttttgagggcagactgccaagtcctggagaaatagtagatggcaagtttgtgggttttttttttttacacgaatttgaggaaaaccaaatgaatttgatagccaaattgagacaatttcagcaaatctgtaagcagtttgtatgtttagttggggtaatgaagtatttcagttttgtgaatagatgacctgtttttacttcctcaccctgaattcgttttgtaaatgtagagtttggatgtgtaactgaggcgggggggagttttcagtatttttttttgtgggggtgggggcaaaatatgttttcagttctttttcccttargtctgtctagaatcctaaaggcaaatgactcaaggtgtaacagaaaacaagaaaatccaatatcaggataatcagaccaccacaggtttacagtttatagaaactagagcagttctcacgttgaggtctgtggaagagatgtccattggagaaatggctggtagttactcttttttccccccacccccttaatcagactttaaaagtgcttaaccccttaaacttgttattttttacttga

SEQ ID NO: 629392 - DNA, 634 bp, Homo sapiens
ttccaataatgtgacttcttaaaagttttattaaaggggaggggcaaatattggcaattagttggcagtggcstgttacggttgggattggtggggtgggtttaggtaattgtttagtttatgattgcagataaactcatgccagagaacttaaagtcttagaatggaaaaagtaaagaaatatcaacttccaagttggcaagtaactcccaatgatttagtttttttccccccagtttgaattgggaagctgggggaagttaaatatgagccactgggtgtaccagtgcattaatttgggcaaggaaagtgtcataatttgatactgtatctgttttccttcaaagtatagagcttttggggaaggaaagtattgaactgggggttggtctggcctactgggctgacattaactacaattatgggaaatgcaaaagttgtttggatatggtagtgtgtggttctcttttggaatttttttcaggtgatttaataataatttaaaactactatagaaactgcagagcaaaggaagtggcttaatgatcctgaagggatttcttctgatggtagcttttgtattatcaagtaagattctattttcagttgtgtgtaagcaagtttttttttagtg

SEQ ID NO: 629393 - DNA, 579 bp, Homo sapiens
tggctgagagggcttttgggtgggaatgcaaaaattctctgctaagactttttcaggtgaacataacagacttggccaagctagcatcttagcggaagctgatctccaatgctcttcagtagggtcatgaaggtttttcttttcctgagaaaacaacacgtattgttttctcaggttttgctttttggcctttttctagcttaaaaaaaaaaaaagcaaaagatgctggtggttggcactcctggttyccaggacggggttcaaatccctgcggcgtctttgctttgactactaatctgtcttcaggactctttctgtatttctccttttctctgcaggtgctagttcttggagttttggggaggtgggaggtaacagcacaatatctttgaactatatacatccttgatgtataatttgtcaggagcttgacttgattgtatattcatattacacgagaacctaatataactgccttgtctttttcaggtaatagcctgcagctggtgttttgagaagccctactgctgaaaacttaacaattttgtgtaataaaaatggagaagctctaaattgttg

SEQ ID NO: 629394 - DNA, 510 bp, Homo sapiens
agcccaagaacccacccccactctcccagcccatgctgccctactggcatctgagtaggccagctggaggcccaagaatcggcctgtctgtacctggctaacactggtgctggtgtacgtcaccctgggaccaaagacaggtatgctcagcccataaatcccaccactggggacagaagactagccccagctagcaacccagtccccaggaacacttcaccacagcctttacttataacccagaccctaagctgtcaaggaccaaacaggtacccctgacgttgtttagagccmaagaaatcatacagagattacattatcatatatgctcaggatttccacgccaggaacttttcccggcccggagagaaagtaatgacatattccaaggtttggaaaaaaaaaaaaactgccaatcaagatactatacctaccaaaattaccctttgtaagtgagaaaaatctttccctgacaagcaaaagttaagaaaattcatcaccattaaaggg

SEQ ID NO: 629395 - DNA, 632 bp, Homo sapiens
ctttgtgggctctacagtttgtgtgtcagctatctctctcttctactgtagtgtaaaagcaaccataaatggtatttaaatgaataaacatggttgtgaactttatttttagrtactataatttaaattttatgtagttttaaattgtcatgaaatgttcttttttttacctttttcagccatttaataatgtaaaagtcattcttagttcttgggctatacaaaaataggtgctgaaccacatttgatctgtaggatataatttgctgaccccctgttgctttaaccagtgttagccaaaagatgagcttttccattcttgctgttggggggcaggccttgttcatagacctgtgtgggtgttgggtgctattccctttatttctttggagcagttctatccctgaccttgggtaatttccccgggtacatgccctgctcagtcctttgctaaagactcagagggactctgcaaatttccagagtactctctgcagctctcttctctgacacttttctctgttaattctacctttgccttcttgactcttaacctcatctctctaagggagattgccaggtttttgattgatcctccctgtttgcctctttacccagtttgtaaattgggg

SEQ ID NO: 629396 - DNA, 585 bp, Homo sapiens
cctttgctctggagacatagaatcattctttccttgcccggttatgtgccaggagttgtgctgggcatacagcacagacattcttacagtccaggtacagatcagttggaagaaataagrcgtgtaaacattacagtgaggatgtagaagttgcaaattggcacaaatctacctggagacatgttttgtttgtctcagtaattttaatatttactgtagttaccaaggttttttaactttcatgaaaatgaagatttctggctgttttggaagaatgggaagaactgacaccactaggtccacacttataaatgaaaataactgagtggaatggaatagcaccgccttctccaacagagaatgtgctctctgattcttccaattgctgttatcttctaggccactttattcctttacttttcctgcctacctttcttaaggggtttgcatttgtgaacctgcaatgccatattaataaatactatactatgtgtgaagaatatagtataggaggctgtgggaacatagaggaaatgttccaagcccataagagacacagatatgtcctagaacaaggcccagtcc

SEQ ID NO: 629397 - DNA, 585 bp, Homo sapiens
cctttgctctggagacatagaatcattctttccttgcccggttatgtgccaggagttgtgctgggcatacagcacagacattcttacagtccaggtacagatcagttggaagaaataagacgtgtaaacattacagtgaggatgtagaagttgcaaattggcacaaatctrcctggagacatgttttgtttgtctcagtaattttaatatttactgtagttaccaaggttttttaactttcatgaaaatgaagatttctggctgttttggaagaatgggaagaactgacaccactaggtccacacttataaatgaaaataactgagtggaatggaatagcaccgccttctccaacagagaatgtgctctctgattcttccaattgctgttatcttctaggccactttattcctttacttttcctgcctacctttcttaaggggtttgcatttgtgaacctgcaatgccatattaataaatactatactatgtgtgaagaatatagtataggaggctgtgggaacatagaggaaatgttccaagcccataagagacacagatatgtcctagaacaaggcccagtcc

SEQ ID NO: 629398 - DNA, 504 bp, Homo sapiens
cttgctctcttcctcttgctccagccatgtaagatgtgccagcttcctcttcaccttctgccatgatagtaagtttcctgaggctccccagctatgcttcctgtacagcctgtggaaccgtgagccaattaaaactcttttctctagaaactatccagtctcaggtagctctttatagcaatgcaagaagagactaacaaagaaaattggtaccargaagggggtattgctataaagatactaaaaaatgtggaagcagctatggaactaggtaatgggcagagggtggaatagtttgaagggctcagaagaagaaaggaagatgagggcaaatttggaaattcctagagacctgttgaatggttgtgaccaaaatgctgattgtgaaatggacagtgaagtccaggctgagaaggtctcggagatgaggaacttattggcaactagtgtaaaggttacttgtgctatgctttagcaaacagactgggggcattgtgccctgcc

SEQ ID NO: 629399 - DNA, 500 bp, Homo sapiens
cacactgagggctggccaagggcctggccccaggacccctacgtgtccagctgcccctaggtggcctgcacatttcagaagggtcagtgggaagagcastaaactcagtcaagctctgggcctcgtggtagctgtgagtcctggggagccactcatctctcggggtctcaggtccctcctcttgtggggatgggtcatcggccctccctgcatccccaggctggggtctagggagggagggatgggtggagggagaggtgggagtggcagggtgaagacggagcctgcacccggcttccctgtggggcataaggaccgagggcctggtttcccagcctccggagagatctcgagggaagagtaggccatcaccctcatcatcactttaccaggccatttcttattaatattaatagcattatttataatatggcatccaggcctgggctggctctgtgcgatcgctaggccaagagggctctgagagaggtttggcctcc

SEQ ID NO: 629400 - DNA, 378 bp, Homo sapiens
ccaggacccaggcttgtctccctcctgtccctaggtgggtgacgcaccaacatgcccgtggcctccggtgcacacacagggtccccaagcaggcagctggagggctggggtgcckggagctgccctgcctgcagtgattgcggacacgcccctcgcgaggcaccgcaggctgccacccccagcttgtgaactgggggtggccccagagctgtttgttttccctgactgaggggcggctgtgccacccccacactcctgaaatgggtgatgagggggttgggggaggagctgagcggcccacttcctgctgctgtccatttagccagcggttcgctcggcttttaggagggggctggcggtgaacccatccccgttaca

SEQ ID NO: 629401 - DNA, 433 bp, Homo sapiens
atgtccctgcctctgctgggctggctgcctcgtggagggacagaraaagtccccttgtgctccgtgctggaaaggacaccagtgaaaggttcccccgctcctctttagccccctaatggggcaggggagccacttaggatggggacaagcagaacctgggccccaggagctacctgccctgccactagctcccgtcctggcctgtgcaaagcacccatcccccatcgtttcttgtgaatgaagggcaactccacccacccagaaaccgggctgcttccagctggtatttaaagaggtgtctctgagtgtgatgatggcatttgttcctgtctcccgcccactgcatggtgtcccgctcaaggcaaattcgaggcaaagctactggctgcccctcaccctgctcccggcccagaggagcacctcctgcaggctg

SEQ ID NO: 629402 - DNA, 433 bp, Homo sapiens
atgtccctgcctctgctgggctggctgcctcgtggagggacagagaaagtccccttgtgctccgtgctggaaaggacaccagtgaaaggttcccccgctcctctttagccccctaatggggcaggggagccacttaggatggggacaagcagamcctgggccccaggagctacctgccctgccactagctcccgtcctggcctgtgcaaagcacccatcccccatcgtttcttgtgaatgaagggcaactccacccacccagaaaccgggctgcttccagctggtatttaaagaggtgtctctgagtgtgatgatggcatttgttcctgtctcccgcccactgcatggtgtcccgctcaaggcaaattcgaggcaaagctactggctgcccctcaccctgctcccggcccagaggagcacctcctgcaggctg

SEQ ID NO: 629403 - DNA, 533 bp, Homo sapiens
agggcctgatctgctctctctcccactctatagacagatggtcatggagatgctggstgaggtggctcacacctgtaatcccagcattttgggaggccaaggcgggtggatcacctgaggtcaggagttcgagaccagcctggtcaacatggtgaaaacctgtctctactaaaaatacaaaaaattagctgggtgtggtggtgggcacctgtaatcccagcttctcaggaggctgaggcaggagaatcacttgaacccaggagtcggaggctgcagtgagctgagatcgcgccactgcactgagggagaccagaggcagtcgctgccctctctgagtctctagtttctgaggcaagcccacccccagagaagagtcttattctacattggatgagattttgcagttttaatattactttttggttttattactttgaactatactttaaaaaaattaatgatggacaatttcaaacatacccaaaattagagagatgagtctaatgaccccatcacgtacccatcattcagcc

SEQ ID NO: 629404 - DNA, 547 bp, Homo sapiens
atgaggatttacactacctgatttcaaaacttatgaagctactgtaatcagtcagtgtgttactcacataaggatagacatatagatctatgaacggaatagagtgttcagaaatagatctttgcatacagaagtgtgctaaagctggctcacactggcttacagaaataattgttaaattttcaggaatttaatgaaccgattgttaaattattggtagcttgaaagcatccatgtgacagtattcatatcaggaaattggctaacactgtaaataggacaaataaggccctttttttttccagatagtgggaaaaagttattaaacatttatcatcataccatkggctcacatatatggtcaatttattttggacaaaaagatggaaatagcttaaatgtccatcaactaatgaatagacaaaatgagtggtatccatataatggaatactacttagcaacaaaaagaaatgaacccatatggatgactcttaaaaagcatgctaaatgaaagaaggctaacagaatataccacatattgtatga

SEQ ID NO: 629405 - DNA, 504 bp, Homo sapiens
actctaagctggaagaggggagattttttggaaaagggatagaacagagtcacaatacttcagctgataagagagaaatactagctccttttccagtgagagatgaaacttttggaaatacagctctcctcaagaaagctgaaagtggtgagtgccagctaagcacacagaatttgattcagrtggctgcagaagattctcatccattggatccaacttcccagctttccagaaagggttcttttggggatgtggccagccctccccaagatatgctttttccccaggatgctcatcttgttccccaggctagggtacacccttctcaaacggaaatttcggagactgtagagaaagtcattcttccacccagacctgtattgaatgatgtaagtgctgcattacagaagctgtgtggagaagtatggttaagttatccagctggaagggaagtaggtcctggagaagtgaacccagaatttcctgaagcagtacagccagtat

SEQ ID NO: 629406 - DNA, 504 bp, Homo sapiens
actctaagctggaagaggggagattttttggaaaagggatagaacagagtcacaatacttcagctgataagagagaaatactagctccttttccagtgagagatgaaacttttggaaatacagctctcctcaagaaagctgaaagtggtgagtgccagctaagcacacagaatttgattcagatggctgcagaagattctcatccattggatccaacttcccagctttccagaaagggttcttttggggatgtggccagccctccccaagatatgctttttccccaggrtgctcatcttgttccccaggctagggtacacccttctcaaacggaaatttcggagactgtagagaaagtcattcttccacccagacctgtattgaatgatgtaagtgctgcattacagaagctgtgtggagaagtatggttaagttatccagctggaagggaagtaggtcctggagaagtgaacccagaatttcctgaagcagtacagccagtat

SEQ ID NO: 629407 - DNA, 593 bp, Homo sapiens
gcaaggagtgtaaaacttacataaatggtgactctcacatgatgaggatttcagaagacaggcaaattgtcctgacagtcccatgacatcaagaatgaaggcttcaaaaaaaaaaaaaatccaggcagcaacagaagagcagtaatatgcctgagttggggagaatgccgccagacaaaaaggccctgatcaacaagaaggctcatccccaccggaacacttacgaaaccattgtgcataaaactaaatgctttgtaaacttcctaggatcacagcagcatcaaaggatggawggaaggagaagccaaagacggaacaagttgaatgtgacaatcagagactctttgctcacctccctctcagcagaaagatttccctccagtgtaccagcccgatgatcatcagatcacactgccagggcatccatgcctaaagctgctaactgcacagctgggctgctccgcttctcaggctcacttggttggacttgcccctaagttcttcacattggctacattttaccctgcccacttgaaccccatttaatttattctcccttgcacataatagtttacaaaaaagatgtcatgctc

SEQ ID NO: 629408 - DNA, 600 bp, Homo sapiens
tccctataaaatgtttaaccactcttgactgggggtggtggctcacgcctgtaatcccaacactttaggaggctgaggcwggtggatcccttgagcttaagagttcaagacaagcctgggcaacatgacgaaactctgtctctacaaaaatttaaaaattagccaagtgtggtggcacatgcctgtagttgcagctcctctgggagggctgaggtaggaggatcacttgagcccaggaggttgaggctgcagtgagccatgattgtgccactgaactccaacctgggtgacagagtgagaccctgtctcaaaaaaaaaagtataactactcttaaaaatgactataccttagccaatacctgttttggttactttatacccaaatatgttttaaatgtcttccactagcaccaactgatactggtattaatgtttgcaaggtatatgcatttcattgaaatgttttgaatataactgtaaatggatgattcacattcctggtgtttgattttgttgaatcaagcaaaaccccaaatgaatgatgtgctaatgatgtaatacttggtacttaaagccaatatgaattatttttatagagct

SEQ ID NO: 629409 - DNA, 606 bp, Homo sapiens
taataatgcctacccttcaagaatatcattagaattaagtgagagatgtacaaataaatgcccactacctagaagagctctgtaaatggtagctttaaaagggagggaggcatggaaagacttaaagataagtggagacgactcattgatcaccacaagggagagaattggtcaccttggatctctgggaagggaatataygggatacttttaggaggggagctagaaaaaaaatgattgagcaaagaagacaaccacggcagaaaggaaccaaagtgattactaaactaagttatttgaggacagtgatcgtatttattttattaatatattcttagcacctagcattgcaaataaccttgcaaatgtttactgaataaatgaatgaatattgattaggatcttatcagattcttggtcttgataagtaatctatagatgtgtgttattttaaataatgtaaatataaatttaatagaaatgtgtattaaaatatatttgcaaaaaagaaatataagctttttcaaatgtggaaaatttagctgaacatggtggtacatgcctgtagtcctagctgcttgggaggctgaggcaggaagattgctt

SEQ ID NO: 629410 - DNA, 554 bp, Homo sapiens
cttgatctttgacagtgagggaagaacctgaaactcttctttcagatttgtttcgctcccagtgaaatctgaagcatttaaaaattcatctcatatctataatgacacccagggtttttccttatcatcatgacttgggagatagtaaatctgatcaccagaaactgtgaccacaagaatagtcaactcttttccctacccttaattttcacaggattgaaatcatctgaattttaagttttgtattttgcctttttcagttgtatttctaacataagacttttccatgctattaaaaattacctataaatgtaataagttctagtggctgyacaatattttttgtatgaatatatcataatttttgtaaccattccctttttttttggaaaactggggtttccaacttttagttgttacaaaccacactacaatgaaaagtttggagcaaaatgtttttcgttgtcagattatttcctaagcaaagatctccgcagaagaattactagttcggaagccataaaaatatcttaatttctcagtacctacggtca

SEQ ID NO: 629411 - DNA, 554 bp, Homo sapiens
cttgatctttgacagtgagggaagaacctgaaactcttctttcagatttgtttcgctcccagtgaaatctgaagcatttaaaaattcatctcatatctataatgacacccagggtttttccttatcatcatgacttgggagatagtaaatctgatcaccagaaactgtgaccacaagaatagtcaactcttttccctacccttaattttcacaggattgaaatcatctgaattttaagttttgtattttgcctttttcagttgtatttctaacataagacttttccatgctattaaaaattacctataaatgtaataagttctagtggctgtacaatattttttgtatgaatatatcataatttttgtaaccattccctttttttttkgaaaactggggtttccaacttttagttgttacaaaccacactacaatgaaaagtttggagcaaaatgtttttcgttgtcagattatttcctaagcaaagatctccgcagaagaattactagttcggaagccataaaaatatcttaatttctcagtacctacggtca

SEQ ID NO: 629412 - DNA, 632 bp, Homo sapiens
tcttgctagcctatataatgtggcaaataattcatattagtatggtctaccaaccaagatgcacatacacagcagttctaaatactttttctttaattgagatggagttttgctcttgttgcccaggttggagtgccctggcgcaatcttggctcactgcaacctccaccttctgggttcaagcaattctcctgcctcagcctcctgagtagctgggattacaggtgcccaccaccatgcccggctaattttttgtatttttagtagagacagggtttcaccatgttggccaggctggtctcaaactcctgacctcaggtratccacccgccttgtcttctcaaagtgctgggattacaggcgtgagccactgcacccggcaatacttccctttttctaacatatctttctcacagtgctcatttagagtaagaaatatttggaaatccatatatacatatatatgaaaattatatatatggaaatattatatatatacaaatgtatataaataatatgttggctaccttagattttttatttatattttatagagaagttccttaaagggggaaaatatttttatgggaataactctttatacagtaaatctcttaaagcactaaatgcat

SEQ ID NO: 629413 - DNA, 587 bp, Homo sapiens
ggcgtgagtgctggaaaaatgaatctgaaaaggtaacctgaagcctttttaggtggtcaggagcctcatctgatattcctccactctgcaagatctgaataaataccccgtattttccagacactaaacaaagatgtattgagtacagaccctgccccsaggaactcaccagggagaagtagaagaacttctccattctggaattgaactcaaacttggtccttttgggaggagaaggcaaaggttcaccaacagtccagcagttgtttgctctgctgaaaacagtgttgaaagcagtgtcaaaccattaggaacatttaataaaaaccatgatatcgttgctgactgagaactatgaagcaatgatgctctccctgttagggtttatagatggggctgtcatgacaaagagaggaagttcctgtaagagtttactctgggtggaaggacactctccaggcacgcttgggagagaggagacattcttgctagacctgggataactgctccccctctttttcccactcccaggtatgcctgtgtgcaacccttacatgcagcgctgctaccaccttggcccattcaca

SEQ ID NO: 629414 - DNA, 598 bp, Homo sapiens
taaaacacttttccattggttcttcacctgcttattgcctgtcatgcctgtggcctacaatagtaacatttaaaagtgaaagtcaaaagaggggggaaataaaaatgccaaccaaccaaaaacccacttctgcctaaaggtttggggggaaatctttacttatccacccatctactgaattgatgggatttatactatcatgacaatgcccatttaaaagtggcaaaggcagccagcatcccaccccagatgggcttgtagcatggtttctgtggccagggaggttactatgatagtgcgtattccttatatcatggcattatttttatgtcttttttttttttaatagacatagagtcttactattttggccaggctggtctcgaactactggcctcaagcaatcttcctgcctcaccctcccaaagtgctgcgattatagacataagccaccagtgccgtggcaaaggcaatctttkgagggctggtttaaaattctatcaagttcattaaatacttacgggtggccttctctctaattaactctggcttagtccatgtaaagccttgtcaagggtctaccctgtactcaataagg

SEQ ID NO: 629415 - DNA, 598 bp, Homo sapiens
taaaacacttttccattggttcttcacctgcttattgcctgtcatgcctgtggcctacaatagtaacatttaaaagtgaaagtcaaaagaggggggaaataaaaatgccaaccaaccaaaaacccacttctgcctaaaggtttggggggaaatctttacttatccacccatctactgaattgatgggatttatactatcatgacaatgcccatttaaaagtggcaaaggcagccagcatcccaccccagatgggcttgtagcatggtttctgtggccagggaggttactatgatagtgcgtattccttatatcatggcattatttttatgtcttttttttttttaatagacatagagtcttactattttggccaggctggtctcgaactactggcctcaagcaatcttcctgcctcaccctcccaaagtgctgcgattatagacataagccaccagtgccgtggcaaaggcaatctttggagggctkgtttaaaattctatcaagttcattaaatacttacgggtggccttctctctaattaactctggcttagtccatgtaaagccttgtcaagggtctaccctgtactcaataagg

SEQ ID NO: 629416 - DNA, 598 bp, Homo sapiens
taaaacacttttccattggttcttcacctgcttattgcctgtcatgcctgtggcctacaatagtaacatttaaaagtgaaagtcaaaagaggggggaaataaaaatgccaaccaaccaaaaacccacttctgcctaaaggtttggggggaaatctttacttatccacccatctactgaattgatgggatttatactatcatgacaatgcccatttaaaagtggcaaaggcagccagcatcccaccccagatgggcttgtagcatggtttctgtggccagggaggttactatgatagtgcgtattccttatatcatggcattatttttatgtcttttttttttttaatagacatagagtcttactattttggccaggctggtctcgaactactggcctcaagcaatcttcctgcctcaccctcccaaagtgctgcgattatagacataagccaccagtgccgtggcaaaggcaatctttggagggctggtttaaaattctatcaagttcattaaatacttacgggtkgccttctctctaattaactctggcttagtccatgtaaagccttgtcaagggtctaccctgtactcaataagg

SEQ ID NO: 629417 - DNA, 573 bp, Homo sapiens
cagttgctgctaattatcagagatgttcaggtaaagagtgagtgctggatgttcagaggcaaaagaggttattttctgaagcaggagcacagaggttttatgggggctctgacayctgagctgggattgaagaatatgtagttttggatttgtagagactgtggggaggaggagaaggcagcagaggaagacattcctagaccataatcatttgttcccctttgtatcttagagcacatacaagatatttgaacacattgtagctattcagtaaatgcttggtaatgatggtgcttctatcccactgaggacttcctgccctgagcatcccctggccatgcacatttagacctgaccccaactcagttcagattaacctagaggcagtcagaattttgctttaatggtctctggagttactctcacatttaaaggtatgctcattctctcaagagactctgcttggggaaatctaatgtcgtgggaatttactgacttctctcttagatgtaattctgatcaactacttagacccagtgattgccttggcactgggaaggcctgaggttcagg

SEQ ID NO: 629418 - DNA, 538 bp, Homo sapiens
agagaaaatggggcaaaggaaagctgggtgaataatgtcaacaaagatgctttccttcctccagagctggctggcgttgtagaagagccagaagargatgcagcaccagcaagcccgaggtaaggcaaagcttctggggagagctgctgcatgtggctttcatggcctggggtgtcacatgggcagaatggcaggctatgagtacagatgccagactggggtcatgggcatggggaaggggcagtgtatgagagaattctgggccccgatgcagataaagcccaagtggtactctttctcagcttccagaatttccaacaaatctatatcttaaataaaataaaaatgttaagtggtgatttcttccagtaccagcaagagccgtttttatttctcccatggatttctccttagagtagaatgaagaggtacttcaatttgaatatcaaggaataagtcatttcagggaaaagataaactatgatcagattgtaacagcctagtgcaatggaagaagctcaagcacaagaaccagata

SEQ ID NO: 629419 - DNA, 531 bp, Homo sapiens
ttgacatttcatttaattcttctcttcacacagattcctccaatcagcgaggcagaacaaaacccctgtctctgtggaccctcattctctgcttaagtataagagactcaccgacccagaccyggcagtcagaacgggggcaacctcagtgctaaactgtgagggaagaattttggctactacagtgtcttgcattctcaccagagcctcacaataacctcagtaaagaagggagggtaggagtgaatatacccattgttcacagatattattgatgtgttcacaggaggaactcctggggcaagttctccttgggttcagcctctcctacccatcctccattcagcatgatgctgagtcatttttctaaaactcagttctgaccaagacacattctcaggcttaaaatccttcaccaacttcccactgaccattgactaaaactcaaaatccttaagcggcctgtaggactctccatgaactagcacctgctttactctccaagctcttttccttaggctccagccattc

SEQ ID NO: 629420 - DNA, 643 bp, Homo sapiens
tggggcaagttctccttgggttcagcctctcctacccatcctccattcagcatgatgctgagtcatttttctaaaactcagttctgaccaagacacattctcaggcttaaaatccttcaccaacttcccactgaccattgactaaaactcaaaatccttaagcggcctgtaggactctccatgaactagcacctgctttactctccaagctcttttccttaggctccagccattctgaaattttccagttcttcttgccttcaggcttttgcatgtgctgttccttcgtcctggaacagcatttccctggttaatacttgttaggtctcaagttacatgtcacttactgcacaaaagtcttccctaacccctccaagccagcttaggtgcccctcctatgtgctcaattagcacctgacttcatcagtcacagtactcatcacacggtctcaaatccctacytactcatgtttgtctcttgccagtttatgaacaaggcttgtgtctcccagtgatttgtattcccagctcttgccactgtcttgcatctactaggcactcaagtgttcatgaaaaaaaaaaatgatgaacacaggtggaaggggattgagcttctatttccccctgaacatgaacatagctc

SEQ ID NO: 629421 - DNA, 619 bp, Homo sapiens
actcttccatgccttcgcatagtctgttccctgagcctggaatgcccacggctcacaagatgaattactatcattcttcaagacccagttccaagtccctggctctgagctcccttccccaccctacttttttctattagattacaattgattccttgagggtccccaggcctgcataggacctggcctagaagacagtgagagttacattgatggcaatgcctctttttcttgaccctgtggtactcagcgaccctcctcggccccgggctttctgctgtcacagcctccacatcctgagtggtcactctctstgggtcttctcccctcacatctggggtcacaatttcttctatgtccccagcgcctagcatggggtggctcagaggtcccacagagagcgaaggtttgtggttgcatctctagcgggactcatgtcacaccgactgggcaccaggtggcactgtcagcccaagtaagggttggggagccccaggccctaagcctctggctctggtacagcttggcacacacagatggggcggagttgtcaaagccccaaattccagagctgcttctcctcaccccatccagtgcgcttatgcctgattttaaagct

SEQ ID NO: 629422 - DNA, 554 bp, Homo sapiens
ggacgtggccagcacaaaggtagatttgatgtctggctgcattagcagaggcagaaagcctctggactcatccaagcctgctctcacaccctcatgcctgtctccagaagcagccccttcagctctgagactgccttttgcacactgagctaagaccagcctctcgtgacatccccatagtctcccttgaggcacaaagggagctgccccatggccttgagattgccctattcaactgagaggagagtggctctgcttcttctctgctctgggtctgacaccacctgggcagggcctacagctctgaagccatgcctaagaaaggggaacaaaggtccacagaagagccagttgggaagtcgtggattcctccactggtgrggctgaccagcagcctgggacacccctcatgttagggctgtgagagtctacaaatttctaaattgatctgagaatctgaggttctgaggcctgaaaccacttggaggtgagaaactcagcaagccaggagccatgctttttgtccatcagctgtttattttgtgtggctttat

SEQ ID NO: 629423 - DNA, 535 bp, Homo sapiens
gatctgggtggagacccaggcaagtttattacctgtgggtggaagtggaaggaagaagattctctgagcagacaggtccacaagagagctctggagactcagagatctatgttccaatcctgtcttggccactgtgtggcctgggcaagccgtcctttctctgagcctcagtggcctcgtctgtaagaagggactaatgataaggaattcgagggctgttgaggagctgatgagtgtgtcatgttcagcaccagtgtccccccatgggcaggctcacagcttggggatgggaagtcagtccctggaaggagyctcccagaaccagaatcccaactgtgcccctccctagggcacaagccttccacaggaccaagcctgaaccctgtagcctgggacttaaggtatttgataactggggcctgccagcctttccagccacctctcccgcctgactctttaccttgcagcagctgcctggagtctctcatttcttgcccctggcctgttgcatattctacactccctctctgataag

SEQ ID NO: 629424 - DNA, 571 bp, Homo sapiens
gatctgggtggagacccaggcaagtttattacctgtgggtggaagtggaaggaagaagattctctgagcagacaggtccacaagagagctctggagactcagagatctatgttccaatcctgtcttggccactgtgtggcctgggcaagccgtcctttctctgagcctcagtggcctcgtctgtaagaagggactaatgataaggaattcgagggctgttgaggagctgatgagtgtgtcatgttcagcaccagtgtccccccatgggcaggctcacagcttggggatgggaagtcagtccctggaaggagtctcccagaaccagaatcccaactgtgcccctccctagggcacaagccttccacaggaccaagcctgaaccctgtagcctgggacttaaggtatttgataactggggcctgccagcctttccagccacctctcccgcctgactctttaccttgcagcagctgcctggagtctctcatttcttgcccctgrcctgttgcatattctacactccctctctgataagccctcctactctcaccttcctcaactggagaactac

SEQ ID NO: 629425 - DNA, 557 bp, Homo sapiens
tttgttgtgcctgagacaggaagatgagggcagggacagagaggatgggctttctggagggatggtgggtaccagatcagccagggcctgagtgccaggctgaggagctgggacagttgcctgagggcactagggagccacaaacatggctcaacaatrtatggtaggattcgtgtttcaggaaactacatgactgcagtgtgaaaggtggacagacggggcaggggtggaggcacggaggccagtgaggaggctgctgctgtggactgtggaagcacaggcctcgggctgcagtgtggggaccgcgtagtgcatgtccgaggaatttcactggttgaactaacaggacttggtgagtggtgggcttccagcagggtggggaagagggaggttgtccaggctgtatcagaggtttgaaacctagaaggatggtgggggcccttctcagaaatgagaaccacttgtggaaagtgatattctccattttagcctgttgagtcaaggcattttctaaggaggaggagacagggtgtgcacctgggtgcagcagggtgaaa

SEQ ID NO: 629426 - DNA, 457 bp, Homo sapiens
acatcctccatggggagttagaccatcttgcagcacaagcagagggtgccctcccaggcctgccccaccaagcccacccaacacccacccatgttaaagcctttttttggagaaaattgttattttgctctgagcttcctcccttctttaaaccaagtgcggagggcttcaagacgttgggggacatgggaacctgaattgtcctcacatatcacagagtctaaaggcagtgtgtggtggtggaatggggagagccagggccaccctgggaatggctcatgctgccaggctagrcaaaggatatctgatttttccagtggaccggatgagggcctgtggagggagctggaggcgggtggggtgaggacctcccaacagagggtactgctggaactgatgtctgaggggagaggttgcaaaccagagggggcattgttcctttgggtgggggtggcag

SEQ ID NO: 629427 - DNA, 658 bp, Homo sapiens
atatctgaaacaaaacaatgagataccaccacacaccagtcagaatggttatttactgaagagtcaaaaaataacagatgctggcaaagatgcagagaaaagggaacacttatatattgttgctggaaatgtaaattagtacaatctctatggaaaacagtatggagatttctcaaataactaaaaatagaactatcacgcaatccagcaatcccactactgggtatctaccccaaaagaaaagaaaccatgatataaaaaagacagctgctgctgtttatcacagctctgttcacaatagcaaagatatagaatcaatctgtgtccatcaacagatgagcggataaagaaaatatggtatatacactacggaatactattcagccataaaagacaatgaaatmatgtcttttgcagtaacacagatagaactggaagccattatcttaaatgaaataactcaaacagaaagtcaaataccacatgttctcacttgtaagtgggagctaaataatgtgtacacatggacacagagagtggaataacaactttggaaattcagaagggtggcagggtgggaggcgggtaaaggatgaagaattacttaatggctacaatatacgctatttgggtgatgggtacactaaaagcctagact

SEQ ID NO: 629428 - DNA, 641 bp, Homo sapiens
ttggctttctctggttgaccctgagttggaggtcgggtagaaattggggtgaaaatgacaatccttgatgaggaggtcctggccgcttggggcggctttttgctgagaggtttgcttggcttcctggtgctgccgcagatgctgggtcagggcgccggtgtcccccgtggtgtctgtcctcttgtgccttcactctcacttcagagctgcagggtgcagctgccactgcctgggctgggggaagtggcyacctggactcaagccttggtggggagcaagacagtgcttatcgctcaagaggtggcctgtgtgcttgaccaagctgagaccttgcaggggtgcagccaaggggcccctcagatgcctgaggtggggtgtggcccagccagggctcccacagcccagggctattggccccaagaaacttcgtctggctgtgcgatgtcctagtgcttggagaaacgctggcacttcggtccccagccatcacaattccaccaccacggtcaccgctgcaggggcacagccaggtgggcagtggaagcacagagagatgccaggaccactggagctgctgtgggctgccctagagggacttggaaaggagcaaggaggagggaggaagctgcctgccctcttcc

SEQ ID NO: 629429 - DNA, 639 bp, Homo sapiens
tcaacacacatgggcaccacctggccaggggctgcaggtactcaggatgttccctcagtgagggaytctgccctttcccatctgctggataggaccagactggccttggacatccagaactgcctctggggagaggctggctccaaggactggctccctctgtccactgctaccaggctgtgccagctgacgcttcttctggctgctctgctgtgggagtgctgcactcccagttaaactgcttaagtgacaaaagaccccgggtaatcatgtgattaaaaataaacttgggctgactgatgctgcttgctggggcctatccaaccgggcagggggtgagggggaggaacaggaagacttcagtcccagttcctctgacgcatcaccccaggggatgagggcgcttcagctactccctgtttacaaccgaggatttgagagacccagaaaagaccggggaagcttcaggaactcaaggtggagggtgggtggtcccagcctaggggaatctcaggccacagagacacagagcagaggtcaggataaacgggctggcatttatttgtcgaacacatacagtgtttctatccccagagggagcccttctcatgggttgtcacgagaacccattgcggacaa

SEQ ID NO: 629430 - DNA, 639 bp, Homo sapiens
tcaacacacatgggcaccacctggccaggggctgcaggtactcaggatgttccctcagtgagggattctgccctttcccatctgctggataggaccagactggccttggacatccagaactgcctctggggagaggctggctccaaggactggctccctctgtccactgctaccaggctgtgccagctgacgcttcttctggctgctctgctgtgggagtgctgcactcccagttaaactgcttaagtgacaaaagaccccgggtaatcatgtgattaaaaataaacttgggctgactgatgctgcttgctggggcctatccaaccgggcagggggtgagggggaggaayaggaagacttcagtcccagttcctctgacgcatcaccccaggggatgagggcgcttcagctactccctgtttacaaccgaggatttgagagacccagaaaagaccggggaagcttcaggaactcaaggtggagggtgggtggtcccagcctaggggaatctcaggccacagagacacagagcagaggtcaggataaacgggctggcatttatttgtcgaacacatacagtgtttctatccccagagggagcccttctcatgggttgtcacgagaacccattgcggacaa

SEQ ID NO: 629431 - DNA, 411 bp, Homo sapiens
agatgtaaatttggcaagtggtttagtgtggtgtttctgtagctctgtgtggcaggggaggaacttttccatttttagaaccgaaaatgtttagtcactgatgcttttaaagaaaatgacaggcgtgtagacatgtaccacagagcacattatcctgtggtttcagcagagaggccaagaaatatgatggcggccccaaggtgcaattgacttcattgcttgagttgcatcagcccatgagtatgaatctcaagcmcttcctgggggagagttggcctggactagccacctgcaatgggagatgagtgggcccacttcctcccggggtcctgtggggaggtcaggcaatgtgaacttggaagacatctcccaggcttgtaaccaggtgctgcttgtcttcccagctgacac

SEQ ID NO: 629432 - DNA, 457 bp, Homo sapiens
cagcctcaagcaatcctgtggtggcggaggttgggcaggcacctaaaactctggaggaggggatccttctttctggccagaggagctgtggtccacacatgtggaggaatccccattgcttttggcctctctctctctttttctgccatttgaccgtggatgaaggtccatttgcagtaagtttatggcaaagcagggaaattaattaaggtcccagtttttcatccagaagcctgataaaggggtctccatggacacggaaaatgtcagggagactgtagtgaggagggagcagaacagggatcgtgtgaagtggtgtctgaacttctagactcagctccaastggtgcacaggtggatctgacctcgcacagcatatcaatgatattcagaaaagcattaagagatgaaaccaccaccatctccaagcttggcgagtgtctgtgcatacgtggga

SEQ ID NO: 629433 - DNA, 524 bp, Homo sapiens
aacagttattttgttgtgtattaattattctataacctgagtcacactgtatgactcttctgtgatttgttttgtaaaaaaatctgtgcccctgagagtaaccctgatgcacacggctgtagctcatcagtttccactatggaatcacagcccgtgagctggatgctccttgatctggctctctagcccactgaggatggactttttttgtcccaagtactgcggctgcaggcccactgacaatgtctcctggtgcacatgggcacactcgggagaggtgtggggtgggccccgggcaygcacacattccctctcatctgattagactcctgcccatggctgtgagtagcgtggctgaggactctggccgctccatgtcctttactcctactcgctactgtcaggcttggacctttctgcggaattgttggcaggtggcaggtgcctcactgttttggttcacctttctgtgatccctcctgaaactggattcaccgggtattttcctggtgagttaggctttc

SEQ ID NO: 629434 - DNA, 565 bp, Homo sapiens
caagattgaccagctataacagagagaaggcacaaataaacaatattacatrtaaaaagggggacataactttggatacagccaagattacaaacataaggcaatcatacaaataactttgcgccagtaagtttgaagccatagcaaacatgagaaaatatgggggctgggtgtggtggctcacgcctgtaaccccagcaatttgggaggctgcggtgggcagatcacctgagatcgggagtttgagaccagcctggccaacatggtgaaaccccatctctactaaaaatacaaaaattagccggccatggtggcacatacctgtaatcccagctattcgggaggctgaggcaggagaatcacttgaacccgggaggcggaggttgcagtgagccgagatggggccactgcactccagcctgggcgacagagcaagatcctgtctcaaaaataaataaataaataaataacatgaaaatatttttccttgaaaatatgactgaagaacagaacacctgagtaatctattaccactgacaatctaattccaaacctacctacccac

SEQ ID NO: 629435 - DNA, 568 bp, Homo sapiens
gccctgtgggggcacctccctttccttgcctctggaaagccatcaggcctgttctacaggcaaagcaaagatgcagaaatgagccccttgccaagggtcactggccagggaaatggcagagctggggtcctaacaccagggctctctgtgccacagctggaacagtttcaactcccctctccttccccaagcaggtgtggagcctcaaaggcagagcagacggacagatgccacagtggaggggaaggagtggctctgggccggacagctggctccagcattgggactgagagaaaggggcagcagaggggaccggagggggccctgcctgcacctgcagcagcacccaagcccacccaagtcatggctgccctgagctccctacctttgttctgacacaggagcagggcagctgccagccccctattcacgatcggttcctcgtccaggatggtggtggaggaagcagagaactacgggacacgtggcgggggtggttagcaggccataccggctcttctcagccccacccactgrtcaccacctgccaggcaccagccctccacaa

SEQ ID NO: 629436 - DNA, 624 bp, Homo sapiens
ttttgagatcccaaatatctaaacatgttcactgtattatcacatttgattcataatttggctagatgtggatttctaggttgaaagtaattttctctcagaattttgaaggcattcctatgttgcctttcaacttgcttgttgtttttaaggaatgcattatgatttcctatttgcatgtgatttcttgatatggtttgtctctgtttccccacccaaatctcatctcaaattgtaatccccacgtgtcaatggagggtccaggtgaaggtaattggatcatgggggtggtttcccccttgctggtcttgtgataatgagtgagttctcaggagatctggtggttttgtaagtggttggtgatttctcctgtgttcattctctttcctgctgccttgtgaagaaggtgcatgtttcgccttccccttctgccaygattgtaagtttcttgaggcccccccagccatgtggaactgtgagtcaattcaacctctttcctttataaattacccagtcttgggtaattctttatagcagtgtgaaaaccaactaatacacttatttttcctttggaagtttttagaatcttctttatgtcctgagtattctgatatttactgatga

SEQ ID NO: 629437 - DNA, 415 bp, Homo sapiens
gaatcaaaaattctgggatctgtatgttaacaggcccttcaggtgattctgacactcagctgaagtttaaaataccactgccccaggaaggccctacctggtcgtgtggtatgcctggattgaggggttggtgctttttaacctccatttgtaaggaagttactgcatccaccttgctgagaagccctgcagctggggatcacaatgataatgttcagagccatgcccagtccttgtgactagctcccagaggcttctaaacccaagcatgagggaataaggcagcccggtggttgcaactgccagcccagctgaagcatgaagcactctctgggtcagaacttatggtaggcaagcagcacccmacacctcgggacctcaaactgaagcaggtcccggagagtgaggcagatct

SEQ ID NO: 629438 - DNA, 505 bp, Homo sapiens
ctcacactcttttttgggctttcttgttttatttctaaactgttatacagagtccttaataaggttatacctcatctgctttttcttttggtaaaggatagagaaattagcaagctacctgattttaagaagtttagtgctacaggttgaatatcccttatctgaaatgcttgggaccagaagtgtttcagatttcaaatttttttttttttttkggaatatttgcaatacagttaccagttgagcatcccaaatctgaaatccaaaatactccaatgcacatttcctttgagtgttatgtcagcactcaaaaagttccagattttggatttcagatttttggattagggatattcaatctgtaacagttatattttctttgtaaggctgtcttaaatcatttctacaaaattgtccctccctaacgaggcaaaagcttataaatctatcaggtaagtgctacctttcacatattctttgtagtgccaaataatagggaggatac

SEQ ID NO: 629439 - DNA, 591 bp, Homo sapiens
agaatgtgagtctgggggaaatttttaaatgttcccaagtccacatgactattaagtagcaaaggtaagatttaaacctagacatcctaactacagatcccaagttcttccaccctaagttatactggcattgcatcaggttcaaaagataaactcattaaaaaaacaaacaaacaaaaaaaaaacaaaaaaacttttctctgcccttaggcagtctgcagcctaagccagaaagagaaaagcagcatataaagttaacacacggcatttkgggaccttctcaggggatcgtctaaaccataaagaataaagagaatttagccatgctaagaaatgtagaaaaggatggcaaccacgccctgaaatgggaactgcttgtataattccagagttatggaaaaacctcgctcaactatggaacttattttggctgtttgcctaagagatgggaaaacaaagttgaagcatttggctttttagccctaagtttgagatgcattcggaaaaggtatcgtcaaaaatgttaagtaattaaaaataaacaactcagaagaaatgaaaagaaaatatcagaggctatgggaagacttc

SEQ ID NO: 629440 - DNA, 591 bp, Homo sapiens
agaatgtgagtctgggggaaatttttaaatgttcccaagtccacatgactattaagtagcaaaggtaagatttaaacctagacatcctaactacagatcccaagttcttccaccctaagttatactggcattgcatcaggttcaaaagataaactcattaaaaaaacaaacaaacaaaaaaaaaacaaaaaaacttttctctgcccttaggcagtctgcagcctaagccagaaagagaaaagcagcatataaagttaacacacggcatttggggaccttctcaggggatcgtctaaaccataaagaataaagagaatttagccatgctaagaaatgtagaaaaggatggcaaccacgccctgaaatgggaactrcttgtataattccagagttatggaaaaacctcgctcaactatggaacttattttggctgtttgcctaagagatgggaaaacaaagttgaagcatttggctttttagccctaagtttgagatgcattcggaaaaggtatcgtcaaaaatgttaagtaattaaaaataaacaactcagaagaaatgaaaagaaaatatcagaggctatgggaagacttc

SEQ ID NO: 629441 - DNA, 544 bp, Homo sapiens
tttggtttgtgtgtttgtcaaatctctttccatccttttacttttatcatacataaggctatatatttaatgtagtacaatggactgaatgtttatgtcaacccaaattaatatgttgaaatcctaatctcaatgtaatggtatttggaggtagggtttttagaaggaaattaggtcatgagcatggagttcatgacctaattcatgaatggaattagtgcccttagaagaaaaggccagagagtgagctagccctctttcctccatgtgaggatagaatgggaagtctgcaaccttgcaagaggcctctcaccagaaatcaacacactggcaaactgatcttatacttccagcctccagaactgtgaaaaataaatttctaaagtttataagccaccctgtctaaggtatttgtaaaagcagcctgaactgaataaaacaagtacgtttcttgtagatagaatatarctatatgccttagatttttattcagtctaacaattttgtaattggtgtgtttataacacctatagaaaatgctatt

SEQ ID NO: 629442 - DNA, 544 bp, Homo sapiens
tttggtttgtgtgtttgtcaaatctctttccatccttttacttttatcatacataaggctatatatttaatgtagtacaatggactgaatgtttatgtcaacccaaattaatatgttgaaatcctaatctcaatgtaatggtatttggaggtagggtttttagaaggaaattaggtcatgagcatggagttcatgacctaattcatgaatggaattagtgcccttagaagaaaaggccagagagtgagctagccctctttcctccatgtgaggatagaatgggaagtctgcaaccttgcaagaggcctctcaccagaaatcaacacactggcaaactgatcttatacttccagcctccagaactgtgaaaaataaatttctaaagtttataagccaccctgtctaaggtatttgtaaaagcagcctgaactgaataaaacaagtacgtttcttgtagatagaatataactatatgccttagatttttattcagtctaacaattttgtaattggtgtgtttataayacctatagaaaatgctatt

SEQ ID NO: 629443 - DNA, 600 bp, Homo sapiens
tgctagtgtgaatagtgatgcaaagaacattcaagtgcatatgtcttttgggtagaaagattggttttgttttggatatatacctagtaatgggagggctaggtcgaatgatagctctgtttaaagttctttgagaaatcaccaaactgctttccacagtggctgaactaatttccattctcacygacagtatataataattgccttttctctgcatccttgccagcatcttttgctttttgactttttaataatagcagttctaactggtatgagatgacatctccttgtgattttgagttgcatttctctgaagattagcgatgataatttttttcatgtttgttggcctcttgtatgttttctttttaggagtgtctgttaatgtcattcactcactttttaatggggttattcatttatgcttgttgaactgtttacattccttatagcttctggatactagacttttgtcagatgcatagtttgtagatattttcttccattctgacaggctgtctgtttacttggttgatcatttcttttgttgtgcagaagctcttttgtttaactagatctgacttgtcaatttttgttttt

SEQ ID NO: 629444 - DNA, 588 bp, Homo sapiens
cagacatacacagagagaaggtcatgtgaagatggaggattggagtgatgcatccataggccaaggaacacyaaagattgctgtcaaaccctcagaagctggaaagaggcaaggaagaatttccctacaagttttagagggagcatggtcctgcaacttgttcttctagcctccagaactgtgagacagtatttctgttgttctaaggcacctgttttattgtattttgttatagcgcccaaggaaacaaagttggtcaaacatggggctagtaagtagtgatgcacaatcatcctttcctggttccaaagcttacatgttttctcctttacaaagaaaattatcttcaccaaaaccttttaaggatgaattaaagcttataaggtggaagggaaaggaaagtgccttttatcggaaaattttgtgagttcaggctaactctaaaggccctcaaccttagcagtattgacagtttgaactgaatatacatatattttcaggtggtctttcctatgcattgtagaatgtttgacatcatctctgacctcaacctactagatgtcagcagcacctctttcagctaagaca

SEQ ID NO: 629445 - DNA, 494 bp, Homo sapiens
tttatgatggttaattttatgtgtcaacttgactggattgcagggtgctcagacatttggctgaatattgtttttggttatatctctgaggttgtttctggagattagtctaagaatcaggctaatctccagaaacagttgaatcagtagtctaagaaaagcagactgactttcccaatgtatgtggccatcatctaatcttttatgatgtccaatagaacaaaagataggaagggaggattcactctctctgtttgatttgggacaccattctttctattttctcagactaggactcacatcattggccctytggtcctcagaactgcaccactggtcttcttcagtctcaagcttgcagattatgggattcttttgcttccataattgtgtaagcaaatgccttacaataaataaacctctctatattaatagatagacagatagatagataatagattctcctattgcttctgattctctgttgaacccta

SEQ ID NO: 629446 - DNA, 494 bp, Homo sapiens
tttatgatggttaattttatgtgtcaacttgactggattgcagggtgctcagacatttggctgaatattgtttttggttatatctctgaggttgtttctggagattagtctaagaatcaggctaatctccagaaacagttgaatcagtagtctaagaaaagcagactgactttcccaatgtatgtggccatcatctaatcttttatgatgtccaatagaacaaaagataggaagggaggattcactctctctgtttgatttgggacaccattctttctattttctcagactaggactcacatcattggccctttggtcctcagaactgcaccactggtcttcttcagtctcaagcttgcagattatgggattyttttgcttccataattgtgtaagcaaatgccttacaataaataaacctctctatattaatagatagacagatagatagataatagattctcctattgcttctgattctctgttgaacccta

SEQ ID NO: 629447 - DNA, 622 bp, Homo sapiens
agtgattagatgcacaagtgttggaaacaggcaagcttagatttgagccttggcctaccctctactagatgtagttacctcatcaaattcattaaattcatctatgaaatggagtagttattgtgtaagtgatatgtttgttgcaaaactttcaatacatattaccttctctctaataggcagttaataatacaatttgaaatgccttgtccatttctttgcctggagaacctccttcaaaattctaatttcatcctaatgttacttttctcaattctagtgctgtttcttctaaaatattataaaaactaatgttttttactagtaaacataygtttttaaacttctacatcacaagcacctaacatagtgactaacacttagaaggtgcaataaacatttgttgaattacatttgatcacacagaccttaattctataatagatgtgagaggcatattattgcacagtgtatgtcaataagcagcaaatgttttcatagaaaaaccaatttaaaatagttcacatattgacattattgtttaaaagtagcatagatgttaagaaaccaagtgataattatatggtggacttgtttttttccatttttgcctttacaaata

SEQ ID NO: 629448 - DNA, 594 bp, Homo sapiens
ttgtagtccagtttgaggtggcggtgtctgatttacacagggcttatagattggttcgatcatgtatgatgtttacataatgcacagggaagtctggtctccccaccctaatgttattatgcaaatgggctgtccagttgatcagcaccatcttgtctgctccttagagtacacatagctaacagagaagagaagatggagccaccatcttgaaaatgtctagtgcttagtttctgccagcattcaccgatgcaaactcccagcttgcttgtctatgtctgcaggtcaactttacaggctactctttgttagtaaatgatttggggctgtgtttcattaaaaagaaaagcattaccaaagactgttacacccttgctatctgcctaagtgatttcttcttaactcctctatcattcccctctctggagtggtawccctaactgcagttaaggggtgttggatgatgactctttctggctacttcctgctgaaaagggacgtcatgtggggaacagcagctagggctcctcttggttcgatctaagggttcctggaagaaagatgcatccatgtgttgttcagtctaaagctcca

SEQ ID NO: 629449 - DNA, 540 bp, Homo sapiens
gctcaaatcttctgacttctcctaaacatccctcttttaaacaaccaactgttctctttaggagaagtatttatcatacaagatcctttcttakgtaaaatattttttcctttataacctttgtatatagccagggtgtgacattaccaaacccaataagaagttctagcagattcagtgatagtaaaactttcatacttcttttttcttttcttttttttttttgggtgactattatccctcctgtaaggataataattaagcaaaatactacagcagtggaaactctctgtctgatattccagttagaaggtgctactgtgtatagccctactgtgaatagtagagggagtatagcaatttctgcaagtgtggtgtagtagataattttcatctaaagttttacctgccaagatacagaatttccctttggggagtctatgaagtttcttggctttattttcccaaacaaataaacctctgggttatgggcaccctactcactttcattacctggcagaatttgcagaataattgccc

SEQ ID NO: 629450 - DNA, 540 bp, Homo sapiens
gctcaaatcttctgacttctcctaaacatccctcttttaaacaaccaactgttctctttaggagaagtatttatcatacaagatcctttcttatgtaaaatattttttcctttataacctttgtatatagccaggrtgtgacattaccaaacccaataagaagttctagcagattcagtgatagtaaaactttcatacttcttttttcttttcttttttttttttgggtgactattatccctcctgtaaggataataattaagcaaaatactacagcagtggaaactctctgtctgatattccagttagaaggtgctactgtgtatagccctactgtgaatagtagagggagtatagcaatttctgcaagtgtggtgtagtagataattttcatctaaagttttacctgccaagatacagaatttccctttggggagtctatgaagtttcttggctttattttcccaaacaaataaacctctgggttatgggcaccctactcactttcattacctggcagaatttgcagaataattgccc

SEQ ID NO: 629451 - DNA, 540 bp, Homo sapiens
gctcaaatcttctgacttctcctaaacatccctcttttaaacaaccaactgttctctttaggagaagtatttatcatacaagatcctttcttatgtaaaatattttttcctttataacctttgtatatagccagggtgtgacattaccaaacccaataagaagttctagmagattcagtgatagtaaaactttcatacttcttttttcttttcttttttttttttgggtgactattatccctcctgtaaggataataattaagcaaaatactacagcagtggaaactctctgtctgatattccagttagaaggtgctactgtgtatagccctactgtgaatagtagagggagtatagcaatttctgcaagtgtggtgtagtagataattttcatctaaagttttacctgccaagatacagaatttccctttggggagtctatgaagtttcttggctttattttcccaaacaaataaacctctgggttatgggcaccctactcactttcattacctggcagaatttgcagaataattgccc

SEQ ID NO: 629452 - DNA, 488 bp, Homo sapiens
attccatgagaggagaaaacacttgatattaaaggaaaaccagaattatctgccatagtatgcgccttggtcagccaatcatttgtgtayacttccttccacatagagaacgtattcatctcatacccaggggggagacttcaaagtctcattcatgaaagtccattgaagtccatgaacttgaggttatgagtactcacctttattaggtctatctatggttcttcatgatccagtggcctataacatacccaaaacgcaacagtagagtaggaacagtataaccacactaaaatgtccatctgacttgtcaaatttgtggatatagagttgctcacaattttcccttgttatttttgtgtctgtgaaggtatgtaatgatgtcccttattcaattcctgatattggtatttatgtcttttctcatttttggttgccagtatgactagagttttattttttccaaaaacacagcttttttttaaact

SEQ ID NO: 629453 - DNA, 515 bp, Homo sapiens
aatggtcagaacacacaaagcaaamctgaacagaacctttaatttagagagggcactatctgctcttaattcctggggtttcatgaggaaaagaaagggttttttttgtttgtttgtttgcttttttccccacaatggggtctgtggcacctcctctgtttttcccaaggactaccagaagttatcttagggcctctcacacatgcattaagagtgtcaagaaataaaatggagaaagatgatttagtcaactgagaaaaataaaaatttttttccagaaaacaagatccaagaagagaaaaatataaaggccttttaaatatatttattacttgaatacccagttttaattaagctgagcactctttaacaaaatccctttaaatccactgttactcaactttagctatgccaagcagttaagattttcagcttctgaactttacaaaaagtaacctcacaggtgaaaccaacaagccttaattatgttacgatgtaacagtgagtgtacaagg

SEQ ID NO: 629454 - DNA, 513 bp, Homo sapiens
attttcttccgtatctaacatgtattaagtgaccttattcagtgtacatataatatactatgcataactattcaacaggtataatattataaagataatattagtttaagatgttgtgtgtgtttgtgtaacttgaataagcttctgtaacaaatagatcataggaggtatagtggctycaagataaatggatgcttttttctcacctacctaatagttcaacgtgggtggctctgcttcacatagcataacttacgaagctctgcttcttccatcctatggcccctgcttcccctagattttcactgaaatctgcatccatcaggcaagagtgaagaggtagtgaaggagatatagcttcttcttaaacgtctttgtctggaaatggcacatatcacttctacttgcattccagtggttaaaacatcatcatttggcctcaagtagctaaaaaggaagctgaaatggagccttactctgtacataggaagaagaaacattgatttatcttgg

SEQ ID NO: 629455 - DNA, 573 bp, Homo sapiens
tctgaaacctacacctgtttaagtgttgtcatataacaaataaggttctttgcagatgtgagtaagttaatgattttgagactgggagattatcttggattgttcaggtgggccctaaaataccaccacaagtgctcttatcagagagaggcaaggcgatacttaatccagacagaagaggaaaagaaagtgttaagatggaggcagaaattgggttaatatggaggcaagccaagaaacattgataaccaacattagttgaaagaagcaaggaacagatctctctctggaggagacccccatcctgccaataccctgatttcaatccaatgaggctaattttggatttctggtctccagaaccatgaaagaataaatttctgttgtttaaatccaccaagtttgttgtaatttgttaatgcagccacaggaaactaatacaaggagtaatggggtatcataactgaaacttactcttaacwtttttgaaacaagagaaatgttaacaaggaaatctgggtgaaagttatacaacaggtccctatattttttcaatttctatgtaaattttaa

SEQ ID NO: 629456 - DNA, 573 bp, Homo sapiens
tctgaaacctacacctgtttaagtgttgtcatataacaaataaggttctttgcagatgtgagtaagttaatgattttgagactgggagattatcttggattgttcaggtgggccctaaaataccaccacaagtgctcttatcagagagaggcaaggcgatacttaatccagacagaagaggaaaagaaagtgttaagatggaggcagaaattgggttaatatggaggcaagccaagaaacattgataaccaacattagttgaaagaagcaaggaacagatctctctctggaggagacccccatcctgccaataccctgatttcaatccaatgaggctaattttggatttctggtctccagaaccatgaaagaataaatttctgttgtttaaatccaccaagtttgttgtaatttgttaatgcagccacaggaaactaatacaaggagtaatggggtatcataactgaaacttactcttaacattttygaaacaagagaaatgttaacaaggaaatctgggtgaaagttatacaacaggtccctatattttttcaatttctatgtaaattttaa

SEQ ID NO: 629457 - DNA, 575 bp, Homo sapiens
attattgattttaacctcaagaagaggaaaataaaattgattcctaggtaattacaacttaaaatacatagagtgtgtgcagatactgactgattaaatataatgaatatttaaaaactgatataaaattgtgaccaagttggagagaatcggattgtggttgtgacagtaattaaaacaaaaattgagacctggctggagtgtacttcggtctcgtgaatcttgcgaatctaccatttcctctcctttcttcaatgtcactttttttatttctcaaatagaactatggtagcctgaatcttatcttccmaaggttttgtttctttatcccataaatagatataatatatctaatacatggggttgttgtaagaaaatttaaaaatcccagtgctgaacacagggcttggccaaaaaaaaaaatgaattaataattgctgttattatgtaaattttacccataatagatttgaggaggaggttgatgatgctgagtttttcaacactgtattctttaggattagtagcactctattatatacagaagcaacactcaataattgtttgctgaattg

SEQ ID NO: 629458 - DNA, 575 bp, Homo sapiens
attattgattttaacctcaagaagaggaaaataaaattgattcctaggtaattacaacttaaaatacatagagtgtgtgcagatactgactgattaaatataatgaatatttaaaaactgatataaaattgtgaccaagttggagagaatcggattgtggttgtgacagtaattaaaacaaaaattgagacctggctggagtgtacttcggtctcgtgaatcttgcgaatctaccatttcctctcctttcttcaatgtcactttttttatttctcaaatagaactatggtagcctgaatcttatcttcccaaggttttgtttctttatccmataaatagatataatatatctaatacatggggttgttgtaagaaaatttaaaaatcccagtgctgaacacagggcttggccaaaaaaaaaaatgaattaataattgctgttattatgtaaattttacccataatagatttgaggaggaggttgatgatgctgagtttttcaacactgtattctttaggattagtagcactctattatatacagaagcaacactcaataattgtttgctgaattg

SEQ ID NO: 629459 - DNA, 658 bp, Homo sapiens
gttcaaaggtgaaccatgaaaaagcctcaaaaatatttcagcccactttcttcatatacagaaataacaaatggcaatataaataagaaataaggtgagatgtgacatcatccacaataaaataattctcagtttatgatatagagccggtacaaaggaaaaacaacaacaataacaactgtattttatctcttttagagccctgtgtggggctagaaattcacaagtctctgtctttgctcatgctagttcctcaacatggttttccagccctgcttttggtttcttctttgcctgtttacattgtacttatcaatgggacccagatcaaaggctagtgtctgtttgcaccttccttaatctctctaattaggatgatttttttttttttacttkggttctttcaatatgctttctctatctttgtgttcattttaattttgcatggttaggtgttaataaagtcatttctctcatttttatgcatattccttaaagtggtatatattttactcaattgtgtagcataatcagaactcaatattacagtgactggcaaagtacataaaatatttgttgaatgagtaagatgaagtgttttatttgtaatgcttttcagatagcatatagtatttgaaactcattggagaatcactaa

SEQ ID NO: 629460 - DNA, 594 bp, Homo sapiens
gtctcactatgcttctcaggttggtctcaatctcctgtcctcaagcaatcctttctcttccgcctcccaagtcattggtattacaggtcactgcacccagcacaaattattttttatcacttttctttacttacattaagacagatgctccttttttggcatgtcttattttctttgagcttgagaaacataggcaccaaaaamcgtttggagagatgacagtttttttctgcctaacaaatttgactgtgtacattttgatttatttctttgaaacaccagtctgatccaataatcttactttaaagcaaacttgggaaacagccaaactagaatccttggtgtgcttaaacaaaacccaagtgtttgagaataaaacatgtatcacttatgcatatagtgattcagtccagatgaactgggaaaacttgttctcatttttttgaggcctctcttgaccaaactattcatatgtaattagaagccacatatagagcttcactaataagtaataaatgcatttaatttcatattgttacctattttaaaaatgaagaatttgggggtctcattgacaaacataaacttaagttt

SEQ ID NO: 629461 - DNA, 484 bp, Homo sapiens
ctcaaaggaaaaatggataagtagcaagagttccatttatctgtgagacaaatgaggtctcaaaacatttgaatgaatggcccaaggacagacagtgactttgaccctggcacagttgcaaatggcagcctcagttcttggctgctgtgtctctttgggttcgccagtgtttttwaaacaagcaaaaaaaaaaaaatgctgtaacatttttactgaggacaacttggctgagttattttgacaaaacacaaatcaccgggaacagctgagctgcttgtacattgcacccatttgtttacccacctgtctagatgctaagaacaatattctaaaacagtgagttcatatatggtgcctacttttggtgttctccttttaccccacttggatccagttaaacctccttgaattatttaggctattcttgaagaatttctcacctagagattcacaggacccctagcaactataaattaaagagcca

SEQ ID NO: 629462 - DNA, 484 bp, Homo sapiens
ctcaaaggaaaaatggataagtagcaagagttccatttatctgtgagacaaatgaggtctcaaaacatttgaatgaatggcccaaggacagacagtgactttgaccctggcacagttgcaaatggcagcctcagttcttggctgctgtgtctctttgggttcgccagtgttttttaaacaagcaaaaaaaaaaaaatgctgtaacatttttactgaggacaacttggctgagttattttgacaaaacacaaatcacygggaacagctgagctgcttgtacattgcacccatttgtttacccacctgtctagatgctaagaacaatattctaaaacagtgagttcatatatggtgcctacttttggtgttctccttttaccccacttggatccagttaaacctccttgaattatttaggctattcttgaagaatttctcacctagagattcacaggacccctagcaactataaattaaagagcca

SEQ ID NO: 629463 - DNA, 648 bp, Homo sapiens
taaccttgtgatctgtccgcctcggcctcccaaagtgctaggattacaggcatgagccactgcgcctggcctaagcccagtattttgaagatttttaccataaaagaatgctgaattttatcaaatgccttttcagcattgattaagatgatcatattgttttatccttcattctgttgatatgatgtatcacattgattgatttgtgtatgttgaaccatccttgtatccctgggataaattccacttggtcatggtgaatgattttttttaacaatattgtttttaatcacactatttttaacacagtgagatttcactttattaaaaaaaaaaacgcagkggtcttttaagtgtggaatattaagatattttcaggactgagggtacaatagattctattaatttgctgatatctcattcacttataaggaggccagctttgaaagccattataacctgcacatatatgtttttaaaaaataagaatgccatacacttatgtagcacttttcctgtcaaagtagatttgttcctattttccattgggtaatgtgaggtgaggcaggtattgtcactgggctctcagagaacaagggttgataggtgcagcaaaccaccatggcacatgtatatctgtgtaacaaa

SEQ ID NO: 629464 - DNA, 648 bp, Homo sapiens
taaccttgtgatctgtccgcctcggcctcccaaagtgctaggattacaggcatgagccactgcgcctggcctaagcccagtattttgaagatttttaccataaaagaatgctgaattttatcaaatgccttttcagcattgattaagatgatcatattgttttatccttcattctgttgatatgatgtatcacattgattgatttgtgtatgttgaaccatccttgtatccctgggataaattccacttggtcatggtgaatgattttttttaacaatattgtttttaatcacactatttttaacacagtgagatttcactttattaaaaaaaaaaacgcaggggtcttttaagtgtggaatattaagatattttcaggactgagggtacratagattctattaatttgctgatatctcattcacttataaggaggccagctttgaaagccattataacctgcacatatatgtttttaaaaaataagaatgccatacacttatgtagcacttttcctgtcaaagtagatttgttcctattttccattgggtaatgtgaggtgaggcaggtattgtcactgggctctcagagaacaagggttgataggtgcagcaaaccaccatggcacatgtatatctgtgtaacaaa

SEQ ID NO: 629465 - DNA, 529 bp, Homo sapiens
aatcctcccattctctattaggtatctattatctccattttgctaatgaggtaactgatgctcagagtagggaacttgtcaaagacacacattcagtgagtggaagagccgagattgaacgcaggattcctaacttcaatttgtatttctttaagattgcactctttactgtgtgagaaaagacataaatactatagagtgtatcaaaatccttcatacacctcctaccgtctttaaaacagacctagttttaagaaaaattcatttcacaaagagccataatttttcatcttcttgttcagcaatgcagtttcattcctgatgctgctattaactcttaaataatctaaacctaatgaataatgggaaagtcacaggcaggtgaaaggagaattggggccttggaattctcctgtgatgagtaattagtttatcctgagaraaaccagtcttttaaaacaacagtagcctctcaagtcatggagggtctaactagtctcactatcatgatttcataacgccgggaggg

SEQ ID NO: 629466 - DNA, 483 bp, Homo sapiens
tgggttaagtctgcttgtgttctataaccttgttgtacttaaatattgatatatttctataggtttggaaagttctctgttatttttttcaatacgctttctaccccaatctctctttctgtctcctrtttaaggccaataactcttagattttcccttttcatgctattttataaatcttgtaggcatgcttcattttttttgttattgctttcctctgtctgtgtgttttcaaatagcctgttcaagcacacaaatcctttcttctccttcatccattctgctcttgagagactctgatgcatttttctgtttgtcagttaatagggctgttccagaatttctgcttgagtttttaagattattttaatctctttgttaaaattatctgatggaattctgaatttcttctctgtaatgtcctgaatttcattgcgtttcttcaaaacagctattttgagttatctgaaaggtcacatatct

SEQ ID NO: 629467 - DNA, 570 bp, Homo sapiens
ttcctaagaactgaagaaatggattgtcaaataactgttgaagatccaggtccaaaagcctgtcacataagtattaatggaattttaaattaattaatgcattatatattaataatatatttttgattagataatgagagaatatatgacctttgcaagaaaattgaatttagtcttggatagctacaacagctgtaatagaaacagatactctccataatggggcaagggagcaagaacttatccccttccccttattttcaattaattacatttcagctctccrctaatttattctaatatgacctcgatatcactggtttttgaatcaaacttatgccgcacattaaaaaaagtcttacaattcaacaacaaaagatggttgcattttgttttataaaccaccaatcttgttacattaggaaagctctatcgggcagctttatttctggggtactacttcatagtatatttattgatgttttcttttctcctcctcctcctctctgtcctcctccttcactgaatttctcttgctctcagtataactaaaaattagattttttttta

SEQ ID NO: 629468 - DNA, 570 bp, Homo sapiens
ttcctaagaactgaagaaatggattgtcaaataactgttgaagatccaggtccaaaagcctgtcacataagtattaatggaattttaaattaattaatgcattatatattaataatatatttttgattagataatgagagaatatatgacctttgcaagaaaattgaatttagtcttggatagctacaacagctgtaatagaaacagatactctccataatggggcaagggagcaagaacttatccccttccccttattttcaattaattacatttcagctctccgctaatttattctaatatgacctcgatatcactggtttttgaatcaaacttatgccgcacattaaaaaaagtcttacaattcaacaacaaaagatggttscattttgttttataaaccaccaatcttgttacattaggaaagctctatcgggcagctttatttctggggtactacttcatagtatatttattgatgttttcttttctcctcctcctcctctctgtcctcctccttcactgaatttctcttgctctcagtataactaaaaattagattttttttta

SEQ ID NO: 629469 - DNA, 540 bp, Homo sapiens
atattggcgtgaacatgtaataggttattaaagatcattgaatatttaaatttgtgttttagtttttaatatagtaaataccagtggatattgcccacataaacaaaagtcatttggagcattcagtacttcttaggagtgcaaaggtgttatgaaacttagaaagtttgagaattgctattgtaaactataatggtttatcttaaaataccttcactgcaaatactgatttatctaataggtatcagaacaatttatgctaaatgaaagatgtctttagttatattttatattgaaatgtgtgaatakttaagcctaagccttagaggaacaatcatttttattctctagaatattttctttggcagatattttataagacaaaatttattgaacaagttgtttttgtaattcttttaatttttttatgtttcaaaaaattgattttatgtaatttttatattatattttcagggtatttaaaagcagaaaatgataattatgatttatttatctgagaggtgaacagggtactatatt

SEQ ID NO: 629470 - DNA, 579 bp, Homo sapiens
aaaaccactgtatttaaagtaagcacagtgagcacagagccctactaatttacttccccctcatctccaattttagcttctgaggcaacacaatgtgtaaaccagtgatctggttcaacttgctcaatttacgaataaggaaacatagcctaaagaggtttagtgacatattcaaagtcaaacagcttattagaagtagagccaggataaaaacaaagtctgtgaaccctaatgctgttttctatacactatgctacctgggtggtacacgaattaaatatactacccatcatatggatagaaaggtgtttagagtattccaacagtgagggaaagtgtcactgttgagtacaaaaaatcyatatgctttctcatttgtttgttttaatttgttaaatttgtttaatttgttagcttatttaattattcatttttcacaggaaatgaacaggaaacacaggatagatgaataaatagaaaatgataaagatacagacaccacacaagctatgcaattacagttctgtgtaggcgaaggacttgttaaaaatgaatctgttctcttatgagtgcccagag

SEQ ID NO: 629471 - DNA, 551 bp, Homo sapiens
tcacaatgagctctaagaatgtgtcaaactgtcaattgatttcaaagataacctaacaaggttaataactcttatcttccggatgataacctaataactaagtattgcacatctttagtgcccaaagctgctctatttgtcatgttatttttcaggaaaatacaaatggctattcaaaatttacatgatgcatttgcaccaggtgagggttaaatcataccaggacccaatgctgaaataaaaaatttgaataatttaagtgaaaagagactcaagtcaccacataacatggtgaggtagaagcatgatgaatgcaaaagtatatccagtactacattcagttgtacatcgtgatttaatttcagaaagataacatcctcaatcacattaacttaatgattttatttgaattttattttattttaattgtattcaaaccttayttgaaaatttgctctggtcttataattgaatatacattataaatattagggtctaattcataatgcaatggttttatattttaaatattattataataaaaatgcata

SEQ ID NO: 629472 - DNA, 603 bp, Homo sapiens
attaacatgttccaggatggattctagtccatattctcttttctctccataactgtgaatttgtactgttttctgcactactgatatttgcctaaaatgttcttgattgcagtatattttaaattcacaattgctctattttttatcttctgcaataattttcctttttctttgcatattctatatttttagtttatgactaattcatctgtggatgactcaagaattctgttttattctggcacatctgaaataatttctcttctcttgagatcaccaaatatatattcaaattttattctctaaatttcaccactgaaggcctaattgtttactcaattttgttttgtttttaactaccagaactttggtacccggtgtgsttactttaaaataatacttttataatgcaaaataatttttaatcaagtgatacaagggtgcccacattaatcatattttcatgaaacccaaacataccagatgcaccaacattaccctatcatggctcctgaagataacagtagagaaaaataggccaaatgaagcaaaaaacttttaaaagttgtaatgtgtgtattttagctgcatatgtgggcaaca

SEQ ID NO: 629473 - DNA, 603 bp, Homo sapiens
attaacatgttccaggatggattctagtccatattctcttttctctccataactgtgaatttgtactgttttctgcactactgatatttgcctaaaatgttcttgattgcagtatattttaaattcacaattgctctattttttatcttctgcaataattttcctttttctttgcatattctatatttttagtttatgactaattcatctgtggatgactcaagaattctgttttattctggcacatctgaaataatttctcttctcttgagatcaccaaatatatattcaaattttattctctaaatttcaccactgaaggcctaattgtttactcaattttgttttgtttttaactaccagaactttggtacccggtgtggttactttaaaataatacttttataatgcaaaataatttttaatcaagtgatacaagggtgcccacattaatcatattttcatgaaacccaaacataccagatgcaccaacattaycctatcatggctcctgaagataacagtagagaaaaataggccaaatgaagcaaaaaacttttaaaagttgtaatgtgtgtattttagctgcatatgtgggcaaca

SEQ ID NO: 629474 - DNA, 561 bp, Homo sapiens
attactttattagccctccccaaattttgaggacattcgtacataaatctgagagttattttcatgagattatctcaccagatggcttacttaaatatttgtaccattgtagaagtaattacttcatctgggagaaaaaaaaaagttcaaaagccctggattatttytgtctgttttcatttgtttcatttctattttactttctagacaggagtaaacttacatttctatgataaatagatgttggtaaggttttggaaaatacatatatgtcaaaatataggaaattctctgtgtcagaaataaccacagttatggtgtaatgaatgcaatactcaacagagagttggaaaataaggcataaattttgagttttagtaaatatgagctatgtaaccttgtgcaagtcacttaatcttactaacatcatattcatctgctaaaaattgagtaaataatggaaactccattgagccattatatgaattaaaacataatgccacatttgaaagtgctaaggaatccacgccagaaaaggctaattaaggagttagtcaatta

SEQ ID NO: 629475 - DNA, 595 bp, Homo sapiens
tttcctctcctttggattttctgtgtttcatgggagatttgggggatggggcacaatggcttcagcttcttctcttccagccatctgactctagataggccatcgttgtttctcagcataaaaacaatcatttaattaatgagatgaaaataagtatttattaaagtgagtaagaggcttttccttggagttagactaccctgggtccatattttggctctaccacttacactccatatatcctttgacaaattatttagtgttcctaggcctctgttttccaaggggtaaaatttagataatttagtgataactgaaggaaagaatacgttaaaagtgcttacaacagaattgaatactcagtgaattcacaactgtaatcatcatttttttttttatcattttactcatgtggctctgaatggttkgctttgctggaacattgacttctcactatttttagtggtcagtaattttagtaaaatagaaacctgatttgtgccccttcaaaattcctatgttggaatcccgacccctaataccttcgaatataaccatatttggtgataagttaaaaggaggcccatatggtggg

SEQ ID NO: 629476 - DNA, 531 bp, Homo sapiens
gtataaaaaaatgaacagtgcattctcaaaggatgtctccttatttttatgatagaatatatattgagcagaaagtttcttaattcagtaagaccccttgacaagctcatatgtattggtatttctattgatactttataaagtcacatttttatttatatgttaatagtgtccattattagaatatctaatttataataaaataatagttggcaacataagaaaaaaaaatgaatggttctcaagagacacagggccagaaattaaaactactcaatccctctaggcccaggcactatcatggaagatgtgggcatgtgagattataagggtcaatactgagtgataaaattacttcagagtttttctataaattaaacaggaacatcaaaagcacacttatgcmaggccagcatctgggcccctgtatcagtttagcaaggttttcatggtgcattgatctgttcttttatttttaaatttttattgtaaagcttattcatcttttgctttaatgtcagtttttttttt

SEQ ID NO: 629477 - DNA, 603 bp, Homo sapiens
ctcaggtttgagttgactgagattctcgggagggcactctggctgagggtgaattttcatcatgaccaagtgggatttatcaaagggacgcaagaatggtttaacatatgcaaatcaatcaatgtgatacatcataccaagagaatgaagggcaaaaaccatatgatcatttccactgctgctagaaaagcatatgataaaattcaacattcctttatgataaaaagtcctcggatgaactgacagatrtaggcttcagacggtggctaataacagactttcctgaggtaaagtagcatgttctaacccaatgcaaaaaagctaagaaccaggataataggttacaggatctgctaactagaataactagtttagaaaggaacataaatgacctgatggagctgaaaaacacagcacaagaacttcatgaagtataaacaagaatcaatggctgaatcaatcaagtggaaggaataatataagagtttgaagaccatcattataaaataaggcagcagacaagattagagaaaaaagaaccaaaaagaatgaacaaaacctgcaagaattatgaaactatgtgaaaagacggaacctacaact

SEQ ID NO: 629478 - DNA, 263 bp, Homo sapiens
aagagctcctggtaaagtgccttgaagtctctggggggaagtttgactggactgcacctgctctgtcttagataggcaggaatatgatctgtttccctrtcacacccctatttcagggctcatgactcctagtcagaaaaatactgtagtctgtctcttggctgcaatgtggttgagagtcatgggaaatgcctgttttgtgactctctgtgggagtgattctggtgcacattctcatcactttatctgaaacagatagcatt

SEQ ID NO: 629479 - DNA, 580 bp, Homo sapiens
tggttaatttataaagaaaaagaggctcaatggactcacagtttcacatggctgggaggcctcacaatcacagcagaaggtgaaggaggagcaaaggcatgtcttacatcacggcaggcaagagagtgtgtgcaggggaactgccctttataaaactatcagatatcatgggacttattcactatcatgaaaacagcatgaaaaaacatgaccccatgattcaattacaccttgctgggtccctgctgtgacacatgggattatgggagctacaattcgagatgagattcgggtgacacagytaaaccatatcacccctagaccctttgactgcctggaaatgttcatgggattaactgagtaaatagtaatgggagtttgtagactgtgtaaatggcactgtaagcatcttgcatcatggaactttgtgcaatgtgactgttttccactcctcagccagggtgtccttaataaagaatgacaccccaaaacaacaaatttggccaaattttaggcagttgtttcagcaccagatgccctggtgaacaaatgatcctattttcacattaattatcaacta

SEQ ID NO: 629480 - DNA, 455 bp, Homo sapiens
ctagagtggtcaccatgtgcccacaactcctcattcattcattcacccattcattgattcagttaagggcacttcccaggatacatagggaaaagatctgggttcaagcttcctggatcccagacaagtcacttatggtctctatagcatagcttcccaacctgagaagtgggactcatagccrcctctcaggccatgactgtgatggttattctgggctgggagagctgctggatgagggtgggatgcgttggcagctgcaaggctgggcccagtatgagggcaaggtccagaggggaggggcctgcctggaggctgggggatgcaccaaaggaccccaacagtccctttccaggcaaggatgcaacaaggccaggagacaaggcctgtgggggtaacattcctgccttcagggcagacccaccggagagggtcagagggaccccccgccaccg

SEQ ID NO: 629481 - DNA, 582 bp, Homo sapiens
tctcttcattcattcagtttattcaacaaaaattattaagagcaaactgctacgcactgacattatttttatatatatatttatttatttattttgaccccatccaatgacctaycaaattggtataatctttatggaagtaaacattatatggtactagcaatactgtaatatttataatacctacaatgtttgaaattatttttttcttttttctcctcaaagtcagctaaatactccgcatcaccacactgcaaaacaaacaaaattccttaccatggtctacaaatctccctatattttcctttcctcttcctatcatactttgctatgagtcataaactttttctaacctctactcaaaagcaagtaaaacctaatcatcacagaaatacaagtcaaaaccacagtgagataccatgtcacaccagtcagaatgactatattaaaaagtcaaataataacaagtgttggtgaggttgtggagaaaagggaacgctaatacactattggtgaaaatgtaaattagtttagcccttgtggaaaacagtgtgaagatttctgaaagaactgaaaatagaa

SEQ ID NO: 629482 - DNA, 585 bp, Homo sapiens
taatagctcttgagttttaaaggaaaaccaaatttacttttgttttccagataatataagcaaggaaaactgtgttttcagaagctcactgattggcatagtttgtggtgttttctatcccagttctttggcttttactaaaaatggacgcctggcaaccaagtaagttcttccttttccttcttttttcttttcttttcttttctttttttttttttttttwaggttaataaactctcttgcgtctttagctgtctatgagagatttgaatcaaaatgtggtagtttggtatttcagatagctaacttttaacttttttgctctctacattatagatctagaaaggcaattatcaatttaggagaagtcaacaaacttctaatagcattcatatccaggagaggtgattaactcttttttctttttaggtatcataccgttccactgccaccaaaaggaagggttttaatccattggatgacgctttgtcaaacacaaatgaaattaatggcgattcctctagtctttcagattatgtttggaatattaaatggtctataccattatgcagtatttgaagagac

SEQ ID NO: 629483 - DNA, 561 bp, Homo sapiens
tcctttaaaggtatcatcttagaagagtcagctaacactttgaaggtgcagaaattaccccgcatagcacttcggattccgcctacttgggcgcttcctcagttccaccggcaccacacctgaatcccttggcttagtcccagcctcatacccgaacaccaccattttggtggctcatgtgacttgccggtgggcggggacccagaacgccctgggcgggaagtggtgctgatttacggctcaacgcctctcgattgcagcccgggcccgccccmactcagtcaaaagccgcgccctccatcctgactgtgattgggcgcggcgtctagaaattacggccacttattcgcttagaggaggtccaggcgcctgtgggcctgcccccctcgccagccgagtatttccttccctgactatttatcagcttagctccctgatctcttcgcgtcctgcgggaaagatggggcggcccgaatgttgtaatgttactgcgctcctgcctctcctcagggcagctgggaactagctgcctgcccctttcagtccttgagggaactcgcc

SEQ ID NO: 629484 - DNA, 561 bp, Homo sapiens
tcctttaaaggtatcatcttagaagagtcagctaacactttgaaggtgcagaaattaccccgcatagcacttcggattccgcctacttgggcgcttcctcagttccaccggcaccacacctgaatcccttggcttagtcccagcctcatacccgaacaccaccattttggtggctcatgtgacttgccggtgggcggggacccagaacgccctgggcgggaagtggtgctgatttacggctcaacgcctctcgattgcagcccgggcccgcccccactcagtcaaaagccgcgccctccatcctgactgtgattgggcgcggcgtctagaaattacggccacttattcgcttagaggaggtccaggcgcctgtgggcctgcccccctcgccagccgagtatttccttccctgactatttatcagcttagctccctgwtctcttcgcgtcctgcgggaaagatggggcggcccgaatgttgtaatgttactgcgctcctgcctctcctcagggcagctgggaactagctgcctgcccctttcagtccttgagggaactcgcc

SEQ ID NO: 629485 - DNA, 625 bp, Homo sapiens
acaatccctagcacaatatccagcacacagaaaataatcaagtaagtcaactgaacacctactttctcttcattcagatctaactcaaatgctctctcttccataaagccatctctgatggttaaaattaatcaycattccgtcttcttctaaaccactttgcctatacgaatttgtcggcagtcttaaacccatatcttattattttatgacttcttgaataatgtcttcatccttcacaagacaaaacatccttgaaaaagtcactagagttatacaacctttgtgtttaggtgataattgtctttgaatttaaaagccctccttcccttccaatctatcactttcaaaaaagcctacataccaattataataacaatagcttatatttattttctatttcctcctttctcttgaaccttccaactcttcttcctcatggccattctcagctgatggtattacttcctattacatggaaaatcagaaggcagattccacaagctcctaacataacatctactgacttacctgtaactgcacccacatagtctgccttcccttatattactatgaataaagaatttgtttctaaggtcaactcctctcttgagcactggaatct

SEQ ID NO: 629486 - DNA, 507 bp, Homo sapiens
ctctgaattccagactcatatccagcygaatgctcaacatttccatttggatgtctaataagcatctcaaacttcacttgtcaaaactgaactccagatcttatccacccaccctcagtctgcttctcctccaatgtatctccatctttcacccttccaattattcagacccaaattcctgaagtcagcattcattcttttctctaattctctacatctatccatcagtaaatcctgtgggctccaacatcaaattatatgcagaatcccatcacttctccctacctccagtgccaccaccctggcacaacccatcatcatctatcccctacattactgcaatgttctactagtttacatgctgtcacctttgccctcctacagtcttttctcttttttttcttttttctttctgtctttgtttgttttgttttgtgttttcttttaagcaggatctctctctgtcacccagatgggaatgtagtggggcaatcactgcacatttca

SEQ ID NO: 629487 - DNA, 537 bp, Homo sapiens
ccactttcttctcttcattgctgtgggaccaggaacaagcctcattttcccatagtgtgtgtttgcaatgactgctggagcggagggtctgtgagaaaggattggggcatcttgccacctcactcagttggatctgtgttctctgcttcaacagaaaagatcccgcaccatcctccaggatccaatggccttggagagagggcygcagggcccacggacattgctgactcttcagaacgtgctgacatggagccaggtcagtccccttgtctgctctgattttctgtcattagctgcaaatttgtggccttgatgagaaatgcaatctcagactctgaacatttgcatgttttttggttggaggcttttacgacttggcagcatagaaagtagaggagttctggccagagtaaaggtagccttctccgggaacagatgcagtaggactggtaggtggcaacggttgctggaaaccaagctggcagccagcatggtgggagggcaaggtgggcaaggatggggcatctagcaggtatg

SEQ ID NO: 629488 - DNA, 562 bp, Homo sapiens
ctgatgaaatctctcccatattttaggggtacgacctggatgattggccmctttggtctctgtagcagaggaggaaatcactggaaggttgaacattgactcttaaatgtgttggtcctgaagtgacacaccacccattggccagaactagccctgtggtcctgcctgatttctgggattccaggaggtgtgggaagacatggatattttaggagcagtaacttcccctgccacagtagatatgatttctattttataggaaaggaattgaggcttagagaaattgtcttgtcaaaggtcttccaaataaaaagtgctggagtctggaccttacataacttctgattaatcatttatttagttattcgacaaagacatatggaagatttaccatgagtgcagcactatgttaagctctggggatatcacaaggaataaaaacaaaggtaggcttttccctcaccctgacaagtatataactacaaactgagatcaatgctgtgcagtagagacataggttctctgaggagctccattaatattttttgctttttggccaggc

SEQ ID NO: 629489 - DNA, 610 bp, Homo sapiens
gcaggtatccaaatccaagaatcttcaactccctcatataaagtggcatagtacagtctctaattgtggatttctatctgcagttggttgaattcatagatgcaaaacctgtatgtccaaagggctgactgtactgtaataaaagttatgtgactatcatctctctcccaaaatatcttattgtgctgtattcacatgaaaatgaaattgtggaaagtgaaagtgctatatttggcaagaaaaaggaatgaagtactaacacatactacaacctagataaaccttgaaaacaygctaagtgaaagaagccagccacaaaaaaacacatgttgtatgatttcatttatacaataacatttccagaatagacaaatccacaggtgcagaaaagagatttgtggttgcctagacctggccaaagcagggatgggaataaggtggtgcagggggtggaggcattaggttaggaagaaatctggggtgactgttaatgggtatgggttcttttggggtgaataatgaaaattttctaaaacggattctggtgatggtttctcgactctgcaaatagtaaaaagcactgaattgtacactttaaatgactgtatgt

SEQ ID NO: 629490 - DNA, 610 bp, Homo sapiens
gcaggtatccaaatccaagaatcttcaactccctcatataaagtggcatagtacagtctctaattgtggatttctatctgcagttggttgaattcatagatgcaaaacctgtatgtccaaagggctgactgtactgtaataaaagttatgtgactatcatctctctcccaaaatatcttattgtgctgtattcacatgaaaatgaaattgtggaaagtgaaagtgctatatttggcaagaaaaaggaatgaagtactaacacatactacaacctagataaaccttgaaaacatgctaagtgaaagaagccagccacaaaaaaacacatgttgtatgatttcatttatacaataacatttccagaatagacaaatccacaggtgsagaaaagagatttgtggttgcctagacctggccaaagcagggatgggaataaggtggtgcagggggtggaggcattaggttaggaagaaatctggggtgactgttaatgggtatgggttcttttggggtgaataatgaaaattttctaaaacggattctggtgatggtttctcgactctgcaaatagtaaaaagcactgaattgtacactttaaatgactgtatgt

SEQ ID NO: 629491 - DNA, 610 bp, Homo sapiens
gcaggtatccaaatccaagaatcttcaactccctcatataaagtggcatagtacagtctctaattgtggatttctatctgcagttggttgaattcatagatgcaaaacctgtatgtccaaagggctgactgtactgtaataaaagttatgtgactatcatctctctcccaaaatatcttattgtgctgtattcacatgaaaatgaaattgtggaaagtgaaagtgctatatttggcaagaaaaaggaatgaagtactaacacatactacaacctagataaaccttgaaaacatgctaagtgaaagaagccagccacaaaaaaacacatgttgtatgatttcatttatacaataacatttccagaatagacaaatccacaggtgcagaaaagagatttgtggttgcctagacctggccaaagcagggatgggaataaggtggtgcagsgggtggaggcattaggttaggaagaaatctggggtgactgttaatgggtatgggttcttttggggtgaataatgaaaattttctaaaacggattctggtgatggtttctcgactctgcaaatagtaaaaagcactgaattgtacactttaaatgactgtatgt

SEQ ID NO: 629492 - DNA, 591 bp, Homo sapiens
atgtcaattatgtctaaataaagctgctatttttagaaagtgatggttacatatttaaaaagaaaaaatgaagaaaaagcaactataatccttccaagtaaaagcatctggaattattattttttattcattcaacaaatcttgagcccctactatggcctgggcacctatctctgggagctgtgactagaagtttcyagtctggttggggagatacaatgtgggcacagaaccatgcttcatggtagaagaagccaagggaattgaaacagtaggataccatttcatacccactagactggcaaaaactaacttctgatattaccacaatggcaaaaatgcagagccatagataggctgatatactgcttgagggagaataaataggtatagtttggaaggaaatttggcagtgtttagtagagctgcagatgcgcctgccctgtgtcctagccatcctatgcgctcctagggtatagtggggagagtcttacacatgtgcacaagaggatatcagcaaaaaccttcacggcaacacggctcgtgctggatgactggaaacaaacaaccaagtccagcaacaagtgaaag

SEQ ID NO: 629493 - DNA, 591 bp, Homo sapiens
atgtcaattatgtctaaataaagctgctatttttagaaagtgatggttacatatttaaaaagaaaaaatgaagaaaaagcaactataatccttccaagtaaaagcatctggaattattattttttattcattcaacaaatcttgagcccctactatggcctgggcacctatctctgggagctgtgactagaagtttctagtctggttggggagatacaatgtgggcacagaaccatgcttcatggtagaagaagccaagggaattgaaacagtaggataccatttcatacccactagactggcaaaaactaacttctgatattaccacaatggcaaaaatgcagagccatagataggctgatatactgcttgagggagaataaataggtatagtttggaaggaaatttggcagtgtttagtagagctgcagatgygcctgccctgtgtcctagccatcctatgcgctcctagggtatagtggggagagtcttacacatgtgcacaagaggatatcagcaaaaaccttcacggcaacacggctcgtgctggatgactggaaacaaacaaccaagtccagcaacaagtgaaag

SEQ ID NO: 629494 - DNA, 562 bp, Homo sapiens
agcccctactatggcctgggcacctatctctgggagctgtgactagaagtttctagtctggttggggagatacaatgtgggcacagaaccatgcttcatggtagaagaagccaagggaattgaaacagtaggataccatttcatacccactagactggcaaaaactaacttctgatattaccacaatggcaaaaatgcagagccatagataggctgatatactgcttgagggagaataaataggtatagtttggaaggaaatttggcagtgtttagtagagctgcagatgcgcctgccctgtgtcctagccatcctatgygctcctagggtatagtggggagagtcttacacatgtgcacaagaggatatcagcaaaaaccttcacggcaacacggctcgtgctggatgactggaaacaaacaaccaagtccagcaacaagtgaaaggataaatgagctctattacagtcacacaacgggttatacacagtggtaagttccaacaaaacccaatatatatcaagtttgaagatataccaaacgatagcatctattgtttgtg

SEQ ID NO: 629495 - DNA, 520 bp, Homo sapiens
cttcaacatcagcatagtgaatatttattgaacatctgggcattaggatgatgcaagtactttttagcagaagcaggaaagctccataaaagcaggcatttttgactattttgctcattgcagtattccctgtgcctagagtgtgcttggtatggttgacacttagtaggtatgcagtagatatttgttgagaagattaaggaatgtataaagatacttcccttgatgcgtgagatctatccattcatctaacatttactgagcacatgtcagatcttgagtcagaccttgggaacacagaatagatcagccctgcactcagtaagtcttatgamgtaggccagctggtcaaaggatcacagtcattcctgggagaagtgttacaacagcagtaagagctgagtgccggagaggcaagtgggagtgctacttactccacctgggaaatcagatagggcttcccagaaggaggtagcatttaatctgggtcttgaaggatgaataagagttctgagagtag

SEQ ID NO: 629496 - DNA, 475 bp, Homo sapiens
cagcatttcatggaatcacagcaagcatttcttgaaggaattcacaggaacaggcctagcatgggaccgggaacagagtttgtgtctaatgaatgtccattccacagcccctggwgcagggtttggtacaggtttgtggggtcagatctatcagctttccccacacacaagcatggaggctaccctgctagttcagctcagtttttctgcagaggtcgatctccaggtatgaaattatgtctggacccagggtcagggggtcgtacttcccagtgaactttccacacaaaaggtccagtctccatggctcaggtcagaaattacccactagacagcctccctctccaacctgccaggtcaaggcaaataggaatactgccccctgtgcctcatggcaaattgtcactcaattatggccactttagaacccaggttatcacaaattgacttggctgatctctctaaattgcctcat

SEQ ID NO: 629497 - DNA, 632 bp, Homo sapiens
atctgccattgtagtacagaatagtttcactattctraaaaatcctctgtgttctgcctattcatccttcctccctccaatccctggcaaccactgatcttttcactgtctccaaagtcttgctttttccagaatgtcaatgggaataatgcaggatgtagacttttcggattgacttccttcacttaatgagcatttaagtttcctccatgtcttttcatggcttgatagctcatttactttagtgttaaataatattccattgtctggatgtaccacagtttatttatttatttatctacttaaagacatcttggttgcttccaagttttggcaattattaataaaagtactatacacattcatgtgctggtttttttctggacataagttttcaattcatttgggtaaataccaaggagtgcagctgctggatcatacaataagaatgtgtttagtttcttaagaaactgccaaactgtcttccaaagtagctgtaccattatgcattcccatgagcaatgaatgaaaattcctgctgctccacatcctcactagcatttgatgtcagcgttttggatttttgccattctaataggttagtattagtattgttttaatttgcagttctc

SEQ ID NO: 629498 - DNA, 632 bp, Homo sapiens
atctgccattgtagtacagaatagtttcactattctgaaaaatcctctgtgttctgcctattcatccttcctccctccaatccctggcaaccactgatcttttcactgtctccaaagtcttgctttttccagaatgtcaatgggaataatgcaggatgtagacttttcggattgacttccttcacttaatgagcatttaagtttcctccatgtcttttcatggcttgatagctcatttactttagtgttaaataatattccattgtctggatgtaccayagtttatttatttatttatctacttaaagacatcttggttgcttccaagttttggcaattattaataaaagtactatacacattcatgtgctggtttttttctggacataagttttcaattcatttgggtaaataccaaggagtgcagctgctggatcatacaataagaatgtgtttagtttcttaagaaactgccaaactgtcttccaaagtagctgtaccattatgcattcccatgagcaatgaatgaaaattcctgctgctccacatcctcactagcatttgatgtcagcgttttggatttttgccattctaataggttagtattagtattgttttaatttgcagttctc

SEQ ID NO: 629499 - DNA, 568 bp, Homo sapiens
ttttgctgtctatatcaagtatagactcattttgtcaacaatcacaaaataacttgctgggattttgattgggattgcattgagtctatagataaatttgggaagaactgacatcttgacaattttgagtcttcctgtttataaacgtggaacagtttttttttttttwagttctttgatctttcatcagaatttttgggttttcctcatatagatattgtacatattttgtcaggtttatacctaagtatttcatttgggtggtgctaatgtaaacggtaatgtgtttttaattttaaattcaacttgttcattgctgatgcataggaaagtgattgacttttgtatgttaactttgtatcctgcaaccttgctataattgcttattagttccaggactttcttttttttttttaaatcagttctttcaggacttttacataggcaattatattatttgtgaacaaagttttatttctttcttcccaatctatataccttttatttccttttcttgtcttattgttttagctaggacatccagtaaaatattaaaaagtagtggtgt

SEQ ID NO: 629500 - DNA, 568 bp, Homo sapiens
ttttgctgtctatatcaagtatagactcattttgtcaacaatcacaaaataacttgctgggattttgattgggattgcattgagtctatagataaatttgggaagaactgacatcttgacaattttgagtcttcctgtttataaacgtggaacagtttttttttttttaagttctttgatctttcatcagaatttttkggttttcctcatatagatattgtacatattttgtcaggtttatacctaagtatttcatttgggtggtgctaatgtaaacggtaatgtgtttttaattttaaattcaacttgttcattgctgatgcataggaaagtgattgacttttgtatgttaactttgtatcctgcaaccttgctataattgcttattagttccaggactttcttttttttttttaaatcagttctttcaggacttttacataggcaattatattatttgtgaacaaagttttatttctttcttcccaatctatataccttttatttccttttcttgtcttattgttttagctaggacatccagtaaaatattaaaaagtagtggtgt

SEQ ID NO: 629501 - DNA, 575 bp, Homo sapiens
cctgtttctcagaaaagtttcagatggctgagtttggtggrtaaatgaatttgaaatagaacccagcactgtccctgacacatagcagaggcctaataaatatttatgattcaatctattcattaatgatttacttgctggtgaggggttatgctgtcataccttttaaaaggtagactagaagcatgatggaaaatgcatgggctagatttggaattacagggacctatgttcaaatctcggcttttgtgcttactagctctgtgcccatgggtaggtaggttaaatatttctgtgcctcagtttcctcacctgcagaatgggaatgatgaatatctctatagtttatgtgaggatttaataagttaacacatacagtgcacttagaatagtccctgtaggtagtaagtactagataaaagctattattttttattgtaagcactcaaacaaataagaattattagtaattgttactgcatgctactagggttgtgtcaatgatgctaaataaaaattgaagaccaaattattgctgaagatcaggtgaaaacacctggatcccacaggtagtg

SEQ ID NO: 629502 - DNA, 620 bp, Homo sapiens
gagactttttcttgtctttctaaagggctttagagacggcaaagccacttgctcctctaggttctcttgccatttatttgcacttttcataccaatctggagtgttctatttataggtccataatccataagagaccatggcccctccatgatggggctgaatcgtatttgcatttgtgtccccagggccacagtgggtaaacagtctgtgtttgctgagcttacctccttaccttccctcatgaggggaaaggcagggccagccctcctgagggccttacctaaggcaccagctgtttaatggyggggctgggtggagcccaggtcttcaccttccactcttcaaccacaacactgaacttgccagagtggtcctggcacgggctcttcagcccacctactcccccagctctctcccacagggtcctggggtggcagtagaggaagtggtggcctctggcctgggactacctcttggcaagaccacctagtaatgagggctttttgttccttaagtgaccaaactctcccactccaggaaaggagagaaggggaagcaaacatacttcccatgcactgagcacctgctgtgtaccagagactatgtcagccacacacac

SEQ ID NO: 629503 - DNA, 566 bp, Homo sapiens
gtggcagtagaggaagtggtggcctctggcctgggactacctcttggcaagaccacctagtaatgagggctttttgttccttaagtgaccaaactctcccactccaggaaaggagagaaggggaagcaaacatacttcccatgcactgagcacctgctgtgtaccagagactatgtcagccacacacacagagctcatagttaaataaaatgagaacatagatgatctcatttgttcctgtaacaaccctaggaggtagtgatgtctgcttccattttccagatgacaaagtcaaattaagagtaaatggcaaaatagggattttcagcctcaggcctttgtgactctaaagtcacaaagtgctttttccacctcccacmtcccacctcccagagggactcaaccagtcctggattccactctagcattctcacaagtttctagctgctgcaagctcctttccattcaacagtcattgcctggaagctgagtgtatgtggctagagggattgtttagatcataactgttttcagaacagttcagatctgaaacctgtgtgatttta

SEQ ID NO: 629504 - DNA, 464 bp, Homo sapiens
cctcctctctctcttttctcctcttccccatccccatcctcacttctcttctgctcgctccccttctcctttattcttcccttccttcttctttgcttttctcctccattgactcctctcctcactcctccattctcccttccttctcccctcatctctcctctccttccctccttcttcctctcctcctctcttttcccttttcctcacctccatcatctcctctctactaggacttcactgaaactctctactctagggttcataagctggggtctatgaatcctgcagagtctgtgagtgagtttccaactgtgcattaacccttgaaattgaagtcagcattctggattcatggccatgaatgtsttttgccagggagaagttttatagcttttaccagatcctcagatttctagacttggatctcccacttctcttctcaattcctagtcttcggtttc

SEQ ID NO: 629505 - DNA, 571 bp, Homo sapiens
atgctttcgtacaaaaaattttgaattctttcacctccaggtgcagatatttcaggccctgacttgaacaaggatatcaaaataaggtaacactggtttcacatgagcctcaagactgtaatctaactgtacctaccatcttactttacgttactttaaaaaagtttaacatccatttacctatgccaattcagtagactgaatttttctctcttaggaagtcttcaaccaaatkggaattaaattaatctcactttaaagctcaagaaaggcttgccagactagggttgttctgcggaatagaaagagaagcatgcctccctcagcactggcctaagaggccccacatgaagaactggctgcaggacagtgatccatgaggtctaccaaaaagcagggggactcaaggttcagcctagaaagaggggtccatgccaagtctggcttttatctgtacccaggttctaaacatatcttggggcccctaactgacaaggctggggcacagcaccagcagtcaagagggtcagagtcctctcaacgagtcagtgaacccctctatgccatgatt

SEQ ID NO: 629506 - DNA, 470 bp, Homo sapiens
tgtggtcgtaatcccaaagcagacataaaaaaacatacaaacaattgtgcatggcacatcaatcaaagatcatttacaaaaacaaatggtgggtcagattttgcctgtgggccttaatttgtaaatccttgatttacacatggatttatacaacatacatcaatttaaaaaaagattgaagaggatctctataactgatatggaggatttcagaggctgatcaaagtgccaatctagatcatttgagcagcaaaataaattatgatgataatggataataaccacttcaatcaaatatctgtccatgaatccayggataatgaatgaatggcagaaaaagaaaaaagttttcattcactaaccatgcattcatgaatatgaattttatgtatttatacatatttgtgtatatatatttattcttcacagattattactcttattatattatatatattattattattatt

SEQ ID NO: 629507 - DNA, 409 bp, Homo sapiens
gcctgtcttatttcagcaagataatcctgaagctctgagattctcttggtctattcagctactgatatttgtagttgcaccgtgaagttctcctgttgtgtgtttcagctccatcaggccatttatgttcctccctaaactggttattctttttaacrgctcctctaatgttttgtcatgattcttagcttctctgcattgggttagaacatacttcttcagctcagtgaagttcattattgcccaccttctgaagcccacttctgtcagttcatccatttcaacctcagcctagttctgtgcccttgctggacaggtgttacagtcatttggaggagaagaggcactggctttttaaattttcagcgtttctgtgctgattttttctcatttgcgtgggtttatctcc

SEQ ID NO: 629508 - DNA, 593 bp, Homo sapiens
actggccacaatccgccacagccgctgtgctgtgctgtgaggaattcctkccagttcaaaccactcagcctccctggtactagcagggtaagatggctgcctggagctgcagtgatggctgctacccctcacccctctggaatcagtggtcttaggcagtctctagcctgctgccactgcccaaaacccgagcggctgccaagagtctgcacagttctgtgcttgggacccaaggccctggtggtgtgagttcaccaggggaccgcctgatccactggttgcacagatctgtgggaaaagtatggtttccctggttgggtagcacaatcactcactgtctaccttggttgcaggtgggagtttcccttaccctgtatagctcctggctgggctgtcactacatcctgttttcccttgctttccgagggttgcacccaaccacttacttagtcccagtgagagaacctggatacctcagctgaaggtgcaggattcacttgccattttcattcttcttggtgggagctgtagatgggagctaattggtcgtctcagcctctcccacatctatgacttttgattttagaaaatca

SEQ ID NO: 629509 - DNA, 360 bp, Homo sapiens
gtctgtgcacttgggaaaggcagagtgcgattgaaggatttatattgaactcagtgctgccctgtcatagtggagagcaaagccatactgggctcagccagcacctgtgcaaagaggcagcacttgaatcagacctagtcagaagggaatcacccatcccagtggttggaactcgagtttcttggcaagtgtcaccgctgcaggccaaagtgctgtagggtcctagtaaagacagtttaggacacaaggactgcaactctaggcaactcctagtgctgggctaggctcagagggtggcattttacttagrgagacatcaggcagggttgctacgggagtgattgtgctatgcctcccaca

SEQ ID NO: 629510 - DNA, 613 bp, Homo sapiens
tattgcagtttgagtgccagcttagccacagtagaataaaacatcaggcaaatttctaaggtttgtgactcaaattctggatcccagatagcatctctggatctgcctcgggcctggaggaactcaccaccctgaagggaaggacacaaacctggctggctttgccacctgctgatcatagagtactagggccttcggtgagcataggaggtagccagatagtggttacagcaggctttgggcaagacccaatgctgtgctggctttaagtcagacccagcacagtcccagtgctggtggccacagggttacttacatcaccacacctccagttccagttagctcagcatagagagaaggctctatttgtttgggagaaagaaagggaaaagaacaagattttgtgcatggtaatccagagaattgtttcctgtcttatccaaaaccactaaaatggtacttctttgagtctgcaaaaacaacagtgatattgggcttgtggcccaagttctttcaaatacctggaaagtcttcccaagaaggatgggcacaaasaagctcagactgaagactacagtaaatacctaactctccagtgcccagatgctgatga

SEQ ID NO: 629511 - DNA, 552 bp, Homo sapiens
aacttaagaaaacactgagaaagaattcagaattctatcacataaatttaacgtaaagattgaaataactgaaaagaatcaagcagaaattctagtaataacagagarcttcccaaacctagaggcagatatcaacattcaaccacagaaaggttatagaacattaagaagatttaacccaaaaaagactacctcaaggcatttaataatcaaactccgaaaggtcaaagatgaagaaaggatcccaaaagcagcaagggaaaagaaacaaataacatacaatggagctccaatacatccagcagcagacttttcagtgaaaactttacaggccaggagagagtgacatgacataattaaggtgccaaaggggaaaaataaaacttttaccctacaatactatatctggtgaatatattcttcaaacataaaggggaaataaagatcttcccagacaaacaaaagctgagggatttcatcaacaccaaacctgtcataaaagaaatgctaaagggagttcttcaatctgaaagaaatgttaatgagcaagaa

SEQ ID NO: 629512 - DNA, 552 bp, Homo sapiens
aacttaagaaaacactgagaaagaattcagaattctatcacataaatttaacgtaaagattgaaataactgaaaagaatcaagcagaaattctagtaataacagagaacttcccaaacctagaggcagatatcaacattcaaccacagaaaggttatagaacattaagaagatttaacccaaaaaagactacctcaaggcatttaataatcaaactccgaaaggtcaaagatgaagaaaggatcccaaaagcagcaagggaaaagaaacaaataacatacaatggagctccaatacatccagcagcagacttttcagtgaaaactttacaggccaggagagagtgacatgacataattaaggtgccaaaggggaaaaataaaacttttaccctacaatactatatctggtgaatatattcttcaaacataaaggggaaataaagatcttcccagacaaacaaaagctgagggatttcatcaacaccaaacctgtcatraaagaaatgctaaagggagttcttcaatctgaaagaaatgttaatgagcaagaa

SEQ ID NO: 629513 - DNA, 625 bp, Homo sapiens
gtcataaaagaaatgctaaagggagttcttcaatctgaaagaaatgttaatgagcaagaaggaaatcacctgaaggtacaaaactcactggtaatagtaagcacacagaaaaacacagaatattataacactgtggtgtgcaaactgtctttatcttaagtggaaagactaaatgaagcaatcataaataatatattacaacaacttttcaagacacaggcagtataataaaacataaagagaaaacaaaaagttaagcagggaaatgaagttagagttttattagttttctttttgtgtgttttgtctgtttatgcacttagtgttaagttgtcatcagatcaaaataatgagttatcaaaactataaaaaccctagaagataatccaggcaaaccattcaggacataggcctgggcaaagatttcatgacaaagatgccaaaagcaattgcaaccaaagcaaaaatgacaaatgggatctaattaaagagcttctgcacagcaaaagaaactatcatcagagtgaacagacaacctgcaggatggsagaaagtttttgcaatctgtccatctgacagaggtctaatatcttgcatctgcaaggaacttaaacaaatttacaag

SEQ ID NO: 629514 - DNA, 567 bp, Homo sapiens
aagaatctcatagcttgggaaaagatggaggacttaagtactgctagttttaatgaggtctccgaacgtatattgcacaaataaggtttataacaagtccatgaaatgtccttgaaatgagcggatgaaatggagtgagaaggaaggtcattggaatggagagggtcaaggaactttaacaatgggatactttatggccatcatgtggacactgatgtcctcaagatgctagaagctcttggagctacagagaaagactgtgatcctggtgtcaacactgtgtctacctcctctgctcctgggagctcctcctctgctcctagagcaaattgtacaattaagttgattggaattatgaaaatccatgatcttgaacctmatttcttcagacctactaaggaagtctcatatgatttccagtttccttcacaaccatttccagccttcacaattcacaagctgtatcagcttcctcctcattctcagcagatttactcaccttctgccttacagaccaaagtgaggcccaccaaagcaaacatctcaacttctttctccacctaaaaa

SEQ ID NO: 629515 - DNA, 272 bp, Homo sapiens
gacttcctgctgctgctaatctctgggctgcctccctcacctcctgtgatctttgtagatttcctaccacctgtgtaactaactgtgagcattgcatttcctgtttcaaatactcaaagtcttttctgtttaccctattgaacacttactgaagcagtgctcaaaaaatgggagcttttcagtgtgtgccatacrttctattttcatcttcttatttgatcctcacaataatccaaaaggatatgttttaaattcctatactataggaaggg

SEQ ID NO: 629516 - DNA, 589 bp, Homo sapiens
ctcagtaatattgattaactaattaatttattgtataagaagtattcagccaccagacacatrtcttttaagagcaagctttaaccatttcagttgtttgctcccatccattttctgtcatccgacacaggaagacatcaagggagaggtaattcacaggagtaaggaggcaccaccaggggcagaaatgtttgatcctaagaaagtgtagccacaagatttatatcaagtggcagagcctcaaggtttgaggaagaaaacaaaagtttgattcaggagggcagagcagagacagaaatggcaactggatgtcagagatatgccctggataatctctttttgagatgaaccatggaatactcaaaatagggctgagtccaaagaagcagagctgggtaggaatgagagaggaatgcaggtgccagccagctgtcttggatacagtatgagaggcctgatagagtccaaggacctagcagagagagagaactcctggaacccaaaacactggatagactggactccatgaagtggccatttgttagtgttgctgaaactcacgctgaagaacttaatttttctctatatt

SEQ ID NO: 629517 - DNA, 589 bp, Homo sapiens
ctcagtaatattgattaactaattaatttattgtataagaagtattcagccaccagacacatgtcttttaagagcaagctttaaccatttcagttgtttgctcccatccattttctgtcatccgacacaggaagacatcaagggagaggtaattcacaggagtaaggaggcaccascaggggcagaaatgtttgatcctaagaaagtgtagccacaagatttatatcaagtggcagagcctcaaggtttgaggaagaaaacaaaagtttgattcaggagggcagagcagagacagaaatggcaactggatgtcagagatatgccctggataatctctttttgagatgaaccatggaatactcaaaatagggctgagtccaaagaagcagagctgggtaggaatgagagaggaatgcaggtgccagccagctgtcttggatacagtatgagaggcctgatagagtccaaggacctagcagagagagagaactcctggaacccaaaacactggatagactggactccatgaagtggccatttgttagtgttgctgaaactcacgctgaagaacttaatttttctctatatt

SEQ ID NO: 629518 - DNA, 574 bp, Homo sapiens
gtatcaaattaactgtatttgaaagagctagagtgatttctcttttcccacctggaccctgactgataaagcaactrtccctccaaatcatttatataaccacatagaaggtgtgattccagcagatttgcctcaatcatatgtcttctttctgagaaacatactcaactacagccaaagttttccaaaatacagaccactgactatgataatatatcctttttcataattagtattaatgactaatggttttaacctagtagactagcttttttcctaatttttttaaagttttattttatttttaattgatacatactaattacatatatttatgagatacagtgtgctgtttcaatgtgtctatttttcagtcattaaatataattaaccagtcattccacagaagagtatagagcactacttttaaatagatctctaatctataaatatagaagtctgtagtttatttttatttccactgttctaaatgtttcaaaaagaaatatcctcatgtctgtagcatattaaccgacacacacataaaaataagaatattctttatattattaca

SEQ ID NO: 629519 - DNA, 574 bp, Homo sapiens
gtatcaaattaactgtatttgaaagagctagagtgatttctcttttcccacctggaccctgactgataaagcaactgtccctccaaatcatttatataaccacatagaaggtgtgattccagcagatttgcctcaatcatatgtcttctttctgagaaacatactcaactacagccaaagttttccaaaatacagaccactgactatgataatatatcctttttcataattagtattaatgactaatggttttaacctagtagactagcttttttcctaatttttttaaagttttattttatttttaattgatacatactaattacatatatttatgagatrcagtgtgctgtttcaatgtgtctatttttcagtcattaaatataattaaccagtcattccacagaagagtatagagcactacttttaaatagatctctaatctataaatatagaagtctgtagtttatttttatttccactgttctaaatgtttcaaaaagaaatatcctcatgtctgtagcatattaaccgacacacacataaaaataagaatattctttatattattaca

SEQ ID NO: 629520 - DNA, 571 bp, Homo sapiens
gtaatgagctatgcaggatgggtgtgatcagggttgtgaggactgaaactctccccagtagcaatgagtgaatagtgcaaygggacatttcattaggttagagaggtgagtggggagaaagacagcaaagagtctagtttagtagagttaatggaagaaattatttccattccttatcctgcctttactctcatgtcctcaactactcattggggcttggttttagagattgcttttggctccaaacacctattaaaggagatatatattttagtgtttctgaatgcttatttgtggtgaaatttttttatttttatttttgccaacgaatgtggtgaaatttttaatgacctcagttaaaaagtaaaaataataacgctatctagtgaattctgcataaagctaaaagtgccacattggtgtaatagcctatattccaaaagacatctattctactatcttcaaaatcattgcattaaaaaatgttaaaggaaaagtaagttttagcttttattttgttttgctttttgaggctagttggaaatactctttgaaatcctgtttttttatc

SEQ ID NO: 629521 - DNA, 569 bp, Homo sapiens
tttttaatatttatgacaaaaatttgttctttccattttacacatgaggaaacagaggaccaggccagaatcacacagttggtaaacgatagaacttcaaytggtatctccttgtgatttttaaactgagcgctcttttcaagacttttttgctacctttctaattccaaagtcaagtttctgaaagtgctcagccatgtatttgattttgaaagaaaggaaggcaggagagaggaagagaaggagagagataaaaagagagaaagaaaggaaagatggaaagaaggaaggaagaaatgtaatgtagaggtggagttgagtcaggagattgaagacacctatgctaaatataagacacctgtgctaagtatggtactaaagaggagctataagtttcttccatatactcttctgttattgcccttccaagcagcaagtgaaaagtaaaataatcccacatattaaaatgtatgagtcagtatagaaattcctttgtcatattgaagtttgaattaataaataagtaacagctggagaggcatatttgtcagatgattaactaggtgtca

SEQ ID NO: 629522 - DNA, 569 bp, Homo sapiens
tttttaatatttatgacaaaaatttgttctttccattttacacatgaggaaacagaggaccaggccagaatcacacagttggtaaacgatagaacttcaattggtatctccttgtgatttttaaactgagcgctcttttcaagacttttttgctacctttctaattccaaagtcaagtttctgaaagtgctcagccatgtatttgattttgaaagaaaggaaggcaggagagaggaagagaaggagagagataaaaagagagaaagaarggaaagatggaaagaaggaaggaagaaatgtaatgtagaggtggagttgagtcaggagattgaagacacctatgctaaatataagacacctgtgctaagtatggtactaaagaggagctataagtttcttccatatactcttctgttattgcccttccaagcagcaagtgaaaagtaaaataatcccacatattaaaatgtatgagtcagtatagaaattcctttgtcatattgaagtttgaattaataaataagtaacagctggagaggcatatttgtcagatgattaactaggtgtca

SEQ ID NO: 629523 - DNA, 631 bp, Homo sapiens
tttcagaatcagctgtatgtcttcataataaataatttatttagttaatgaagcatgcttataaaatgtgtttgtatatgaaaaagagatcagcacagtatagaatttatattgttcctgaactttcaccatgcttctctttggaaacatattcatgtttctgtatgggtaaactattgctctaacacactctattgaacatggatggtctcctaggcaaagcgtcaggtcacatagcacagctggcggaagagaagtaattggagaaaggatttatagctcagtaacaagcagacatcttcagtgccctgtttctttcttttttcattaacctgtctgaagtttcatttctttgcaactaccagctgcacatggcttcatccttgttcagctggatctcaaataaatctagtcttgggtagtacttcatccttgtgtaaaagaaaaaaaaatgtgaagaacaataaggagagcagctcctcggtgtaatgatagaagagtcactaatctactgactagcagaggggraatgcttagggatagccggtctgtattcctttctctctattttattaagagcttctgtgattttcttttcttaatataagagaaaatattatacactgcaaaa

SEQ ID NO: 629524 - DNA, 631 bp, Homo sapiens
tttcagaatcagctgtatgtcttcataataaataatttatttagttaatgaagcatgcttataaaatgtgtttgtatatgaaaaagagatcagcacagtatagaatttatattgttcctgaactttcaccatgcttctctttggaaacatattcatgtttctgtatgggtaaactattgctctaacacactctattgaacatggatggtctcctaggcaaagcgtcaggtcacatagcacagctggcggaagagaagtaattggagaaaggatttatagctcagtaacaagcagacatcttcagtgccctgtttctttcttttttcattaacctgtctgaagtttcatttctttgcaactaccagctgcacatggcttcatccttgttcagctggatctcaaataaatctagtcttgggtagtacttcatccttgtgtaaaagaaaaaaaaatgtgaagaacaataaggagagcagctcctcggtgtaatgatagaagagtcactaatctactgactagcagagggggaatgcttagggatagcckgtctgtattcctttctctctattttattaagagcttctgtgattttcttttcttaatataagagaaaatattatacactgcaaaa

SEQ ID NO: 629525 - DNA, 589 bp, Homo sapiens
ttgcaggacaacagtcctaaaggccataggaagttataggcataaccacccctagagaactacttgacttgtgctacagagtctgcagagggggtgattaccctcagttccagcagtggggacatacagggttaaggatatctattgcccccctgatatattcaagtactatagaccagaagtggtaccttggtacacagatagcaagatcccatgcasaagcctacaaatacaactcaaacccttaaattgtcttgtgtccaacatgagtgggaatcacttcaaatcaatgtttcagcatgattctggtggcccaatctctgggccaatgggagagacccattcactagactagaatcagaggtagtctactggaatcagggcctggccggggacccatggaataacctcatgggtgcaagttccagagcttccaggagcaactgataaagcccatgtgttttgggaggtaaaataagagaagagcacaagagagagaaacaggaactgggacgtatatgcctcccattctgggcttggaatagcctattaaaatggtactgccaacccaaacatatttcagatgttg

SEQ ID NO: 629526 - DNA, 589 bp, Homo sapiens
ttgcaggacaacagtcctaaaggccataggaagttataggcataaccacccctagagaactacttgacttgtgctacagagtctgcagagggggtgattaccctcagttccagcagtggggacatacagggttaaggatatctattgcccccctgatatattcaagtactatagaccagaagtggtaccttggtacacagatagcaagatcccatgcacaagcctacaaatacaactcaaacccttaaattgtcttgtgtccaacatgagtgggaatcacttcaaatcaatgtttcagcatgattctggtggcccaatctctgggccaatgggwgagacccattcactagactagaatcagaggtagtctactggaatcagggcctggccggggacccatggaataacctcatgggtgcaagttccagagcttccaggagcaactgataaagcccatgtgttttgggaggtaaaataagagaagagcacaagagagagaaacaggaactgggacgtatatgcctcccattctgggcttggaatagcctattaaaatggtactgccaacccaaacatatttcagatgttg

SEQ ID NO: 629527 - DNA, 589 bp, Homo sapiens
ttgcaggacaacagtcctaaaggccataggaagttataggcataaccacccctagagaactacttgacttgtgctacagagtctgcagagggggtgattaccctcagttccagcagtggggacatacagggttaaggatatctattgcccccctgatatattcaagtactatagaccagaagtggtaccttggtacacagatagcaagatcccatgcacaagcctacaaatacaactcaaacccttaaattgtcttgtgtccaacatgagtgggaatcacttcaaatcaatgtttcagcatgattctggtggcccaatctctgggccaatgggagagacccattcactagactagaatcagaggtagtctactggaatcagggcctggccggggacccatggaataacctcatgggtgcaagttccagagcttccaggagcaactgataaagcccatgtgttttgggaggtaaaataagagaagagcacaagagagagaaacaggaactgggacgtatatgsctcccattctgggcttggaatagcctattaaaatggtactgccaacccaaacatatttcagatgttg

SEQ ID NO: 629528 - DNA, 515 bp, Homo sapiens
aaatgaacaaggcacgactatttactttagtggtattattttgggccagagctgctgacactgagatagtacctattaagctgatactaccttagaaggttgatttctttaagaaaaawattagaattagtgttctgtttattaatatttatattaatgtcaattattaattaataagtatttaatatctgtcacatattatatttaatattaaatatttaatattagtataaggcattaagaaaaatttataattaatattctttttattaatacttgatattaggataagtcatgtaacctctgcatgtattcaaaatattctactttaagctatttatattctgagaagtatttctgcaacttgtagttataaaatattttgtcatggcaattaaaaaaaataatctctgtatgtattctgaaacctttgaaaatctttattggtatgagaatttagattgtatgagtcagtttggagtcaaatttgattatgcccatgatttcaatgtgtt

SEQ ID NO: 629529 - DNA, 515 bp, Homo sapiens
aaatgaacaaggcacgactatttactttagtggtattattttgggccagagctgctgacactgagatagtacctattaagctgatactaccttagaaggttgatttctttaagaaaaaaattagaattagtgttctgtttattaatatttatattaatgtcaattattaattaataagtatttaatatctgtcacatattatatttaatattaaatatttaatattagtataaggcattaagaaaaatttataattaatattctttttattaatacttgatattaggataagtcatgtaacctctgcatgtattcaaaatattctactttaagctatttatattctgagaagtatttctgcaacttstagttataaaatattttgtcatggcaattaaaaaaaataatctctgtatgtattctgaaacctttgaaaatctttattggtatgagaatttagattgtatgagtcagtttggagtcaaatttgattatgcccatgatttcaatgtgtt

SEQ ID NO: 629530 - DNA, 497 bp, Homo sapiens
gtattctgaaacctttgaaaatctttattggtatgagaatttagattgtatgagtcagtttggagtcaaatttgattatgcccatgatttcaatgtgttttcaaatttatagtatcatttgaattataatgactctatagtggtacattatatgattcatttcagaggtggcacttaatcagcaatgctgtcatttctaactacaacacaaatatgtgtctattattcaccttaccagccagtactcagggcccagctacctaatgaatratgcctattattgagtaaaatatgaatgtgctgggcaggctctaaaatggcctccaatgatccctacttcctggtattcatacccttgtgtaatcccctttcctggagtttgggcaagacttagaaactgtcttctaataaatagaatatgacagaaatgacagtatatcaattccaagatttgattataaaaagcctgtgactgccatcttgggagctctttcaca

SEQ ID NO: 629531 - DNA, 497 bp, Homo sapiens
gtattctgaaacctttgaaaatctttattggtatgagaatttagattgtatgagtcagtttggagtcaaatttgattatgcccatgatttcaatgtgttttcaaatttatagtatcatttgaattataatgactctatagtggtacattatatgattcatttcagaggtggcacttaatcagcaatgctgtcatttctaactacaacacaaatatgtgtctattattcaccttaccagccagtactcagggcccagctacctaatgaataatgcctattattgagtaaaatatgaatgtgctgggcaggctctaaaatggcctccaatgatccctacytcctggtattcatacccttgtgtaatcccctttcctggagtttgggcaagacttagaaactgtcttctaataaatagaatatgacagaaatgacagtatatcaattccaagatttgattataaaaagcctgtgactgccatcttgggagctctttcaca

SEQ ID NO: 629532 - DNA, 572 bp, Homo sapiens
tatgcccatgatttcaatgtgttttcaaatttatagtatcatttgaattataatgactctatagtggtacattatatgattcatttcagaggtggcacttaatcagcaatgctgtcatttctaactacaacacaaatatgtgtctattattcaccttaccagccagtactcagggcccagctacctaatgaataatgcctattattgagtaaaatatgaatgtgctgggcaggctctaaaatggcctccaatgatccctacttcctggtattcatacccttgtgtaatcccctttcctggagtttgggcaagacttagaaactgtcttctaataartagaatatgacagaaatgacagtatatcaattccaagatttgattataaaaagcctgtgactgccatcttgggagctctttcacacacatgcccgtgctccctcttggacagctcagtccaggaggagttagttgacttttatacggacacttgggctgcctaatgggaggttcatgtggtaaagaattggccaatagccagtgaggaactgaggtctgccaacaaacacgtaagt

SEQ ID NO: 629533 - DNA, 572 bp, Homo sapiens
tatgcccatgatttcaatgtgttttcaaatttatagtatcatttgaattataatgactctatagtggtacattatatgattcatttcagaggtggcacttaatcagcaatgctgtcatttctaactacaacacaaatatgtgtctattattcaccttaccagccagtactcagggcccagctacctaatgaataatgcctattattgagtaaaatatgaatgtgctgggcaggctctaaaatggcctccaatgatccctacttcctggtattcatacccttgtgtaatcccctttcctggagtttgggcaagacttagaaactgtcttctaataaatagaatatgacagaaatgacagtatatcaattccaagatttgattataaaaagcctgtgactgccatcttgggagctctttcacacacatgcccgtgctccctcttggacagctcagtccrggaggagttagttgacttttatacggacacttgggctgcctaatgggaggttcatgtggtaaagaattggccaatagccagtgaggaactgaggtctgccaacaaacacgtaagt

SEQ ID NO: 629534 - DNA, 572 bp, Homo sapiens
tatgcccatgatttcaatgtgttttcaaatttatagtatcatttgaattataatgactctatagtggtacattatatgattcatttcagaggtggcacttaatcagcaatgctgtcatttctaactacaacacaaatatgtgtctattattcaccttaccagccagtactcagggcccagctacctaatgaataatgcctattattgagtaaaatatgaatgtgctgggcaggctctaaaatggcctccaatgatccctacttcctggtattcatacccttgtgtaatcccctttcctggagtttgggcaagacttagaaactgtcttctaataaatagaatatgacagaaatgacagtatatcaattccaagatttgattataaaaagcctgtgactgccatcttgggagctctttcacacacatgcccgtgctccctcttggacagctcagtccaggaggagttagttgacttttatacggacacttgggctgcctaatgggaggttcatgtrgtaaagaattggccaatagccagtgaggaactgaggtctgccaacaaacacgtaagt

SEQ ID NO: 629535 - DNA, 422 bp, Homo sapiens
atgaaagaaattgaagaagacataaataaacagaaagatatcccattttcatggttratattatgtgctaacttgacagggataagagatacccagatagctacaaaacattattttggagtgtatctgtgagcatgttttcactaagagcccaaacaaaacaaaaatgtaggagaaagggttatattatttgttttttatttgtcactctgtttctcccctccatctccctttatttaggattaacagaatatttgtattccttttgactatttgggcataacccttttttaaaaattgctgccttagggattgcactatgcacctttaacctgtcacaatattgaactagttaacattaatattgtaccacttcttgtaaaatgtaagaatgttacaatattatcattcaatttactccc

SEQ ID NO: 629536 - DNA, 422 bp, Homo sapiens
atgaaagaaattgaagaagacataaataaacagaaagatatcccattttcatggttaatattatgtgctaacttgacagggataagagatacccagatagctacaaaacattattttggagtgtatctgtgagcatgttttcactaagagcccaaacaaaacaaaaatgtaggagaaagggttatattatttgttttttatttgtcactctgtttctcccctccatctccctttatttaggattaacagaatatttgtattccttttgactatttggrcataacccttttttaaaaattgctgccttagggattgcactatgcacctttaacctgtcacaatattgaactagttaacattaatattgtaccacttcttgtaaaatgtaagaatgttacaatattatcattcaatttactccc

SEQ ID NO: 629537 - DNA, 601 bp, Homo sapiens
tgggtttatagttgggtttcatgtataagatgaggaggacggattagagttttcaaagggtccttcatgtgctacaacttggcaacctaggtcacactttktatttgtatgctcactttgtttatgtgttcatgtttatgagcattttgtgggcataggctgtacttagttcatcttcctaggttgacagacagtgtcttacacatagcagatatgcagtaaatgctaatcaaaggaatcttcctcctgagtcacttcaccatgaggaaaattcgtctatgtgtgctgtttcaggtgacagatttaattagagaaataaaatgttttcaatgaaggagatttagagatatcttggtatacgccctttcaacctctcatcatcttgacagctgtcaactaatggggcaaaacattacagtggagagttatatactcaaatgtagtaaaatccccagagcctgggatgagttttattatgttttattggagtagtagtggtagaaaaagttataattaaatgacataatgaatgtaaagcaattattccaatgtacattaagcatttgataagtgccagctatttttgactaattttataata

SEQ ID NO: 629538 - DNA, 506 bp, Homo sapiens
tttcctgtgcctgtggccacaacatcaccatttttcccgtcatctcccatttgtcctcattatgcgtcgtcgaaggtactttcaaaacagccctctaagttgaacccaaacaaccagactacataaagcatatcttaaacaaccacggctcataagttctaatagaaacataatttatgcctctcactaccccctttaaattgtattcagcrgggtggattttgtctttgtgtcaggatgaaatctttgtctcaagcaggccccatactgttccggaacgttgagggagtgtcaggagccctgggtgaggagtcccagagtcagaaaactgtgatgggcccactcgcttgggcatgcagcttctgttgaatcactgtgtcttggtggaaaccttgatgttaacatctatttcactgctttattacagatgtcaggattgataaaggtgacaaactatagaagatgggtaataagaggtagagagtttcagcttcacatgaatcatg

SEQ ID NO: 629539 - DNA, 601 bp, Homo sapiens
tgggtttatagttgggtttcatgtataagatgaggaggacggattagagttttcaaagggtccttcatgtgctacaacttggcaacctaggtcacactttgtatttgtatgctcactttgtttatgtgttcatgtttatgagcattttgtgggcataggctgtacttagttcatcttcctaggttgacagacagtgtcttacacatagcagatatgcagtaaatgctaatcaaaggaatcttcctcctragtcacttcaccatgaggaaaattcgtctatgtgtgctgtttcaggtgacagatttaattagagaaataaaatgttttcaatgaaggagatttagagatatcttggtatacgccctttcaacctctcatcatcttgacagctgtcaactaatggggcaaaacattacagtggagagttatatactcaaatgtagtaaaatccccagagcctgggatgagttttattatgttttattggagtagtagtggtagaaaaagttataattaaatgacataatgaatgtaaagcaattattccaatgtacattaagcatttgataagtgccagctatttttgactaattttataata

SEQ ID NO: 629540 - DNA, 601 bp, Homo sapiens
tgggtttatagttgggtttcatgtataagatgaggaggacggattagagttttcaaagggtccttcatgtgctacaacttggcaacctaggtcacactttgtatttgtatgctcactttgtttatgtgttcatgtttatgagcattttgtgggcataggctgtacttagttcatcttcctaggttgacagacagtgtcttacacatagcagatatgcagtaaatgctaatcaaaggaatcttcctcctgagtcacttcaccatgaggaaaattcgtctatgtgtgctgtttcaggtgacagatttaattagagaaataaaatgttttcaatgaaggagatttagagatatcttggtataygccctttcaacctctcatcatcttgacagctgtcaactaatggggcaaaacattacagtggagagttatatactcaaatgtagtaaaatccccagagcctgggatgagttttattatgttttattggagtagtagtggtagaaaaagttataattaaatgacataatgaatgtaaagcaattattccaatgtacattaagcatttgataagtgccagctatttttgactaattttataata

SEQ ID NO: 629541 - DNA, 582 bp, Homo sapiens
caatctttttcaattaacagtgaactattatcagtaatatgaatacttacttaaacagttataccaaaaggtgatcaaacacctaagcttaggaaattagagtaatatgacatgaaatatataggtattatatgtatatcatttttttgaaattcagwtgcatgtggaaatttaattgtttaatattaatcttatatcccatttgtatgtgacaaacgacagctaattcagtctgccaaattctttcccgtctgctttccaatatacaacttccttggaagatataaaatgttatcaactcataccattaccagcaactaggagtgactgtcattctattgccagaatatggagggatttccactaaccacaaggcttattgaacagaattgatttacaattgctggccaaagtaattttccatttgaatatttcatttccaaaagtcatatggaatatttaaggatcacaatacaatttttttctagttatttgttggttttggtggggttgggtcatgaaggaaatatcaaagactgtcatgtgtcatacatttggggcaagcttatagttgatagaatt

SEQ ID NO: 629542 - DNA, 496 bp, Homo sapiens
caactaatggggcaaaacattacagtggagagttatatactcaaatgtagtaaaatccccagagcctgggatgagttttattatgttttattggagtagtagtggtagaaaaagttataattaaatgacataatgaatgtaaagcaattattccaatgtacattaagcatttgataagtgccagctatttttgactawttttataatatttgtgtccagaggtccttaactgacatagttcattgcatgcactgttccttccaggaggaggcctagcaagtttccatactaatggtaatcccaggaatttctaggtaatagcaagattatgccccacacctaatctgtgcaactcctgagataagttcacgaatttaagcatgaaaatctcatgagtttaatcttgatggctagctggaaaagttagcatatgtgtcctcagagatggtcacatattcaagcctcatttatttatgtcaaacaggggtatccatca

SEQ ID NO: 629543 - DNA, 570 bp, Homo sapiens
atctgtagatgtcattgttaaaactagaatcaaataataatacagcaaaaatgtcacctttactgtacgatcttcactccctatgagaaatgctcaagagcttgaattatggtgtgtttctgggaattggaagaatggggtgaatatgagagatacagggagaagaaaaatcacagaatttgaaaaccatgaagaacgtaaaacatacmaagcatggctaataaatatgttccatttttgctgctatctgagataagcattgtataacttatttaggatgttaagctgtctcatgaaaccagcagggaaagtcatcttgttgttaattataggctcataactgctgtccagagtataatatcatctgttttgcaatagtctgacattagggaaatttctgttatttgtaaaattaaaatcatggctttcttctttcttaagttaaacttctggctggaaattctgaatagcaatttatattagttctttagcatatataatattttaaaataataggcaatattaataagtcaaataaagagagataaatgtagttctgaaggaaaaatg

SEQ ID NO: 629544 - DNA, 437 bp, Homo sapiens
atgttaattgctatgtatggtacaaattaggggtaaagaatcacttatttctatatgaatgttcagtttcttcaggactactaattgataaaacatttagtttgcttttaattacatggagagctcttcaaaaatcaattgtctacatttgtgtgttctatttctcgtgtctctattctgttccatttatttatttatttattcttgtatgaccatcatgccatcttaattattgtatctttattgtaattttattcaataaatatttattaaatacttaatatctggaacaagaagcaaatatggtccactggacccctaaagaagcagagcaaatgaaaccggggagacacgacctatgatctgtgttgmgatacccctacaatccatactatataggaaatatattggaagtgccacaaatatataggaagcac

SEQ ID NO: 629545 - DNA, 555 bp, Homo sapiens
cttgggatgcaagtggcagcatgcaggcataccttctgtaaagtaaatgaataacataattttagataatgataaggttctgtgcttgagagtaatggaggaggaattttraatagagtggtccaggaagaaagcatagagccacaccaggctgtgcactgccgaattccagtgccgtttccatagtccctaatacggataatgtcccctcaactgtgctacacagcagccctaagggttcggggaagggcctctttgaagagatgacatttgagtggagtcctggttaattaaaaagttatcatccatataaccctctgaggtagaagtgttcaggcaaaaggaaccaaaaatcccaaggcaggtaggagtttggtgagtttgtgaacaggaagaagaccttggtggctggtgtagcaaaacgtgaagattgtgttagatgagattggatggcaagcagaagccaaaccatgtgaggccttgcaagttatggtaagcagttttgcttttactctaagtgttctgaaaaacttccaggggtcctacttagaaaag

SEQ ID NO: 629546 - DNA, 555 bp, Homo sapiens
cttgggatgcaagtggcagcatgcaggcataccttctgtaaagtaaatgaataacataattttagataatgataaggttctgtgcttgagagtaatggaggaggaattttgaatrgagtggtccaggaagaaagcatagagccacaccaggctgtgcactgccgaattccagtgccgtttccatagtccctaatacggataatgtcccctcaactgtgctacacagcagccctaagggttcggggaagggcctctttgaagagatgacatttgagtggagtcctggttaattaaaaagttatcatccatataaccctctgaggtagaagtgttcaggcaaaaggaaccaaaaatcccaaggcaggtaggagtttggtgagtttgtgaacaggaagaagaccttggtggctggtgtagcaaaacgtgaagattgtgttagatgagattggatggcaagcagaagccaaaccatgtgaggccttgcaagttatggtaagcagttttgcttttactctaagtgttctgaaaaacttccaggggtcctacttagaaaag

SEQ ID NO: 629547 - DNA, 609 bp, Homo sapiens
gatatcagtctgttgatgtcagatgctgtgatatctcttccgatgctcaaaacaaagtaagtctctaacccaagcacctccataccattgtgtttatccttatcgtaggtgctatcacagcgcatccattctgccctcaagacaaaaagcagatagggttttagagttggtgccatataaattttcaccattgtattcttggtgcctccaacagtgccaagcaccaagtagaactcartacatttttttaaagatattaaagaagaaatgttggaccgagaataatctagacttagatttgagagggagatcagaaatattcagaaaaacaaaattaataaaaagagttgtttctactacattcatcgtgtaacttacatatgtttaatttactcacagagttgatacccctctctatttccattgcctgtggtatggcaaagcagttaccctggagagggccactggaggaaatgtgttataaaaataaacttcccacctattttctctatgactgacagaagctgagttatctttggaacataaagcctttttaaatgtatttcaggactatctcagtgtcattaagctgggaaaaaacaaattttt

SEQ ID NO: 629548 - DNA, 497 bp, Homo sapiens
cttcttgattaataactttaaagtcattccaaacctatcaagactcagagatagcgctgggcctttcctgtagtgtggggtttgtcttcaggaacaaaatcccacttctgcagcctgcagtgtgacccatctgttttgtatcccctgtcattttgggaacagtgtaacactgtggaggccaggctatacccgaggttagagaccccacctttaaaattattactctggggaaagcaggaaatattgtttcaatcataaggataaaatatggacaactatgarccacttaagaagtttcatagcagttgccttcaaccacaaaaccaaaatcagtattgagctctttgcttctgcacagtatagggaagatgtgagtggcagttcagtcaagctttttttttttttttttttttactgttctctggacctgattttgcacttgaaaatttccaagctctcagagtacttcagtgttaatagaaaacagctaaaatgtt

SEQ ID NO: 629549 - DNA, 583 bp, Homo sapiens
tttcatagcagttgccttcaaccacaaaaccaaaatcagtattgagctctttgcttctgcacagtatagggaagatgtgagtggcagttcagtcaagctttttttttttttttttttttactgttctctggacctgattttgcacttgaaaatttccaagctctcagagtacttcagtgttaatagaaaacagctaaaatgttgccacatttgcagatgtggcagatgtgagcagaagaacaaggtcagcacacataggaccaggtctggtacagcaggagcatgtggagtttccagaactgctttcaggtgtttctactctgtacggttttcattccctatttccaatacatcatcccctgtgtttcacctcatttcctcccagtttccgtttctactttgtcatatattaatttggacctttgtaatctttggtttccttctagtggaatctrgtgattttattaaaaccagaccaacgagaaaatgtttccaggtaagtcttcaggctggcagcctctcttccaatatcatcccggtccatcagctgagcctggtaggtaatcccactgttgcagactgg

SEQ ID NO: 629550 - DNA, 578 bp, Homo sapiens
ctttactgtttttaagatctatatcctggcttgtgtaaacatatacggtcatcactaaatagatgcctctctgttacagagccaacmaagaacttttttttaagccctcacttcctctccaggaaatggtgtatattcagagaggaagctgtcttcctgttttctccatactaacacacttgctgggtttttttctaagctcccaaactcagagtctccatcatatggaacaactcttcttagcaacaggccacattttttgctgcagtgattttaaaaaagatttattttctgtaagtcataaaaagtattattagtctaatttttcatctactgtattctcaagtactatgtcccctcccaaactctatcttattcagcctataataagggcattagactcctccaatggggttattctgtcaaaattcttagcaaaatacatcacctcctagcttcccaattacaaaagcaacttgacagggcacctgctttttattatttcagtgttgtgagatacaaacccagtgtgcctggcacccaagaatgaaatataattcaagaacgttttgtacatt

SEQ ID NO: 629551 - DNA, 578 bp, Homo sapiens
caatcatagcttacaggcaggggcaaccacgtgcagcctgacaatattttttcccccatctaacagcaatgcggttcagagaacattttcttagtttcgtggtaaggagattaggtcaaaccagaattggaagtcaggctgtatcatgtctgaggatactcatttcacatatcagtgaaatgagtatggcctyatttcactgaggccatactgctatataattaaacatgactgatatgatgagacgtaataaatatttcaggttgccaggtgaactgaaagaattataggaactgaaagatagaatgttagtcaaatacaacaaaatgtgagtcacacacatagaagttcagtgaaagatcttgtaaatggaggcaggttaagccccttgctcctttgaaagtcttgttttgatttctttgcttcttttaaaaattcttcataattcccctggaaactaaaggatgtgaacattaatgaaactgatacatataatttcatttcctacaaaatacatatttttagatgttagcactttgaaagggaacatcaggatgctaaaccatgacctataaata

SEQ ID NO: 629552 - DNA, 576 bp, Homo sapiens
tgtgaacattaatgaaactgatacatataattcatttcctacaaaatacatatttttagatgttagcacttgaaagggaacatcaggatgctaaaccatgacctataaataacaggctatattttaaaatataaaacaaactgatcacagctttgagaggtttcatcttcctgaatctccaattatcttctggttctgtttctaagagagtcttcaaaaggaaaaaataatagcctcaggcaagcatgtatctatggagataaacaggctcatatacatatcagtcaaggtacatacttgtttkgggtatttattcctgtatgttgaactctgaaacttaatggcttaaaaaataccaccattctagttatctgctcgtgattctgaaatttgagcagagcttagtggagtgaactcatctctgccctacatcgattgcatcgactggcatggctcaatgggggctggaagatcaaatcccaagaagttctcactcacatggcaggcagttgttgctgtttgttgacgaggaacacagctgtgtctgttgaccagcagagctaagaatgataggaa

SEQ ID NO: 629553 - DNA, 571 bp, Homo sapiens
ccacctccagcattggggattacagttcaacatgagacttgcttggctggagacaaatgtccagactatatcagcagctaactagaagcagggcattccatgtgattggtgagggggcatatttagctttccccagttggccctaagttaaaagcaggagctgaaataggaaagctggaagttattaatcaattcctgatcattttgggtcaatcgttataggggctatcctttggcttcctggaatggatactgtggatagtaagttggcttcctgggctggctgttacaggttgtgggtcagagtcctgctttatacattgcctggtcattgctcatttgtatattcaatctttcaattcccaggaccagcattttccagcatagagtaagaacgcagtaattatgagttaattaatatgaagcgggcaacttcgaatttgacattgcccctcagaggtgcagctcccttccatcctctttctacccrgcttctgcatccctgtgtctttactagctccattccctgtcacttccttgactgtaggtgagtcagagagactctccacaa

SEQ ID NO: 629554 - DNA, 621 bp, Homo sapiens
aaccactgagaaatagagaagaaaaagcagatgggcattcaaatactggctttattactgataaagttaataatgaaaaatatggcttcctaatcctaaacctcaaacagagcttacctgcccagccacaggcagtgctaagcaacttcaggcctcctgattgcagcctgcccctgaaaaacttacagtatgaaggagcaaaccggaatgatgagtagaccccccaaaataagaggccagtactgaccacactttgacagcccctcatcccataatcacaatttagatcactcctcctccccctaaggagtttgaatgcgagggtggggaagtgtgacggatgcctctcacaagaagccaagggagagaaagctctcccccataaacaccaccaggcagagatggcatgacagcaatgtcattatcaaatgaagcctatcaaagtgctattcacttttctctgctattttctagaaagacaayacatttgcaatttttagaccatcttaagcaaatggaacaatgatttttcaaaactcacatatctgattccataggcttttgtggttctatgctatttccgagaatgggacatgtcattccttcaggaagataagtagc

SEQ ID NO: 629555 - DNA, 509 bp, Homo sapiens
gcagtcttgctacttagagatccaagtgaccttcaagctgggccacttatgatacaacttaaagcaatttcttatttcatttttgccaatgatagcttgtactccaaatttcatgaaaggaggcgatgatactactagaaatttttttttaaagcagagaaagttkgtatgttaagaatccttgcatgcaaatggcagaaatccaactcgaaatagagtgggtagaaaaggcaatgtatttgaccgtattgagtatcccatgaaagagtggggaaaatcaacggtacttctagttttggaagactaaaaccagggaataaaattctgtcagaacctctccttcccgtctcatatcagtgccttttttttctgcacatcagctctactctttctcatttcatcctccctcattagaaattgaatttatctacatgacagaaaatatgagcatagttttagctatcgcagacagactgtctcagtcagttggggctgctataaaagaatac

SEQ ID NO: 629556 - DNA, 533 bp, Homo sapiens
ttttggccaacggcagtcttgctacttagagatccaagtgaccttcaagctgggccacttatgatacaacttaaagcaatttcttatttcatttttgccaatgatagcttgtactccaaatttcatgaaaggaggcgatgatactactagaaatttttttttaaagcagagaaagttggtatgttaagaatccttgcatgcaaatggcagaaatccaactcgaaatagagtgggtagaaaaggcaatgtatttgaccgtattgagtatcccatgaaagagtggggaaaatcaacggtacttctagttttggaagactaaaaccagggaataaaattctgtcagaacctctccttcccgtctcatatcagtgccttttttttctgcacatcagctctactctttctcatttcatcctccctcattagaaattgaatttatctacatgacagaaaatatgagcatagttttagctatcgcagacagactgtctcagtcagttkgggctgctataaaagaatactatagacgaggg

SEQ ID NO: 629557 - DNA, 551 bp, Homo sapiens
gataaagaaataaataggtaaaataaaacctatgaaagtctataatttttaaaaataagtcacagaagtgaacaatttacaaagtaacaacaacaaaaataacaagatctcactctgtcacccaggccccatctcaaaatgacaaaacaaaaacaaaacaacaagagctaatataatgcttatgatatgtcaggtgctattctgggcactgtttatgagctgacttttcatctcaaagccatattatgaggtaggtccaagaaggaactactaattcaagcataaaaaaattatttaaattttctacgttttcaatattgtatcagcaaagattttaaaatactagtgctcactgcctggggagttttgatgttgtcattcttaaacmatgctgataggaatataaattatttcctaacacataaagaatttttaaaaagttgacttgacaatatcacttctagaaatcctcaaaatccagacaaatctatcttgtaagcaaatatttgcatacaagaatggttatcatggttttacttacaataaaaaac

SEQ ID NO: 629558 - DNA, 582 bp, Homo sapiens
aactcttcttatggactctaaggacctttccatggacccccaaggtgattcatgaaattatagaatccaggttcaaaaacactggaggatagatgtcaccaaaaatggtggaatagggarccctaaggacctgttcctccactgaagcaaatgttaagctagtgaaagctgttaaactattttggaatgtgagaatctaataagaaaaaacttacaacaaccaggagagtgcttaataaagaggagacttctaaatttcagtaagaaattgtgtggcatttttgcttatccacctatcaccccctataccctagcttggtggtggccaataggaatggtggccatgttcctggtggtttagttgctagtgccagaaagatcagtacagaccttgttatcaataaattgtggttgtgcatgcattttaacctttttggcagttcctcgagaggctggcttagagaactgcctttgtttttaccccactttgaattctctcatgactggaggcctcctggacagcatttgtcaaaagcacataaggacattatacaatggacagccacctggagaaagaggtgg

SEQ ID NO: 629559 - DNA, 582 bp, Homo sapiens
aactcttcttatggactctaaggacctttccatggacccccaaggtgattcatgaaattatagaatccaggttcaaaaacactggaggatagatgtcaccaaaaatggtggaatagggaaccctaaggacctgttcctccactgaagcaaatgttaagctagtgaaagstgttaaactattttggaatgtgagaatctaataagaaaaaacttacaacaaccaggagagtgcttaataaagaggagacttctaaatttcagtaagaaattgtgtggcatttttgcttatccacctatcaccccctataccctagcttggtggtggccaataggaatggtggccatgttcctggtggtttagttgctagtgccagaaagatcagtacagaccttgttatcaataaattgtggttgtgcatgcattttaacctttttggcagttcctcgagaggctggcttagagaactgcctttgtttttaccccactttgaattctctcatgactggaggcctcctggacagcatttgtcaaaagcacataaggacattatacaatggacagccacctggagaaagaggtgg

SEQ ID NO: 629560 - DNA, 451 bp, Homo sapiens
taagtttaaaaatccgatagtggttgctagttgaaaattcctattccttgggaaactgttgaaagtctgtttagtactaacccccctcattaatggccatttgcaaagccaggccaagtttagtcttctaccagcactgaagaaacacatttttacccagaagaaatgagggtgaaatcctctgataactggaagatgctggatgttctggaaagaaaagtawtttttttttcaatctctggaaattgctttttttgttttaagtaagggtggctcagtagatgctaacagagaagctgggatcagctaatctggagaagattctgagagaatgagttggggaagctcacactgagaaaatgagaagattggtaggaagggcggtttcttgctgtgtccaagaacaggaattgagaaatggtattaagctgaaggtgagaggggaacaaag

SEQ ID NO: 629561 - DNA, 569 bp, Homo sapiens
ccttgtaagctctgaacaaatagcctttgcttgttcttatttgagtgctcttcattaattttcacactctgaagcaaggtctttctctcaacaagctcttctcacataccagtaaacctttacaaattgttacaaatagcagcactgaaatgaagatccttatataaaaccatggaggaaacctatactagcttgctataaaatcaactcggctcctcattcttaaatatgacagccaaagatagacagccaaagccaccagactcagagagaacgagcagcacgtaggagacgataaagaaaacagaacagattgaccttggaggaaacaggtcattcagagactcmaaacaagcttaaaaacattctaattagatcttcagtgacatttgagaagatattacatccatgaaaccaaaaacagcaggctgtgggaaaaaaaaaagtctcttggaaattaaaagtgaactgccagaattaaaaagattggaggattaagttgagaaactcaaacagaacagagagcaaaaagatagtctgaatgtgtggcagaaaaggtaagtcacatt

SEQ ID NO: 629562 - DNA, 569 bp, Homo sapiens
ccttgtaagctctgaacaaatagcctttgcttgttcttatttgagtgctcttcattaattttcacactctgaagcaaggtctttctctcaacaagctcttctcacataccagtaaacctttacaaattgttacaaatagcagcactgaaatgaagatccttatataaaaccatggaggaaacctatactagcttgctataaaatcaactcggctcctcattcttaaatatgacagccaaagatagacagccaaagccaccagactcagagagaacgagcagcacgtaggagacgataaagaaaacagaacagattgaccttggaggaaacaggtcattcagagactccaaacaagcttaaaaacattctaattagatcttcagtgacatttgagaagatattacatccatgaaacmaaaaacagcaggctgtgggaaaaaaaaaagtctcttggaaattaaaagtgaactgccagaattaaaaagattggaggattaagttgagaaactcaaacagaacagagagcaaaaagatagtctgaatgtgtggcagaaaaggtaagtcacatt

SEQ ID NO: 629563 - DNA, 569 bp, Homo sapiens
ccttgtaagctctgaacaaatagcctttgcttgttcttatttgagtgctcttcattaattttcacactctgaagcaaggtctttctctcaacaagctcttctcacataccagtaaacctttacaaattgttacaaatagcagcactgaaatgaagatccttatataaaaccatggaggaaacctatactagcttgctataaaatcaactcggctcctcattcttaaatatgacagccaaagatagacagccaaagccaccagactcagagagaacgagcagcacgtaggagacgataaagaaaacagaacagattgaccttggaggaaacaggtcattcagagactccaaacaagcttaaaaacattctaattagatcttcagtgacatttgagaagatattacatccatgaaaccaaaaacagcaggctgtggraaaaaaaaaagtctcttggaaattaaaagtgaactgccagaattaaaaagattggaggattaagttgagaaactcaaacagaacagagagcaaaaagatagtctgaatgtgtggcagaaaaggtaagtcacatt

SEQ ID NO: 629564 - DNA, 591 bp, Homo sapiens
cacagctctgagcttgctgaggtagtcaaggtcttagtcacactctgagctccctgagttagtgagggtcttataagccaagattgtttttcccataaccctccctcctcagcctctaagactgtctgccaactcctccctgcctggggggacttgttgctttagggtaaacagactcagccccaggagccaggctaggtatgaccaagtatagcatccaggcagctcagagccaccatgaccatccatacctattgaaacaaaagtaatgttctgcctattcttcaagatcccatcagttaacaagggaacyttaagagtcagtcattttcatcagccatcagcatctatgaaaatacgtatttttttactccaagccagaaaatatgatgtttgcacaactgcagagcagtggcctgggaatcaaacgtgaatgtcatatgtaacctaataaacaaagtttgtatgtatatttgtaacaaaacaaagttatgtattcccctctcccttgcaccagggaggtaaggaggtggaattgtgagtttttaatcaagcaagcaaatgagaaataaatagaatatggcaatggtg

SEQ ID NO: 629565 - DNA, 643 bp, Homo sapiens
tgagaagtttctgttgtaacccatgtcagatgatgaagagcctcgaatgaccatgttaaagtatttgcatgaggtggcagaggaagaggggtccaggatagctccaggcagggtgactggagggaaggggtgccattagccagcatagaaaagcagattgaatgaggagctaaaacaggtaagtgtaaggtgcctgtgagaaattcaagtgcaataccaytggaagtatgtagatatgtaattctacaggtcgggactgtatagagatttaagagtacccacatatagatgatcactaaagccatgttgggggtgagattgcccagagagagagtgtgtaccgtaagaagagaagaggtccaaccaagaacagagccccagaaagcacttaaagggcagaaggcggaaatggaacctatcaaagggaccaacaaggaactagttgagacgcaggaggaaagtcctgagaatcaagaagacatgactttcaagaaggccagggggattgagtactttggtcaaaggcagctgaagggtcaggtaggatacagatggaccttacccactggattggataatttagaagttgctgctgaatatggccagagtggattccagggaacggtggtggagccaggcagca

SEQ ID NO: 629566 - DNA, 330 bp, Homo sapiens
aaattaacaaaaataaactatgctttaacaccattcccccacacacacaaattttgactttttgatattttgatttacatctttttgtatgcctatctctttaccaatkgtcatgattattattattttctttaatagttttgtcttgtagtctttatacttaagatataagtaagttacatatcacagttaaagtattattctgaatttttctatattcttacttttaccactgagttttttataccttcaaatgttttctttttgcacattagcattatttcctttcagctgcaagccatattggggcttcatttaatatgatatgtt

SEQ ID NO: 629567 - DNA, 583 bp, Homo sapiens
agcaaattataacagtgtctaaccaggcaaacagaaaccacttccagtctttatgacagagagaatttaatgtggaggatttgttatgcagatgggggtgtagctaaagagtcaggcagaggattgcgggatgatccagagatcagaaatagcagggaaaattatgaagaaaataagtgttgtctgatccatgagcctgaggcagagaggaagggagagaaacagcctgactgttcctttcactttcttctaatctcctcccagtgccttccattggctgaagccagttagcagccagatgacagagacacccgggaattccttagtcccctagtcagcccctccaccttgcaattcagaggaggggaaatggtgagaatgtgatagagggcgaagaagcccaagatgggttcacaaggacattcatccccatggcactgggcaatctcaggctgtgcaaaaccagtcttctgtggtgacacagtttggctgccagaagccatrgcaggtgagttctttctttttttaccccagagatgggatcttgttccattgcccaggctggaatgtagcggcactgcag

SEQ ID NO: 629568 - DNA, 575 bp, Homo sapiens
ctttttgagggacctccatacagttctctatagtggctttgctaatctatatttccaccaacaatgcagaagagttcccctttctctacattcttggcagcatgcattatttcctatctttttcataaaagccattctaactggggtggattctaactggggtgagaaggtacctcattgcagttttgatttgccttactctgatgatcagtggtgttgacaatttttttttctttttttctgagatgaagcctcgctctgtcgcccaaagtttgtcaggttggagtgcagtgatgtgatctcggctctgcaamctccacccctcagactcatgctatcctcctgcctcagcctcccgagtagctgggactacaggcatatgccaccacacctggctaatttttttatttttagtagagatggggttttgccatgttggccaggctggtcttgaactcctgacctcgggtgatccacccaccttggcttcccaaattgctgggattacaggcatgagccactgcgcccagcctgaccattttttaatgtataatatatgttggccgtttgtatat

SEQ ID NO: 629569 - DNA, 575 bp, Homo sapiens
ctttttgagggacctccatacagttctctatagtggctttgctaatctatatttccaccaacaatgcagaagagttcccctttctctacattcttggcagcatgcattatttcctatctttttcataaaagccattctaactggggtggattctaactggggtgagaaggtacctcattgcagttttgatttgccttactctgatgatcagtggtgttgacaatttttttttctttttttctgagatgaagcctcgctctgtcgcccaaagtttgtcaggttggagtgcagtgatgtgatctcggctctgcaaactccacccctcagactcatgctatcctcctgcctcagcctcycgagtagctgggactacaggcatatgccaccacacctggctaatttttttatttttagtagagatggggttttgccatgttggccaggctggtcttgaactcctgacctcgggtgatccacccaccttggcttcccaaattgctgggattacaggcatgagccactgcgcccagcctgaccattttttaatgtataatatatgttggccgtttgtatat

SEQ ID NO: 629570 - DNA, 589 bp, Homo sapiens
ggctggttgcagtcatgcacaaacatggcagtctccacatgcaggaagccctggcctctattccccacaaactgaatcccacttataggatcgtagtgctcctaaattggaagaaaaataaaaagagagctaaaggagcatttgccaatatttgtatgcaatgaaagggaattattgtgccctgagaaaccgcaaggtaccaggtgtaagtactttacctacatttccttatttaatactgagtattacttcaaagagtacattacacatactcatttgacaaataaatgcataaactactatcaagaaaagtggaaagagttgcctaatgccacacagctagtaacagagctagtggtctaggggactgcaaggcctgtactttgtccataacactctataacttaaatccaattaactttagccaagtctaatttcctttaaactccagagtgcaagctcattkccatatgcttcaggcttaaagaattagcaccccaccatgatgaccaatgggccaatgctgcagagtgtcgttccaatattgcttggcatagggaagcaatgaggtgttggagtaaagatgcgc

SEQ ID NO: 629571 - DNA, 524 bp, Homo sapiens
gcagttgcttaataagtatttctaagtaaatgaatggagagacagtctcataagagtttcaggtcctgctagcagtgagagagaatgtagagctgagaatccaggtatatctgtgtgggagtgtgtgcatgtgtgtcatcaggaggaggatggcaccaaatcaaagggaacagaaggtactgtcatagccaagaataagaaagcagattggttccacattttggctattatgaataatgctgcaatgaatatggaaatgctagtatttcttcaatatactaatttcacttcctttgaatacctacatatggataagtgggatttctggatcttatggtagttctatttttcattttttaaggagcttccgtattgttttctacagtggctgtactaatttacattaccactgctggtgcacaaagtttcctttctctccacatcctcatcaatacttgkttttttttgtttttagttttttgtctttttatataatagctattctcacttgtgtgacatgatat

SEQ ID NO: 629572 - DNA, 471 bp, Homo sapiens
gttcagtgcttggcacatacaagcgctcaacatatgttgaagaaataacaaaataagtgtggacaaaaactggtcctcatctgtccttagtccattcaagttgctataacaaaaataccatagactgggtagcttaaacaacaagcatgtagcaaacatttatttgtcacagttctagaggctgagagctctaaaatcaaggcactagagattcagcttctggtgagggccascttcctggttcattgatggcaatcttctctctgtgtcctcatgcggcagaagaaatgaggaaactctctggggtctcctttgtaagggcaccaatcccatttatgtggtctccacgctcatgacctaaacaccacccaaaggtctcagctacctatattgtcacattggaggttaggattttaacatgtaaattttgggggcatataacatcagtccatagcatcatgcaacattata

SEQ ID NO: 629573 - DNA, 548 bp, Homo sapiens
tcacaatttagtaatgactttgtggaaagtacagtaaaatgtgtgagcagttttagttatatatattatttgttggactctaaagtattccacagttgttttgatatatgcctgtttggagttagcaatgtacttttctggataaacatcacataaggattacacatttatcttctcaccaaaacaggctcctccactcctctagtgtatgtaaatatgactggtcacctttttctcttaagctaaatctgatagttctggctttgctcatttgctttctagcagcctcccyatgttagccttgccacatggtcagtcttctgtttggtaggttttataaatcctaaaagttctagttcaaaaacagttctaatacaccaagcatagataatttcattcatttcttctgaggatgtagaatttgcatccattttttcagcagctgtcaaaattgttgcaaaagcctgtgaatagtccacaaggttgattagcctgcgacactctaggtacaatttgtatgctatgcagatgtctggggtgatatttgg

SEQ ID NO: 629574 - DNA, 506 bp, Homo sapiens
cctttgcatgtactagtttataattcagaatattctcaccatctttttttcctggggatatctctcacttcctttgagactcttggctcttcctctgacctcccataagacactcagcttatagctttataatagatttagcttgttctgtcttcctatrtagaatttttacatggctgaatgtacagaatggataaagaaatgaatcataatagatattcaacaaatatttgtgaaatacattaggttttttttttaaattaagtaccaatctggggcataaattagcataatttgtgggtgctgggagggggaaacgatagtaaagatacagctaaggtaagaagattgactacatacctctctctaacttcatggggtggagactttcttctttgaagtttttctgaggtggagtctcgctctgttgcccaggtttgagtcagtggtgcgatctcagctcactgcagcctctgcctcctgggttcaagcaattctgcctcagc

SEQ ID NO: 629575 - DNA, 506 bp, Homo sapiens
cctttgcatgtactagtttataattcagaatattctcaccatctttttttcctggggatatctctcacttcctttgagactcttggctcttcctctgacctcccataagacactcagcttatagctttataatagatttagcttgttctgtcttcctatgtagaatttttacatggctgaatgtacagaatggataaagaaatgaatcataatagatattcaacaaatatttgtgaaatacattaggttttttttttaaattaagtaccaatctggggcataaattagcataatttgtgggtgctgggagggggaaacgatagtaaagatacagctaaggtaagaagattgactacatacctctctctaacttcatggggtggagactttcttctttgaagtttttytgaggtggagtctcgctctgttgcccaggtttgagtcagtggtgcgatctcagctcactgcagcctctgcctcctgggttcaagcaattctgcctcagc

SEQ ID NO: 629576 - DNA, 645 bp, Homo sapiens
tttttgacaagaattcctagtttgataaccctggctgtttttcccttaaatgtaccttccgaggatttggcattaatcaaaccacattttaaatataccgttacattaagtaatgcacatttgtcctcagagataatgctgagtcttttttactctttatcaaagcacattttaattgactgggaaattaagaaatacattccttgcatataatatgaagaaatatgttcgcaaaaataaatataaaaagaggtttataccaaaagcatatagctagatctagttgcagagctatacaacttggctctgtttgagactacatctagtttaatgtaacttggatcaattttagcaactagaaagcactgtagaraagacatcaggattttatacacacacacacattgtgtatatacagatatatatacatatatatttgaagagaagcaattttcaaatatatgtattgcaacaatgtttaccctcttgaccaggaacattagattgcatctgtgtattaaaacatgacatggaagtagctcctgtctgtaaaccgtcctcaatctgttaagccctattgatctcagagaggtgatggagaaaagagaagtcgtccctcattctaagacttttactaaaaagact

SEQ ID NO: 629577 - DNA, 645 bp, Homo sapiens
tttttgacaagaattcctagtttgataaccctggctgtttttcccttaaatgtaccttccgaggatttggcattaatcaaaccacattttaaatataccgttacattaagtaatgcacatttgtcctcagagataatgctgagtcttttttactctttatcaaagcacattttaattgactgggaaattaagaaatacattccttgcatataatatgaagaaatatgttcgcaaaaataaatataaaaagaggtttataccaaaagcatatagctagatctagttgcagagctatacaacttggctctgtttgagactacatctagtttaatgtaacttggatcaattttagcaactagaaagcactgtagagwagacatcaggattttatacacacacacacattgtgtatatacagatatatatacatatatatttgaagagaagcaattttcaaatatatgtattgcaacaatgtttaccctcttgaccaggaacattagattgcatctgtgtattaaaacatgacatggaagtagctcctgtctgtaaaccgtcctcaatctgttaagccctattgatctcagagaggtgatggagaaaagagaagtcgtccctcattctaagacttttactaaaaagact

SEQ ID NO: 629578 - DNA, 626 bp, Homo sapiens
agggacctacaagactacaatcaagctattagccaggcttcattgttattcacagacttgaatagggaagaatctgcttcaagcctactcaggttgttggcagaattgcaagtgagtctgtcatgagagagttttatatgatataacttagtcaagggagcaatatttcataatatttttatgttctattggttaggagcaattcacaggttctgttcactcaaggggagaggatcacacaaagacctgaatatccagaagaagggagcatgggaccacctcagtctgtctaccccaagaaagtagcttagggtgataggaagagaatcagtgagactccaaaatatgaaatattatttagagaaacctagaatagatcttgaygacaacatgacccagaatgcctggggaaaagcaaggtgtatgtgcattcccatgaatgcccattaggtgccagctaccattccgagaaggagaattcaaagacaagaacattcttctctcaggatgacattgtctagacaggaaaataaataagtaaacacaataaatagcgaagcaggatgtggtaagtatgtgataaatgctatgataaaagtaggtaaaattactatagaagcaaagag

SEQ ID NO: 629579 - DNA, 626 bp, Homo sapiens
agggacctacaagactacaatcaagctattagccaggcttcattgttattcacagacttgaatagggaagaatctgcttcaagcctactcaggttgttggcagaattgcaagtgagtctgtcatgagagagttttatatgatataacttagtcaagggagcaatatttcataatatttttatgttctattggttaggagcaattcacaggttctgttcactcaaggggagaggatcacacaaagacctgaatatccagaagaagggagcatgggaccacctcagtctgtctaccccaagaaagtagcttagggtgataggaagagaatcagtgagactccaaaatatgaaatattatttagagaaacctagaatagatcttgacgacaacatgacccagaatgcctggggaaaagcraggtgtatgtgcattcccatgaatgcccattaggtgccagctaccattccgagaaggagaattcaaagacaagaacattcttctctcaggatgacattgtctagacaggaaaataaataagtaaacacaataaatagcgaagcaggatgtggtaagtatgtgataaatgctatgataaaagtaggtaaaattactatagaagcaaagag

SEQ ID NO: 629580 - DNA, 569 bp, Homo sapiens
gtttggtttgaagtttttacaataagcaaaagcaatataggcatacccattttgaaaaagaattttatatcagaaacatcactgtagcatattgtagggattgatatggaagagtttgttagttggaacaaaaattgaaggcactgtaacaaagatacacaaattacagtgtttctgacagatacattgatttccctcttgtgtaacaactcgagtaacatccagctctgtgtccacaartccaccagggacccaagctgacagggcaggtgtcctttccccaaaactggtgttcaagattttccggttcttgccatttccagaaaatgggaaggaaaagggagaaaagagtcccggacaagattcttttgttgaaatgacttggaccctgtacacatcacttcctcttatgtcttattactgagttatagaattaactgagggttggaggaagggtcgacaatcagcaatctgccacaaggagcaaaaaaactctaaataggggagattgttttgcagcttgatgtaatcatcaagctaaaagatgagtttgtgcttttgttattatt

SEQ ID NO: 629581 - DNA, 569 bp, Homo sapiens
gtttggtttgaagtttttacaataagcaaaagcaatataggcatacccattttgaaaaagaattttatatcagaaacatcactgtagcatattgtagggattgatatggaagagtttgttagttggaacaaaaattgaaggcactgtaacaaagatacacaaattacagtgtttctgacagatacattgatttccctcttgtgtaacaactcgagtaacatccagctctgtgtccacaaatccaccagggacccaagctgacagggcaggtgtcctttccccaaaactggtgttcaagattttccggttcttgccatttccagaaaatgggaaggaaaagggagaaaagagtyccggacaagattcttttgttgaaatgacttggaccctgtacacatcacttcctcttatgtcttattactgagttatagaattaactgagggttggaggaagggtcgacaatcagcaatctgccacaaggagcaaaaaaactctaaataggggagattgttttgcagcttgatgtaatcatcaagctaaaagatgagtttgtgcttttgttattatt

SEQ ID NO: 629582 - DNA, 426 bp, Homo sapiens
agtgtcaggcattttcacaactagcactaacaccaaggaaaatacagtgattaaggtccttcagtgctgttttgctccaaggaagtgaggtggcccctgggggatataccaggaagtgtgtgccccctgggggtcaggagacatgtcttacaaacctggctctgctgtgagcatattgggtgattgtaaaaatatgttgacttctctaggtcagaatttcctgagaacattgacaaacacacatttgataaatgtttgttgagttgaagtgaattgtatctgaaaaatgccaatgttggactaagccatccccagtattcctgaggaacccctacacattcacacctcatttgaagcagcagcttctyctgcatgaaatcttttctggttgttccagagtggcaagcccctattcaggagcacaga

SEQ ID NO: 629583 - DNA, 577 bp, Homo sapiens
aattgtgatttcactgtggctcacaaaacgatagtcagatctaacaaattcaatcagttaatttttggacaaagtctcaatgatgataatgtagatcattaatcactactccacctgcacatgaaatatgacagatctcagtgtcaggcattttcacaactagcactaacaccaaggaaaatacagtgattaaggtccttcagtgctgttttgctccaaggaagtgaggtggcccctgggggatataccaggaagtgtgtgccccctgggggtcaggagacatgtcttacaaacctggctctgctgtgagcatattgggtgattgtaaaaatatgttgacttctctaggtcagaatttcctgagaacattgacaaacacacatttgataaatgtttgttgagttgaagtgaattgtatctgaaaaatgccaatgttggactaagccatccccagtattcctgaggaacccctacacattcacacctcatttgaagcagcagcttctcctgcatgaaatcttttctggytgttccagagtggcaagcccctattcaggagcacagagcctcctattaa

SEQ ID NO: 629584 - DNA, 561 bp, Homo sapiens
agctcctttgctgcattccacaccactctgcctgatgttacatggatctgccttatggatgagtggctcttctctgggataatctcattatttgaagttaagtcagacactgatgctacagaagccttgatttgtgtttagaatatttgtgttagaggaattgtttaaagatttgtcattttaacagaccaaaacccagataggcataaaaggaatgttaaagcataactatatctcctcaatatagcgcagtgcaataaggttctgaacctgtagctcaagactaaggtcctaattccagctcttctactgatagcatgtataattttcagtgaatcgcccctgttttctgagccttagtttcctcacttagaaaacaaagataataatatctgttatgcctcttttgtggaagcatttgaaactcaaaggagataatgtatgtggtgttgcattggaagttgttgttaccttgacccatctccatctgtgtctgcagtggtcctgggtccccwgttcatgggagccctcactaatctttagctgatgggacactgtcat

SEQ ID NO: 629585 - DNA, 631 bp, Homo sapiens
acacaggtaattttaatggacactgccagataagaaagaatgcactagaatgtccccacatagtccatgctaaaataccatctaatattccatgctatttcatacttctgggcatattttttcatgctctttgtgaatatgtttccattgaatgtttgcctggcaaatatctaatattttcctgagaggaaaatacatgtgaaaacattttgtgtcaaatctggattcaaatcgtggctctttgacttcttagtttttgtttttgtttttttttgtctttagctgatgattgagctttcacttcccaagagggttctcttaccttkgaaaagatagagttacgctttcattccctgaaggattactgtttccaaagaaaaaagcatggatggaatactgacaggagtgcctgaccagaacaagaaagtaaatacagagggtcatctgaaaaggcctggagtcagatgacttatttccagtgacagacaggttactcactggctatatgacttcagacaagttacttagcctctctgagactggtttttctcatctgttaagtgagcattataaaagaatgcatttcacatggctgttatgaggattaattgggaggttatgcatgagctta

SEQ ID NO: 629586 - DNA, 620 bp, Homo sapiens
tactgcttcttaaaacagggaaattttcccttcctcaaccccagggacatttcgtgatgtctggacatttttggccattacaattcagagagtgctactagaatacaatggttaaaggccagtgatggtcctaaaaaccctccaatgcataggaatatcctttacaagagagtactattcagccccatttgtcaatagtgctaacgttgagaaaaactggtatagactaaagagaaagtgttttatcaatgacactgcttctaagrctatgtatgggccacccctgaagaaaactattgtcaaccctccaccaatttattctgtaaccacgaggagccgatgactgatgtttaatgtttttttaatacatagaggactaagtttgaatgctagtgccaccatattttagctatgtgatcttggataggtaattcacttgtctgatcctcagttttctcacttgcaaaatgatttaaacactttttctttaatgataatacctaccttggaggtctgttacacagattgaatgaaataatgtatttatagccataaaagtatctggtacatagtagatttccaacaattacaattactatgtctttataattattatataa

SEQ ID NO: 629587 - DNA, 595 bp, Homo sapiens
cattcacatcatgatgcacatagatgatgatgacaccagcatgggacacttgagtaaggrgccaggctctacctcccctgcgtacttaaaggactcaggagatcaatatcttggcacatcagttgctcatttgggccacacccttgtggctactggaccccagttggagaatattgggtttaaggatgataggaggaagaaacccagttctaagggatggtgtaaccaggtggttgagagcagtttcaagcctggaaaacagtatcagctctgcttcttactgttgtgtgaactgaaacaggttattaacagagcacctctttggtgctccatgtcttcatctccacaaagaaagtggtaatttgtctcacaaagctgttgcaagaacagaacgagttgagtgattaaagctggtgcatagtaagtgctcagtaaatggcagttttcttcactgttcttctctcccagatacaagcatggccaggtattttcttggaccactttcaagctctcactttattttgacttatagcagtattattatttttgagcattcagttgtcttctgatattctaaaaattaaataatccaaaa

SEQ ID NO: 629588 - DNA, 600 bp, Homo sapiens
agaaaaaataaatgagtatagtcattccattctgttataaccacattcaaatgtgacrtttattatctacttatttttgctttttcacttttaaagacacatttagtggtcattgagtgactaccataataataaaattataagaacaacattaataactttcattcttaaagtaatataatattttagaattttaaaagctctttggcatttaatcctccaagtggagtggatgtttttatccttatattacatgagataattgaggttaatagagtttaaataatatgtgtatggctgcataattagttgataaagggcctaaaactggaactcaaaattccagaccttactctggtactattttgaagacattataaagcattttgctaaatacttgcatgaagtgtaagcataaaaaagtacaaacaagaagacctaaattttgccctcaaaaagctcttaatgtaagaagaaaagtatagtagcccccttatctacaatttcacttacagtggtttcagttacccatggtcaaccatggtccaaaaatagctgaggacagtacagtaagatactttgatagacagagtgggagag

SEQ ID NO: 629589 - DNA, 600 bp, Homo sapiens
agaaaaaataaatgagtatagtcattccattctgttataaccacattcaaatgtgacgtttattatctacttatttttgctttttcacttttaaagacacatttagtggtcaytgagtgactaccataataataaaattataagaacaacattaataactttcattcttaaagtaatataatattttagaattttaaaagctctttggcatttaatcctccaagtggagtggatgtttttatccttatattacatgagataattgaggttaatagagtttaaataatatgtgtatggctgcataattagttgataaagggcctaaaactggaactcaaaattccagaccttactctggtactattttgaagacattataaagcattttgctaaatacttgcatgaagtgtaagcataaaaaagtacaaacaagaagacctaaattttgccctcaaaaagctcttaatgtaagaagaaaagtatagtagcccccttatctacaatttcacttacagtggtttcagttacccatggtcaaccatggtccaaaaatagctgaggacagtacagtaagatactttgatagacagagtgggagag

SEQ ID NO: 629590 - DNA, 597 bp, Homo sapiens
cattataaagcattttgctaaatacttgcatgaagtgtaagcataaaaaagtacaaacaagaagacctaaattttgccctcaaaaagctcttaatgtaagaagaaaagtatagtagcccccttatctacaatttcacttacagtggtttcagttacccatggtcaaccatggtccaaaaatagctgaggacagtacagtaagatactttgatagacagagtgggagagaccacattcacataacttttattgcagtatattgttgtatttgttctaccttattgttagctatttttgttaatttcttactgtgcctaatttataaattaaactttatcataggtgtgtatatatgggaaaaatgtataaataggatttagtactattgatggtttcaggcattccctggggttcttggaacataccccctgggggaataagcagggactactatatatgataytttaactttaatataaaaaataataaaataagcccttcaacattaataggctgtgcctctaagatgcttagagattgaaagagaagggagattggtctaattagaaagacctagttaaaaaaagtgagtgtttg

SEQ ID NO: 629591 - DNA, 510 bp, Homo sapiens
acctagttaaaaaaagtgagtgtttgagctttgaccgtaaagaatgggtacaattttgataagcagatagaagaaagggctttcctggatgggaggagaaratacacaagtaactggtgggggcaatccccagcgtattacctgaactagtgagctggttgcctgttgcaggatgagtggacaaatggaattagaaagggaatttagagaaatatcatggaaatcatggatgtcttgctaacgaatttagaactatttgatttcagaaaaaggaagtaaatggagtgacataaaaatatcattgctttttctgtttttctagcaattattttttcctaaatttcacactttctaaatgcaaattcaatcttaatgagaaagaactagcagtcttgtctctgaagttggtttcttgcacttagatttgtgagaaatgtgaatagactgagaagttaggggtggaagaggctttaactactactaagtccatcaccctcgctcacatgcaca

SEQ ID NO: 629592 - DNA, 510 bp, Homo sapiens
acctagttaaaaaaagtgagtgtttgagctttgaccgtaaagaatgggtacaattttgataagcagatagaagaaagggctttcctggatgggaggagaaaatacacaagtaactggtgggggcaatccccagcgtattacctgaactagtgagctggttgcctgttgcaggatgagtggacaaatggaattagaaagggaatttagagaaatatcatggaaatcatggatgtcttgctaacgaatttagaactatttgatttcagaaaaaggaagtaaatggagtgacataaaaatatcattgctttttctgtttttctagcaattattttttcctaaatttcacactttctaaatgcaaattcaatcttaatgagaaagaactagcagtcttgtctctgaagttggtttcttgcacttagatttgtgagaaatgtgaatagactgagaagttaggggtggaagaggctttaactrctactaagtccatcaccctcgctcacatgcaca

SEQ ID NO: 629593 - DNA, 570 bp, Homo sapiens
cgtgagcattctagtgagttcgctttgacagctatgcagaatgagagaggaaaaaggagagtaagaccaaagacaaagaggccagctaggaggtttctgctatattcaaacaaaaggcaaactgatgaagttctagcatagatatttataatgtgacaggaaagctcaagatagagatagtaattttaactgaaagaatccggaagtaattcatgataaagatagcattcaagttacaattgaattttctggtattacggactaaatactctccccaaaattaatagatggaatccttaacccccaacgtgattgtacttgaatatagtgactttaagtaggtaaataaggttaaatgagatcataagggttgggctstaattcaataggactgatgtccttaaaaaaaagaggaagagatactggggacatgttgcacaccgagaaaaagttcatttgagtacacagcgagaaggcaggtgtatagaagccgaggagactggcctcagaagaaaccaacctggttggtgccatgatcttggacttatagcctccagaactgagaaaatt

SEQ ID NO: 629594 - DNA, 586 bp, Homo sapiens
gctgagcacataaatgaacacgacatagtaaataacatataaataatctccacttccttccttgtcatttttccggctctcctttctggtttcattcttcttcttcctcctcatactatcagcgataatagcactagtatttatgctgtccgtgcagtgatgataatcattagcactggtcaggagcaccatccaygtggaggaaacctggtttaattacccccaacctgcagtgcccagtagctgcctcaatctgtacatttctgatagctgttttggaaaatgatcaaagttatctgttgaaataacaactcacaggaagatagtacaatgccaaagcaatattattatgctacttttcagaaaaatgtatgtgttgaggatgtttatgagcatttgtaatcaccagccatttctgctatggtcactgcaggcagtcttaacttgaaagccatagaaaatacaacgaaccaaggataacatttctttattccaacccctggctgtcttatcagctaggatattttcagagcgtgtatatccctatcagtgctgtttaaatacatgggaaatttttggtgtccat

SEQ ID NO: 629595 - DNA, 578 bp, Homo sapiens
gatttagggcttttgtttgtttgtttttgtgaaagagtctcacttcgtctcacaggctggagtgcattggcgtgatctcagcttatgcaaccaccgcttcctgggttcaagtgattctcctgcctcagccttccgagtagctgggatgacagggatgccccaccatgcctggctaatttttgtatttgtagtggaggcrgggtttcaccatgctggccaggctggtctctcctgacctcaggtgatccacccaccttggcctcccaaagtgcttggattacaggtgtaagccactatgcccaacctgaggctatctttttttttctttatgtcattccaaacatgaaacaccaaatgcagaatgataatgtccttttgtttcaatcatcataataatgaaattccactgaatctgctctcagaagagaaaaagctaaaaaactaacctataatatagcagacagaaggcagattggatccccactcttatttatcagaaagaaggcagaacagaataattcgatgacaatgggcttcagacaaggggagagaatgacaacttccctcacaaactgtgt

SEQ ID NO: 629596 - DNA, 586 bp, Homo sapiens
gagatgcaaaaaattgctagccatatgaaaataattttaaaaattagaagtgacagtatcttcagctggaagaaaccagtgcaaaaattctggcactatgaaaaatctcaatgatctgacaccactaacggattgcactagctctccagtaatggttcctaaccaaaatggaaactcaaaaatgacagataaataatttaaagcatagattgcaaggaagcttaatgagatctaaaacaaggttgaaaaatcaacacaaataagcttctaaagccatctaagaaacmaaagataaacatcttaaccataaattagagtttctggaattgaaaaactcagttaaggaatttgaaaataccgttgaaagctttatccatagactggaccaagcagaaaaaagaattttaatctgaagactggacttttgaactaacccagtcacacaaaaattaaaaaaaaaaagaattaaaagtctttgagaaataagggattatgtaaagtgaccaaacctattagttattggcattactcagagagaaggagaaaaagcaaataatttgtaaaacacatttgaggggataactca

SEQ ID NO: 629597 - DNA, 586 bp, Homo sapiens
gagatgcaaaaaattgctagccatatgaaaataattttaaaaattagaagtgacagtatcttcagctggaagaaaccagtgcaaaaattctggcactatgaaaaatctcaatgatctgacaccactaacggattgcactagctctccagtaatggttcctaaccaaaatggaaactcaaaaatgacagataaataatttaaagcatagattgcaaggaagcttaatgagatctaaaacaaggttgaaaaatcaacacaaataagcttctaaagccatctaagaaaccaaagataaacatcttaaccataaattagagtttctggaattgaaaaactcagttaaggaatttgaaaataccgttgaaagctttatcmatagactggaccaagcagaaaaaagaattttaatctgaagactggacttttgaactaacccagtcacacaaaaattaaaaaaaaaaagaattaaaagtctttgagaaataagggattatgtaaagtgaccaaacctattagttattggcattactcagagagaaggagaaaaagcaaataatttgtaaaacacatttgaggggataactca

SEQ ID NO: 629598 - DNA, 586 bp, Homo sapiens
gagatgcaaaaaattgctagccatatgaaaataattttaaaaattagaagtgacagtatcttcagctggaagaaaccagtgcaaaaattctggcactatgaaaaatctcaatgatctgacaccactaacggattgcactagctctccagtaatggttcctaaccaaaatggaaactcaaaaatgacagataaataatttaaagcatagattgcaaggaagcttaatgagatctaaaacaaggttgaaaaatcaacacaaataagcttctaaagccatctaagaaaccaaagataaacatcttaaccataaattagagtttctggaattgaaaaactcagttaaggaatttgaaaataccgttgaaagctttatccatagactggacmaagcagaaaaaagaattttaatctgaagactggacttttgaactaacccagtcacacaaaaattaaaaaaaaaaagaattaaaagtctttgagaaataagggattatgtaaagtgaccaaacctattagttattggcattactcagagagaaggagaaaaagcaaataatttgtaaaacacatttgaggggataactca

SEQ ID NO: 629599 - DNA, 568 bp, Homo sapiens
aattgaaaaactcagttaaggaatttgaaaataccgttgaaagctttatccatagactggaccaagcagaaaaaagaattttaatctgaagactggacttttgaactaacccagtcacacaaaaattaaaaaaaaaaagaattaaaagtctttgagaaataagggattatgtaaagtgaccaaacctattagttattggcattactcagagagaaggagaaaaagcaaataatttgtaaaacacatttgaggggataactcaagaaaattttcttaatcttgctagagagacagacayccagatacaagaaatcaagagaacacctgcaagaaactataaagcatgagcatcaccaaggaatatagtccctagactacccagattcaatgctaaagaaaagggcacctgaagaaaaagtttgcatcttaaagacagctggagaaaaaggtcagatcatttacaaagggaactctatcaggttaacagacttttcagcagaaaggttacaagccagcagaaattagaaacctattttttagcattcttaaagaagttccaattaagagt

SEQ ID NO: 629600 - DNA, 419 bp, Homo sapiens
acttttgaactaacccagtcacacaaaaattaaaaaaaaaaagaattaaaagtctttgagaaataagggattatgtaaagtgaccaaacctattagttattggcattactcagagagaaggagaaaaagcaaataatttgtaaaacacatttgaggggataactcaagaaaattttcttaatcttgctagagagacagacacccagatacaagaaatcaagagaacacctgcaagaaactataaagcatgagcatcaccaaggaatatagtccctagactacccagrttcaatgctaaagaaaagggcacctgaagaaaaagtttgcatcttaaagacagctggagaaaaaggtcagatcatttacaaagggaactctatcaggttaacagacttttcagcagaaaggttacaagccag

SEQ ID NO: 629601 - DNA, 621 bp, Homo sapiens
ctatggtaacaaaaatggcatggtacaggtacagaaacagacacatagatcaatggaatagaatagagaacccagaaataaagccaaacayctacagccatctggcctttgacaaagttggcaaaaataagcaatggagaatggactccgtaatctataaatgttgctgggatagctagctagctagccatatgcagaggaatgaaactggatccctactttttaccataaaaaattaaaatggattaaagatttaaatgtaagacctcaaaccatatgaatcctagtagaaaatctaggaaacctttctggatgttggccttgggaaagaattcatgactaagtcttcaaaagcaactgcaacaaaaacaaaaattggcaagtgggacctaattaaacaaaagaacttctggatggtaaaagaaactatcaacagagtaaacaacctactgaacaggagacaatattcacaaactttgcatccaacaaaggtttaatatccagaatctatatggaacttaaataattgaacaagcaaaaaataacctcatcaaaaaatgagcaaaagacatgaatagacacttctcaaaagaagacatacacgtggtcaataaacatgaa

SEQ ID NO: 629602 - DNA, 607 bp, Homo sapiens
tcttttaactaatttcttgtttgtttagggtgtcttacatcatttccccaaagagaatatgtaacctacatacagacttttactgtggctctgaaactattctttyaggatgttcagaacagaaacttcaatcacttctctgattctacaaggattaaccttgagagctagcaatttgagctccatattgtttcattttgcttgttattaatgaagcaaatacagttaacaagtttaaattatataaaattataaaaccaattttggttctcttgttaacatcgcctataaaaccatagtttctccaggctcttctctggcatatgactttgcaataactatcctttcacgcatcttcatgggtatgatgccaactctggcacattcttgtgcttgttagaacttctttaagatatcatcaagtagaaaattttcatctcattttccaacaactctctaggatctctcaggctcaagatgactctttgaaatagcaaataaggattacttcccaagccacagaatcaaacagtgcatagctggctagactagctgaatccctgtactgatgccatgtttccacagcttaattaaaaattcaatttat

SEQ ID NO: 629603 - DNA, 576 bp, Homo sapiens
attcagccaaagggaaaatgaaaaacactggacttagtcttaagcaaacttttcattctcatttttgtatttgtttttgaaacagatctgctaaaggccagttacttaacaaatggatggcacacactcggagtcatcagatataaaataaaatcccaacatattaaaaaagtaaagaatacatttgacagaaattacctttgtttacaaaaattcattacatacaatctgcatatttttactggactaagaactgtcctctccgtttacaaaaaccaaagagaaacctgatggataagtaatatttcccccctaacctcctgtaagttcaccatgtatagtcccaagtttttaaagctcaagctcatctcaggatcctggttctccacttacactacactctattcaccgctgttaccaagctaaagcaaacaaaagcaaattaartcagcagttttcaccaggaagttgaaggaatcatcaatgccaagagcaaggtgactgatgacgaagatgtggagagagtgtgaagggtcgactgtgcacttgtgatttttccacctgtgaaaaaagaag

SEQ ID NO: 629604 - DNA, 576 bp, Homo sapiens
attcagccaaagggaaaatgaaaaacactggacttagtcttaagcaaacttttcattctcatttttgtatttgtttttgaaacagatctgctaaaggccagttacttaacaaatggatggcacacactcggagtcatcagatataaaataaaatcccaacatattaaaaaagtaaagaatacatttgacagaaattacctttgtttacaaaaattcattacatacaatctgcatatttttactggactaagaactgtcctctccgtttacaaaaaccaaagagaaacctgatggataagtaatatttcccccctaacctcctgtaagttcaccatgtatagtcccaagtttttaaagctcaagctcatctcaggatcctggttctccacttacactacactctattcaccgctgttaccaagctaaagcaaacaaaagcaaattaaatcagcagttttcaccaggaagttgaaggaatcatcaatgccaagagcaaggtgactgatgacgaagatgtggagagagwgtgaagggtcgactgtgcacttgtgatttttccacctgtgaaaaaagaag

SEQ ID NO: 629605 - DNA, 575 bp, Homo sapiens
ccctctagtgagacaggatgtggagatggaagactgatattgatgatcctgacctaggcctaagcctatgctaatgtggatgtaagtgacttagtttctaacaaaacagtttaaaaagcaaacaaaataaaataaaaaatattaaaaagtttatagaatacagatataaagaaaatgtttttttaatctgtattatgtatgttttaagtgttattacaaaagagataaaatttaaagtttataaagtaaaacagttacagtaagctaagtttattagagaaaaaatkgtttttataaatgtaatatagcctaagtatacagttataaagtctatgacagtgtacaataaagtcataggccttcacattcacttggcaatcactcagtgactcacccagaacttccagccctgcaagctctgttcctgttaactgccctgtagaggtataccatttttttatcttttatactgactatatctttactgtaatttttctatgttcagatacacaaatagcactgtgttacaattacctacagtattcagtacagtatcatgttgtgtatgtctacag

SEQ ID NO: 629606 - DNA, 325 bp, Homo sapiens
gaaataattaatgcagagacattataacttttcttgttgttaaaactatacttttataaatgaaccataaagcatattaaatttttgtgtgaccacaataaaatttaaattcttagatcttttcamcagaatttctgaaacagtcagatttctcccatcttatgttttgtatttttaactattcatttaaaaatacttttaggtgtactgaaaagttgtgagactaaggaattcacccagattccttaaatgttgacagtttatcattcttgctttattgttatttctgtacatatatacatttttttgaaacatttgaaatgaa

SEQ ID NO: 629607 - DNA, 614 bp, Homo sapiens
cttttcctcaaaatattttaatgtatagttcctaaaaataaggcttttaaaaatataaccacagtatagttttttaaaaaaatgaaatgaatgttgatgtaatatctaatttacaggtatgcaaatcttatcaattatcaataatgttccttatcctgtattttcatgtgagaacttatcaagtattgtaagtggcagctaaattatgagaacacatggacatatagaggggaccagtacacgctagggcctatcagagggtggaggttgggaggagggagaggatcaggaaaaataactaatgggtactaggcttaatacctgggtgatgaaataatctgaacaacaaaaccccatgacacaagtttaagtttacctgtgtaacaaacctgcacatgtacccctgaacttaaaaagttaaaaaaattatcaagtattatgtcagtagcttttcctcaaagttccagtctgtctcattcttttctacactgtatttatctcccatttcacttggtggcataaaaaaaaaaatcacaagcaakgcctcgggtctgacttcaagttgataaatacgttaaataacatagggccacatacagagcatgacgggacac

SEQ ID NO: 629608 - DNA, 578 bp, Homo sapiens
aaagtcggagtatataaaagatgctaaataagtattttttgaatgaatgaatgaacaagagccagtggtataaagtcatacttggggcctcatgagagcccatgattggacagacaacatttacatgcaaagcaaactctatagtgccctagcatgtgaacacaattaaagctcattgtaaaattaatagcaaacatttatatgatatgttctatttgccaggcactactttaaaccctttaaatacatttaggtatttattcttcaaaaaatctcctgagtatattttaaaattatatgtgtaattaaatatgcatgtctctctcttcttctccttgatattaggatgcttaaaataagagaataagcctcgttcatctataattcaagcctcttccacagtgcttggcatgtagtatatattgggtaagtaaataaattcatgagtaaatgatttttctctgtgggaaaggcacattgatcaggtcacagtcataagtgtcttctacactatgcctaggagaatactattgyttgaattgtaactactcatatatgtcataactgtaacactcata

SEQ ID NO: 629609 - DNA, 695 bp, Homo sapiens
cataccaattaaaggccattatggagggactgtcaatgtgatgtgatagatgaagaagatgcaaatgaagaaaaacaatcaggatttggtgaatgaatggaaatgaatggtaaaaggcaactggagaatcaaggataattctactgaaactgctaacaatttcaagactactacgtgatcgggacggaacagcaaaaatggggaacgctggaagaaatgctagtttaagggaaccatgataagcctctgtgtgaatatggtaagtgtgtgatgattcatctgaaagcacacagaggcaggagatcattgaggctcagacttatcccttggagtcaactggatcatgagagaatggggtattttaatatcatctatgtgaaggaagaggaamcttcaaagaatttctcaattatcagatgactactttcaggaaatactttttttactgtataaagtcaaggtggtgttcaataagatattttgatatacatatatacagtgaaataattactagagataagcaatttaatataaccatcatctcatagaccttttttatttgcattaagagcatctaaaatcttacagaatttccagaatatagtatcattaaagatactcttcatactatatatatgtacataccatgttttctttatccgttcatccaccaatggtcaattagattgcttcca

SEQ ID NO: 629610 - DNA, 695 bp, Homo sapiens
cataccaattaaaggccattatggagggactgtcaatgtgatgtgatagatgaagaagatgcaaatgaagaaaaacaatcaggatttggtgaatgaatggaaatgaatggtaaaaggcaactggagaatcaaggataattctactgaaactgctaacaatttcaagactactacgtgatcgggacggaacagcaaaaatggggaacgctggaagaaatgctagtttaagggaaccatgataagcctctgtgtgaatatggtaagtgtgtgatgattcatctgaaagcacacagaggcaggagatcattgaggctcagacttatcccttggagtcaactggatcatgagagaatggggtattttaatatcatctatgtgaaggaagaggaaccttcaaagaatttctcaattatcagatgactactttcaggaaatactttttttactgtataaagtcaagktggtgttcaataagatattttgatatacatatatacagtgaaataattactagagataagcaatttaatataaccatcatctcatagaccttttttatttgcattaagagcatctaaaatcttacagaatttccagaatatagtatcattaaagatactcttcatactatatatatgtacataccatgttttctttatccgttcatccaccaatggtcaattagattgcttcca

SEQ ID NO: 629611 - DNA, 577 bp, Homo sapiens
atttcattatacaaggggaccacttaaggggacttaaaggtaaaaaatgaatgttgtactatcataaaaagttaaagtcagcccatccatggctaaggtgatacaactgtagatagtaaatattmttttattaatctgtttaaatgatctggagatgaaattttcacaaaataatcttgcctttgtttatttgatattatagttgcttctttgaccaactagtcataagtaaatacagaacttatcttctaccatgaggaaagttctatgaggacaaaagtttatagaaaacaagttccttttttcatttaaaaattctgaagaagtatgaggcccaatcttctgcatttaatgaaatgtttaaaactcagtttcaactaatgtccttttttaaatggaggttatattcacaatttttgaaatatattaatttttagtgcttaatttcaatatttcttccaatgtctaaactcttatcatttcaatatataataaatgtatttttaattgctaatgagatattttacattatttcattcatttgaagtcttagccaattggtgtgtattttacattt

SEQ ID NO: 629612 - DNA, 556 bp, Homo sapiens
ctgactacacaggggcccaccagctacaggtaactggtggctatttcactagatggtatattctctacagcagagggaaggaagacttcgccttcttctcttctcattcctcactatcacacaaatatctattaagcacccaccctgtatctgatactgaagataaaatttgggggaaaaatcaaatgaggacctcaaattctcccatttgaagaatactatatggagatattgaatatacaaataggcaatggcaagaccatatatgatcataacagtctcacccacaacctctggcagcaagcaaccagtgagagaagccagaccataacctctgcagcgatkggcctagagcgatcaggactttgtcagtgtccttcagctttcattatttttgcctcttctcccaattcaagaccaatcagagaaagccaaatatactcccaaaccaattagataagataatctgcttctatgcagacccccacagcttcctcatatcaggacctccaatcaggggataactgcagcctttccttttcttttactataaaga

SEQ ID NO: 629613 - DNA, 591 bp, Homo sapiens
atgaattgaaggatagtaaatgcaaggattttattgccaatggaagtggctctcagtgggaaggggagctggaaaagggatggagcaggaaggtattcttcccctgaattctggccatctccggccagactcttttccaaagtcccaccctcaagctgtccctctgaagtcaagctgcttctckccaacattcagctgctgcttctccttttcacatatggagtcttcttcttccctgccagctgggtcagggatttttgtgggtacaggatgggggcagggcaagccatgggtggttttagaaaaggcaacattcaagtgggaaaccagggatataaagttctcactttgggccacagttccaggattcagggtgggacctttgctggggaccctgcccttttctacgtagaatttctctgcctcctgtccctatcagattgacactatagccccacaccctcacaaacatatatgtatagaaaatcaagacttgaaatactacaatttacaaaacatataaatgaatcaatacttgagaatttcttaatggagaatttaatctcctatagagtaccagttaagtgttag

SEQ ID NO: 629614 - DNA, 627 bp, Homo sapiens
atagtaaatgcaaggattttattgccaatggaagtggctctcagtgggaaggggagctggaaaagggatggagcaggaaggtattcttcccctgaattctggccatctccggccagactcttttccaaagtcccaccctcaagctgtccctctgaagtcaagctgcttctctccaacattcagctgctgcttctccttttcacatatggagtcttcttcttccctgccagctgggtcagggatttttgtgggtacaggatgggggcagggcaagccatgggtggttttagaaaaggcaacattcaagtgggaaaccagggatataaagttctcactttgggccacagttccaggattcagggtgggacctttgctggggaccctgcccttttctacgtagaatttctctgcctcctgtccctatcagattgacactatagccccacaccctcacaaacatatatgtatagaaaatcaagacttgaaatactacaatttacaaaacatataaatgaatcaatacttgagaatttcttaatggagaatttaatctcctatagagtaccagttaagtgttaggctttcaacmaaactgtttagcttgctcatcactctgatcactggata

SEQ ID NO: 629615 - DNA, 655 bp, Homo sapiens
ctttgcatatattaagagatttaattctttaataactctatgaggtaggtaattctcttattcccatgtgaaaggaagttaagatacttaaaggttaaatcactcacccaaggtaacatggccaagttaacgctaaagctgagatttggattaaggcaggctattgccagacctcacactcttaatcactatatgaggttgcctctaaatgaaatatgtgaaaactaaaagtaagatttttcctgacctcttattttagtttgtcactgtttcatataagaaaaaaatacacaagggagaaattctagctgagcctcatttttcctcatctgtaaaattatgaaartaaaaatgtcactgagatgtttttgccagcatcatagaaaatagatggaagtaatggccccaattctttgcatctccctacgtccatgccttctcacttggcgtggccatatgttatgagctgaactgtgtctgcccctccctgcaaattcctatattgaagtcctaatccccagtaccttaatagatgtctgtattttgagataaggcctttgatgggatgagtaagttaaaatgagattgtaagggtgggccctaatctaatctgactggtgtccttataagaagaagaaatgtggacacagagaga

SEQ ID NO: 629616 - DNA, 618 bp, Homo sapiens
tgtcagaaggcccatctgttccctggggcagagcaccactgtctatctttgtgttcccatggctgacaaagcttttggcctcaagaaacagtaagagatgcygcatcttctggcaatatccctgtagccccctctactgaggaggcttcacagagtgctcactgtaaaggagaaatgtttaaaggaactccattcattattgcagagcaagttttgaaaagtgtggagctaacaggtattagattgataactggcaccccaactaaaacataaacacctactaagcatgaggattgaacacttcaagcaaagaaattatttcaacaataaccgtagattttatctggctaagattttttaacccagaaaagcaaatttaccaatctaacaaactgaagataagtggttttgtttctgtacatcttacggccttcccaaatgttgcacacatcatctaaattaaattagcaacttattgaatggttctaacttaacaaaactttcaatcaaagcatagtatatgattataacacagatgaaataaataaaaatatacaaaagtataacacagagatattgcagacttggatattgcaataaagcaagtcacacaaattt

SEQ ID NO: 629617 - DNA, 602 bp, Homo sapiens
ggctgctacataagcttgagtcccggggtgaatttaacataaagcagagtagtggctggcctatgaaagacgtacagcctgaccagaaacttgtatgttataagcctctaagatccctgggttgtttgttactgtagcaaaacctagcctggtttgactgatgactagctgttaaattataccatgtaaacgactattatttaactcaagagatcaagtctgtccgttaagtctatatttgtctagattttgtggtttgggaagaacttccatatgaggttgttcaattcatttttaacttgtgcccaagattctggaatcatcagggatttcgtatggctactgccatccatcaaaacmataagccataatgagaaggtatatctaatttttttctaccatatctattgttttgcaatacgcttttcatactttttgtgtttgaattttctaccctaatatgaaacatataattttgtgttatttatgttatagattaatctttacctatgacctatcactgatcaagacaaggatcacatctatgtgctatattcttgtctacatcaaaataactgctcgaaaatgaaagatgttgccaa

SEQ ID NO: 629618 - DNA, 602 bp, Homo sapiens
ggctgctacataagcttgagtcccggggtgaatttaacataaagcagagtagtggctggcctatgaaagacgtacagcctgaccagaaacttgtatgttataagcctctaagatccctgggttgtttgttactgtagcaaaacctagcctggtttgactgatgactagctgttaaattataccatgtaaacgactattatttaactcaagagatcaagtctgtccgttaagtctatatttgtctagattttgtggtttgggaagaacttccatatgaggttgttcaattcatttttaacttgtgcccaagattctggaatcatcagggatttcgtatggctactgccatccatcaaaaccataagccataatgagaaggtatatctaatttttttctaccatatctattgttttgcaatacgcttttcawactttttgtgtttgaattttctaccctaatatgaaacatataattttgtgttatttatgttatagattaatctttacctatgacctatcactgatcaagacaaggatcacatctatgtgctatattcttgtctacatcaaaataactgctcgaaaatgaaagatgttgccaa

SEQ ID NO: 629619 - DNA, 572 bp, Homo sapiens
tatgggacatttccagattggctgtatgaagaaaccatgctttggataaaagaggggagcaaatttatctgtgtgcctccatttgtctcttatttcttactggtggaagttcacaccctgagcaagttcatccccttgtgcacacctgttctgcatcatctaatactgacaggagctagtcgggcagatagattccatgctctgcattttaactgggtacaaacattttaactgagtacagaagttgtgagacagcccagaaccctatacatrtgcctggttgacttagctttgagaatgtcagccaaaaagaatcacctagtgaattaggtattggttggtcccaggcagtggaattgagtgtacctgaagggcgttagtttggtggcagctagaggtggaataagcatctctgcgtctgggaggcaggaagaccaagtgagtctggagatacacataagatgtgtttgataactcatgataatttaaaaatataatattaaatacccagagttatttcttcaaattttttccttttgtttttaggataatctgaagaaaaaaaacccatc

SEQ ID NO: 629620 - DNA, 572 bp, Homo sapiens
tatgggacatttccagattggctgtatgaagaaaccatgctttggataaaagaggggagcaaatttatctgtgtgcctccatttgtctcttatttcttactggtggaagttcacaccctgagcaagttcatccccttgtgcacacctgttctgcatcatctaatactgacaggagctagtcgggcagatagattccatgctctgcattttaactgggtacaaacattttaactgagtacagaagttgtgagacagcccagaaccctatacatatgcctggttgacttagctttgagaatgtcagccaaaaagaatcacctagtgaattaggtattggttggtcccaggcagtggaattgagtgtacctgaagggcgttagtttggtggcagctagaggtggaataagcatctctgcgtctgggaggcaggaagaccaagtgagtctggagatayacataagatgtgtttgataactcatgataatttaaaaatataatattaaatacccagagttatttcttcaaattttttccttttgtttttaggataatctgaagaaaaaaaacccatc

SEQ ID NO: 629621 - DNA, 630 bp, Homo sapiens
tgtaaacaatgttggttgaagtcttctctgcatgtctgatgatccctacaagagtgatttgtgaaatctcagcattgccaattttgaacacttcatcaatcaaagtggcagaaagcagctgagatgtgtgggggttcaatgtgctgtgctctggctcttgatttcttttctgcctaagaaggtgcccgcgatccaaagcctaccggggactgcatgtattcaccggctgccctatgagttgctgctatagctttcaaatccactgttccacatctagattgtgattctctggggaagaggccgggaaggttagggtctggggaagtcgcagaacacctcagaatccggaggctgccgtaccrctctagctacttttctctcctttagtgattcttaagctggaattgaggttacacaatattcacaagtcacatgcactttctaaggttgaaacttctctttatttagtgtggtgtgcctcagatgtagatttcaacagctcatgtactttgactctgctgatgtaaaatcacttgatacccaattaaagtcattaaaaagatatcaataattaaaattagagcacagacagcttatcattttaatatcttcatacaattattttcttgg

SEQ ID NO: 629622 - DNA, 539 bp, Homo sapiens
gtcctttaaggaatctccacactgttttccatagtggttgtactagtttacattcccaccaacagtgtaaaagtgtaactttttcaccacatccacgccaacatctattattttttgattttttcattatggtcattgttgcaggagtgaggtggtatctctttgtggttttgatttgtatttccctgatcattagtgatgttgagcatttttccatatgtttgttggcagtttgcatatcttcttttgagaattgtttattcatgttctttgcccactttttgatgggatcgtttattttcttcttgctgacttgagttctctgtagattctgatattagtcctttgttggatgtatagactgtgaagattctctcccactctgtgggttgtctgttaactctgctgattatttctatcgcygtgcagaagctttttagtttaattaagtcccatctatttttctttgtttttgttgcatttgcttttggtttcttggtcatgaagtatttgcctaagctgatgtctagaagggtttt

SEQ ID NO: 629623 - DNA, 539 bp, Homo sapiens
gtcctttaaggaatctccacactgttttccatagtggttgtactagtttacattcccaccaacagtgtaaaagtgtaactttttcaccacatccacgccaacatctattattttttgattttttcattatggtcattgttgcaggagtgaggtggtatctctttgtggttttgatttgtatttccctgatcattagtgatgttgagcatttttccatatgtttgttggcagtttgcatatcttcttttgagaattgtttattcatgttctttgcccactttttgatgggatcgtttattttcttcttgctgacttgagttctctgtagattctgatattagtcctttgttggatgtatagactgtgaagattctctcccactctgtgggttgtctgttaactctgctgattatttctatcgccgtgcagaagctttttagtttaattaagtcccatctatttwtctttgtttttgttgcatttgcttttggtttcttggtcatgaagtatttgcctaagctgatgtctagaagggtttt

SEQ ID NO: 629624 - DNA, 635 bp, Homo sapiens
tctgctaccttcagactttttttatgcagcctttctcacctatctcaggcttcataaaattgaagagcattaggatcttatggattaggctttggtttaagggaaggttgtggctggattgatcttcagtgcagaccacaaatagtttctctgtttwggaattagggctgttttgttttcttgtcattcatggagtaatacttttaatgctttcttcatgctttccttgctaattttaataatttctgattttttatttaaaatgagaaacatgtaactctttcacttgaacatttagagacgattgtagtgttattaattttaatattggcctaactgaaattcaatcattggtctaatttcaattgttgtattacaggcatagcaaggccaaggcagaaagagagagccagggcaaacaggctgctcagtggaacagtcagaatacaaacatcatttatctattagttttgttgtcttacacgggcttgtttgtggcaacccaaaacaattacaatagtaacatcaaagatcactgatcacaaatcaccataacagatataataataatgaaaaagtttgaaatactgtgagaattactgaaacgtggcagaaagatacaatgtgagcacaag

SEQ ID NO: 629625 - DNA, 535 bp, Homo sapiens
gacctggtactaactaaagagcaattggaggaggaaaatgtaaacttagaactcatgaggaaaagaaaacggaaagtatattaagaatatatttatttgctaaatgttttataccgagccatacaaaaattgttattgatatcattttatatgtaggaaagctaagagtcaaagaaattaaatatctttcccaaagacacagtstcataaatagcaaagtatggtttcaaatcccagattgtcaaaattgatgctcttcattaacctacaacatatagtggcagttcctctacttggcatgtgtcagagtggactcacaggtcaaatgtaaaatgagggaagttgttgacatccagttaaagacatgaaaattcaagtcctacaattttttaaatctgcattttcttacccaacagaattatataaaaatgtaactttaaaagatttggtgttgaatctaaatatctaatccattttttccactttacaatagagaaaactcagaccaaccatcatggttaaaagctttgtctat

SEQ ID NO: 629626 - DNA, 641 bp, Homo sapiens
tgaaatgagactggtcagggcaatctaggccattttaaaaaaaatcaaaagaaagcattccacacaaaggaacagcaagcacaaagtctctgagacaggaacaaggttgatacatttgaaaggaaaaaaatagcattgtgaggccttccagtttctggccaggcatgtaaggagcttggaagtcatcactccatcctaacaaataaaatgctgaacggactaaaaactcaacaactcttagctgtcagagaaatgaggtcacggtgcaacccatyacctccaaaactgggaagacagagaggtgaatatagagaatcacaacttaccagagcagaaacctccatgagaacaagtgctggggtaggaaaatctaaactataatttatgtattgctggaggctcagtatggacgactctgagtgggtacaaactccagaggaatacagtcaagaaaggagaagggaagtctcgcttttgcaaattctcccacctggagctctaccacattctcattggaagtatcacaaaaaatccccttgcacttcctgggagaggggagaaggaccaattttcaaataaaccagatcattctgttctccttaacaaggtcttccctcagatgaaactatttaaccagagct

SEQ ID NO: 629627 - DNA, 641 bp, Homo sapiens
tgaaatgagactggtcagggcaatctaggccattttaaaaaaaatcaaaagaaagcattccacacaaaggaacagcaagcacaaagtctctgagacaggaacaaggttgatacatttgaaaggaaaaaaatagcattgtgaggccttccagtttctggccaggcatgtaaggagcttggaagtcatcactccatcctaacaaataaaatgctgaacggactaaaaactcaacaactcttagctgtcagagaaatgaggtcacggtgcaacccattacctccaaaactgggaagacagagaggtgaatatagagaatcacaacttaccagagcagaaacctccatgagaacaagtgctggggtaggaaaatctaaactataatttatgtattkctggaggctcagtatggacgactctgagtgggtacaaactccagaggaatacagtcaagaaaggagaagggaagtctcgcttttgcaaattctcccacctggagctctaccacattctcattggaagtatcacaaaaaatccccttgcacttcctgggagaggggagaaggaccaattttcaaataaaccagatcattctgttctccttaacaaggtcttccctcagatgaaactatttaaccagagct

SEQ ID NO: 629628 - DNA, 594 bp, Homo sapiens
cagttccctttagacttctccatgggagaagggacatactcaactccagtcccccaccgacagccatcctgtcccatttttaaaattcacagttcagagggtcaccagctaactaaaagactgaaacctaatcccagaactatagaatgcacccctggctcccctggctcccctcacaccttaccactatgataaaaaggaacatttacggcagttctttttacccagtatattatgccagtctaccaaggaaacattcacaaagcatacaaaaaaaaagcaaaaacaaaagcatgggttgaaaagagagcaagtactagaactaagggctctaattgatggataaagtagacagcgtgcaccaacaggtgggcaakgtaagcaaagagatggaaatcaaagaaagaaccaaaaagaaacgttaaagctcaaatgaagaatgtctttgatgggctcattagtagactcaacatggctaacaaaagaatctctgagcttgagaatatttcaacagaaacctcagacacaaaaaagcaaagagaaaaaagactgaaaacaaaaaacctatccaagaactgtgggacaactgtacaa

SEQ ID NO: 629629 - DNA, 483 bp, Homo sapiens
ctgtgtctgatgagggtccacttttggtttccacaatggtgacttgaaagcagtatcctcaagaggggaggaacaccgtgtcctyacttggcagaaggcggaagtgcaaaagggccaacaaccacgagaagcctcttttataagggcattgatcatactcatgaaaggagaagtccttgtgatacaatcacctgttaagggccccacctcttaatactatcacactggcaacacctgaattctgcaggggacacattaaaaccatagcagcatagatcttactttcttactcgatttcagacattgaggtgtcagcaacatatataactagcagatattactagagaaagatgattacagaaattttgctaaccagatattataaaaaaaaaaaagaggtttccctatcacaaaatcttgtcagggccttcaaagtgaccaagaatatcatgaaagatagatggaattgaaccacatataatt

SEQ ID NO: 629630 - DNA, 451 bp, Homo sapiens
aagtaaggactaaaagcatagagaaccagcaagatgttggaaaggattgtctgttataccaaataataatacaaataatttccactcaaaataactttccatttgagaagytgaatccaatttggtaatttatttggcatatttatgacttttcttcaggtcaataaacatgtgccactttattttgttgtatttacattccccaattcagaatcaactgcctattttattaatacattatatataaatgattgggaaaatgaaacaaaaacttcaaatcaaagttttcttaccttgacttattttttcaaataaatgtttttaaacaaataaaattttatttttacaactcctataatttggggtctctatctagaatccttactaattatagcacgtaagactcaccattactggtgttactaaagaaatgccaaaaaagcttattgac

SEQ ID NO: 629631 - DNA, 383 bp, Homo sapiens
tgatttatttttgagattgtctatgagatgctgggcttcttggaattttgtttaagaaatccagatttaatagtaataatttcaagatatcatagttttcactaacaagtaaggactaaaagcatagagaaccagcaagatgttggaaaggattgtctgttataccaaataataatacaaataatttccactcaaaataactttccatttgagaagttgaatccaatttggtaatttatttrgcatatttatgacttttcttcaggtcaataaacatgtgccactttattttgttgtatttacattccccaattcagaatcaactgcctattttattaatacattatatataaatgattgggaaaatgaaacaaaaacttcaa

SEQ ID NO: 629632 - DNA, 520 bp, Homo sapiens
ggacctcaggctataatccaagcaaaaactattagttttcaaatctgtatctagaaaatagcctttcctagatatacaaccccttcaccaaatatctcccctcacccatatctactttctacctgtttacagagctagggcaaatagaaggaaatcaggcccaaagtttactagttattatacagtccatcaataccgtaatagtccattttcacattgctaataaagtcattcctgagactgagcaatttgtaaaagaaagagttttaatggactcacagttccacgtggctggagaggcctcacgatcacggcrgaaggtgaaaggaacgtctcacatggcagcagacaagagaagagaacttgtgcagggaaactcccctttataaaaccatcagatctcatgagacttactcactatcatgagaatagcacgggaaagacctgtccccatgattcagttacctcccaccaggtccctcccataacatgtgggcattgtgggaactacaattcaaga

SEQ ID NO: 629633 - DNA, 529 bp, Homo sapiens
aatacattagacaattttctttatgcataaacatagctgtcattgcaactgtcaatctataaatgtccatattctctaagaactctcggactccttacgtcaataactattttttmtatgtcttgataacttcttaaccttctcatagttctcattctcatgcatcttttctaaatcaggattttaaaatgagccaacattctctaaagcactgaagattaactattaatttaatgtatctttttacttagtagatctacatatatgtatagcactccatctccctggatatattggcaaaaggccacacttaatctcaaactcgttttgacaccactaactgattttttccccgtctttacctcttaatcctaaatctcaactgatccacaaatttttcttcaactctagaacattagatatgcattgctggatgtatttttctttgtcataagaaatgtaatttattgaaccataataacactgtcctctaaaataatcactcccctgccaatcctcaccaatttac

SEQ ID NO: 629634 - DNA, 572 bp, Homo sapiens
tgggtaaaatattctagaatcatgtagctagttttggttatctgcatttgaaattccataaaggtgctctgttttccgattccctttgctatatgatggtttttgtctaaaagtatcagccaaataatattttaaacaccctgttaggagtgaaatggtcagagttatgcttttaatgaattacttcggagactctgaaaagtagattgtagaggatggatgcaaatgtggaagcacgaaaaaggctattagagtagcccaaatgagaaataatggggatatatactagagctgtgaaaataaattacatgtcagatagatggaaagataaaccatgctcatagattaaattagtattgttaaaatgttcatastacccaaagtgacctatagattcagtgtaatctctatcaaaattccaaagacatttttcacaggcatagaaaaatcaatcctaaaattcatatggaactacaaaagaccccaaatagccaaagcaatctcaaggaaaaagaataaactggaggcatcacactatctgtcttcaaaatttactgcaagtcaagaaagca

SEQ ID NO: 629635 - DNA, 579 bp, Homo sapiens
ttgttttattttccatatgctgtgtgggtagccgccattttacagagcctctttggctttttattaatactacattaaagtaagaatataagaaactaaacaataagaaaaaataaaatgccaattttatcctttcttttctgaaattctgaggactctcatttaaatcaaagagcttttatgtcactatcattagatttctttcttggcttattttcatagactctgaggccaactaaaaattacgttttctgaaaatcatcaaatcaaaagcaaattgaagtaatatttcaattgtttaacctgttcttttcttgtcctattgaaacacaactctataatttttatcaaaaatagttactcaytttactgtgtttttgtttcatttgattctagatgcatggcttcatggttgaaattctgtaactaaaacaactttaaaattttcttttctactgaaattttgacacaaaccattttaagactcttaggatattttcctgaacatattgttgaaacacaaatggaaccaaaaaagtattgatgatatgttttatcatatttagaagtatttctcgg

SEQ ID NO: 629636 - DNA, 313 bp, Homo sapiens
gcatacatatatctctccatttatatacacacatatactatatatacatatacatatgtatatacaaatcatacttatcatatgtatgtacacataatatawaacacgcataatatgtatatgttataatatgtatacacaaatcatataaaacatacatatatgtatgtgtgtgtgtatatatatatgtatgtgtatatatggagacagaaatcctccttcaaggggacctagtctctctctctctccctctctctatctctctctctctctctcacacacacacacacacacacacatcttagtaactgtg

SEQ ID NO: 629637 - DNA, 313 bp, Homo sapiens
gcatacatatatctctccatttatatacacacatatactatatatacatatacatatgtatatacaaatcatacttatcatatgtatgtacacataatatataacacgcataatatgtataygttataatatgtatacacaaatcatataaaacatacatatatgtatgtgtgtgtgtatatatatatgtatgtgtatatatggagacagaaatcctccttcaaggggacctagtctctctctctctccctctctctatctctctctctctctctcacacacacacacacacacacacatcttagtaactgtg

SEQ ID NO: 629638 - DNA, 313 bp, Homo sapiens
gcatacatatatctctccatttatatacacacatatactatatatacatatacatatgtatatacaaatcatacttatcatatgtatgtacacataatatataacacgcataatatgtatatgttataatatgtatacamaaatcatataaaacatacatatatgtatgtgtgtgtgtatatatatatgtatgtgtatatatggagacagaaatcctccttcaaggggacctagtctctctctctctccctctctctatctctctctctctctctcacacacacacacacacacacacatcttagtaactgtg

SEQ ID NO: 629639 - DNA, 593 bp, Homo sapiens
aataagatctttatggtaggaagggccaactagtagcccctgaaactgctcctcctaaactctggccaaaatagtaaaccaaaagcagcaaaaaaccaatgtcacatcctgggaggattgcacagactggttacactatcagagttttaaaagcaacaaggagggtaatcctctcacagcctcactcaatgaatccttggagcccttgcataaacccaatacatcatgacggtggccttacctagtgggtaactacctagcaggtaacttacctagtgggtaattatcatcacagctactatttcagacatgatttctttactagagcaaattaacacagcctcagaaacatgatacagagtgattcaagaggagtgtttagagatttcccctgctgtctttgagcccacaaatgcactagaaagtaggggttttgcttgtttgggttttgtttgggktttaaacgaggctctagccttccagtttgaatccttttagagaatttaaccccaaacaccactctaaggggaagtagtagcttttttccagacctagcccatatgtcttaaaggggcagtgttctggccaatgaa

SEQ ID NO: 629640 - DNA, 596 bp, Homo sapiens
tgtatccatgttgcttagataaacataatcactgtaaacatctgcatgatctgggatttkgtttttattttgaaatgggaactttttttgtttacaagttcattgaaaactaaaaactttctgtaaaaaaaacctatctcacaaagggagaaaggtaatggaggaaattatcagcgaagtaacccttatactaagtcttgcagaatgggtagacttgtattaagtagaaatagaggagaataaaaaatataaaaaagcaggacaggtacaaggcacatttgggaaaaaatataattcacttggtttgtaagggggtaggatgagagggaagtgggaccggtaagttatttttagacctgagcatggaaggtcttaagtgctaaagttagtttatatctgttttgctttttttaaaaattaattttttatttctataggttactggggaacaggtggtgtttggttacatgtgtaagttctttagtgatgatttgtgagattttagtgcacccattacctgagcagtatatactcaatttgtagtcttttatctaaacctgacccccttcccaccctttcctcctgagtccccagag

SEQ ID NO: 629641 - DNA, 596 bp, Homo sapiens
tgtatccatgttgcttagataaacataatcactgtaaacatctgcatgatctgggatttggtttttattttgaaatgggaactttttttgtttacaagttcattgaaaactaaaaactttctgtaaaaaaaacctatctcacaaagggagaaaggtaatggaggaaattatcagcgaagtaacccttatactaagtcttgcagaatgggtagacttgtattaagtagaaatagaggagaataaaaaatataaaaaagcaggacaggtacaaggcacatttgggaaaaaatataattcacttkgtttgtaagggggtaggatgagagggaagtgggaccggtaagttatttttagacctgagcatggaaggtcttaagtgctaaagttagtttatatctgttttgctttttttaaaaattaattttttatttctataggttactggggaacaggtggtgtttggttacatgtgtaagttctttagtgatgatttgtgagattttagtgcacccattacctgagcagtatatactcaatttgtagtcttttatctaaacctgacccccttcccaccctttcctcctgagtccccagag

SEQ ID NO: 629642 - DNA, 597 bp, Homo sapiens
atgtgctatgcttcatataaaatctccagtaaggctgrgtgtggtggctcacacctataatcccaacactctgggaggccgaggtgagagaactgcttgaggccaggagtttgagactagcctggccaacatagtgagacctcatctctacaaaaaatcttaaaaatcagtgggacatggtggtgcacatctgtagttctagctacttgggagtctgaggcaggaagattgcttaagcccaagagtttgaggtccctacactccagcctaagcgacagagggagaccttgtctctaaataaataaattagttaattgaatgtccagtcagttgatatatccaaattcttcccatggtaattttaaaaactttagtcttaggagagtaaaagtcatgggcataagacttcttataaacaactcagcctaatgagaaatagaccctttatttaagtgtcatttaagtatctatttcttcattgatctattcatttattaactcatgtaacaatcatttgcagacacctactatgttgaggtagtataaactataaattcaacaagtttgataagggaaataagagagattgagtgacag

SEQ ID NO: 629643 - DNA, 587 bp, Homo sapiens
tattttagacagggtccctctctgttgcctaggctggagtgcagcggcacaatcacagctcaatgcagcctcaacctcccaggcccaagtgatcctcccacctcagcctcttcagkgactaggactacaggtgcatgactccatgcttggctaactttaaaaaatgtttgtttgtttgtttgttttttacagagatggggtctcaccatgttgcccaggctgatcttgaactcctgggctcaagtgattcccctgcctcggcctcctgaaattctgggattataggcttgagccaccatgcctggctctgagtaaagattaagggaagccatggtgctatcgcaatagggtaccaggcagcttaacaaaggcagaagggaacctcagagaaccccgaagagccaccgtaaagtgagtgctgggggagctgaacttcagtcagtacaggtgccgaacagccatcaggtgcgcagtgttagtaattccaccctctgccctgggagcaaggtgtgtggagaaacctgtagcactttatgaccatcagaaccagtctttttcaaaaagaccatggagtactctttgacctg

SEQ ID NO: 629644 - DNA, 452 bp, Homo sapiens
gttttggtctttagttagaagtttggtgatgtttttgtgacttagaaatatgccatagaaatttaactcttgtttgtatcaattagcctatggtaaaaatggtttccttatgcatccctttgcttaaaatcacagtttccaagaacttatccagatgttaaatgaggacttttcaacatattggttttgccagtaagactgtgaacttcatcattgttgttgaactgctgggtcaaaactcaaatgaggtgaattttgcctttaaagggattatttgctaagaaccaaccttaaatagtcacagaaaatcaaatattagttgtcagtataagtcgttcatatatttaaccatttagtttgaggctctatattacttgattcttttttattgatacataataattgtacatatttatgggaattattgartcttaaatgaatgtggttttaat

SEQ ID NO: 629645 - DNA, 513 bp, Homo sapiens
ggaaactctaatcacctatttctttcttccccaaaawtcctcctcccttttccctgcattgcagcctaggaagcacagcaactatttcaaaacaccagggaccctttagtgctctgcaaacatggtgatcaggttacctttcaataaagatcatcagcctccacttccttaccttgagtagaaaacaaaatctttttttttttttaaactttgggcacatggaaaggtaagtatttgcaaatgactggcatgggcaatgactgacaactcaggaaagacagacaaaaaatctccctgggaattagtagcagcaataagatagggtggaggagaaggccagctaaccaacattaaacctggccacaccacttgatgggatttttatgctaacatggtaatctgaaagtcgagcttgactccacatgttagctcgagatgtaagtgacactggagcactttgattttatatgcatgtataagataaagtagcgagatttgtgtaattatctttat

SEQ ID NO: 629646 - DNA, 542 bp, Homo sapiens
aaatttctttcctttttcttcagaagactgtagtgagtctcccgtcataggtttccagagtaatgtcttctatgaaagaaaaattattctatcgtgcaaatgaattagcccagcataagctttaattacctgcaatgtatgcaaaacagtgcgtgtgctataccctcttccaaaagctaggccgtgtttgtatacgtgtatgtgctgtgtaaatatattcttgtatgtgtgtagaaagattctggaaggatgcacaaaaagtcttgactctggatgagtacagggagaactgggaactaaaatttttaatttgcttctcatttgtgctctttgaatgtttgtcatgtgyatattgatccatcagtaagtaaattacttgattaaatgtaatgttgatcctgatgtcatttttaaaggaagtaaaaataaaattattattcgaaagatctactcatgccttttgaaaagtaactgtgacttaagacatttggaaacagcaattagaagctaagaaccagatcagcctgtgccttcaaaaatga

SEQ ID NO: 629647 - DNA, 598 bp, Homo sapiens
gcttttctcttttgtctcctctgactgtgtattttcaaatagcttgtcttcaaactcactatttcttcagcttgatcaattgtgctgttaagagactctgatgcattcttcagcatgtcaattgcattttttagtttcagaatgttygcttgattccacgtaattatttcaatgtctttgttaaatttatttgataggattctgaattccttctccatgttatcctggattttgatgagcttcctcaaaagagcaattttaaattctttgtctgaaaggtcacatatctctgtctctccaggattggtctgtggtgccttatttagtttgtttggtgaagtagtgtttttctgggtgatcctgatgcttacagatgttcatcagtgtctgggcattgaagagttaggtatttatcatagtctttttagtctggacttgtttgtacctgtcctttttgggaaggctttccaggtattccaagcaacttggttgttatgatctaagtctttggtcacagcagccatatgtgctttagggggcaccccaagcccagtaaacctgtggctcttgtagacccacagatgtaccagcttggtag

SEQ ID NO: 629648 - DNA, 564 bp, Homo sapiens
ttcaaatagcttgtcttcaaactcactatttcttcagcttgatcaattgtgctgttaagagactctgatgcattcttcagcatgtcaattgcattttttagtttcagaatgtttgcttgattccacgtaattatttcaatgtctttgttaaatttatttgataggattctgaattccttctccatgttatcctggattttgatgagcttcctcaaaagagcaattttaaattctttgtctgaaaggtcacatatctctgtctctccaggattggtytgtggtgccttatttagtttgtttggtgaagtagtgtttttctgggtgatcctgatgcttacagatgttcatcagtgtctgggcattgaagagttaggtatttatcatagtctttttagtctggacttgtttgtacctgtcctttttgggaaggctttccaggtattccaagcaacttggttgttatgatctaagtctttggtcacagcagccatatgtgctttagggggcaccccaagcccagtaaacctgtggctcttgtagacccacagatgtaccagcttggta

SEQ ID NO: 629649 - DNA, 654 bp, Homo sapiens
gatacatggcttttctgtattcatattatatgttgataaaagttacctttttaaaatatatatactaaatctcactctactgcccaggctggagtgcagtggcgcgatcttggttcactacaaccttcacctcctgggttcaagtgattcttgtgactcarcctcccaagtagctgggattacaggtgcctgccaccacacccggctaatttgtgtattttttgttagtagagatggggtttcatcattttggccaggctggtcttgaactcctgacctcaagtgatctatctgcctcagcttcccaaagtgctgggattacaggcgtgaggcactgtgcccagccactttattttttatacgaagtttaagtgtctgttttctttaatatgtgacagtgttgccatgtacatgtaaggatgatacagttttacgctgttttttctttgttgaaactgagggctgttattgtcttgggtggattgagatatgcatcccatatgtgcagctgctcaggttaaagtcagagtcttggactctagtaaaaagcttttttctgtgaaaacctaaggatgaccttgattgacaacccttagtacttgcttaaaactaacttatataagttcatgaagcaatatattctagctaacatag

SEQ ID NO: 629650 - DNA, 582 bp, Homo sapiens
ttctctacatgctccatgtccttctcacaatacccctactccacggccagtaaatccatctgaaaatcaataatagctattgtaaacaaggactcaagaagtgaaatatttgttttaatatctttgtaaataacaactcccacatttagaccacgactatatttggaatttatttccgttgacctacttaattcttacctgcttatatttaagtttaaaacataatcttcttaaaagaaaattgcactgattttaaaatgtcaaaacatttggcattttaccaagcttgtcagctctctttaagtaaatacagagacgtgaattatctagccaattctttttcgtctttacaaacacagaaatcatttcctggggattaatcattctttcaagtttagaaagttgaargaaaatactgatgtaggctgtatcaccattacattaaatgtttgtgaacattcagacttaaaaaacacatgcatgaatcatactgttggtgatctcagcattgtctctgtataaaagaaaggccactagggggtagagctagaagcccagtagacaaagaaggtaagggcagtg

SEQ ID NO: 629651 - DNA, 582 bp, Homo sapiens
ttctctacatgctccatgtccttctcacaatacccctactccacggccagtaaatccatctgaaaatcaataatagctattgtaaacaaggactcaagaagtgaaatatttgttttaatatctttgtaaataacaactcccacatttagaccacgactatatttggaatttatttccgttgacctacttaattcttacctgcttatatttaagtttaaaacataatcttcttaaaagaaaattgcactgattttaaaatgtcaaaacatttggcattttaccaagcttgtcagctctctttaagtaaatacagagacgtgaattatctagccaattctttttcgtctttacaaacacagaaatcatttcctggggattaatcattctttcaagtttagaaagttgaaggaaaatactgatgtargctgtatcaccattacattaaatgtttgtgaacattcagacttaaaaaacacatgcatgaatcatactgttggtgatctcagcattgtctctgtataaaagaaaggccactagggggtagagctagaagcccagtagacaaagaaggtaagggcagtg

SEQ ID NO: 629652 - DNA, 370 bp, Homo sapiens
ccctctctctctcttcatgaagtctcagagcttcctcctcttcagtagagtagccagatttttttctttactacatttagtaatactttctccatgaatgcttgaacacatttaatccaggggactaggctgtatttatccattcatatatgtcttcctccattcaacaaatattttcttaatatttccagtcacttaggctggagaaaggaaaaataggccagcarattattcatgcatggtacctttaatttgtgctgtaagagattcatacaaagtgctgcaattacacagaagacagtgaccttatgtacgatagagatgtgtgtacaaacttccaacacatgatggataagaacacattctcctc

SEQ ID NO: 629653 - DNA, 462 bp, Homo sapiens
tgaacaatttggttgtttggaatatcttttttggcggcagtcagatcgtgactggggctagaacacccaagatgttctggcttcatcacaggtctggtgctttggtggagaagattggaaggctgggatcagcagggataccagggtctccctctctctctcttcatgaagtctcagagcttcctcctcttcagtagagtagccagatttttttctttactacatttagtaatactttctccatgaatgcttgaacacatttaatccaggggactaggctgtatttatccattcatatatgtcttcctccattcaacaaatattttcttaatatttccagtcacttaggctggagaaaggaaaaataggccagcagattattyatgcatggtacctttaatttgtgctgtaagagattcatacaaagtgctgcaattacacagaagacagtgaccttatgta

SEQ ID NO: 629654 - DNA, 299 bp, Homo sapiens
tatcatgagaacagcgcagggaagacccacccccataattcaatcacctcccactgggttcttcccacgacatgtgggaattgttggagttwcaattcaagatgagatttggttggggacacagccagaccatatcacatggctttccaccaacaatggaataagctctaagcaccttagctacagactaatggtcttctatgactggactccaacctatcttttcacaactttattttttattttccattattacccttcacataccttttatttcaataaaaagtaactctttgacg

SEQ ID NO: 629655 - DNA, 270 bp, Homo sapiens
ttctaaactttatctccaaatctatactcttagttkgggtattctgaagccctgtgagactcagatacttgataaatgaatgtatagctgaaataatgattatatcagttatcagctagaggtagcaaggatcctgcacaatcatgtctgattagtcatggagaagtgtgacaaataggaagacaaatgtgaaaagttacgagatagaatgttacctgggatcactgccagtttttaaatccaaggattagattgaatgtaaatttaatt

SEQ ID NO: 629656 - DNA, 569 bp, Homo sapiens
agttactcgtcatatttggataagtaacataaagttttctttaacaatttttcataaaggcaggagaaaataacatcctcttcaatttttctcctccaggattgtgaattatacaccagatttgccaagagatgctgttgattctgccattgagaaagctctgaaagtctgggaagaggtgactccactcacattctccaggctgtatgaaggagaggctgatataatgatctcttttgcagttaaaggtaatcaaataaagcatccatttatctggtgtattcatctgttcagactgctatagcaagttaccttagactgggtaatttataaacracagaaatttattgctcacaattctggaggctgggaagtccaagattaaggtgccagcagatttagtgtctgatgagagcctattcctcatagatggtaccttctgtgtcctcacacgatagaaagggccaggaggttccctcaagcttctttcataaaagcactaatctcattcatgagggcagagcacttacgacataatcacttcctaaagacctaacctcttaatacta

SEQ ID NO: 629657 - DNA, 411 bp, Homo sapiens
ggggccttaaaggccttttagttcacccaacattccaccttatcccatccactcyccatttcacaaatgatctataaaatgaaatattctggttaaattcctcattgtgtattttctgtaatgattttcagagtgcacatgtttagcaaaaggtctgacactcttaactcttttctgaccaggtatgatgaatataaacgatctatggatccaggttatcccaaaatgatagcacatgactttcctggaattggccacaaagttgatgcagttttcatgaaagatggtaagtgaatatacatgtatttcctccatttcattgccgtagcaataacatcattattgttagttggaacagcaaatgccaaaaatatctgtgctcacagatgaattggtttctcaagaattcaa

SEQ ID NO: 629658 - DNA, 585 bp, Homo sapiens
atgaaaaaagtcacctcttatctcaccactactgggatgaaataaaaataataatactattcttataggattgtcaaggaattaactgagatacagtgtctaaactgcttattgaagtttgtagtaagtgcccaatacatatcactaatattattttagtgacaaaagtcacaaaagtagtaagtagcagakataaggctcctccatattaagctcctaagggagagaggatttagaggagaaagagatagcaacaataccgagggtcggtccacctcccaattcaaagtaaggcaaaaatagaaaagaagtccttgggtttgatgatcatgtaggataattagggcagaatcagattgtaaaaggatctcacgctcaggtggagaaaacaggtgttgcagattcatttgagaaacctgacaataaaggaaaggtgtggaataagatggtggatagagaaggcaacaaggtaaatgctttttgttttcactgggatggcgaaaagctgcacacatttataaacccagagaaatgcaccataagagctggctggctgaaatatgcaaaagagtgaaagggtaacaa

SEQ ID NO: 629659 - DNA, 546 bp, Homo sapiens
gtaggattattccctgtgacagattggccatgctaaactatacaaactgaatgaagtgaaacccagaccatctgtgcatggagccatttctaagtggttagtactgcagagacccctggataagcatttgcattgagcagtgtagtagcacctgacatcctcacggtwcattcatccagcagcttgtggtcagttgcttactggatccaaggccaaagtataaacagaatgtcttgggtttctcccagtacagtttaaagcatgtcaatagtttggttttggcctcttctcattactatttaagctatatgacgcatatttgtgtttttgtaagtctgctacattttaagtataaaagaagataaagcaaataataataattgctattttttattgagaatttattacctgccaagcttttttctaaataattcatattatttctaatcttcctaattataatctgcaaagtaattataattattcccattatataattaaggaaatgggagcttagagaagttaattagctagtcgaagatcaaa

SEQ ID NO: 629660 - DNA, 514 bp, Homo sapiens
ctgtgaaaatctgaccaggctgaattgagcagggctcgtgatcagttatttgtagtctgagctgtgacactattttctcagttgcctaagccagaaacctgctatctctcactccttatagtccttgaaccatcaaaatctgttgatcctatgaatgggcttcctgttttttgaaaacctccattctcgataacactacagttatttaatactcatttttttgcttacattattgtaacagcctcctaaytgcacttcagcttcttgtcttcacctctgataatccattatcttaaagactgctgcaatattctttggaaaatatatataggatcatgtcatatccctccattaaatcctttagaaattctatatttcccatagacctcaggaactcttaaggatggcaaaacaggaactttgtgttctggtccatgacacctagttcagttcagtctaatttatattctccttccaacacttcatatactgtgctccatgtctgaatttatag

SEQ ID NO: 629661 - DNA, 506 bp, Homo sapiens
aatgaacctgatagatatctacagaagtccccactccagaacaatagaatatacatttttcttatcaccacatggcacttactctaaamttgatcgcataatcagaagtaaacactcttcaacaaatgcaaaaaaactgaaatcttaacagtctctcagaccacagtgcaatcaaattagaactcaagattaagaaattcactgaaaaccatgcaattacatggaaattcaatgacctgctcctgagtgactttggggtaaataatgaaattaaggctgggtgtggtggcttacgcctgtaatcccagcactttgggaggctgaggtggctgggtcacctgaggtcaggagtttgagaccagcctggccaacatggtgaaaccccatctctactaaaaatacaaaaattagcttggtgtggtggtacgcgcctataatcccagctacttgggaggctgaggtggaagaattgtttgaactcaggaggcagaggttgaaatgagcag

SEQ ID NO: 629662 - DNA, 506 bp, Homo sapiens
aatgaacctgatagatatctacagaagtccccactccagaacaatagaatatacatttttcttatcaccacatggcacttactctaaacttgatcgcataatcagaagtaaacactcttcaacaaatgcaaaaaaactgaaatcttaacagtctctcagaccacagtgcaatcaaattagaactcaagattaagaaattcactgaaaaccatgcaattacatggaaattcaatgacctgctcctgagtgactttggrgtaaataatgaaattaaggctgggtgtggtggcttacgcctgtaatcccagcactttgggaggctgaggtggctgggtcacctgaggtcaggagtttgagaccagcctggccaacatggtgaaaccccatctctactaaaaatacaaaaattagcttggtgtggtggtacgcgcctataatcccagctacttgggaggctgaggtggaagaattgtttgaactcaggaggcagaggttgaaatgagcag

SEQ ID NO: 629663 - DNA, 533 bp, Homo sapiens
acaatagatgagctcaacagcataatggagaggaaatgaaaatcagtgaaattaaagataaaacaacagaaattgtccaatgtaaaaaaaaaaaaaaacagaaagaaaatgagctgaaaaataaataataagaacctcagaaatgtgggggactataagaaaagatttaacatttatgtcatcaagtycaagaaaaagaagagaaagaaagtagtgctaataaagtattcaaagaaataatgacaaaaatttttccaaatttggcaagagacataaacctacagattcaagaggctgaacaaatctcatatagaatcaaacctaagtaaatccattccaaaatacatcaaagtcaatcttctgaaaactaaaatcaaataaataaataaatgaataaatacaaactttgaaagcagaaaaagagaaacaatgcatcataacataaggggatacggggaaaacattctagtgaatgttttcactagtaaccatgggtccctgaaagctatgtcacagcagttttttaagtgctg

SEQ ID NO: 629664 - DNA, 533 bp, Homo sapiens
acaatagatgagctcaacagcataatggagaggaaatgaaaatcagtgaaattaaagataaaacaacagaaattgtccaatgtaaaaaaaaaaaaaaacagaaagaaaatgagctgaaaaataaataataagaacctcagaaatgtgggggactataagaaaagatttaacatttatgtcatcaagtccaagaaaaagaagagaaagaaagtagtgctaawaaagtattcaaagaaataatgacaaaaatttttccaaatttggcaagagacataaacctacagattcaagaggctgaacaaatctcatatagaatcaaacctaagtaaatccattccaaaatacatcaaagtcaatcttctgaaaactaaaatcaaataaataaataaatgaataaatacaaactttgaaagcagaaaaagagaaacaatgcatcataacataaggggatacggggaaaacattctagtgaatgttttcactagtaaccatgggtccctgaaagctatgtcacagcagttttttaagtgctg

SEQ ID NO: 629665 - DNA, 533 bp, Homo sapiens
acaatagatgagctcaacagcataatggagaggaaatgaaaatcagtgaaattaaagataaaacaacagaaattgtccaatgtaaaaaaaaaaaaaaacagaaagaaaatgagctgaaaaataaataataagaacctcagaaatgtgggggactataagaaaagatttaacatttatgtcatcaagtccaagaaaaagaagagaaagaaagtagtgctaataaagtattcaaagaaataatgacaaaaatttttccaaatttggcaagagacataaacctacagattcaagaggctgaacaaatctcatatagaatcaaacctaagtaaatccattccaaaatacatcaaagtcaatcttctgaaaactaaaatcaaataaataaataaatgaataaatamaaactttgaaagcagaaaaagagaaacaatgcatcataacataaggggatacggggaaaacattctagtgaatgttttcactagtaaccatgggtccctgaaagctatgtcacagcagttttttaagtgctg

SEQ ID NO: 629666 - DNA, 610 bp, Homo sapiens
tatattagacaaaacagactttaaagcaacaactgttaaaaaagacaaagagggacattatataatgaaaaaggactagtccaacaggaaattatcacagtcctaaatatatatgcacctaaccctggtgctcccaaatttataaagcaattactactaggcctaagaaatgagacagatggcaacacaataatagtgggggacatcaataccccactgacaacactagacaggtcatcaagacagayagtcaacaaagaaacaatggacttaaactataccctagaataaattaacttgaaagctatttatagaacattctacccagcaactgcagagtatatattccattcatcagcacatggaacattctccaagataaaccatatgataggcaacaaaacaagactcagtaaatttaagaaaatcaaaattattatatcaagtactatctcagatcacagtggaagaaaattggaaatcagctcaaaaaggaagcctcaaaacgatgcaaatacatggaaattaaataatctgctcctgaatgattgtggagtcaacagtgaaatcaagatggaaatttaaaaattctttgagctgaacaataata

SEQ ID NO: 629667 - DNA, 552 bp, Homo sapiens
tggtttgccattgcaaactcaatgaaacaggtgaaaaactgtgagtgcccaaagtgtgagaggggtaaagtccaccctgaacacacatcctcactacagaacctgaaatccaaatcatgggataaggatttaaccttaccaagagctgaagtgaatttagagaaccaagcaaaatataaaggtagaagaaccaaggggaagagccctgtaggcactgccagaccccagggaagctatttctaactttatttcacaggggtcctggggagggctgccagtaaaatgggggaaagattacagggagaaggaaacttccagccaaactttgtaataattttgaycaagtgcaaattatccagggcagaatctggtggtagggacaaataggaattgcagataccagcacagaagctacacaaagtgaggagggacaaagcctgaaacccctgtttgctttcacaatcacaaggcttgttgcctggggcaagatctcagccctgcttactggctgccttgatataaatttggtgttgttggtggggcatggtagga

SEQ ID NO: 629668 - DNA, 598 bp, Homo sapiens
gataattgggggctgggggcaagatagaggagcccttctctttttcacttctataggtgtttaggatgggagatgctgtgatctctttcttctgtcacctttatccgagatcctgcatggagattatctttccactttagttattgtgatgcyccgggacaatgaacacatctgttctgataacatcctagggaacctgggtggaatactccgcatcacagaggtttaatatctttattcctcagtattctagagaagagaattttatttgttctaacatatcaaattggaaacaaaatgaaaaaaataaagcaattcctttagttctatgactgcgtcatgtttatttacttcactagaaattgagttttcttatttacttattttgccaaagcttgacagctcttggtcagccttgctgttaggcactttacatgtagtggaatctttaagcttttgttcaattttataactttgaaatttcaagtaatttcaaacttatagcaaagatgcaagaatagtacatcatttccaattgttcacattttgccccacctgcgttctcattatctttttaccctaaaaatgtcattatgta

SEQ ID NO: 629669 - DNA, 536 bp, Homo sapiens
ctttaagctatttatttatgagatacagggtttcactctcatcgcctggtctggagtgcagtggcatgctcttggttcactacaacctccatctccctgactcaagcaatcctcctgcctcagcctcccaagtaactgggactacaggtgtgtaccatcacacccagctaatttgtgtatttttagaacactctgggtttcaccatgttggccaggctggtcttgaactcctgacctcaggtgatccgcccacttcggcctcccaaagtgctgggattaaaggtgtgagccactgcgctcggtcactttaagttatttaaatcagcttaaggatattgcttgacataatctcttattatttttaatctatkttatcctttttctctttcactatatttgctttattttagtttttcattttagcaatttatctcatttttaaatcttttgttttaatggaaagttggtgtaaagaaaacaatctccaaataaagttcatatgtccttcttcccagtcctccacagtcctccacagt

SEQ ID NO: 629670 - DNA, 629 bp, Homo sapiens
tagaatctttatggaaagtaattttagcaatatgtatcaaacactttaatggtgtaattccttttttagsaactgaacctaagaaaataatcagaaatgtgaacaaaggagaatgtacaaagatattaattatatgtctatactagtggaagaaaacttacatgttatatttagatagaaaagtgggaagaaaatgtaccaaatgttaacagtgtttatccatggttgatgagattataaataagtcctattttcttctttgtcatttagtatctagattttcaacaaaagtatatatttcttttaacataagtttaaactttcctcttcgcaccacttttgctgtatttcagaagttttgataagttgtgtcacgattattattcatttcaaatagtttttaaatttccaccttgatttcattgttgaccccaaactcattcaagagcagatcatttaatttccatgtatttgtatagttttgaggattccttttggaattgacttccagttttatttcactgtgatctgagaagacacttgatatgactttgattttttaaatttattgagacttgttttgtggcctatcatatcatctatcttggagaatgctttatgggccgatg

SEQ ID NO: 629671 - DNA, 499 bp, Homo sapiens
tgtttcatttctgtgaaatacatgtgtttacaagaaactatactgaaaaagagatatgtctaagattaacttgtatgaatgtccatgagaaattctccaaaattctccaaaataaattctccaaaataaatgaacacagtatgattctatctggataaaaaaaaacaaaacacctgcatatgctcatattgttatgggcatgaagaagattatggaagattatactttagattgggcataattattctttatatagtcccactatagataagcattattacttygtgattttatgaaactaaataaaataaaaatagacaaaaattgaggcatcttggacatcttgccatatagctaaaatacattcgattttttcatttgtgttacaattgtttctgccaaaaaccattattatcatctcaggaccataataaaggaggaagagatctgctaattcctcagtgatcaatgacaaaattcaagcgaggcactccccatg

SEQ ID NO: 629672 - DNA, 506 bp, Homo sapiens
catgtgagtaggtctaaataaattgattctctcaatgtagtttccgcatgagtagatgaggctcagttgttatatgagaattgaattctacagtcactaaagagattatgtcagaaagtttttgttagtaatctttccttttttgcagtgttccttgtctgcacctgcccatactgtctcatccatggctattataggagttcttaagtttttgtgcaaaccataccacctttctgcagatgtggggaggagccaagagattcaaaatcagtattttctcaattttaaaactagaattgaatcagtctttgatttgtcagtttctgcaaaaactgacaaatttttgtattttatatatatatctaattttttttatatatataaaatcaagacttgctaatgaccmaaattctctccttattggagaaacttttctgcaatgagagagtaaagcaggagagcctgttgatgaaggtggaggcaattctgcttgtggtcaaatccct

SEQ ID NO: 629673 - DNA, 633 bp, Homo sapiens
gtacttctcactggttaatgagaaaaataatcggtggaagaaaacccttttctcattcaaaataaaaataaaacaaaattaattcctaaatcatttagttatataaatcatgctcattaaaatcttcacagtcacatcttcactattgtaaacagacaatacaaatcattatccgatgattgaactacctgaaaattataattttaaacactattaattattattacattgactttttaaaaacatagtaacaataataatatgtttactactggatatatttatgtgattggtggttgacctttggcatgttcactgttttgtgctttagggtcttagcatttcatacatttccaactagagtttgacagtctcaatttttaacatctgagcatttttccaagaacaacaatgtgacaaaagataatacaaataaaagtactatatgaactcgaagcttaggatgaacctattcaaagcctsaataggattttgtggatcagaacacccatgtcaccattgctaacagtcagctttgccctccctgttcaccgtcgctggggagttaaaattgcctgtggacaaaacggaacaccataaagcatagaccaacacttaccataattgtggtta

SEQ ID NO: 629674 - DNA, 569 bp, Homo sapiens
tggtcagtgttttcgctttcaaatattacatttaaatttgtatktttttcatttaaaattttttttatttagaagtcaaacactttttcctaaaaatgaattaagtaattacttaaggactctgcaaagtagtaagctacaatgggatcttaatggaaatttaggattctttgttttttgcagaccattaagcaataataatggctactacatattgagtgctgctctgaggcagacaatgtactcaatgctttttaaaagtatacgtcttaaagttaatacacatacccagtatggagtaggggcagttattgtccacattttagagatgaggattcattttagaaggctaaataaattacacaaagttacactttagtagggcctgaattcaaaactcaggtctatatgacaccaagtctacatgctttgctattatgctatgcgaccttctaaaatgggtgttcatttaatgcgtgacaaacttctttcttgaatttcttgattcagttgataaaactcatgtctccaataaaatgtatgcatttgctcactggtctgtattcact

SEQ ID NO: 629675 - DNA, 569 bp, Homo sapiens
tggtcagtgttttcgctttcaaatattacatttaaatttgtatgtttttcatttaaaattttttttatttagaagtcaaacactttttcctaaaaatgaattaagtaattacttaaggactctgmaaagtagtaagctacaatgggatcttaatggaaatttaggattctttgttttttgcagaccattaagcaataataatggctactacatattgagtgctgctctgaggcagacaatgtactcaatgctttttaaaagtatacgtcttaaagttaatacacatacccagtatggagtaggggcagttattgtccacattttagagatgaggattcattttagaaggctaaataaattacacaaagttacactttagtagggcctgaattcaaaactcaggtctatatgacaccaagtctacatgctttgctattatgctatgcgaccttctaaaatgggtgttcatttaatgcgtgacaaacttctttcttgaatttcttgattcagttgataaaactcatgtctccaataaaatgtatgcatttgctcactggtctgtattcact

SEQ ID NO: 629676 - DNA, 569 bp, Homo sapiens
tggtcagtgttttcgctttcaaatattacatttaaatttgtatgtttttcatttaaaattttttttatttagaagtcaaacactttttcctaaaaatgaattaagtaattacttaaggactctgcaaagtagtaagctacaatgggatcttaatggaaatttaggattctttgttttttgcagaccattaagcaataataatggctactacatattgagtgctgctctgaggcagacaatgtactcaatgctttttaaaagtatacgtcttaaagttaatacacatacccagtatggagtaggggcagttattgtccacattttagagatgaggattcattttagaaggctaaataaattacacaaagttacactttagtagggcctgaattcaaaactcaggtctatatgacaccaagtctacatgctttgctattatgctatgcgaccttctaaaatgggtgttcatttaatgcktgacaaacttctttcttgaatttcttgattcagttgataaaactcatgtctccaataaaatgtatgcatttgctcactggtctgtattcact

SEQ ID NO: 629677 - DNA, 603 bp, Homo sapiens
agggactctttgcaagtaatagagttcagaatttaaaattaatagatacatgtaaaaatcataaataaaagactcccactataaatctcttattttgatatgaaacggttcttttgattccagctacatgaagctattgcaagctgttctacaaaataattgatatttttgttataggaagaaaattaggtgaaaggaataaagctagggtccacaatgatatttataatatctttcaaactcatagcaatttaagtaaaaatattctataaaaaattcatcacaaattcagcaaacacttaaaaatacttctcattttagatttcttttcaaggcttgtttctgcaaatgagtggaccaaattgctcattggatttagagagccaaaattccaatttgtttgattggwgttgatatgaacaaaataaatctaactttgtggtttcaatatgtttctactctcttaaatgactcagtgggtgatatttacatacattcttccattttttcttatggtgtacattaaaccatattttcaaatacttgatcttaaactcatattttgaaatgcttgaatgagtatatgtctagctactatattaa

SEQ ID NO: 629678 - DNA, 587 bp, Homo sapiens
gaaatgcttgaatgagtatatgtctagctactatattaaatagcaatacatttataagaacgaattagttcatgtcataaaataatttggaaaacatgtatagaagatgaaatgcttctataaccacagttttccattaacatattttgagagaatattgtctgaactatttctattatgtttttgcaaattgatacaaattaagatgtcaatgaagtaattattgatggcatgctaccataatatgaaatgtgcccatccttctagaaattttttttttggagatggagtttcactgttgttgcccaggckggagtgtaatggcacgatctcggctcaccacaacctccacctccggggtttaagtgattctcctgcctcagcctcccgagtagctgggattacaggcatgtgccaccacacccggctaattttttatttttagtagagacagggattctccatgtttgtcaggctggtctcgaactcccgacctcaggtgatccacctgcctcggcctcccaaagtgctgggattacaggcgtgagccaccatgcccggccatagaaatttactaatatgaagtg

SEQ ID NO: 629679 - DNA, 626 bp, Homo sapiens
aactcatattttgaaatgcttgaatgagtatatgtctagctactatattaaatagcaatacatttataagaacgaattagttcatgtcataaaataatttggaaaacatgtatagaagatgaaatgcttctataaccacagttttccattaacatattttgagagaatattgtctgaactatttctattatgtttttgcaaattgatacaaattaagatgtcaatgaagtaattattgatggcatgctaccataatatgaaatgtgcccatccttctagaaattttttttttggagatggagtttcactgttgttgcccaggcgggagtgtaatggcacgatctcggctcaccacaacctccacctcckgggtttaagtgattctcctgcctcagcctcccgagtagctgggattacaggcatgtgccaccacacccggctaattttttatttttagtagagacagggattctccatgtttgtcaggctggtctcgaactcccgacctcaggtgatccacctgcctcggcctcccaaagtgctgggattacaggcgtgagccaccatgcccggccatagaaatttactaatatgaagtgtgtccatccttctagaactttatcatc

SEQ ID NO: 629680 - DNA, 585 bp, Homo sapiens
aaatacattatgtagaaagtgataaaggatcttacactgccttgggggttttgctatggatrccagttattattaaatagatgagatatcaaaggcatttgatagaaaactagaacaatattgatcctagtacacatcatggatgtatttaaggaatctaaccaagtatttatcaggaaaagatagtaaggactgaccttagagtatgaagtaggtatttaacaaaagaatggagaaaaatgtctctacagttgactcacaggtatcttaaactgcttctttatcatgtaccccagatttaattggaacccctttcagcagtattgccactttcattatatgaaagggaatttagtgtcccatcagacacagtgtgaatctcggattactgacaaaaccagtgaccttcccacactgtttgcaaatcaatcaaaaaagcctaaaagccacggctgacctctcagaggcttactgtgaccaaaagaagccaataatcctacctcagggcaagatcaatgagaaagagaggaaaatttctcaaacctaaatgaggccatttgcacataagagatgaaatgtggacat

SEQ ID NO: 629681 - DNA, 581 bp, Homo sapiens
aaaagaatgacaatgctatgaaccaacatttacatatatttctcatgagaatacatcaacatagaaactgaaaatgattttcatccgaagaatttagatgtacttcacttattgataatttataaaaatggaagataggctgcttggtgtcttaatagggtaagaatagtcatctatgagtagactgagtagcaagcaaggtttttctaaggcacmatctctgtttatagacatctctaataccagaaatatttagtgattctcacctgtatatgaaagccctaatgttttcttataattaccaaaagtaaaaaaaaatccaaaagcttttctctctgttggattctttttttttttctgagaatgttttcagaaatgtttaggaaattagaaactcaaacatctttttttaaaaaaaattctagagatcttttcaaagttcaattttatttttgcattagagattacgactctcattctctgaaaaactgaaaattccttcaacaagagaaaatctaatttcagttactaatgagcagctttgtaacttcactggtgtcgtcaatgataacagtgaaagc

SEQ ID NO: 629682 - DNA, 581 bp, Homo sapiens
aaaagaatgacaatgctatgaaccaacatttacatatatttctcatgagaatacatcaacatagaaactgaaaatgattttcatccgaagaatttagatgtacttcacttattgataatttataaaaatggaagataggctgcttggtgtcttaatagggtaagaatagtcatctatgagtagactgagtagcaagcaaggtttttctaaggcaccatctctgtttatagacatctctaataccagaaatatttagtgattctcacctgtatatgaaagccctaatgttttcttataattaccaaaagtaaaaaaaaatcmaaaagcttttctctctgttggattctttttttttttctgagaatgttttcagaaatgtttaggaaattagaaactcaaacatctttttttaaaaaaaattctagagatcttttcaaagttcaattttatttttgcattagagattacgactctcattctctgaaaaactgaaaattccttcaacaagagaaaatctaatttcagttactaatgagcagctttgtaacttcactggtgtcgtcaatgataacagtgaaagc

SEQ ID NO: 629683 - DNA, 572 bp, Homo sapiens
tctactgtaaggacaggtgctagtcaccattgctgtgatatttttcagtccagttacagatctactgtttgagatgatccttattgcatttgttttaaagtctgcattaaatacccaagtcctaattttcaattctggttatatatcgtactctctcctcttttctgtgacatatttttctgaagcactttaaacatacagcaagacctggaaatttaaaactccctagaccaatggaacataactagtcatttgtctgcattctctgtttaagtgtaaatagaaggacagattactgttttcttttgcttaaagtctgacattgcctaatgaatctgaatagcagagtttgtgagaaagccattgttaatgacaaggcaatacmaaagtctcactacatccagaactattaacctaaagacctgattaaaaaaagatagattgttttggaaaacagacttaagtctctacagaactgaataagacagaaaggtttcaaagactttgatacaggtatgttctctcgaccttgctctgatgaatacaattattttgaatttgcttctacaaac

SEQ ID NO: 629684 - DNA, 559 bp, Homo sapiens
tttgttttacctctttttaatgctgtactttttgtgacatactataaaacccctcactaattattacactgttgcttgcaaacacaatatattggtttaacacaaccttttccattactggtgtttgtttcttatatctctctcaacccttcccaaaccaacacacatatcaaagcacattgcagttacccttttgaaaccaatgaaaacaagtataatatttatattgctttcatttgtactargcaatagtacaggtctcattaccttcacttttcaatggcttaccagaggcatcactttttaagatcaggttcttggttaagtcctttggcaaagattctgatttcctcttgaatctgtgctttgtatacatttctcctaagcagcactgagaccagagtaatttgtcgatcatcacttttgatgggatccagccccatcaattcaacagcagcctttattgcttaaggaaaagaggaaattctgcctcctggacataaacatgtgaattttctatgtccaggaccaaaaggatgaaaagggcagatttaaccaa

SEQ ID NO: 629685 - DNA, 559 bp, Homo sapiens
tttgttttacctctttttaatgctgtactttttgtgacatactataaaacccctcactaattattacactgttgcttgcaaacacaatatattggtttaacacaaccttttccattactggtgtttgtttcttatatctctctcaacccttcccaaaccaacacacatatcaaagcacattgcagttacccttttgaaaccaatgaaaacaagtataatatttatattgctttcatttgtactaggcaatagtacaggtctcattaccttcacttttcaatggcttaccagaggcatcactttttaagatcaggttcttggttaagtcctttggcaaagattctgatttcctcttgaatctgtgctttgtatacatttctcctaagcagcactgagaccagagtaatttgtygatcatcacttttgatgggatccagccccatcaattcaacagcagcctttattgcttaaggaaaagaggaaattctgcctcctggacataaacatgtgaattttctatgtccaggaccaaaaggatgaaaagggcagatttaaccaa

SEQ ID NO: 629686 - DNA, 559 bp, Homo sapiens
tttgttttacctctttttaatgctgtactttttgtgacatactataaaacccctcactaattattacactgttgcttgcaaacacaatatattggtttaacacaaccttttccattactggtgtttgtttcttatatctctctcaacccttcccaaaccaacacacatatcaaagcacattgcagttacccttttgaaaccaatgaaaacaagtataatatttatattgctttcatttgtactaggcaatagtacaggtctcattaccttcacttttcaatggcttaccagaggcatcactttttaagatcaggttcttggttaagtcctttggcaaagattctgatttcctcttgaatctgtgctttgtatacatttctcctaagcagcactgagaccagagtaatttgtcgatcatcacttttgatgggatccagccccatcaattcaacagcagcctttattgcttaargaaaagaggaaattctgcctcctggacataaacatgtgaattttctatgtccaggaccaaaaggatgaaaagggcagatttaaccaa

SEQ ID NO: 629687 - DNA, 400 bp, Homo sapiens
atagtaatgcacatcatttatgcattcacagtttcactgatgactgagacaggcacaggataaaactgcattgaaatgaaratcactgtgtttaagtcaggtgtgtgataatgtgaaagtaccaaaacagcgaggctggcattaagtgacaagtacagactctttaaatgcctctatatttaggctcaccatggcacataaaacatgaagtatataaagtttcataatggggcaaaaccaaggcaatagttgaattcagatgtagttttcccctgtggcttaattcttttttcagttgattataactgtggcatttttttgaagcactgagtataggtcattgcctgaggcagcctagtggagctgatagatgtaccattattgtgttcctatgagaaaa

SEQ ID NO: 629688 - DNA, 516 bp, Homo sapiens
tcataactaactggtaatccaagtatgattttttgagatgaaatatgtaagagtgttttctaaaggaaatgaattacagtagttccaacaacttcgatattgttaacatctaagttatgcttactgtatcaaagtttaaaatattaaccmaagaaccaatgctttagaaacccttttcctttggaatttaaagctcaatatgaaacagtcgatgaactctgtggtaaaatacattttgctattttttaaactgcatttttttttctcatttagggtcacctaagcagtcagcaattctttcctatggatataaaactaaccaattgcttcataatgtctaacaatttcctcattctgcataggttttagctgctttactgtactgtacaaagaatgttcattgcttcatggtctaaaaggcaagatgcagaatcgtctgcctttttatcagaaggcagttttgccttctgaattgaagttttggcttggaaagtgagtccctcctaggacttcagt

SEQ ID NO: 629689 - DNA, 543 bp, Homo sapiens
tgtcagtttttctcattgtttgtggattgcattattaataaaatagagaaagatttaaacactgtatgtgcctcttggaatgtwgctgcaaattaaacaataatagacgtttaaaaattgttatgtgcccaagggaaaagaagtttcaggtgtatgtaagtaaattcttcaataagttgatttgcttaccccataaacaagttctcctaccatcccattccagatttttgtgtctgcatcccttgctccatattttccatcagggacaatggcaattttatacttgataccaatatgttttgcaatttcagatgccaaatctacacagtatccttcatacttgtcatttccttcaaacatttcatgatttttcttgtacataacatatggggattcctataatgagagaagtagaactgtaaaggagaaattataaaacatttgaaaaaccttatgtaactttccaatttcagaatttgacaaagattgtatttagtattggtacacatactgatttggtgtagctagaagtcaataataaaa

SEQ ID NO: 629690 - DNA, 637 bp, Homo sapiens
aaaaggggtatagcaaaggctccatttggtactacagttgaaggtcaattcacaagtgtctgcaatatctgaacacatgaatttttgtactcaagtacatatattactgtattagtttgtgtgtgcaagtttctctagctagtatttataatctaatttgctaaatgccctctacattacataatgaacaatttacttcaataaaarctacatatttgttatttaatcaaacatttattaagcagctactgtgtgccagtcagtttgctgggtgatagggacacaaaaataagtcaagtgtgccccttgatctcttgcaatcaaagtcactataatttttttgtaataatggcaaaggagtataagatgtggggaacaataataaaatatagcagtgaaaaacaatggtagctcttacttatttagtgcttactatgtatcgggcacaatgtaaagttcttcatgtcttttcatttacttttgacactggcacattgaggtaggcatttcccattttgcagatgggacagtgaagactcagggaggttaagccagttgttcaatttcacagaactaacaagtgaaagaggtgggaactgaccctgtattttgatattttgttttgtttttgtttttg

SEQ ID NO: 629691 - DNA, 510 bp, Homo sapiens
aataattattgtgaaaataaaaaaggaattaaatggtcattagctgggagagctagaaaaacatctgagaaatggatattatcagacactatgtgcttgtattttttcacmatgggaaatggcaggatgaataaagatgagattttttttttcttaatttgtctctaagtaggattctgtgaatttggagagaaacaaggcaacatagtgagaggctcatgggcttgggacctaggcagtaatgggctccagttccacttctgtcactcatcagctatttaacccgagttgcagcagcagcatctgtccagatgaagataaaagcaacaactacaaggagttagggggatcaaattccagtatatatgggtgtgctacatagtagttattaaatttttatttccttttttttttcatttatgtagtctctgatatggtgttttcttatttgaattactttatctctgttgaggctactgtctaattaacagagcttagaatcaggtccta

SEQ ID NO: 629692 - DNA, 565 bp, Homo sapiens
gatttaatactttctactaaaagctgaatttgagggtggggtgagttgaggattatggttaattsgggtgcctggttattttaaacccagttaatctaggttttcctatccataccaaccactactctctgcacctgacccccaagccccatttgtgacgtgattgttacaataaccacaactgtgggtttgctagtgacctgcaaatcctttgagagcagaagtcacatctcatttatctctgtaaaatggtattttccagagtagctgactcagagtaggtgctctataaagtagctcaatttgaaaaatgacagagcaagatttttgaatccagagcaagcttttttcttgaactgatactctaagggtttttaggtccccaggcaagctccccaagcctttgtaacacatgggtgctaaactatattacctatattcagttcttgtatgggctggtctgggaggaggagatctcagtgctgaaaaccagaggaaagttcgagagtttcctttaagtttcttcaagaagggacaattgaaggcaaaattgtgaataagatga

SEQ ID NO: 629693 - DNA, 633 bp, Homo sapiens
catttatctctgtaaaatggtattttccagagtagctgactcagagtaggtgctctataaagtagctcaatttgaaaaatgacagagcaagatttttgaatccagagcaagcttttttcttgaactgatactctaagggtttttaggtccccaggcaagctccccaagcctttgtaacacatgggtgctaaactatattacctatattcagttcttgtatgggctggtctgggaggaggagatctcagtgctgaaaaccagaggaaagttcgagagtttcctttaagtttcttcaagaagggacaattgaaggcaaaattgtgaataagatgaagactgcattaggcttctctctcccctcttaaagyagtcttttctcctatggccttctttttccctctggcctctttatcctttctgctatttcacacctgtaacctggttttagaggattagattaacactttgaatataagatatttagtattaaccataattaatgttcaactggtggactatcagaacaaggaattcattactgggagagtcattctccaagggctagattcctttagtgttttttgtttactacaactttttttcctttccattttttcctgctgatgaatgcat

SEQ ID NO: 629694 - DNA, 633 bp, Homo sapiens
catttatctctgtaaaatggtattttccagagtagctgactcagagtaggtgctctataaagtagctcaatttgaaaaatgacagagcaagatttttgaatccagagcaagcttttttcttgaactgatactctaagggtttttaggtccccaggcaagctccccaagcctttgtaacacatgggtgctaaactatattacctatattcagttcttgtatgggctggtctgggaggaggagatctcagtgctgaaaaccagaggaaagttcgagagtttcctttaagtttcttcaagaagggacaattgaaggcaaaattgtgaataagatgaagactgcattaggcttctctctcccctcttaaagtagtcttttctcctatggccttctttttccctctggcctctttatcctttctgctatttcacacctgtaaccyggttttagaggattagattaacactttgaatataagatatttagtattaaccataattaatgttcaactggtggactatcagaacaaggaattcattactgggagagtcattctccaagggctagattcctttagtgttttttgtttactacaactttttttcctttccattttttcctgctgatgaatgcat

SEQ ID NO: 629695 - DNA, 624 bp, Homo sapiens
tttgtttttattttctctggtgttattctatgatattttctggtatttctaatttgcatgaaagaatgctaggctattagtataaaatttaatacttttctctatgtatatatttatatgtttatgaaaactatcagaaaatttcagacagttggagctccaaaatataaaataagttattactccttaagacagtgcctagaatggagacmaaagtttgtccttcctcctgctgcaatagaactagttattagatgggaagatgtaagtgagcttaatttgaaaggctttttagatcgggtgagaaatttcccatccatgaactgttttctttaagtctaaaaatactgatatatagtgaagaagggctctgggacactagtatattctgttaattgcctacttttttgttctttagatattgcttagaaataaaaaaaaactattattttaggaagctggagttaagatatgaagtgaagacaaagctgagttgattttgtttttgtttcctgatcattttgcaatttgatccatttatggaaggcaaaaaatgtgtagttcatatgacagcctttgatttgttatttaacttgaatagaacctgagagtttagatggagaa

SEQ ID NO: 629696 - DNA, 624 bp, Homo sapiens
tttgtttttattttctctggtgttattctatgatattttctggtatttctaatttgcatgaaagaatgctaggctattagtataaaatttaatacttttctctatgtatatatttatatgtttatgaaaactatcagaaaatttcagacagttggagctccaaaatataaaataagttattactccttaagacagtgcctagaatggagaccaaagtttgtccttcctcctgctgcaatagaactagttattagatgggaagatgtaagtgagcttaatttgaaaggctttttagatcgggtgagaaatttcccatccatgaactgttttctttaagtctaaaaatactgatatatagtgaagaagggctctgggacactagyatattctgttaattgcctacttttttgttctttagatattgcttagaaataaaaaaaaactattattttaggaagctggagttaagatatgaagtgaagacaaagctgagttgattttgtttttgtttcctgatcattttgcaatttgatccatttatggaaggcaaaaaatgtgtagttcatatgacagcctttgatttgttatttaacttgaatagaacctgagagtttagatggagaa

SEQ ID NO: 629697 - DNA, 624 bp, Homo sapiens
tttgtttttattttctctggtgttattctatgatattttctggtatttctaatttgcatgaaagaatgctaggctattagtataaaatttaatacttttctctatgtatatatttatatgtttatgaaaactatcagaaaatttcagacagttggagctccaaaatataaaataagttattactccttaagacagtgcctagaatggagaccaaagtttgtccttcctcctgctgcaatagaactagttattagatgggaagatgtaagtgagcttaatttgaaaggctttttagatcgggtgagaaatttcccatccatgaactgttttctttaagtctaaaaatactgatatatagtgaagaagggctctgggacactagtatattctgttaattgcctacttttttgttctttagatattgcttagaaataaaaaaaaactattattttaggaagctggagttaagatatgaagtgaagacaaagctgagttgattttrtttttgtttcctgatcattttgcaatttgatccatttatggaaggcaaaaaatgtgtagttcatatgacagcctttgatttgttatttaacttgaatagaacctgagagtttagatggagaa

SEQ ID NO: 629698 - DNA, 649 bp, Homo sapiens
tttacatactgtttacccgcttttggtgacattgaggctaaccttggagtcacctcccccgctgccacattctcctttgtcgtaccaccatttgtttttcaatttgtccaagaggccttgttcattcagttttaaaactgcgaggttaacagcatttcttgaaacgataaaacatattttgtaagaaactgcacagctgttaagatgttagaaggaatgaggacttaagctctttataagcttctcccagacgctaaataaacctctcattttaccatcctgcagccccttcctctggagtccaaaccaaaggcaattgtaactaatttcaaatgtattaaacatgcagtatttggtgctgttcactttcacagttcgtttattgtcaaataastgatctcatcatcaattacatggatttttttttggcaaaacagtaataaacgggaatttactagtaattgagaaagaattgtgtcttgaattcctttgcctctaagaatgccaatgatccaaaagagaatgaaattaaaattcccacaaggaaaaacaaaatggcatatacaaaccatcaaacaagccactaacttttctttactgattccctgaaaacaaagagtaattattactccctttattttttatgtgg

SEQ ID NO: 629699 - DNA, 645 bp, Homo sapiens
gaataattgatttgcaagcaaaatgacatttagccaactaataaaaagtgttgcatattttaccactaattagcctactaaagtgtttattgtcttaaaatttgttcatattatttcaggtcaacaacgtgcttttccattttgtgatgatctgatccacttggagagtaaacagttctcataagtaaaycacacacttaagagtttttagtattaactcttcttaagaattagactgcccatttactgaatgctaattaaataattagctactcctacatttccaagtaagtgccacattagtggtgtaaaataatgcatgtacttcctaatgtgacaatatcaagttgttagtttaatcaccaaaggaccagattgaaatgtaggaatgaagatagagacatctatttttttaaaaattctgctgggaaaaaaggaattgttttaatttattttgtgtctatgaggaactaaatttgtctttcaataaattaaggttaactactaaaattctctattttggagaaaattatttttataatccattttattttagccttaaacattcatatgaagatttttaaaaatgaagtaatattccaattattttctgtgttgatttagaccattcctctgataaaacta

SEQ ID NO: 629700 - DNA, 605 bp, Homo sapiens
tacatgaactgtcattttcaatatacatttggaaaagtacaagctacacaaaaataaatccaagttatttaagcttttctgctaatttgctttattatgcatatatgaagaaactgcaaacccagactaggatgcattaaagtttacctgataattctccacctgtgtgtccctgtcttagccccatacaaaatggaattaggagtactttgtatatatactgttattcaaatcagcaatatgttcagacaagagattatttgtaaggaaagaattgtgtctttgtttcattatgagaaagcttggatttctcataaacaggtttggtattcatcaattatctaatatgatagacaatgttattctcacaggtatatattttattcatttttctcttatgaaagatatattaacattggctaaaaataagtctgaattcctgtggtctaaagaagggaacagggtgtagtgaaaacagtatggaaactatagtcaaaagacccagctggagttccagcttcatcacttaatgmctatatttatttaatgtaattgtttatgaaaggaaggaattaccccttccaccccttctaataattctacat

SEQ ID NO: 629701 - DNA, 442 bp, Homo sapiens
attttagtggggaagccacacaataaaggaacaaatatataatgccatatagtgataatgagaaattattaatgtattaaatttgtttattaaatgtctaatttgccaaacaccatttttgttaagattttaagaagtgtaactaatccaagtagggtttttagaaaaataaattkgttttggcaattttaatagtattgctagtcaatatgaataatagcctttaagttttgactggcctgtggacaaatataggcaaaataaactgagcttgctatgcaaaaattacatacccacagcaaataggtcaatctagtttattagggagaggttttttttggtgttttatttctatagttagaccttggggatttttaaaataatatttataataatatttattttaataatatgggaagtaatcattttaacaaatgtaaat

SEQ ID NO: 629702 - DNA, 474 bp, Homo sapiens
taaatgtctaatttgccaaacaccatttttgttaagattttaagaagtgtaactaatccaagtagggtttttagaaaaataaattggttttggcaattttaatagtattgctagtcaatatgaataatagcctttaagttttgactggcctgtggacaaatataggcaaaataaactgagcttgctatgcaaaaattacatacccacagcaaataggtcaatctagtttattagggagaggttttttttggtgttttatttctatagttagaccttkgggatttttaaaataatatttataataatatttattttaataatatgggaagtaatcattttaacaaatgtaaatatgtctaactgatttataaagacagggtatctacttacatctgtgtctttatgaatccacttcagaggaagctggttgtctattacatatttgaagtatagcataacaaagcccaaataaac

SEQ ID NO: 629703 - DNA, 631 bp, Homo sapiens
catgacccaatttcatgcatcccatattgatgtctgctgaatttcattgttctctttttggtaaatatgagttggacttcataccttctgcttttatattctacattatgactacagaatattttaaatattctggaatatttgtaaacatcacaagtaagaattgttattgtagaaatcagttttttactaatactgttaaatcacccttgatgagttggtttaagtatagcagttctccattaattgtaaattgtaattgtaaattatcaatgaaatattttcttggtttaatttttagaatattattgctagcatrtagacatacaataaactgttgtatattcaccttgcattctgcaaccctgtggaacttactagttctataaatattttttgattccttagtatttttatatacatataatcttctttttcaatctggatgccttttattgattttacctaaatatctgtaatagaaccttcagtacaacgttcaatagaagtggtgagagaggacactcttatcttgttcctgattttaggggaaaatcattcagtctttcaaccttaagtatgatgttgatgtaatttttcattttgattctggattgacttcacatttgag

SEQ ID NO: 629704 - DNA, 470 bp, Homo sapiens
ggccgtgttgcctaagtttactttcttttcttttcttttttttttttctttctgaaacagggtctttatctgtcacccaggctggagtgcagkggcacaatcatggctcacggtacccttgacctccggggctcaagcgatcctcctcccacctcagccttccaagtagctgggactataggtgcacacaaccacgcctggctaatgttttgcagtttttgtagggatggggtgtggccatgttgcccaggctgctcttgaactcctagactcaagtgatccacccacctcaacttcccaaactgctaggattacaggtgtgagccaccatgcccagccctaagtttactttctacaattggaatttcaaatgatttttcttcatttgaaagcacaaaatcaaggagatcatcctccactttctacagcacaaatctactgctcaaacaggcatggaaggtgttaattat

SEQ ID NO: 629705 - DNA, 470 bp, Homo sapiens
ggccgtgttgcctaagtttactttcttttcttttcttttttttttttctttctgaaacagggtctttatctgtcacccaggctggagtgcaggggcacaatcatkgctcacggtacccttgacctccggggctcaagcgatcctcctcccacctcagccttccaagtagctgggactataggtgcacacaaccacgcctggctaatgttttgcagtttttgtagggatggggtgtggccatgttgcccaggctgctcttgaactcctagactcaagtgatccacccacctcaacttcccaaactgctaggattacaggtgtgagccaccatgcccagccctaagtttactttctacaattggaatttcaaatgatttttcttcatttgaaagcacaaaatcaaggagatcatcctccactttctacagcacaaatctactgctcaaacaggcatggaaggtgttaattat

SEQ ID NO: 629706 - DNA, 470 bp, Homo sapiens
ggccgtgttgcctaagtttactttcttttcttttcttttttttttttctttctgaaacagggtctttatctgtcacccaggctggagtgcaggggcacaatcatggctcacggtacccttgacctcckgggctcaagcgatcctcctcccacctcagccttccaagtagctgggactataggtgcacacaaccacgcctggctaatgttttgcagtttttgtagggatggggtgtggccatgttgcccaggctgctcttgaactcctagactcaagtgatccacccacctcaacttcccaaactgctaggattacaggtgtgagccaccatgcccagccctaagtttactttctacaattggaatttcaaatgatttttcttcatttgaaagcacaaaatcaaggagatcatcctccactttctacagcacaaatctactgctcaaacaggcatggaaggtgttaattat

SEQ ID NO: 629707 - DNA, 489 bp, Homo sapiens
tcataaacttacaaagaccccagaccatttctggcactcgataagattttaacatttaccattatgttcattttcatttggttagtacacctctgctctgacttatgatggagtccttgtgatggctgaaactttccgaagtcttaggaggcagaaaattgatatctcaaggagaggaaatgctggggattgtctggcaaatcctgctgctccatggggccagggaattgacatggagaggacactcaaacaggtaactcacaattttatttaagttcaattcatttcatggtcttgttttaactgaatgttcaaaaaacagactaatttatccaagcacaaatacatattacaattgctacttaaatatatcaagccatcatttttggaacatttctacataaaatacaaggtagaatcttgctgtttacattttatgyggatgcataatcaggataagctaggttatgttgcagtaataaaaaaccc

SEQ ID NO: 629708 - DNA, 600 bp, Homo sapiens
ggtgtattactcaagtttttttttctttttatacatgtatacagacatacccaagcatacacacaatattacacatgtttcataaattctatttgctaatctagctgttttatataacaacatatkggttcttcctatgccaataatccaacatcgtttaatttttatcaaagtaattcatgtgtataatgttgaaagtcaagtagtaccacatgattataaaaacaaaaacagcagcagcagcagcatcaatagagcctagcagtttcctgatagacttcttcccatccctattccagctccctagacacaactaccttcaactttttgtagcctgtgtcttttgatatttctatatttccactaaagttagttttagtttctactataggaaatgaagaaaatgaagctctcttatactagacactctcttcctcaactacatacatgttctcttctccccagagagagcttttggctcaatttttagctaaagtcaatatccagcatttatatcataaagatttttttatggttttctgctggattgcatctccattcttacgacttatttttattttgcaaaagtgaatcacctcg

SEQ ID NO: 629709 - DNA, 615 bp, Homo sapiens
atccttttataaaggaaaatgtaaacagcaaaaatttacttaagggttgggaggtagctggaggtaattaaaacatgagatagtaaacaattccaagtttgctatcaggcactaccagcctagggatttatggattgttgcctgcaatagggaaattctcacaggcatctactctccttgagcccttgcttcctactcagttgttaggccctttctatttcctactccttgccccagctgctagcctacaattccctaatttctattaaaatagtacatagagaggttcagttcttcatactttcatccgcccccccatccaaagtggcctctggatgggcctttgcacaaagaaacactcactgaagtgctctgcttaaagaagataaaccattgtggtctccactgttaattacaaaaaagttgccacaaactttgaaattacaataatttttaagatttaatatttttartctaatacttagtcaggattcagactttctccttccataccccgcatttaaacaccagggttagatcttcctgtcctatacttccacaattctcagctcacacctctcatagatattaccagactgcatttctgcaacgtgt

SEQ ID NO: 629710 - DNA, 561 bp, Homo sapiens
gacttgaagctctatgttcatatatgtagttccaactggtttttttaaccactgcttaatatttcataatatgaaaaatcattatatttaggaattactaattacactattacttgagtaaaccctttttgtacatttctcctttggtacatgtcttgcttctctttccagaatatattgaagtattttgatacagttctaaatgaactagatgattagctttctacctgctgctaagatgatttgattcactaatttattcacttcagatacmtgtattgatcctacatttaaaagttgcttgtgctgggactgaagatgaaaatgtatgcagaccctgtctttgacatgcacaaaaccaagaagaagaaaacaaaacagaacaaacctgtggtacaactagtgaacatgagaataccttgatacaagttatgccagagccgtggccaacacaccgtagtattcagttagacacatggagaagaatggcagtttattctgctaacatatcttgatgttgtgcaagaggcttattcatttaatagtcacttaagtcgcctt

SEQ ID NO: 629711 - DNA, 578 bp, Homo sapiens
agcccttgcttcctactcagttgttaggccctttctatttcctactccttgccccagctgctagcctacaattccctaatttctattaaaatagtacatagagaggttcagttcttcatactttcatccgcccccccatccaaagtggcctctggatgggcctttgcacaaagaaacactcactgaagtgctctgcttaaagaagataaaccattgtggtctccactgttaattacaaaaaagttgccacaaactttgaaattacaataatttttaagatttaatatttttaatctaatacttagtcaggattcagactttctccttccataccccgcatttaaacaccagggttagatcttcctgtcctatacttccacaattctcagctcacacctctcatagatattaccagactgcatttctgcaacgtgtttatgtgcctttctcctaagttatgaayttggctcatccatttttgagtctcaatatttaacacaaatccaggcacaaaacggcattatttttggtataaattaataaataagcagacgactaaatgaagtgacaaaccagaa

SEQ ID NO: 629712 - DNA, 541 bp, Homo sapiens
ttaattgtaaacaccccattgtgcattccacattttcttgaccttctgttttataataatcctcaccattcctttaaagcagtggtaagctaacttttttgggggtgggrataaggggtcactgatctctttcaaaacctcatgaaaagaattatcctagaaaaaacacaaataatttatatataatcgtaagggattctgaccatgttccatgctttagccaaattgtccttctgctcagtctgtagtttttgtttacaaaagccattacaattcttgctatcaaaaatttcatgcattctcagcagcccatctagcatgctatcctttccataaaaacacattttggtctccctagctaaatatgatctttttccccttgaaatcaaaaacacatttgatttatatattacctatattatacttgaatatgggataaactccatgattgaacgaaaactatatgaagttaggtaatatggcttatttatcttttatagctccctgtagaacccagcatggtactaagaatttattaaaa

SEQ ID NO: 629713 - DNA, 584 bp, Homo sapiens
gtatgttcaatagttcaaggagtgaaatggtgaaagtcagtatggtatgacccacaaatcgtaggcttgttctaggttggggacccctgccctagaagaaataataaagtgcgtggaaattcccaaggatggagcagatctaaatagtctttggactrgaatctaagacgacacagaatatactggctagagaacagaccactgggcactgaacaccaggtgtgagcatctgagaccttaagggtgatcctgaggagggatacagcacactggtgagcagcagggcagagaatagcacctcctgtctcttacccccgcatgttactaaacttcaccctgaactacaggacactacaggaatcccaaattagtccaaccatcagacaaacaagtacttcggtaaagactgggcatattcctgacctctcacatatataagaatatatgttatcttcacccaagaatagcaactcaacctgatggaatttttgccaatctcagcatttagtactcaaagaggaaatctaatgtcaacccaatttttatgtcttagtagttaaccagttttattaatcctacttaaa

SEQ ID NO: 629714 - DNA, 548 bp, Homo sapiens
atctgtttatatctttcacccactttttgatggggttgttttttcttgtaaatttgtttgagttcattgtagattctggatattaggcctttgtcagatgagtagattgcaaaaattttctcccattctgcaggttgcctgttcactctgatggtagtttcttttgctgtgcagaagctctttagtttaattagatscaatttgtcaattttggcttttgttgccattgcttttgctgttttagacatgaagtccttgaccatgcctatgtcctgaatggtattgcctaggttttcttctagggtttttatggttttaggcctaacatttaagtctttaatccatcttgaattaatttttgtataaggtgtaaggaagggatccagtttcagctttctacatatggctagccagttttcccagcactgtttattaaatagggaatcctttccccatttcttgtttttgtcaggtttgtcaaagatcagatagttgtagatatgtgtgatgcctccagctttgttcttttggcttaggattgacttggc

SEQ ID NO: 629715 - DNA, 558 bp, Homo sapiens
atctttacctatttttcctgcctacagaatcttcctaaaaggactgtgtcactgtggtcttacataaacagccagctggaagacttcactaatcctctctatgggagctattccaatcatgtcctttatccagtagccagcatgcgccacctagagctctgggtgggatattacataaggtggaatccacggatgaaaccacaggtatgtgccttacaatatacaatgggagttttcattcatgcagtgcaactttgtctccktaaaagcagctggaaagattatctgtgcatatttaaaactttactccttacccattgatagttaacaattgtatagtagaaaaatactacactggggcagggtaatcagtatacctggttcttaggactgcttgtatgacattggacaaatcactgctctcttttcttgcatcttccctcctctgtctggataacctctagggggtcttgttttaataagctgaagaaagtagctttaggaaagttaaaagctgaacaaaattctggtctactgtgaatatgtttatggaatatt

SEQ ID NO: 629716 - DNA, 540 bp, Homo sapiens
ctacactggggcagggtaatcagtatacctggttcttaggactgcttgtatgacattggacaaatcactgctctcttttcttgcatcttccctcctctgtctggataacctctagggggtcttgttttaataagctgaagaaagtagctttaggaaagttaaaagctgaacaaaattctggtctactgtgaatatgtttatggaatattaactacttagaactgtttaagactaaaaacctataaataacagggaatcttctgactactgtcttttaattgtcttgttaattatttgttgtatttggaaaagtaccagtttcaggagcacctacacagcaggttattctttggaaatactcaggggcactgggaaagccagtgaaaagattagtggtgtccacagtccckgtatttaatttcactgatgggttggaaaggtgccattggttccaacagctgaaaaaacatacactgcaacatttagggaatgatttgacctggctttggtcaggattgcctagttgaatattttatgttt

SEQ ID NO: 629717 - DNA, 529 bp, Homo sapiens
tactgctttgtaatgaattctgtatgctttgcatgtccttcaataactgaagattttttctccttttttctccaggtctcagtttcataaaatctttcttatttgtggtccctgtgattccagaacggctgctgctgtttcyttcttcatcaagagtctttttggtagcttttaattccttcttctgcttctctaacttctgtttctccagctataccaaataaccaaggcaggaaggaaaaggagaatttaatgaaaatattttttttctgacaacaaaaagtacaagagtacctttttttggttaactctcatgctaactgaaactcaaataatacattctaggctttcttttaaagacttcaaaatctactgcactagtcatttaacacttaaatattaatataaataaatatatgcttatatatatataaaacaatacacaaacaagtagacatgagtaaacaaattctggttgtcctaaattaaggcaatattgccaaagtacagaacagggcgagtgagaaac

SEQ ID NO: 629718 - DNA, 608 bp, Homo sapiens
ctttggccaaattacaaactgtgccatagtttctttatctatgaaatgaagttaatgaaacctgagtacagtaaaatatatctgtgtgtttgggtgtaaagaggctggcaaagtgcctacacatagtagatgctcagtaaatgtatttttcactttcaattctgtctttttctgtttgataagaattttcagagatcataaaatttaagatagattttcttaagtccaaccatttaatataatagcttaattttgtatacagtgaaggatggaaaatttcagttgttttattaatcctatatgtgaagtagtacactatttataaaatagcagatattgaaggagcacgagagctcaatagttgatatgttttttaaaaatggtttcaagcatttttcttgcctgtgcctgtgtcatttgccttgcattcctcccttacttttctaatatattttagattagcaacatccattagtattataatacctcagtgaaaaatgtactttacgtatgtaagygatagctgtgcatgtagcactctggtggacacttggtgcctgacttctgatatttatttgtatagatgaatggcaacaaagtcaatcatc

SEQ ID NO: 629719 - DNA, 573 bp, Homo sapiens
tagtgtttttgaaaattatcattcacagatgatttgaagctggttaacctctaggcttccagttcttcacatagcctcattgcttatttgtgtcctgagccttcacattttataagctcctttagtaatagcttttaaatagaaagtgtagagaacataatacattgaaaagctaatccagtttcattaaaaaggttaaattgtgtaggttttttgctataggtactgtaaaatggcactttcctgaaaggatagtgccttagtagattaacagctaactatgaaagctttttctgttaagaattttgtattcaaacaagatttgttgcctctgcatcagtaaagcagaatggaaaatgggctggggatggaactagtctagatatatcttgaactttgatttttcaagtggaattatattkgtattacttttttgccttgttatccttgtttgttatggaaaaagtcttatacagatgtaatctggtagatgtgttttggaaaaattgggcacgaatccaggctttgtaaatggaattgtgcttttctggtgacataattgtagagtgtttt

SEQ ID NO: 629720 - DNA, 506 bp, Homo sapiens
gcctggttgaggaatcccagtggggcggcgcctccatctgtctgggagtttggctggtggccgcctgcgcctcgggtagggaagctccacgagacagagatctcgtccattctcaccccaagctctcccgcacctcgttaaggcatccaataaatagttgttgcaccgaagaatggccacccaccagctgaactcccagcctgatccctgattgccaataataggatcttacaygtcaattcaagcctaattatttcccttttgattatttttttgtcttctagttctgatcatttttgtaataaggcactccctggtggaaacatggaaagtacagagaggtaaaaagcggaaggggaaaactcactcatagtcccatcatccaaaaacagcccaatcgcatggctcaaggcaacacctctttgtcttacctattttgacgtggatgcaacaggtagagagtttcattcaccggaaactccaccatcgatcctcataagaaaagc

SEQ ID NO: 629721 - DNA, 345 bp, Homo sapiens
caccacaggacacacacgtgcacatacacgttgcacgtgcagtgaagcccagagacataccagaccttcacctgaccacagtgcacatctccccaccccccactgcaaactgacccccaggctcctcagactccacagggagagacctgcccacaaagggamtcactcacatgcgcacacctagaccactgggtgacaacccgagccaggcacccactcgcccctcacctgactacagggcgcacacacccaattcacacacccacacaacacacacacagaagcaggctacattcacccaaatgcatgcacagccccactcaccaccctatcaccccacacatc

SEQ ID NO: 629722 - DNA, 246 bp, Homo sapiens
ctgctactctcagcacactgcctatgaggtagccctgcatggcaggagcagtcacggagctgtgacgttgccactgcttcartaaagctgttttcttctacccccggcttgctcttgaattccttcctgagtgaagccaagaatttgccctgcctcaccttgagataccataaacattttaggatggttatttaagaaatgtcagtgaaaaacatcatcatgactttgatagggattgcattgaat

SEQ ID NO: 629723 - DNA, 557 bp, Homo sapiens
ttcagactgctgtgctggcagtgagaatttcaagccagtggatcttagtttgctgggctctgtgggggtgggatctgatgagctagaccacttggctccctggcttcagccccctttccaggggagtgaatagttctgtcttgctggtgttccagctgccactaggttacaaaaaaaatactcctgcagctagtktggtgtctgcccaaaaggctgcctggctttgtgcttgaaacctggggccctggtggtgtaggcacccgagggaatctcctggtctgcgggttgcaaagacagtgggaaaagcgtagtatctgggccacatagcttcgtctctcatggcacagtccctcatggcttcccttggctaagggagagagttccccaaccccttgcacttcccaggtgaggcgatgccccaccctgcttctgctcaccctctatgggctgcacccactgtctaaccagtcccagtgagatgagccaggtacctcagctggaaatgcagaaatcacccgccttctgtgttggtctcattgggagctgcagaccggagc

SEQ ID NO: 629724 - DNA, 557 bp, Homo sapiens
ttcagactgctgtgctggcagtgagaatttcaagccagtggatcttagtttgctgggctctgtgggggtgggatctgatgagctagaccacttggctccctggcttcagccccctttccaggggagtgaatagttctgtcttgctggtgttccagctgccactaggttacaaaaaaaatactcctgcagctagtttggtgtctgcccaaaaggctgcctggctttgtgcttgaaacctggggccctggtggtgtaggcacccgagggaatctcctggtctgcrggttgcaaagacagtgggaaaagcgtagtatctgggccacatagcttcgtctctcatggcacagtccctcatggcttcccttggctaagggagagagttccccaaccccttgcacttcccaggtgaggcgatgccccaccctgcttctgctcaccctctatgggctgcacccactgtctaaccagtcccagtgagatgagccaggtacctcagctggaaatgcagaaatcacccgccttctgtgttggtctcattgggagctgcagaccggagc

SEQ ID NO: 629725 - DNA, 557 bp, Homo sapiens
ttcagactgctgtgctggcagtgagaatttcaagccagtggatcttagtttgctgggctctgtgggggtgggatctgatgagctagaccacttggctccctggcttcagccccctttccaggggagtgaatagttctgtcttgctggtgttccagctgccactaggttacaaaaaaaatactcctgcagctagtttggtgtctgcccaaaaggctgcctggctttgtgcttgaaacctggggccctggtggtgtaggcacccgagggaatctcctggtctgcgggttgcaaagacagtgggaaaagcgtagtatctgggccacatagcttcgtctctcatggcacagtccctcatggcttcccttggctaagggagagagttccccaaccccttgcacttcccaggtgaggcgatgccccaccctgcttctgctcaccctctatgggctgcacccactgtctaaccagtcccagtgagatragccaggtacctcagctggaaatgcagaaatcacccgccttctgtgttggtctcattgggagctgcagaccggagc

SEQ ID NO: 629726 - DNA, 528 bp, Homo sapiens
agaaggtagagcaaccggggctgcccccctgtgttcttgggattcaccagaacccagtctgtatgttccgctctctgccctccacacccctcacagtgaccaccactgcttrttgcaattacttcccatgcttcctcagcattcttcataataaaaggaaatcaaatatttgtgttttaccattataaagtgctcctgattggtcatctcatctgatccccacaaaaagcttgtgaggcaggcgttattaccttcgttatacaggggaggatgctggagcccagaggactgagttgcccatggtcttccagatagtaaggggcatcagcaagtctcatttccagattccctgagaccgttcactgacttattcaataaacttattgagaacctactgtgttccaggcactgtgctgggttcatggtccttgctctcaaggaacctagagtgtaaagaacagacagactagcaagctcataagagtaaagcagtataataggtttcatattatattaaaagtatgttat

SEQ ID NO: 629727 - DNA, 590 bp, Homo sapiens
ggatggggcaggagggaaagtcatggggtagggggcatgggctgctgtttgcctgcatgaagagttaaaccttagctctgaagatgaacactgaagagtgacactataggatttgaactttagacagatcatctggccccaggtaggagacagaaacagagtctgggagactagtcaagaaggaatttagtccctatgagggaaatgaggaccttgtatgacgaatagtgaagcaaacacagacatgagaggcctaaggaagcaaaagactgggctcttttcagaattccttgagctccataacagccagtaataggagtccmagagctattgtccacatgtccaaaaaaaaaaatagaaaccttatatttatccatcataaatttacacagcttaaccaagatatcacattcctctgtctttgcctagaattaaatggaataaaactattaatactggttatctcatgcaagtatcaaaagttctgcttggcagttatgtgtctttaaacattggaaaataaattaactattaataaatgcaggatttttcaaaacatgaaattcatgaaggggtactttgagactgag

SEQ ID NO: 629728 - DNA, 590 bp, Homo sapiens
ggatggggcaggagggaaagtcatggggtagggggcatgggctgctgtttgcctgcatgaagagttaaaccttagctctgaagatgaacactgaagagtgacactataggatttgaactttagacagatcatctggccccaggtaggagacagaaacagagtctgggagactagtcaagaaggaatttagtccctatgagggaaatgaggaccttgtatgacgaatagtgaagcaaacacagacatgagaggcctaaggaagcaaaagactgggctcttttcagaattccttgagctccataacagccagtaataggagtcccagagctattgtccacatgtccaaaaaaaaaaatagaaaccttatatttatccatcataaatttacacagcttaaccaagatatcacattcctctgtctttgcctagaattaaatggaataaaactattaatactggttatctcaygcaagtatcaaaagttctgcttggcagttatgtgtctttaaacattggaaaataaattaactattaataaatgcaggatttttcaaaacatgaaattcatgaaggggtactttgagactgag

SEQ ID NO: 629729 - DNA, 364 bp, Homo sapiens
acaaatttggccctctatgggctaagtgttgtcactttctccattgggttgaattttagcttgcctttctcttttccaagtcttagtttgtctttatgaaccatgattcctggggaataaaaatagaaaatcagaagcttgcaggaatgattttcttggctagtttgactcactatcagccaattgtccaagtaaaaagctgtttaaagtttttttttaaaaaaagaggtgaagttttaatagcatcaggwacaaaaataccattgtaagccagctctcattttttgacattttttggtatcatctggacaaggtcatttgtcacagggtatgactctatccatgatgctacagacatcataga

SEQ ID NO: 629730 - DNA, 595 bp, Homo sapiens
gttagaagaagacttttctcctattttgtccttttctacttggggtcaggacatggtatttagcccagagaattgcataagggtcagtaaaaactatacttaatttaaatatatattatgcattcatttttttgagatctactcacatatgcccttcattgacccccccccccagtgaaattgagagcaggttatatgtgtgcttagctkgctccccagttgttgaacatgatgatattggcctctggggagttgggaacaccttcttccccatctttccctctggggagatggggaaagggcaatatcctggagatgagatcctgggagctgggctgagatagaggtaagtctcctgtgtatatcaatggggaaacactgaattggggaggagagaaaagaaactgaatggagaggtgggccattgggagaggccaggagttggatactgtatcatggagagcataactgaaggtataacgtggcagataggaagagaggtgatgagagagaagaatgaggatcaagatctgcaagaggcaaagtgagatagctcaggatcagaatgagtgactgctgaatatccattgggcat

SEQ ID NO: 629731 - DNA, 549 bp, Homo sapiens
acccccccccccagtgaaattgagagcaggttatatgtgtgcttagctggctccccagttgttgaacatgatgatattggcctctggggagttgggaacaccttcttccccatctttccctctggggagatggggaaagggcaatatcctggagatgagatcctgggagctgggctgagatagaggtaagtctcctgtgtatatcaatggggaaacactgaattggggaggagagaaaagaaactgaatggagaggtgggccattgggagaggccaggagttggatactgtatcatggagagcataactgaaggtataacrtggcagataggaagagaggtgatgagagagaagaatgaggatcaagatctgcaagaggcaaagtgagatagctcaggatcagaatgagtgactgctgaatatccattgggcattattgtttaggtgcatcttgacacctcttaaagagataaggcagctccttaagaaaacaaccaggccagatggctaaggcctgtccagtcagtgtgaaaatctgtggccccaggt

SEQ ID NO: 629732 - DNA, 557 bp, Homo sapiens
acagtggttcacattttgatgaggaggcaagtcgggggagtaaagtggaaggagctcaggcttaggaattcaagggacatggatttacatcctgaccctgccacttactagcagtgtgatcttgggaaggttacttgatctatctttcctgaagtttgctatctgtagaaagaggataacagttctaacctcctaaggttgttttgaggattaaaagagatattatagctatttaaagtgcttgtttaacacaatatctgacacattgtaggcccccagtaaatgctagtttaagctcccttaccctttactagcaatgatatcatattagtaagagttctaaaaacttgaaagataatgtgtcatccacccttagcctacacttcacatgagttttcgtccttttttgagcaaaagcttttattttaacaaagacacattaagttctacttatttatttgtgtgctgtggttgtgatttttttttgcatttgtatatgaaaawtcaatagtaaatgctgatttccttttcctgtggctgtaattgctatgttaatt

SEQ ID NO: 629733 - DNA, 556 bp, Homo sapiens
catgctgaccattagctgacatgctactcacaaycaggatgtcaggagggaggttgggaacatcatagcagtctaaggagaagacagtcctggtggggatgactgtggtacccatgtagagacatgaacccaagctctggctccatacaacccagttcatttgggagggggatttaaatcagggcccccacttctgactgaccagatggaggcatccctgaacacccctctcaggtttcccaatctctcctccctctactcttccttctcctttttttcttcctccttcccttcctcatgcccaaaatggctgtttgtaggaatggaaggagaggggtgtatttgggagggatttggggactcaattaatggaacatatcaaggttaagggagaataagtgcaggaaggaaattctggttccttttctttcctcctatctggactccaaaggcaccgtcatggcagaatcagcatggggctgtgagccagtggccctactctcatctcagctctgccactgatggtgggcctgtcatttaactgcgttgagcccag

SEQ ID NO: 629734 - DNA, 358 bp, Homo sapiens
gtaacctccccaaatgaccccatgaggyccatggtagatgcttctgtctgtgaagtccttcatgattgcatctgatggacagactcctctcctcttccgggcccctctagcacggtcctctgttgccctctggcctatagaacagcatgcatttgggtttgagagcaacctggatttgcagccaagacacccatgagagtaccttcctctccctcacaaccacccttctcataccaatcaagtctcaatgtccctaagcgtcctgtctagcaccttttcatttctcttattacatttctcctccatgcccttactttccagctattttaatgtgctcagtggaatgtggcatttaaca

SEQ ID NO: 629735 - DNA, 358 bp, Homo sapiens
gtaacctccccaaatgaccccatgaggcccatggtagatgcttctgtctgtgaagtccttcatgattgcatctgatggacagactcctctcctcttcygggcccctctagcacggtcctctgttgccctctggcctatagaacagcatgcatttgggtttgagagcaacctggatttgcagccaagacacccatgagagtaccttcctctccctcacaaccacccttctcataccaatcaagtctcaatgtccctaagcgtcctgtctagcaccttttcatttctcttattacatttctcctccatgcccttactttccagctattttaatgtgctcagtggaatgtggcatttaaca

SEQ ID NO: 629736 - DNA, 358 bp, Homo sapiens
gtaacctccccaaatgaccccatgaggcccatggtagatgcttctgtctgtgaagtccttcatgattgcatctgatggacagactcctctcctcttccgggcccctctagcacggtcctctgttgccctctggcctrtagaacagcatgcatttgggtttgagagcaacctggatttgcagccaagacacccatgagagtaccttcctctccctcacaaccacccttctcataccaatcaagtctcaatgtccctaagcgtcctgtctagcaccttttcatttctcttattacatttctcctccatgcccttactttccagctattttaatgtgctcagtggaatgtggcatttaaca

SEQ ID NO: 629737 - DNA, 358 bp, Homo sapiens
gtaacctccccaaatgaccccatgaggcccatggtagatgcttctgtctgtgaagtccttcatgattgcatctgatggacagactcctctcctcttccgggcccctctagcacggtcctctgttgccctctggcctatagaacagcatgcatttgggtttgagagcaacctggatttgcagccaagacrcccatgagagtaccttcctctccctcacaaccacccttctcataccaatcaagtctcaatgtccctaagcgtcctgtctagcaccttttcatttctcttattacatttctcctccatgcccttactttccagctattttaatgtgctcagtggaatgtggcatttaaca

SEQ ID NO: 629738 - DNA, 584 bp, Homo sapiens
tttgaaacctcacagacaaagccatgcctctgggaatagtccagctgctctgaatgttatgacgaaggaatacaagttcagggacatgaactcgagatgctagacattctcatgacctggtgagaaagatagcagggctccagtttccaggcctgggttttctttccccaaaagacaarccatcagtcagacccattgaattcactgtatcaccagttaggttttgcaggaacaaggggcacgcatgtagctcccaggcctctctttgcagaccctgtttaattggaattgttaatgcaagactgtgaggaagaagagcggactggttctatgctttgggagaatcagatgacaagcacagcactttctttatctttgatttttccatcccttgcttgtcaatactagatttagacgtttctctccatgtaacgtttctccttcctcatagacttttctgtaatgaggactataaaactgaggctcacaggccccataattgagtcaaggcctacccagtgcaggagttgcaactgcggtctgcatgaatctaaagtctgtatttccattttctgacgtggtta

SEQ ID NO: 629739 - DNA, 584 bp, Homo sapiens
tttgaaacctcacagacaaagccatgcctctgggaatagtccagctgctctgaatgttatgacgaaggaatacaagttcagggacatgaactcgagatgctagacattctcatgacctggtgagaaagatagcagggctccagtttccaggcctgggttttctttccccaaaagacaaaccatcagtcagacccattgaattcactgtatcaccagttaggttttgcaggaacaaggggcacgcatgtagctcccaggcctctctttgcagaccctgtttaattggaattgttaatgcaagactgtgaggaagaagagcggactggttctatgctttgggagaatcagatgacaagcacagcactttctttatctttgatttttccatcccttgcttgtcaatactagatttagacgtttctctccatgtaacgtttctccttcctcatagacttttctgtaatgaggactatraaactgaggctcacaggccccataattgagtcaaggcctacccagtgcaggagttgcaactgcggtctgcatgaatctaaagtctgtatttccattttctgacgtggtta

SEQ ID NO: 629740 - DNA, 638 bp, Homo sapiens
tgactcattctactgattcaaatgctaatctcttccagatacaccctcatagacactcagaaataatgttttacctgctgtctcggtattctctgactcagtcaagttggcacataaaactaaccrtcacaaatagatattatttccattttacaggcgtgttaactgagacacagaagtgatgtcatttacacaaggtcattctcccaataagaggtggaggtagggtttgaatccaggtagtccgccttcagggtccatgctcttaacagtgcaggaaacaagcttccagggggagtggttgggaataggtgaaaacttcaaagacaaagcttcgaagacaatcttgatggatgaactcaccaaataaaaggaactctttcatcagccaacgatggcagccagagtcaggaataagagaagctgcaccaaaaagtgggagaagaaacaagaaaacatcaaaaaatatacacaggagaaagagacccatagacagaagaggtggtacaaagaacagtgtgaagtgggaaaaccagggaacacaactttcaggaagaaacgagatattgtctcagtgtttttcagttgtggtccacagaccttctgagctcttgataaaaatatagttgctgagcctc

SEQ ID NO: 629741 - DNA, 638 bp, Homo sapiens
atccttatttcacacatcacagtaatgtttgtgagaattgggtgagcagtatttttacccaagaactttcttttgtgtcttgtgtatagtaacatcgttataaggaaagaatagccttgctttgccagcttatgtctcatgacaggacaagggcatctctgttgcaggcttttgatgttctagaatgatgtaggaggttttaagccagctccaggaggatccatgaacctgtaamattgcaaatggtatgtttttgttatgtacatgctttttatctaggatgcgtccataggtttcatctgagtctcaaagatgtcttgaacaaaccaatgattaagagccctgctgtagaactttctaaaggcataagcaaccaaatatatgaaatagagaatttttgttgtagtaattatatgtaaatgtagtgtcccaacttcttgttttcaaaagagtatcaaatgagttatgaggtccatgtttgtgactcaaatgttttctctctctgaggttctgtatccatttgttataaatatcctatctacacccttgatattatataagaaggttgtcttttgtttgctgagatttagtctagaagtggtattttgatttttttcttccagtagagaagatgcact

SEQ ID NO: 629742 - DNA, 589 bp, Homo sapiens
ttttgtttatagtcacaactaacaatatatgtactgtcttaaagtgacaagaacatataccaaaatgtcaatagtggttgtgctttggtggtgagactataagttttacttccttctgcttatccatgcrttctatgcaattaggatgtttatgagtttttttaattgttattggtggtttttaatcttttcaaagaagtatgctctgaaatcactacaagaatattttgtgactttaagaagttgttatgcaagaaaatccttgagagcaagagccatgacttaggtttcactctgtcccccagccccaacccctaagccatagcaccctcaaggtcagagtgctgagattctgagtatgggaagttgagaagaggaaggaggtgcttcactgctacttacctcacaccaccaccaacacccccatgtgtatggggtaaatagtaatgaagtacttcctcaatagctttctgaaagcaaggtgcagactcagacagaggtgaactcttattagctctgtgatcttgataagtcatcccaccttgaggcctgtatttctaccttgatcaagatgcagtataaagatgtg

SEQ ID NO: 629743 - DNA, 589 bp, Homo sapiens
ttttgtttatagtcacaactaacaatatatgtactgtcttaaagtgacaagaacatataccaaaatgtcaatagtggttgtgctttggtggtgagactataagttttacttccttctgcttatccatgcattctatgcaattaggatgtttatgagtttttttaattgttattggtggtttttaatcttttcaaagaagtatgctctgaaatcactacaagaatattttgtgactttaagaagttgttatgcaagaaaatccttgagagcaagagccatgacttaggtttcactctgtcccccagccccaacccctaagccatagcaccctcaaggtcagagtgctgagattctgagtatgggaagttgagaagaggaaggaggtgcttcactgctacttacctcacaccaccaccaacacccccatgtgtatggggtaartagtaatgaagtacttcctcaatagctttctgaaagcaaggtgcagactcagacagaggtgaactcttattagctctgtgatcttgataagtcatcccaccttgaggcctgtatttctaccttgatcaagatgcagtataaagatgtg

SEQ ID NO: 629744 - DNA, 534 bp, Homo sapiens
ataaatggttgatattggtgtattgtctttgttcctctcagcaactttttcagatggtagctattaatacccccattttacagatgagaaaactgaggtttagagtggctgagtagattgcctaagatcaaacatctagacccatagtaagagccaacaatcaaggccctgttttcagacttaacttctagagtcttcccattgcatgataaggaaaagccctcctttgaatacagcactaatcagatattcatttttcttcccccccccccactttagtgagttatatttgacaaatagtgattgtatatatgtaagatgtacaatgtgatgatttgatatatataatatatatacatacmttgtgagatgatgaccacaatcacgcgaattaacatatctatcacctcacatagttacccacctttttttgtgttgagaacacttaagatctactctcttagaaaatttcaagtataccattcttattaactatagtcaccatactgtacattagatcttcagaacttactc

SEQ ID NO: 629745 - DNA, 534 bp, Homo sapiens
ataaatggttgatattggtgtattgtctttgttcctctcagcaactttttcagatggtagctattaatacccccattttacagatgagaaaactgaggtttagagtggctgagtagattgcctaagatcaaacatctagacccatagtaagagccaacaatcaaggccctgttttcagacttaacttctagagtcttcccattgcatgataaggaaaagccctcctttgaatacagcactaatcagatattcatttttcttcccccccccccactttagtgagttatatttgacaaatagtgattgtatatatgtaagatgtacaatgtgatgatttgatatatataatatatatacataccttgtgagatgatgaccacaatcacgcgaattaacatatctatcacctcacatagttacccacctttttttgtgttgagaacacttaagatctactctcttagaaaatttcaagtatacmattcttattaactatagtcaccatactgtacattagatcttcagaacttactc

SEQ ID NO: 629746 - DNA, 534 bp, Homo sapiens
ataaatggttgatattggtgtattgtctttgttcctctcagcaactttttcagatggtagctattaatacccccattttacagatgagaaaactgaggtttagagtggctgagtagattgcctaagatcaaacatctagacccatagtaagagccaacaatcaaggccctgttttcagacttaacttctagagtcttcccattgcatgataaggaaaagccctcctttgaatacagcactaatcagatattcatttttcttcccccccccccactttagtgagttatatttgacaaatagtgattgtatatatgtaagatgtacaatgtgatgatttgatatatataatatatatacataccttgtgagatgatgaccacaatcacgcgaattaacatatctatcacctcacatagttacccacctttttttgtgttgagaacacttaagatctactctcttagaaaatttcaagtataccattcttattaactatagtcaccatackgtacattagatcttcagaacttactc

SEQ ID NO: 629747 - DNA, 594 bp, Homo sapiens
tccttgtattcatcttgactgccctctggacatgggcaggtttccaagcccacaagttctgccagcagctgcacactttaacctctagagggagctgagagggaatttgagtccattgctctgactgagcaaaacggcatttaaattacacctgaaaacatcactatccactattgagagtgcatcctcagagaaaaatcctgggatcatttccccgaatcgattcaacattgcccagattgcttccatctcatgcatactttgttttagtagaaatgggcttcattacagagtggtctccagctccccatagtggcccctcctagtaattttttctaaattaagcaagcgtgcgtggactcaagagstacacggcagtatttcttggctgcttctttctccctctgcaagaaacaggaataacatttcataaataatgagctgcagctgaactttaatctgctagatccatttaaaaatgtttggaaccttccctgtctctctaagaattaccttctggatttttctggctttgttttttggtttcttttgcattgtaaccttatattaaggagtatgctgcttatgtttaaa

SEQ ID NO: 629748 - DNA, 594 bp, Homo sapiens
acaaattacatctctttgggggaatcctcagtgaatcaggccaagggattagaggctaaatgcagactgagagggggagtcaagtagctaaatctgtgagaagggaaaacaaaaaccactgaggtgatgaagagctgaagagaacccaaatgcactgggaacagcctgtcttcatctcaccaattatatgcatagaaaacacagtttaaaaacacttaaatcaaaaataacctaaactctagtaagaatcccaggattcctccagattactgatgatttttgtcccaccaagaaatgattgtcaacggggaaaactattaatatttttgtttcccattatggaagtgtgtcaggactgttgcaaagttaattaggaaactcaaggatatgctcattacagcttaacaagcttggagcccatgaaggagctagtgaagctggtgacaggggtcagctggtccaggggatgctgaataggccagatgggcaaatcacacygtagacaaagagctttccccctatcctgctgggccaccaccctgacctccaaacaaacactaagggcacaaatttgttcccccttatcagctgctt

SEQ ID NO: 629749 - DNA, 594 bp, Homo sapiens
tgggggcatgtctaaaatggattgtaaattgtgactaaagcagccatgaaaataagagctggccaggctaggaacataagtgggccttaagagttagcttcagactaaatgagaatcagccagggkttctgaggagtaatgcagtctattgtgtccttctctctggaagcaattatgtttggtgcaaccactacttgaaatagtttataaacaaacatttcaaggtgattttgtgataacactctgcaggggtaactgaactccgtggaccacctctcttaggaatgtggttatttaaaagatgttttcttgttaaaattgggtattaaaagttatgacaatgcaacagaagaatagagaaataggatgtaatgcaacagagaaataagaaacgtgttttctgctacccaacaaaatggcccctttatttttgcttttgatattctcagaatgtcagagaactgtttattcctacttaatagaaaaacagaagtcaacaagccaaagtgtaggacagggaaagcgtggcagggaggtagggagcaggtcaagaagagagggagaatcagttaccttggaaacaactccaaagga

SEQ ID NO: 629750 - DNA, 592 bp, Homo sapiens
cacataagcagagtgatgagtatgcagaccaggaagaaataaatgatccccataattctcctttgctgcaaataataataataatgatagagttgaagtgyttacaaatattactagcagcaatatgaatttaaagagttctttggggcaatcatgaacattaaatgttgtgcagaatattacgaataagtttgtgaagcaatgggattaactgaaaaataatgaattttatattcacctcctttttaaaatccatgtgtaaggtcattaacatctgctttcagaagataagagatcttgttttaagatagctgactgagttaaaaatctgacttgaagccactttgtgcccttttaacaatgtaccaaatttagtttcaattaattccactccttggaaggttatgcacaaatttgaaccacaattatatttaattcaagaaactgagttaattctaagtgccaggcactttcccaggtatagagatgcaaagaattataaatggtggttgtagtcatcaaggaattcacaatctagtagggaaacaggtagatatttaaatctctgtaatcaaaatggaaaagcaaaagt

SEQ ID NO: 629751 - DNA, 532 bp, Homo sapiens
agatgagatttgtatggggacacagccaaaccatatcaacaacttatttatagtacttgggagaaaaaaatttacatcagaggcaaacgacaggggcaagaatgatttcaggggaccaaaacctaggttttaaaaaaagacttaaagatcttccttcattttcttaactacttaacaaagcaataaatgctggttggtaacatgccagtaattctaaggcaattattttcacaatgattggagcctgtagtgggaatttattgttttgctttctacatccattcctcctccttctgatgacactatccatatttactgtgaggatctatattccctttattccaagccagatggtgtgggtggccctaccttaaaccccattttaactccaggggtgggctctgaccggctttaattactggtgattggttttggtttgggaatgggaagagagaatctaatcagagtcaayaaggcagaaggattcgctttctgaggcgtcagagaaagggtattttctcttccccaagag

SEQ ID NO: 629752 - DNA, 556 bp, Homo sapiens
tggatggaccaatcaatcgatagatagatccaaatttggctggatctattttttttttaagttagtttttaaacctkggttagaatataccaaaatgttgggacaaaatcctgagactactgatgatatccactatcttcaacaccagcttcaacttccagaactactagctctttaaatgacacttgaatttctgctgctagtgacattttaatttaagcttctctcaggcaaatgtctagattatccaggcttaagctctatccagtactgggaaatcatcactaaagtctccacccagtctgcctgttctctgactcactcttctcctgtcaagtctgccaaaattagatgtagcccatggccatcgaaagtgagtttgatccttcagtcttcccctctccttccggactggatgctttcagggggcatgtaccagatgtaaactctatcacatctgtgacttctgcagcccacacagggcttcacaatgtgttaggaatgcaacagaagctttaggatgtgcattaatcaagaactaattggacacttacca

SEQ ID NO: 629753 - DNA, 472 bp, Homo sapiens
tcaaaattctccagtccccatggagagatctaaaagagggtcaggtcaagattttcaccatcttttcaaaagagctgacagatggggctgatgtatcatcagtcttcaccatatagtttctgatacatcaaggagaagggaatgtagaggcaattcatgtaactaatttttactgaggttacactatcaggaaggcaytgcatgctggctatgagatgcccacgacagtctcctggatctgaagaaaacacacgcacatgatggcgatacatgtgctaataaatgtacactaaggccaaatgtggaaagagccatgacgactacaaatgctacatgccaaagaaatgtagaggatgaatgaattactgccatgtggcgttatcgaggagggcatcatagcagaggtgaccctggagatgctgaaccctgaagcatgccaaagtttttaagtggatccggtatggatggggca

SEQ ID NO: 629754 - DNA, 564 bp, Homo sapiens
gaagaaaacacacgcacatgatggcgatacatgtgctaataaatgtacactaaggccaaatgtggaaagagccatgackactacaaatgctacatgccaaagaaatgtagaggatgaatgaattactgccatgtggcgttatcgaggagggcatcatagcagaggtgaccctggagatgctgaaccctgaagcatgccaaagtttttaagtggatccggtatggatggggcacccaggcattgtgcaacacaaaagtgagggaaagaacaaaaccaaagagcatgtcaaagtactggagagatgtctttaattctatttgtagaattagaaatgtcatgatattatttagctttctgaagatgaggtctcttacagggtacatgtctattgctcaatttctgcacatagagctacaaaagcaatggatgactatactcagagacaatgccattctgtctcattatctgacctaaatagcttctcctccaccatcttcatctaccacctctgacacttccacaggtgtcagccttgccaacactgccattggaagtgtttctgca

SEQ ID NO: 629755 - DNA, 286 bp, Homo sapiens
agatgctgatcaggactcatgttcttacatgggcataatgggaaaatccttcattgcatactgggaagtgaccaatagtccatggtgcttataactctyccagtacagaaaagtggaggaatttcagtggagggatgtggtgtctttggttggttgattggtattgatttagatgttatttgtcttgaaaatctggctgtgggttaactaatgcttacccttcctgttttaatcattcctacttctttttctaatccatgtgtcaccaggagaaacaaatgtaaat

SEQ ID NO: 629756 - DNA, 608 bp, Homo sapiens
gaatttatctagaagaaaattttaaataaagagctttaaatgcaggttcaaataaattagaatttatcatttcactttgaaccctgaatttttatttatttatttatttttgagacggagtcttgctctgtcacccaggctggagtacagtggagcaatctcagcttactgcaacctccgcctcccaggttcaagggattctcctgcctcagcctcccgagcagctgggattacaggcacgtgccagcacacacagctaatttttgtattttcagtagagacagggttttaccaygttggccaggcaggtctcgaactcccgacttcgtgatccgcctgcctcggcctcccaaagtgctgggattacaggcgttagccactgtgcccagcctgaaacctgaatttttaatgatattgtaaaactgcacattttcaaagtgggaattttaccttttagagtagaaaggtactgatgaacataatgtaagggttgaggtaaataatctataaagtcctctgcaatcttaaactcattacctgggagaatgatgtcaggatgtgttgaatatgccactatttgacatgtcagcctagtttgtagctgcagt

SEQ ID NO: 629757 - DNA, 569 bp, Homo sapiens
tcttttgctgtctatatcaagtatagactcattttgtcaacaatcacaaaataacttgctgggattttgattgggattgcattgagtctatagataaatttgggaagaactgacatcttgacaattttgagtcttcctgtttataaacgtggaacagtttttttttttttagttctttgatctttcatcagaattttttggttttcctcatatagatattgtacatattttgtcaggtttatacctaagtatttcatttgggtggtgctaatgtaaacggtaatgtgtttttaattttaaattcaacttgttcattgctgawgcataggaaagtgattgacttttgtatgttaactttgtatcctgccaccctgctataattgcttattagttcccgggctttctttttttttttttaatcagttctttcaggacttttacataggcaattatattatttgtgaacaaagttttatttctttcttcccaatctatataccttttatttccttttcttgtcttattgttttagctaggacatccagtaaaatattaaaaagtagtggtgt

SEQ ID NO: 629758 - DNA, 569 bp, Homo sapiens
tcttttgctgtctatatcaagtatagactcattttgtcaacaatcacaaaataacttgctgggattttgattgggattgcattgagtctatagataaatttgggaagaactgacatcttgacaattttgagtcttcctgtttataaacgtggaacagtttttttttttttagttctttgatctttcatcagaattttttggttttcctcatatagatattgtacatattttgtcaggtttatacctaagtatttcatttgggtggtgctaatgtaaacggtaatgtgtttttaattttaaattcaacttgttcattgctgaagcataggaaagtgattgacttttgtatgttaactttgtatcctgcmaccctgctataattgcttattagttcccgggctttctttttttttttttaatcagttctttcaggacttttacataggcaattatattatttgtgaacaaagttttatttctttcttcccaatctatataccttttatttccttttcttgtcttattgttttagctaggacatccagtaaaatattaaaaagtagtggtgt

SEQ ID NO: 629759 - DNA, 624 bp, Homo sapiens
taaaattttcttccattctcatatctatagtttctaaattttcaagaaaaaataagtataatttactgatgaggaaatatcacaataaaatatatttgtaaaaatagtcaggctgggtgtggtggctgcaatcccagcattttgggaggccaaggcaggaagatcacttgagcccaggagtttgagaccagcctgggcaacacaagragaccatgtctctgcaaaaaattaaaaaatttgctgggtggcactaatggtggcacacacctgtggtcccagctactcgggaggaagaggtgggaggatcacctgagcccaggaggtcgaggctgcggtgagccgtgatcacaccactgcactccagcctgggtgacagaggaagaccctgcctcaaaataaataaataaataaatcacccaaccaagttttagagatgtgctactcagatgttcataaaatatttgttgggaatctctgattacaaactgtttactcaatgtactgcccatagggtcagtcattcaactgatgacttctggtctcattaaaggtggttgcatttccaaacagtgagatgctgatccaacagggtccttgggccatcttctacactccatttactcc

SEQ ID NO: 629760 - DNA, 531 bp, Homo sapiens
tttgcactgtttttaaaacttttcacacccagtgtttttgagtctgaaagcaatctggtaaggcagtgagtttggggttcttgtcctaacctgacagatcagaaaactgaagtccttccaaaatggatgacttmccttacctaagatcactaagaattgaacgagtgagaggatgagggtctaagtcttcctgctcaggggctggttgaagaatcagagagaagaaagggggcctcgtagacccacacacagcatgagcaatggtataacatggtgtcaggggaaccttgcatggtttggagaagagccccagtgtgaaaggacccagcactgtgcctcgtacatggcagatgctcagaaaactacccttccccttctttcagccgcaagaaccactgcttcggtttcccacactgcctggccaccatcatgccaccttctaggttaaggggtgttggggcagatacttggttttggtaggggtgtgagagaagggacgacaggttgtcttgtgctccttacccaagtcgg

SEQ ID NO: 629761 - DNA, 642 bp, Homo sapiens
ctgtgctgtatttttaaaacagtaggaatttaatgatctgtgagaaccaagcaggtaagaaatgatggaggcattgtaggtcataacaaggatggatttgaaagatgataagaaggctgaaccgagcaggagtgaggagtgaggggcagaggcgagtcagagggatcctggggttctggcattgaggactsaataaatcactgcaccaactggtgtgtgtcctttttctttgtgggttcccacctctacctgcctaggtgacattatacaggtttaagaccaaataacagacgtggtcattgtttagaaacttttaagtactttatcagtgtagggcattgttagtgatactgttataaagaaaaaagagcataccttgatctttccttgtgcactgtgtctttgtcagtgagtataattttaaatggtgtgagggaactaatgtgtattgctcacataccttattacaggtgaggaaatggagatgcagaaacatttaaagaaagccagcccaagatcaacccgacagccagagaatgcacactctttctaagcacatataaaacactcacgaaagtggactgtatcctaggccgtaaaatacaatccagtaaatttcaaggagtcagtatcctacagacc

SEQ ID NO: 629762 - DNA, 557 bp, Homo sapiens
ctggcacatataatcggcttggattaraaaccaaagctcttcgcagagtaacaaggtgaagtattttgtgctaataatttacgtgataatgagatggttttcagaagattggatgtgctcctaaaggtgttgcttaaagtcactcttcaaaccaggctgggagcataaaaatcccagaagaactacagactctgtagtttgtacagatctcaaaataaggtagctgaggtagaaagaactatgtgctgagaattgaagacatagtggtcactgtcttcaaggagctcccagtctggtggaaaagaaagttgtaaagatgaataattataagacactggacataagagctagctgaaggacaggaatagcttgctgtagtttcagcattttttctctaaagattcattccttcaattggtaaatttgtgaggaggaaagctacctccctgagaaagcaatgcccatgatgttgaacatttaagactagaagaaattattctacattattatgtatatactaagggtcaggtacttattctctctagtccattattttt

SEQ ID NO: 629763 - DNA, 557 bp, Homo sapiens
ctggcacatataatcggcttggattagaaaccaaagctcttcgcagagtaacaaggtgaagtattttgtgctaataatttacgtgataatgagatggttttcagaagattggatgtgctcctaaaggtgttgcttaaagtcactcttcaaaccaggctgggagcataaaaatcccagaagaactacagactctgtagtttgtacagatctcaaaataaggtagctgaggtagaaagaactatgtgctgagaattgaagacatagtggtcactgtcttcaaggagctcccagtctggtggaaaagaaagttgtaaagatgaataattataagacactggacataagagctagctgaaggayaggaatagcttgctgtagtttcagcattttttctctaaagattcattccttcaattggtaaatttgtgaggaggaaagctacctccctgagaaagcaatgcccatgatgttgaacatttaagactagaagaaattattctacattattatgtatatactaagggtcaggtacttattctctctagtccattattttt

SEQ ID NO: 629764 - DNA, 560 bp, Homo sapiens
aaaacgtaagtgtctttgagcagagactgaggtaaacgatgtatggcacattcaacaatggaaaaatatgcagcagttaacaagagtaattagttttgtaaggactgatagtgaaacacctcctaggtacgttgtcaaagggaaaacccaagaacagaggataaatgggctctttggtataaataaaatatgagcctacactttcttttacggaagaatagcagaaaactcttttgctgtggccacccttggagagaggcagctaaggagctaagacaagtcacgcrttcttttctgtctttctggactctgtactttctgatcatgcacatccaattttttaaagtcaacaggagttactggggcaatgagattaaaggccattttgttttccttacccttgcacacatcaaaaatcacttatattaagtgctgcaactgactataatattgtgttaatattatataatgtgttcaatgccacgctggtgaggtgagagtggaggagagtcacatacacaagcagctggtgtacaggaaaggatctggaaggaaagata

SEQ ID NO: 629765 - DNA, 560 bp, Homo sapiens
aaaacgtaagtgtctttgagcagagactgaggtaaacgatgtatggcacattcaacaatggaaaaatatgcagcagttaacaagagtaattagttttgtaaggactgatagtgaaacacctcctaggtacgttgtcaaagggaaaacccaagaacagaggataaatgggctctttggtataaataaaatatgagcctacactttcttttacggaagaatagcagaaaactcttttgctgtggccacccttggagagaggcagctaaggagctaagacaagtcacgcattcttttctgwctttctggactctgtactttctgatcatgcacatccaattttttaaagtcaacaggagttactggggcaatgagattaaaggccattttgttttccttacccttgcacacatcaaaaatcacttatattaagtgctgcaactgactataatattgtgttaatattatataatgtgttcaatgccacgctggtgaggtgagagtggaggagagtcacatacacaagcagctggtgtacaggaaaggatctggaaggaaagata

SEQ ID NO: 629766 - DNA, 621 bp, Homo sapiens
cctccacaattctgttcctgctgtgtgtctgcctggaacatcctatctactgatctccacacttctactcctcttctaaggcctcgtccacaagctgcctcctctgtaaaacctcccctgagggttccatacctccttgctttctaccataatcctactgtactgtattggtaaattctgtctgttggtcccgctactgtgaactccagaaggccttggacagtgtatttttaccattgtatctacagcagcagggaaccagcaaatgctcaggaaaccttggctgaagtggctgaacttcctgaccagcatgttctaactagtctggggagttctaacctctggtgagagggcagaatcgtcctcattccactacacgtcctacctgcaaagctagcacaattatgctrtgcagcttacctctgctctcagaagtcgatcccagcttgcccaggacccagggaccctcctcctgcactctgggctgcttgcgccctgcatccttgtgtgtcccacctaatctctgcttaggactttctgcagatttgctggggaatgtgcataatcaaaagtaagaaatctacttttgtaacatttccacaaactaagcaaatactcata

SEQ ID NO: 629767 - DNA, 613 bp, Homo sapiens
ccctcctcctgcactctgggctgcttgcgccctgcatccttgtgtgtcccacctaatctctgcttaggactttctgcagatttgctggggaatgtgcataatcaaaagtaagaaatctacttttgtaacatttccacaaactaagcaaatactcatagacacttaagcttttctggccacaccagaacattttggtaaatttcctttaggaagaaagaatgatctccccttgcaaagttgtagtcatactagccaaggcataggagactacagacacaggcaagaccctgccttggaataagatggctggggttgagcctggctctgtcatgatagctacaaggtctcaacaacttatttcttctccctgagaagcctccaggtccttacctgtaaatcagagttaatagcacaacccttgcattggtgcaatgaagattaaattaggaggtaagactcttgacatattgactgtgacactgtactcagtaaggattagtactctcatgaaggaatggggaargtgagtagaatgagaagaatatcatttctcattgtagtttatacttctgaaattgattctacacacactgtcacatttacgcctcaatca

SEQ ID NO: 629768 - DNA, 351 bp, Homo sapiens
ccttttcttatagagaaggtatctgaggcttagggatgttgaataatttgcacaggatcatacaggcaggagagatggattcaccaattctctgactctaaatctggagtttcaatggccaccagccactgaggaagctgctagcatgggtctacagctggagaagtactcctcctcagaccatcacctctattggaycaggatcacaagccccaaataaccctagtatatggtagacatggtcagtgctcactgaaaagcccctgttcttcgcagccaatatccactttccttatagagaggttgaagtgagtggcatggagatgtgtaatttccaggccaagaaacaat

SEQ ID NO: 629769 - DNA, 585 bp, Homo sapiens
ttcttgtaattactgttttgactttcaccctctaatgatagaaaattctttccacaaactcctctagtatccaggaaggcaaccgtgcagaatgggcaaggcatgcagtgcctgggggttcagattccagaacacagggtattcctggcagtcagagctcgggggacttggggagagcctctcttctccaggactttgcaacctggggtgcagggctgagatggagaygggggcatctcggagagcagcagacttggggagccaggtaaaggagtgtgaagaaaaagcggcccatctcaagactgtggagtcataatctgtctgtacttgggttactacagtgacaggtgccagggtcaggggtgaatatagaggcttatcagcatgtcaccagtgagaataagttgtcagcaatatcatggcagaagatcaacattacaatttactgacctcttaccctgtatcaggtatttctcatactttattctagttgtccctcaatgatcaatctccccatctttcatttagaaatttaatcctttgagttttagctggttccatgacctctcagccaacgactagatt

SEQ ID NO: 629770 - DNA, 526 bp, Homo sapiens
gggtgaatatagaggcttatcagcatgtcaccagtgagaataagttgtcagcaatatcatggcagaagatcaacattacaatttactgacctcttaccctgtatcaggtatttctcatactttattctagttgtccctcaatgatcaatctccccatctttcatttagaaatttaatcctttgagttttagctggttccatgacctctcagccaamgactagatttcccggattcccttgcagtgaggcatgactgtctaagtttgggccaatgggtgtgagcagaggtgttatgtgcaactttttgcttgcagttttagaaaaaagccggttgccttccacttcctcttgcaccacctactggctaaagcatggccctttttagtgagccatctttgtctctggggttaagggcatcttgaacagcatgttagaaaaagataaaagaagccctgaagaaccttgtgaagtagaacatctctatccccctggctgagattttatgtgcaagagaaacaagcttctt

SEQ ID NO: 629771 - DNA, 526 bp, Homo sapiens
gggtgaatatagaggcttatcagcatgtcaccagtgagaataagttgtcagcaatatcatggcagaagatcaacattacaatttactgacctcttaccctgtatcaggtatttctcatactttattctagttgtccctcaatgatcaatctccccatctttcatttagaaatttaatcctttgagttttagctggttccatgacctctcagccaacgactagatttcccggattcccttgcagtgaggcatgactgtctaagtttgggccaatgggtgtgagcagaggtgttatgtgcaactttttgcttgcagttttagaaaaaagccggttgccttccacttcctcttscaccacctactggctaaagcatggccctttttagtgagccatctttgtctctggggttaagggcatcttgaacagcatgttagaaaaagataaaagaagccctgaagaaccttgtgaagtagaacatctctatccccctggctgagattttatgtgcaagagaaacaagcttctt

SEQ ID NO: 629772 - DNA, 499 bp, Homo sapiens
cttcaaaattcatgtccactgaaaatctctgaatgtaatcttatttggaaacatggttttgcagatgtaattaaaagattgatataagaccacactggattagggtgggctctaaatccaacgaggggctccttaccagacagaaaggacacacaaagacacagaggggaaggccatgtgaagtgggggtggagactgcagtgatgtgtgtccccaggccaaggagtgctgtggagtgctgacagccgccatagctaggagaggagcatggagtggattctctcagagcctccagaaggagccacttcgccaatacctggactgcagacttttagcctgtccaactgtgatagcatatgtttctgtygttttaagtcagcaacaacttgttctctgtgaaaggagttcaacctttatcttgtggtcagtggggacccattgaagggtttgcagtagagaagagatgataacaagaatggctaacatgggttgagtacta

SEQ ID NO: 629773 - DNA, 621 bp, Homo sapiens
actgtgctataactcccccagccccgtgagtatgatgttgaagcatcttttcccattacatgaaggacataagcacagaggtagaagcacacagaggtcagagaggcatcttctcctatcttacctgtgagaagataaaagcccagagaggggaagaatttgtgtcagagtcccacagcaggaaagggtagagaggrcctagaaccttggtatctacaaatgtccttctccaaatatcagcatgcctcacccagtatatggtatttgtgtgaaatgctaatgcctctgtgggcacaactgcatatttagacatccttaagaaggaaaggcagctggaaagtggatctttgcatttcacaaagtatttcagagccaggatgagtgaggattatcttccaagactgtgccttcctagagggaaacccagccatggaaacgctgtggagtagaaagtaagtggttagtgcctaaacaaaagctttgatctatgaaacgattaaccgttgggttcctttaaatagagagtccccatagactgattaaatatggtgttttagaaatctttaacaactggggaaggagagaggaagaggatctgggaaacagagttccattctaggg

SEQ ID NO: 629774 - DNA, 521 bp, Homo sapiens
atgtagggctggcactggtttctcttggaggcaaaggtgtgactggaaacaggctgggatgttcccactgactcaccacaggttactgagagcagttcgtcttgctggaagggactggggattgtttcttcaagtggtatcatgcccatttgagcggggagaaaactcagaatgagaggggagacmatgaagggaaaggaggaattaagctgagcttcccaacctggctgctcattagatcacctggaagtttttttttttaaaaagcccctgcttgggcccaaccccagctcagtggaaccagaaccaaaagctgctcaggaccttttgccggagaggtaccttgtttgcagttaatcctaaagccatgtcagcatgggagcattagtcccaggctggattgaaccaggtccatctgacccccaagttctacaagtacccagaattccagtttaacactctccccacacatcaacagcaaacttcccacctaatcctttccacttccatcctcctgtgat

SEQ ID NO: 629775 - DNA, 633 bp, Homo sapiens
actttcttgttcccgaccttaataagaatacataaaaagtgtcttctttaagcatgatgtttgctgcagggttttgttagctaatttttatgaagttaagaaagctcctagtttccttagagttttttaaaagctcaacttttagtgttgaactttatcagaagttttttgcatccrctcaggagaccctataatttttctcttttattcctttaaatcagggttgacaaaatgtaggctgtagaccaaattgggttgctgcctgtttttcacaatgcttaactggaacagagccacacccatcatttacatattgtttatggctgctttcacactacagtggaagagttgcataaggagacagacaccagctagcccacaaagcctaaatgatttattatctggccttcaacaagaaaaacttgtctaacttctgctttaaagtgatggattacattgatatactatactttctaatactgaactactttcacattactgaaataaatcctttccattcagtctatttttttcattgtagcataaactacttcaggaaattacacaaatcttagatgtacaacttgatgaatttctacatatgtatacacatttaaatatcactcagaccaa

SEQ ID NO: 629776 - DNA, 476 bp, Homo sapiens
tccaagtagaatgcctgcccacctccccacaccgtccttgtcttctctctccttcagataatgactagtaaacatcagaaaggactctgagatgcactgctaatggcgagctgctgatgtgataataaaaagttagactaagggttttgctcacgtgttagaacttttacatccaagaggcattgttcccatccgtgtaattcacttggaaagcttgatacccattccagtcacatcgcgctgtsaaatcactttgggaactcccctttggaagtctgtggcatgtggtcttgaatattggcaaatgtttattctttgagggtaaactgtatctttggaaacacccccaaaggcatttggattgaagtctggagaataggtaagtgaccaaaacacgggactttgctttgggccaaaaaccttttaaaacatctctgtgtagatacttattgcaaacaggtcctagcttctgtgtt

SEQ ID NO: 629777 - DNA, 659 bp, Homo sapiens
acacacacaccacacacccttcccagcctgtagtgcaaactgcgttcatgactttcctccccacgaccacttctgtccccagtctcagcaaatggtgctagcagtaatccaattgtccaaactagaaaccttgggattacagttaacatcctgcacggtcactagtagcccatatggcatctttgtgcaacttagaaaagatcttcttttctcctgatggacataggccatgccagagcacacaatcaggtaagctgggctcacagaaaaatcagcacctactcatttcctgagcagccatcctttgttcaaggcaacatctgcaggactaagtgcagcattcctgttcttccttggyctcagtaccacatcccaaaacattccctaataactattattactgttttctaaacatgctttgaacgtctaaatgtcttgctaatcccaaagttctccttatccaaactactaacctctaacacagagacgatctgaatagccaccttgctgcctctggtcttgcttacctctgtaacctatgatgcagccagaatgaaacttttcaactgcaaatacaaaaagtcatctgtctccttaccaaaatcctggtaatggcttcccattgccctaggaaaaagtagagggtacattcatgggta

SEQ ID NO: 629778 - DNA, 597 bp, Homo sapiens
tctttggttctacagtttagcatatagttgttcagagtttacgcatagtttcatttgttacacttttgtgtccatgggactatatacacttaactagacctggcttgtattgcagtttggaaatacttttaatttttaattttgttgtctagttttttctctttaatgtaatatagcttttagggattttttttatattaccattaaaagtttataggctgggcacggtggctcacacctgcaatcccagcactttgggaggccaaggcgggcggatcacgaggtcaggagatccagactatcctggctaacacggtgaaaccccgtctctactaaatrtacaaaaaattagccgggtgtggtggcgggcacctgtagtcccagctattcgggaggctgaggcaggagaacggcgcgaacccaggaaacggagcttgcagtgggccgagatcgtgccactgcactccagcctgggcgacagagcaagactccatctcaaaaaaaaaaaaaaaaaagtttacatagaatattttaggataaggaaagattggcaaatgtaagtactatagataaaaatctgccataatctgtagttta

SEQ ID NO: 629779 - DNA, 597 bp, Homo sapiens
tctttggttctacagtttagcatatagttgttcagagtttacgcatagtttcatttgttacacttttgtgtccatgggactatatacacttaactagacctggcttgtattgcagtttggaaatacttttaatttttaattttgttgtctagttttttctctttaatgtaatatagcttttagggattttttttatattaccattaaaagtttataggctgggcacggtggctcacacctgcaatcccagcactttgggaggccaaggcgggcggatcacgaggtcaggagatccagactatcctggctaacacggtgaaaccccgtctctactaaatatacaaaaaattagccgggtgtggtggcgggcacctgtagtcccagctaytcgggaggctgaggcaggagaacggcgcgaacccaggaaacggagcttgcagtgggccgagatcgtgccactgcactccagcctgggcgacagagcaagactccatctcaaaaaaaaaaaaaaaaaagtttacatagaatattttaggataaggaaagattggcaaatgtaagtactatagataaaaatctgccataatctgtagttta

SEQ ID NO: 629780 - DNA, 621 bp, Homo sapiens
atgcatatccttttataaaggaaaatgtaaacagcaaaaatttacttraggtttgggaggtagctggaggtaattaaaacatgagatagtaaacaattccaagtttgctatcaggcactaccagcctagggatttatggattgttgcctgcaatagggaaattctcacaggcatctactctccttgagcccttgcttcctactcagttgttaggccctttctatttcctactccttgccccagctgctagcctacaattccctaatttctattaaaatagtacatagagaggttcagttcttcatactttcatccgcccccccatccaaagtggcctctggatgggcctttgcacaaagaaacactcactgaagtgctctgcttaaagaagataaaccattgtggtctccactgttaattacaaaaaagttgccacaaactttgaaattacaataatttttaagatttaatatttttaatctaatacttagtcaggattcagactttctccttccataccccgcatttaaacaccagggttagatcttcctgtcctatacttccacaattctcagctcacacctctcatagatattaccagactgcatttctgcaacgtgt

SEQ ID NO: 629781 - DNA, 621 bp, Homo sapiens
atgcatatccttttataaaggaaaatgtaaacagcaaaaatttacttgaggkttgggaggtagctggaggtaattaaaacatgagatagtaaacaattccaagtttgctatcaggcactaccagcctagggatttatggattgttgcctgcaatagggaaattctcacaggcatctactctccttgagcccttgcttcctactcagttgttaggccctttctatttcctactccttgccccagctgctagcctacaattccctaatttctattaaaatagtacatagagaggttcagttcttcatactttcatccgcccccccatccaaagtggcctctggatgggcctttgcacaaagaaacactcactgaagtgctctgcttaaagaagataaaccattgtggtctccactgttaattacaaaaaagttgccacaaactttgaaattacaataatttttaagatttaatatttttaatctaatacttagtcaggattcagactttctccttccataccccgcatttaaacaccagggttagatcttcctgtcctatacttccacaattctcagctcacacctctcatagatattaccagactgcatttctgcaacgtgt

SEQ ID NO: 629782 - DNA, 528 bp, Homo sapiens
taccgtggcagaactaatttacattcccaccaacagtatataagtattcccttttttccacagcctcaccagcatctattaggttttgagttttttgagttttcttttttgagacagagtctcactctgtcacccagactggagtgctgtggcacaattatggctcactgcagcctcaatctcctgggctcaagtgatcttcctacctcagcatcctgagtagctgagactacaggcacgcaccaccacacctggcaaactttttatttatttttttttkgtaacgataaggtctcacttggttacccagtcaggtctcaaacttctgggctcaagtgatcctcccaaagtgctggaattacaggtgtgagccaccatgcctggcatgagtttttaataatagtcattctgatgggtgtaagatggtatgtcattgtcgctttgatttgcatatcttaatgattagtgatatggagcattttaaatgtttgttggctgcttgtatgtctccttttgagaaatgtctgt

SEQ ID NO: 629783 - DNA, 528 bp, Homo sapiens
taccgtggcagaactaatttacattcccaccaacagtatataagtattcccttttttccacagcctcaccagcatctattaggttttgagttttttgagttttcttttttgagacagagtctcactctgtcacccagactggagtgctgtggcacaattatggctcactgcagcctcaatctcctgggctcaagtgatcttcctacctcagcatcctgagtagctgagactacaggcacgcaccaccacacctggcaaactttttatttatttttttttggtaacgataaggtctcacttkgttacccagtcaggtctcaaacttctgggctcaagtgatcctcccaaagtgctggaattacaggtgtgagccaccatgcctggcatgagtttttaataatagtcattctgatgggtgtaagatggtatgtcattgtcgctttgatttgcatatcttaatgattagtgatatggagcattttaaatgtttgttggctgcttgtatgtctccttttgagaaatgtctgt

SEQ ID NO: 629784 - DNA, 528 bp, Homo sapiens
taccgtggcagaactaatttacattcccaccaacagtatataagtattcccttttttccacagcctcaccagcatctattaggttttgagttttttgagttttcttttttgagacagagtctcactctgtcacccagactggagtgctgtggcacaattatggctcactgcagcctcaatctcctgggctcaagtgatcttcctacctcagcatcctgagtagctgagactacaggcacgcaccaccacacctggcaaactttttatttatttttttttggtaacgataaggtctcacttggttacccagtcaggtctcaaacttctgggctcaagtgatcctcccaaagtgctggaattacaggtgtgagccaccatgcctggcatgagtttttaataatagtcattctgatkggtgtaagatggtatgtcattgtcgctttgatttgcatatcttaatgattagtgatatggagcattttaaatgtttgttggctgcttgtatgtctccttttgagaaatgtctgt

SEQ ID NO: 629785 - DNA, 599 bp, Homo sapiens
tctcttacagtcttctgagagttttttcacctctcttttgctctgtgaagtgtctcattttcatatttaaattctgggatatttctgatggaaagtttggtgtggtgtatttgtttttttgttttcagagattgcagagagtgaagctagtttgcttctatgcttccattttggaaccaccgtctttttgcttttaacatacatatgtcattatatttgaactgagtttcttgtaaaaaaacatatattttggtcttttattttttggttttggttttattctgaaattttctgtattggtgtttttagagaatttatacttatatttgagtttccatcaatcattttgttatttgatttgattgttaactattttttattccatttctcttttctgccttctttttactcattcgaaccttctcagcattccagttttgttaacctagcatgtttttgattatgtcccttaatctaacrttgtaaatggatgctctaggaattaaaatgaaatcacttaactttgacagtttacttagaatcaatatcttaccacttcaagtgagatgtagaaaccttaccagtatataggtccttta

SEQ ID NO: 629786 - DNA, 579 bp, Homo sapiens
aggaggccagtctgagattagggaggtggccaatccataggtctcttcttgtagcctttgatatgttgtttagtgtctgattcataaatataagcttaggggtaagctccagagttcataaacaactctacggggtctttttcatgagttattctctctctgtgatctycttggtatagtagttttcaggtcccgaccttccttgttctggtcctctggccaaagacttgagactttaattacctggtctgctgcacatgcacactttagctgaccatgcccatgtctggagcttagcaccaggaagacaaataattaaactaacaaacaaaacctccaaactgaaaagtagatgtttattctaccatttttggaacacagctatctgatcagagaggatgtttcccctttgctaatggtctgaatgtttgtatacccccaaaattcatgtgttgaaactgaattaccaaaaaagagaaaaagaaacctaattaccaatgtgatgatattagaaagtgaggcctttgggaagtaattaggtcatggaggcagagccctcaagaatgggattagtgcctt

SEQ ID NO: 629787 - DNA, 579 bp, Homo sapiens
aggaggccagtctgagattagggaggtggccaatccataggtctcttcttgtagcctttgatatgttgtttagtgtctgattcataaatataagcttaggggtaagctccagagttcataaacaactctacggggtctttttcatgagttattctctctctgtgatcttcttggtatagtagttttcaggtcccgaccttccttgttctggtcctctggccaaagacttgagactttaattacctggtctgctgcacatgcacactttagctgaccatgcccatgtctggagcttagcaccaggaagacaaataattaaactaacaaacaaaacctccaaactgaaaagtagatgtttattctrccatttttggaacacagctatctgatcagagaggatgtttcccctttgctaatggtctgaatgtttgtatacccccaaaattcatgtgttgaaactgaattaccaaaaaagagaaaaagaaacctaattaccaatgtgatgatattagaaagtgaggcctttgggaagtaattaggtcatggaggcagagccctcaagaatgggattagtgcctt

SEQ ID NO: 629788 - DNA, 579 bp, Homo sapiens
aggaggccagtctgagattagggaggtggccaatccataggtctcttcttgtagcctttgatatgttgtttagtgtctgattcataaatataagcttaggggtaagctccagagttcataaacaactctacggggtctttttcatgagttattctctctctgtgatcttcttggtatagtagttttcaggtcccgaccttccttgttctggtcctctggccaaagacttgagactttaattacctggtctgctgcacatgcacactttagctgaccatgcccatgtctggagcttagcaccaggaagacaaataattaaactaacaaacaaaacctccaaactgaaaagtagatgtttattctaccatttttggaacacagctatctgatcagagaggatgtttcccctttgctaatggtctgaatgtttgtatacccccaawattcatgtgttgaaactgaattaccaaaaaagagaaaaagaaacctaattaccaatgtgatgatattagaaagtgaggcctttgggaagtaattaggtcatggaggcagagccctcaagaatgggattagtgcctt

SEQ ID NO: 629789 - DNA, 616 bp, Homo sapiens
ttgagactttaattacctggtctgctgcacatgcacactttagctgaccatgcccatgtctggagcttagcaccaggaagacaaataattaaactaacaaacaaaacctccaaactgaaaagtagatgtttattctaccatttttggaacacagctatctgatcagagaggatgtttcccctttgctaatggtctgaatgtttgtatacccccaaaattcatgtgttgaaacygaattaccaaaaaagagaaaaagaaacctaattaccaatgtgatgatattagaaagtgaggcctttgggaagtaattaggtcatggaggcagagccctcaagaatgggattagtgcctttatgaaagaggccccagagatctgcattgtcctttcaccatttgagaaggtaccatcaggatcaggaaatgggctcttaccaggcactgagtcggccggtgccttgatcttggactttctagcttccataactgtcagaaaaatatttctgttgtttataagctcccagtctaaggtattttgttgtagcaacctgaacagactaagacagaaaattggtctgaagaaatggattgctgctatattaattacctagaaatatgg

SEQ ID NO: 629790 - DNA, 604 bp, Homo sapiens
agtattttaaataatcttaggtctgatctccctggcatgaccttctgcctctattccccaytgcttctagagttaatgttctcaaaaacaaagccaaccatttcacctctcagctttgtatctggctcccctctgagccaagcagaactttaagaaacaaccaaacagctagctgaaatgccatttctgggtccctttcttagatattttgacttggcttacctggggcgaggtgcagaaatcatctcaaaccagtacccaggtgattctgaggcagatagcttgaggaccaaaagaacactggcttaccagagaaaaccctaagtagatcaggagccaactttgggatgtgttggtttgagatattcagtctggagttcaggggaaaggtctgggctggagatagaaatttggaagtgattggattttgggtggtttatccacagtttggagactggattagataaccaaggaagtaagtatataaacagaagggaagaggaccaaatactcagaatactcagcactggaccctctcatattaaaagctaaaggagaagaacagtttgaaggggagctagtgaggaaaatcaagagagggtcg

SEQ ID NO: 629791 - DNA, 392 bp, Homo sapiens
atctcagagagagtcagtttgcttctgtttttgtgtgtgtgtgtgtgttttttgaggaagggtcttgctctgtcacccaggctggagtgcagtggtgtgatcttggctcactgcaacctccacctcctggactcaagcaatcctcccatctcagcctcctgcacagctgggactacaggcatgcaccaccatgcctgactaattttttcttttttttttkggtagagataggattttttgccatgttgcccaggctggtctcgaactcctgggctcaagcaattggcccgcctcagcctctcaaagtgctaggattacacgcacgagccaccaaacccagccttctgtatttgtgggctctctaggtccccagcccattggatggtaccagc

SEQ ID NO: 629792 - DNA, 392 bp, Homo sapiens
atctcagagagagtcagtttgcttctgtttttgtgtgtgtgtgtgtgttttttgaggaagggtcttgctctgtcacccaggctggagtgcagtggtgtgatcttggctcactgcaacctccacctcctggactcaagcaatcctcccatctcagcctcctgcacagctgggactacaggcatgcaccaccatgcctgactaattttttcttttttttttgggtagagataggattttttgccatgttgcccaggctggtctcgaactcctgggctcaagcaattkgcccgcctcagcctctcaaagtgctaggattacacgcacgagccaccaaacccagccttctgtatttgtgggctctctaggtccccagcccattggatggtaccagc

SEQ ID NO: 629793 - DNA, 568 bp, Homo sapiens
agtgtcttttcatataataacttattttcctctaggtatctaccagatacctagtagtgggattgctggatgaaasagtagttctacttctagtcctttaaggatctccacactgtttaccataggggttttactagtttacattcccaccaacagtgtaaaagtgttccctttttactgcatccacgccaacatctatttttttttattttttgattatggtcattcttgcaggagtgaggtggtatcgcattgtggttttgatttgcatttccctgatcattagtgatgttgagcatttttccatatgcttgctggccatttgtatatcttcttttgagaattgtgtattcatgcccttagcctactttttgacgggattgtttgtttttttctcactgatttgtttgagttctttgtagattcttgatattagtcctttgttgaatgtatggattatgaagattttctctcactctgtgggttgtctgttaactctgccgattatatcttttttttttttttcagatgaaatctcgctctgtcaccaaggccggagtgtggtggg

SEQ ID NO: 629794 - DNA, 482 bp, Homo sapiens
gaattctagtaagagaattatgaagcaagggtcaaggactaggtcttggtctggctctccagacctgggccagtgactggcatataataggtgttccattaaagttaggtgaaatgaaatggcaggcttctgtacagataaccatacagcaatgtaaaactgtgttctgattgaggcacatgcaagactgtgcagagttacagaaaaggcaaatcattttgcttagagagtaaggggaggcttcagaaagggtaatatttgggctgagtagatcttaaagactaagakttccagatgatgtggaggaaaaagggtgtttcatagagagaacagtgtacccatgagtatgatatattatgcaaatggtaagtaactcattatggctcaagaagagagggagtggaatggaggatactttgagggagaatggggctgacaagtttgtttgggacacttgagaacagataatgtcagatagtgaa

SEQ ID NO: 629795 - DNA, 621 bp, Homo sapiens
gatatatccattctgtctgaaagtaactatgacctcaacgaacagttgattttgttgcctaaatattatcatgcttaagacttgagtatactttattataaaacatcaattatcttacaaaatgtaatggattcatttctagtaaaatcatcttaggagatrtattttcaaataattatattattcagattcaccaagaccctatattgctgaaacgagacaggccaataaagatatttattaaattatgatgacaacatctgttttagaaatgtaaattaattatactgaacagaataattatttgatctttagccgttttaggtcttcagttgggacagacccagaagagtgtgtgtgtgtgttcgtgtgtgtgtgtgttctggctgtttctgcaggtgtctctgagagacttcgattagtaaagggtctaggttaggttcactaatgtccacaaaaggatgacagtcaaaccatcagcttttctggtctccagtgtaagagcttcaccttcaaccagtaactgtgaatctacagtcaaggccagacttgatggcaataacaatcacaattgattgcaacaaaatcatcattttaaaaatctgaaaaaaacagcgatta

SEQ ID NO: 629796 - DNA, 621 bp, Homo sapiens
gatatatccattctgtctgaaagtaactatgacctcaacgaacagttgattttgttgcctaaatattatcatgcttaagacttgagtatactttattataaaacatcaattatcttacaaaatgtaatggattcatttctagtaaaatcatcttaggagatatattttcaaataattatattattcagattcaccaagaccctatattgctgaaacgagacaggccaataaagatatttattaaattatgatgacaacatctgttttagaaatgtaaattaattatactgaacagaataattatttgatctttagccgttttaggtcttcagttgggacagacccagaagagtgtgtgtgtgtgttcgtgtgtgtgtgtgttctggctgtttctgcaggtgtctctgagagacttcgattagtaaagggtctaggttaggttcactaatgtccacaaaaggatgacagtcaaaccatcagcttttctggtctccagtgtaakagcttcaccttcaaccagtaactgtgaatctacagtcaaggccagacttgatggcaataacaatcacaattgattgcaacaaaatcatcattttaaaaatctgaaaaaaacagcgatta

SEQ ID NO: 629797 - DNA, 624 bp, Homo sapiens
gagtggaatggaggatactttgagggagaatggggctgacaagtttgtttgggacacttgagaacagataatgtcagatagtgaatatcccacctgaaaatttgaattctgtgctctagatggggggcagggggtaccaagagttattttaaagtacccatagtgacaggacgaaagttcgtctttcagaattataacactaaagcagtatggaggatgaaccagaggtgggaagagtctgcaggcaagaaaaastaaccaggaaagtcacaatgtgacacatgaacaagtgaaaatgagcatagtaaaacccacatatgtaaatgctaagtaggtgtcaattacatgagtcatcaaaatagcctggctttagtcaaagtttatcatttggatttggagccaaatcttattttagagatatttttcccctaatttaacttaaaagtaacagaaacaagatatagactactagttactttaactcatggatttctacacctactgtatatttccatatgtactaaaggtgctagtaacaagatcaatgctacattttccttatgtcataacatatcctttatattactttttggtgtgtttaagtgatacatacatagaatatgg

SEQ ID NO: 629798 - DNA, 583 bp, Homo sapiens
tttttctgcatctttactccttaatcctttgccattctagttctatccatgcccactctacagaatttaacctcttcaaaaaytaaccttcctttgtccaaaagctattttgcactattttttgaaacattatgctcctatgattatgttcaatatttcatgttttctgccttatatccctgaccgtagacataagtattctctatattcaacccttattactcaactctgctctgtcaacattctctttggggacaatgctatttttgcccttgccctaactaagattttgatatgaaccgttcccaaatccctgtctctatatgagatcatgctggagcttttgtcctttttgcaaacaagtttctctaagaaggtataagggacatttttttgtaaaccagatattgatttacacagtgtatatatgttcgcttattcttagaaactatgcactgaagtaattaggagtaaaaagtcatgatttatgcatttggcttcagaaaagaagtacagttgacctttgaacaatatgattttgaactacacaggtccattacatgtaaattttttaaataatcat

SEQ ID NO: 629799 - DNA, 549 bp, Homo sapiens
atatattgtcaggagatcataattcatttgcaaatttattgctttaaggaagttgtgggccactgaaaacaaggaaccagtaagaaaacctacacagccttattttcatataagaaaatttctaaactattataaccacatttcatcagtctaaagatttttaaggaacatgttctctttccttagtccttgaacgtggttgactaactcaactgaaaatttctgcatatgctcagggctctatcaaagcaaaaaaaaagaaaattaagagatgggggtctccctgtgtcacccaggctgaaatgcagtggcccaatcatagctcactgcagccttgaattcctgggctaagagatgctccctacctcagcctccagagtagccaggactacaggtgcacaccaccatgctcagctagtttttatattgtttgtagagacagggtcttgctatgatgtccaggttagtcctaaactgctggccttragtgatcctcccacttcgtcctcctaaagtgtcagaattacaggcataagccaccagacccag

SEQ ID NO: 629800 - DNA, 563 bp, Homo sapiens
agatatggcagcaggcgcctgtgatcccagctactcaggaggcttaggcaggagaatcgcttgaacccgggaggtggaggttgctgtgaactgagatctcgccactgcactccagcttgggtgacagaacacaaaaaactgattttttgggttcaccattccagtaacaactgtgttagataccaataaaatgtgggctttggtaattatgtaatgctaaatgtatctgcaaaggaatatgactttaaagggtatcaagagaggctatatatatacatacacacacacacacatatrtatatatactcacacttgtatatatatacacacatgtatatgtgtgtgtgtgtgtgtataaatatgtttgataggagaaatttgagcttgtttacaagttaagggaatggagtcagtagagagcaagataggatacagaagagataagggatactaattaaatgaggctccagaaagatagaatacatggggtcaaggacagatataaggttggcctcgaatgagatgtgcaggtgcgtgggtgggaagacacctcatttcataga

SEQ ID NO: 629801 - DNA, 597 bp, Homo sapiens
catggggtcaaggacagatataaggttggcctygaatgagatgtgcaggtgcgtgggtgggaagacacctcatttcatagatttcataaatcaaagattaggtaagatatgtgtaggggtttaaagctctatagttgcactgatttacaagggaaggttgcaaatcagtgatatttgaaaagggggtttgaaagtagttcaagtttcaaattgtttcagaaggctggagaaaaaactaaccaagaacacatgaagtagcttataaactgttatgataaggaactaggcttattttatttacagctgtgtccagtactacacatgtaacacactaactgccacatgataaacgccccataaaaccctactgaatgaataacacaacaagcaaagtgaattaatttttttatgatgaacacacctaaaatctactctcagcatattttcaatatataatacaatattatcaactatagtcctcatgccatacgacttattcatcctacataactgcaagtttgtaccctttgacctgcttctccccgttttgtcctccttcctgtgcctggtaaccaccattcttggttctgtaaataa

SEQ ID NO: 629802 - DNA, 580 bp, Homo sapiens
ggcaccacaaatccttaaagatacaaaaatctcccaacaattccatattatgtagaagtctattaatgtctactggtaaataaacaacaatttcatacatgtatcatctatatggcctactgacttctatctatgtatatacgtatactgacaccgtatcttctctaaagtatgrcatcatccagtagtgcgatattaaagataacattggttataattattttcttaactttgtgacagcaaggtagaaatgtatgaaaatgtattaagtctttcaaaataacaataatgctttcaggtatatgatatatctgacaaagagagtttgtatatgcaattaatctatttctatacattgatttagacacagggaaagaagataatataagagatacaacataaagaggctgtttaagtgtggtatacacaatttggacatttagacacatcaaatgaggtaataaatgtgaaaggaatgtataaactgcaaagtgctatgcgattaataatagcgtaatggatgttagtcattcttttctgctgcctgacatctgaaaaactggcctatgtttaggaaatt

SEQ ID NO: 629803 - DNA, 585 bp, Homo sapiens
gctccctggcttcagcctttccaggggagtgaacggttctgtctcaatggcattgcaggtgccactggggtatgaaaaaaaactcctgcagctagctcagtgtctgcccaaagagccaccctgttttgtgcttgaaacccagggaccatgtagtgtaggcacccgagggaatctcctggtttgtgggttgcaaagaccatgggcaaagcatagtatcttggccagatagcaccatccctcacagcacgatccctcatggcttctcttggctaggggagggagttgcccgacccttgtgcttcccgggtgaggtgatgcctcatcctgcttcagcttgctctccatgggctgcactcactgtctaattagtcccaatgagatgaaccggkttcctcagttgcaaatgcagaaatcaccctctttctgtgttggtctcactgggagctgcagaccagagctgttcctattcagccatcttgcccctgctttccaatctccttcttttaattaatgattctttatattagtttcccccctgcaaataaatcatgtggtttcgacacatgatgaggtttctgacaccta

SEQ ID NO: 629804 - DNA, 585 bp, Homo sapiens
gctccctggcttcagcctttccaggggagtgaacggttctgtctcaatggcattgcaggtgccactggggtatgaaaaaaaactcctgcagctagctcagtgtctgcccaaagagccaccctgttttgtgcttgaaacccagggaccatgtagtgtaggcacccgagggaatctcctggtttgtgggttgcaaagaccatgggcaaagcatagtatcttggccagatagcaccatccctcacagcacgatccctcatggcttctcttggctaggggagggagttgcccgacccttgtgcttcccgggtgaggtgatgcctcatcctgcttcagcttgctctccatgggctgcactcactgtctaattagtcccaatgagatgaaccggtttcctcagttgcaaatgcagaaatcaccctctttctgtgttggtctcactgggagctgcagaccagagctgttcctattcagccatcttgcccctgctttccaatctccttcttttaattaatgattctttatattagtttcycccctgcaaataaatcatgtggtttcgacacatgatgaggtttctgacaccta

SEQ ID NO: 629805 - DNA, 594 bp, Homo sapiens
ttaccgaactctcaatttaaaaattgagtgctaagatcaggtacgaatgcctgaagaagctcagattgtccattctagaaatcaacactgtatagttaaaatgtcagcagtcaccttccttttaaatttaaaaaaarcaagagagagagatcagctttttaagaataagtgcttcgtgttaatgcctcagatctggagctccacggcataactctgatgtaagctcattcatgcctgactccctaccttgtttcccctggcttgttccaaactcctaagtaagcagctgattggaattgacaagaatcctgctcaaggagcctcagcaagcacaaatcttttccatttcaatactctggtagctcaaaggaatgagctgccaagggagcagtggaatggaaaatcatgcgtgcattccctctccttccgtgagtatccacattaacagtaaactttggccttcaagtagctccttttaggaggtgttccttaactaggtcgagacaccaccattaccaccatgaacccaatgcatgtgttaggtaattgttccacctacagtggactgaaattagtttcctcattcttttctat

SEQ ID NO: 629806 - DNA, 613 bp, Homo sapiens
tagtctaagactggtgaaggacatctgaaagtcacaatgtgtttttaatacattttccttaccctcgaatctcagttgtgctgctgtgttccctgcagccctcttaacagctgatcatgggctttctctctcctctaactacataaagaatgcctgcatggttaattttataactgagggaaggggaattgtgctgtggtaaaaatgcaactcatcgctcccaaatagttcaaccctctccctccactcatcttgcatataaatttgctaaaaattgtagcactacaataaggattgcatacatgctagacagcttcagaaatcgtagccataaaaaaataagcagtaatcaataatagttttttttaaaaaaaatgcttaacacagttgcagatattacattttctcataaaaataattttggagaaggcgacctacaacttaccctttttgtggcttatgccaaaagtctgcttactactaacttgaggagtcaggtgaaactytgaaaggtgctagggtggggtggggggattatctgaatattcaggcaggctttacaatttatatataacttctttttagtagttcagctgtatctcaggaggaaggt

SEQ ID NO: 629807 - DNA, 598 bp, Homo sapiens
taaatacattttcaatcaatatacctgtttccagccccagaggtcttcttttcaaggaaactggtacctccattcttcaacttttctgatgggttctgtgatttgaattgtttgttctcctttgttctatctctctgttctgatctagccatcagcttcctctgttctgctaaattaaatacctgaaatctctctgcttgactggccccccaattttgttctcctattcccattatgtggggatatgaacatatctcaaccacttatatttcttttttattgtcattttgtaggatattggagaaaatggtggtaaacaaacaaacaaagaattcagttcatcttatttaatgggaagtttaaatgttttaactaaaacaaacaaaagcttacacttactggtctaaagagaacaagaaaaaaatacaaattacttttattggattataaaatcaggctagctttgaatttctcttctgcaattacagattgctttggttmtttgttgttttaaggcctctctaatctaattatattttcttctaaatttattgattaaatgggatcttgagtcaagcccttcgtttccagttaggcc

SEQ ID NO: 629808 - DNA, 594 bp, Homo sapiens
ttattgacacaccattaggttttgttatttaatgcattaataaagaatcaggtatcttatcatatcacaaatttagttttaatactttgaaattgaatttcagttacatgtgtatacatgtgccatgctggtgcgctgcataactggttacttttgttgtctgtgtaatttatttcatacatttaaaagcgtagttctgagaaaagaactacagacttcaccagaatgtttaataggttaaggataccagaaattgttaagcactccagtctagaaggcaggaaagaaattaattaarcaagagattattaaatgacgtgacaagtgaactgatagaggaagaatacgatgttatcaccatacacgcacatagtagttcagagtggtcttctaaggattcatggagaagtcatgccttggctccccctgaaaaacttgtaggagagtatgaaacattcaagaaactgaaggaagtttattacgaaaggaactagagtgtgaatgtgtgatgtggacgtttgggtgcaggagatgaggggtaagagatcatcttaggccaagtgagaaaagacttaaaatagtttgcacttcatt

SEQ ID NO: 629809 - DNA, 594 bp, Homo sapiens
ttattgacacaccattaggttttgttatttaatgcattaataaagaatcaggtatcttatcatatcacaaatttagttttaatactttgaaattgaatttcagttacatgtgtatacatgtgccatgctggtgcgctgcataactggttacttttgttgtctgtgtaatttatttcatacatttaaaagcgtagttctgagaaaagaactacagacttcaccagaatgtttaataggttaaggataccagaaattgttaagcactccagtctagaaggcaggaaagaaattaattaaacaagagattattaaatgacgtgacaagtgaactgatagaggaagaatacgatgttatcaccatacacgcacatagtagttcagagtggtcttctaaggattcatggagaagtcwtgccttggctccccctgaaaaacttgtaggagagtatgaaacattcaagaaactgaaggaagtttattacgaaaggaactagagtgtgaatgtgtgatgtggacgtttgggtgcaggagatgaggggtaagagatcatcttaggccaagtgagaaaagacttaaaatagtttgcacttcatt

SEQ ID NO: 629810 - DNA, 620 bp, Homo sapiens
gttaacaaagggctaaattggcaggcagcctgactgggtccagatgggcagatgcggccacatcaaagagactcatcagtttagtcagtgacccaaagcaaacttataagcccagggcatctgagttctagaggctggtggtgagagaagagagcagaagaacagaaattagcccaaaagaggctggaattcaagaacaagatttcatctgctggtagaacaccaaaagcagagcccgcctgacagtgctggaccaggagatgttgaaacagagcttcctctatgcattcctatttaagaactgaatcaacctctcagatttaaaaccatcagaaataactaagtactyacaatatgaagatgagtagttataccttgataacaaataaaatccaaacacttgattaacctcttcaatgacctagctgtcaagatgtagaaagtattagttaattgaactttgggcacaaaatgaagaaaagattttgaaatgcaaccaagcttaatatcaaaaaagtaatttataactattaaacttctcagtctattttctcacttactcagcaatttagtgaatctattgaaaagttttctggatattgcttactattcagttcaaa

SEQ ID NO: 629811 - DNA, 575 bp, Homo sapiens
gacattgcccacgtgtaattcactttagtattaaatttctaatgttaacttcaaatggacattcaaattcatattgctgagtgctttggacactcaggtgccttatttttctctatcttatgatgagaaattctctataagttgagctaggtcattccttttgaacagttgaaagaatcactgagtagctaatattaccaggtccatgtttttgtgcagatacatgttctatgtagttgagaagactgaacaggactagaacttggcactccatggcacatttagaaactggtaagagaaacaatcactaagaattgaggactgaaatgggagtaatcttcattaacgatgaatatggaagccccacatgtataatgcatctgtaatatttttcaacttaaaaaattaattagaaaaacatttacaactctatagaagaacattatgcattaaatgcacaatcattgttttttgttgagaccaaccaacaaaatacacttcgtttggacatattagtattgatatraatataaatgcatatcacaattatttctctttaccactgtggacagaca

SEQ ID NO: 629812 - DNA, 620 bp, Homo sapiens
tgcttatgtaagcttaaatttcacttcacatcaaaatattatctttagtgtttttcttttaagtaatgtcaacagaaataagataaaagaatttggattgttggarctgcagtgagaaaggggtatgattgactctaataactttccagctgaaaaactgatgcctaaagaggtagagctgctcatggtcacagggcactttaattaaaggcccttcagatccagcaccaaggctgattatgctccaagaacaaaggaggggcgggaggacatacatgacctgtctctgaacactttgaacacttatttgaatatgcattttgcttggcatacataaatgttataattggtgttagactttttatgttcttgatgagttcggagaagataaaaatcaatgggggcttgaatcatcttggaaagctttctcagcagtctgagatctaatataaacctgtaaccattgatgagactctaccctcagtggtcttttataattgcaattccaatggcttggaagcatatgactactatttttgtagatctatagttcatcatatcaaagaattaacatcttaagttgtttttgctgccttttttgccttttggtttttaccagt

SEQ ID NO: 629813 - DNA, 620 bp, Homo sapiens
tgcttatgtaagcttaaatttcacttcacatcaaaatattatctttagtgtttttcttttaagtaatgtcaacagaaataagataaaagaatttggattgttggaactgcagtgagaaaggggtatgattgactctaataactttccagctgaaaaactgatgcctaaagaggtagagctgctcatggtcacagggcactttaattaaaggcccttcagatccagcaccaaggctgattatgctccaagaacaaaggaggggcgggaggacatacatgacctgtctctgaacactttgaacacttatttgaatatgcattttgcttggcatacataaatgttataattggtgttagactttttatgttcttgatgagttcggagaagataaaaatcaatgggggcttgaatcatcttggaaagctttctcagcagtctgagatctaatataaacctgtaaccattgatgagactctaccctcagtggtcttttmtaattgcaattccaatggcttggaagcatatgactactatttttgtagatctatagttcatcatatcaaagaattaacatcttaagttgtttttgctgccttttttgccttttggtttttaccagt

SEQ ID NO: 629814 - DNA, 501 bp, Homo sapiens
atattccctattgtcctttcttgctttattcttacctacagcacattttatctccttatattctattacccttcacttatttaaggtaggctctgttacaacaagacatttgatttgtttatttgctgctgtattctcaggatctagaattgtacctggccaacaggaggtgtttcatatatacttgtcaaatgaaatttgataagtgaatttaaaaatggggaacaataatgatgaaagcaacaaaggactggagcatgtgtgatcactgaatagttatgggggagggtggtcaggagcttctgaggcccgctaatgaatgatcaggaatgcttgktccctaggaaatgcatggaattcatggagtagctgaatttttgtcacttagtaagttgtctatacttgaacaaggaaaatacgtatgttttattttagcatttaacagttagtaaccatataagaagtgtatattatgttattaaagatgcctaaaaaggaggg

SEQ ID NO: 629815 - DNA, 571 bp, Homo sapiens
tcagcatatatacactgagctaacatatagctacctcaaacatgaaatattattcaaaaaattagctttcagattaaayccttagagactttccaccatgaaatcagtaaacattatcagaaaaaaaaagaaagaaaatcatgttgcaaaaacaaaaatctgcttagactcaatatagtgaaccatggatgtttgtaagtgaacaaacaactcgcttgtcttaatcagcaaaagagaaaggataataatttattaaatatgtaaatactactgattaaatatttgaataattaaaatgtgctcagacccattagcaaatatccacagaagtgttcatcctactctctgggtgcaacaatttcataaaatatagtttaaataacaagatacaaggtagacattcctttctcacaggtctcctctccctgtagcagcaagaaattcattacatacatttctattaatttataagtaggatcttactgtaaaattgttccttctatttgaatggactttttatctctactttttatctaagctaaggacatctgctttactttgtcagtgtcta

SEQ ID NO: 629816 - DNA, 630 bp, Homo sapiens
ttttggttttaagggattcaaactattctaacatatgttattagaaaaaatgttactttagtataaaagcaaagaaatatatgcttcaagttttaatgcctttaagattaagattatagtgattattgtaccaagccatattctattctactattacaatttcctaaaacccaaagcacttactgctttcatcacacacaaacacacacgcagaagcagtaagagaaaattattagtagtataatttcrgtaataaatcatggtttaatatagggaattaaacagcatttttattggatagcattctattctgtaatattctaataacagaatgaaggcgtaaggagctttataaatcagaatttatttaactttgaaatcgctggaaatggtctgagaactcaaaaagctgtatacttgtataactttaacaagtaactggagtagttgattatttctgtttcgtgttgtccttcttggtgtacagcccaaatgtttgaaaattgtttttgaaatttgaatacagccaaaaaataacaacacacaattaaattggctgctttatgtctttttactaacatttgactagttcaattattatattctagaaggggaagaaattgtttttac

SEQ ID NO: 629817 - DNA, 545 bp, Homo sapiens
cttatagataaaacccccatttccatgggaaagagcacctgggggaagggacagttgtgggyacagcttcagcagacttaaacgttcctgcttgctggctctgaagagagcagtggatctcccagcacagcactcaagctctgctaagggacagactgcctcctcaagtgggtacatgaaccccatgcctcctgattgggagacacgtcccaggagaattgagagacacctcatacagaagagctccgtctggcatctggcaggtgaccctctgagatgaagtttccagaggaaggaataggcagcaatctgtgctattctgcagcctccactagtgatatccaggaaaagagggtctggagtagacctccaggaaactccagcagacctgcagcagagaggcctgactgttagaaggaaaactgacaaacagaaaggaatagcatcaacatcaacaaaaaggtcatccacacaaaaaccccatcagaaggtcaccaatatcaaagaccaaaggtagataaatccacgaagatgaggaaaaacca

SEQ ID NO: 629818 - DNA, 610 bp, Homo sapiens
tttggtcactgcaagccatatctgcattacagagcaccccaagcctagtaacgttgtggttcttgaagactcgtagaggtaccactttggtggtctcggataagatatggaagaattctctggattaccaggtggagacttttgttctcttcttttactttctcctgaacaaargagtctctctttctttgctgaggtacatgaggctatgggaagggttacacaagcacccctgtggccatcaccactgagattgggctgggtgagacctgaatccagcacagcactgggtctctcccaaggcctgctataactactacctggtcaccacctatgttcgctcaaggccctagagccttaaagccagcaggtggtgaagccagccagtcttgtgaccttcacttcagagcagtgagttccctcatgtccttggctggtccagagataccatctggaagtcagggactgaagttggaaaacttaaaaatctacctgctaaggctaagctagcactcaaaccacaatacaaagtccttcccactttccccaggcaaaatagtctctccctgtgcccaccaccacacaggctcacagggagtactcttaggct

SEQ ID NO: 629819 - DNA, 610 bp, Homo sapiens
tttggtcactgcaagccatatctgcattacagagcaccccaagcctagtaacgttgtggttcttgaagactcgtagaggtaccactttggtggtctcggataagatatggaagaattctctggattaccaggtggagacttttgttctcttcttttactttctcctgaacaaaggagtctctctttctttgctgaggtacatgaggctatgggaagggttacacaagcacccctgtggccatcaccactgagattgggctgggtgagacctgaatccagcacagcactgggtctctcccaaggcctgctataactactacctggtcaccacctatgttcgctcaaggccctagagccttaaagccagcaggtggtgaagccagccagtcttgtgaccttcacttcagagcagtgagttccctcatgtccttggctggtccagagataccrtctggaagtcagggactgaagttggaaaacttaaaaatctacctgctaaggctaagctagcactcaaaccacaatacaaagtccttcccactttccccaggcaaaatagtctctccctgtgcccaccaccacacaggctcacagggagtactcttaggct

SEQ ID NO: 629820 - DNA, 496 bp, Homo sapiens
gggtacatgaaccccatgcctcctgattgggagacacgtcccaggagaattgagagacacctcatacagaagagctccgtctggcatctggcaggtgaccctctgagatgaagtttccagaggaaggaataggcagcaatctgtgctrttctgcagcctccactagtgatatccaggaaaagagggtctggagtagacctccaggaaactccagcagacctgcagcagagaggcctgactgttagaaggaaaactgacaaacagaaaggaatagcatcaacatcaacaaaaaggtcatccacacaaaaaccccatcagaaggtcaccaatatcaaagaccaaaggtagataaatccacgaagatgaggaaaaaccagcacaaaaagactgaaaattccaaaaatcagaatgcttctcctccaaaggatcacaactcctcaccagcaaaggaacaaaactggatggagaatgagtttgatgaattgacagaagaagg

SEQ ID NO: 629821 - DNA, 496 bp, Homo sapiens
gggtacatgaaccccatgcctcctgattgggagacacgtcccaggagaattgagagacacctcatacagaagagctccgtctggcatctggcaggtgaccctctgagatgaagtttccagaggaaggaataggcagcaatctgtgctattctgcagcctccactagtgatatccaggaaaagagggtctggagtagacctccaggaaactccagcagacctgcagcagagaggcctgactgttagaaggaaaactgacaaacagaaaggaatagcatcaacatcaacaaaaaggtcatccacacaaaaaccccatcagaaggtcaccaatatcaaagaccaaaggtagataaatccacgaagatgaggaaaaaccagcacaaaaagactgaaaattccaaaaaycagaatgcttctcctccaaaggatcacaactcctcaccagcaaaggaacaaaactggatggagaatgagtttgatgaattgacagaagaagg

SEQ ID NO: 629822 - DNA, 496 bp, Homo sapiens
gggtacatgaaccccatgcctcctgattgggagacacgtcccaggagaattgagagacacctcatacagaagagctccgtctggcatctggcaggtgaccctctgagatgaagtttccagaggaaggaataggcagcaatctgtgctattctgcagcctccactagtgatatccaggaaaagagggtctggagtagacctccaggaaactccagcagacctgcagcagagaggcctgactgttagaaggaaaactgacaaacagaaaggaatagcatcaacatcaacaaaaaggtcatccacacaaaaaccccatcagaaggtcaccaatatcaaagaccaaaggtagataaatccacgaagatgaggaaaaaccagcacaaaaagactgaaaattccaaaaatcagaatgcttctcctccaaaggatcacaactcctcaccagsaaaggaacaaaactggatggagaatgagtttgatgaattgacagaagaagg

SEQ ID NO: 629823 - DNA, 594 bp, Homo sapiens
tgaataagacacagtccgttctgttgagcagcatacagtctaatgatgataattcaagatctctccaaatgcaacaaggagcaccacacccaactccagcaccattttggaaagatgacagggtaaaataagttagagagagcagagatagagtagagaatagttgtccagctgttaagaaaaactgccgcaagcccgtatcatacccaagccctttctaggtatcacagaataaataataccactcaacataccttccattttgttagcatttacacattccctcattttttaatttaaaatttaaaatttaaaattggatgcctarcgtgcgtcatgtgtgatgttagattccgggaattcagaaatgaccaacatagactcattccatctccttcctgggtgtataatctatcatgtctagagaatgtactgtattacaggactacatgagagacacctaacataaattttggaaggcagggtggggagagatctgggagggctccttaaaggaatctaaactgaggataagttaaaattttctagacaaaaaataagctgaaaattgttctaaccgtggggaacagcgtg

SEQ ID NO: 629824 - DNA, 594 bp, Homo sapiens
tgaataagacacagtccgttctgttgagcagcatacagtctaatgatgataattcaagatctctccaaatgcaacaaggagcaccacacccaactccagcaccattttggaaagatgacagggtaaaataagttagagagagcagagatagagtagagaatagttgtccagctgttaagaaaaactgccgcaagcccgtatcatacccaagccctttctaggtatcacagaataaataataccactcaacataccttccattttgttagcatttacacattccctcattttttaatttaaaatttaaaatttaaaattggatgcctagcgtgcgtcatgtrtgatgttagattccgggaattcagaaatgaccaacatagactcattccatctccttcctgggtgtataatctatcatgtctagagaatgtactgtattacaggactacatgagagacacctaacataaattttggaaggcagggtggggagagatctgggagggctccttaaaggaatctaaactgaggataagttaaaattttctagacaaaaaataagctgaaaattgttctaaccgtggggaacagcgtg

SEQ ID NO: 629825 - DNA, 594 bp, Homo sapiens
tgaataagacacagtccgttctgttgagcagcatacagtctaatgatgataattcaagatctctccaaatgcaacaaggagcaccacacccaactccagcaccattttggaaagatgacagggtaaaataagttagagagagcagagatagagtagagaatagttgtccagctgttaagaaaaactgccgcaagcccgtatcatacccaagccctttctaggtatcacagaataaataataccactcaacataccttccattttgttagcatttacacattccctcattttttaatttaaaatttaaaatttaaaattggatgcctagcgtgcgtcatgtgtgatgttagattccgggaattcagaaatgaccaacatagactcattccatctccttcctgggtgtataatcwatcatgtctagagaatgtactgtattacaggactacatgagagacacctaacataaattttggaaggcagggtggggagagatctgggagggctccttaaaggaatctaaactgaggataagttaaaattttctagacaaaaaataagctgaaaattgttctaaccgtggggaacagcgtg

SEQ ID NO: 629826 - DNA, 635 bp, Homo sapiens
atggcttcatttccctattgcatcactaatcatcaggactccattgcctttcacattcacaattttatcttggggaggctgggggctggaggtaagcttgtaggtttcattaatttcaaggaatacagggagaaaatttatttttgttacatgtaggatctagttgtagtttagtagacaggctcttcataaaatctagtctgtcataagaccacgaaaaatagtccctttatttttccaggtattgaaaggtatattgaggtagtggaagtatgagagttatttacccagtaataaatagattaaatcacattgctcacttagttacataattaaggttgtagtaataggcaaggaacttcagtgacatagaattaaagctggtactggtagacatctgtatacatccatgtaacatctaggtgagttatttcaattgagtacacaagcattttatttaggatgatatctayagagagagttttgttttaaatgaggatgagaaggtagaaaaaaataggatgaggaacaaacttttgaacaaaaaatatataaattacatagtagttatatgtagtataattacaaaaatattttcatttgcatatatttttaaatctggtaattcactttct

SEQ ID NO: 629827 - DNA, 515 bp, Homo sapiens
tgatctaatcacctcccatgaggtccctctcccaacacatggggattacaattcagattacaattcaagatgagatttgggtggggacacagagccagaccatatcaacaactcattctgtttcacctagagcacactctcctgctgggtcactacgtacaactttaagtattgaagaactaacaattgaacattgtcaaaatatctgttcttatattaaatgtcttacaggaattataaactcatcataaatgaaacaacattttaaaactggttttgcagaaattctctaaatgaaaaaaaaaacaaaaaaatacaagttctgctctcttggagtggtgtttgtttgcttgttttatgatggttaaaacttgcagagactcaaaattcctcattaacgttaaaacagttgctgatatacaatgaattcatctttaaatgtaggcaagaatcaccctgattcttattttgtagaggattgaggggaaagcmaaagccctccatataagatgagg

SEQ ID NO: 629828 - DNA, 605 bp, Homo sapiens
tcatttcttgtatcatttttttttatttccttatattggacctcacctttctctggtgcctccttgattaacttaataacaaatttatttttcaggtaaatcagggatttcttcttggtttggtgacctagtgtgatttggcagggagttaaagaaccttgttctgtcatattaccagaattgtttttctggttccttctcatttgggtaagctatgccagagggaaaatctagggctcaaggctgctgttcagatttttttgtcccacagggtgttcccttgacatagaactctcccccttttcctagggatgtggcttcctgagaactgagctgyagtgattgttatctctcttctgaatctagccacccagcaggtctaccaggctctgagctggtactggggattgtctgcacagagtcctgtgaggtgaatcatctgcagatctctcagccatagatactaacatctgctctggtggaggtggtaggggggtgaaatggactttgtgagggtccttaattttggttgtttagtgcactatttttatgctggttggcctcctgccaggaggtggcacttttaggagagtatcagctctggt

SEQ ID NO: 629829 - DNA, 545 bp, Homo sapiens
ccccacttctaccacttgcctcctgccagtgatcactcagcagccccttacctaagagaagacacctctgagagcctactcagtgactgtcatgccatcctatgacctgagactgaggttcactctggttgctgtattttccatactctaccctgggagccatgtgtaccaagaacagtcccctggcttctagcaggacatggctatctatgttttgtgactggtacattggagggtaattagaaatgtggcttaaaaaaatgrgtgagttacatcatgttttcttttaggttggctggatattcagcagagaaaaacaaggtctgctgtcaggaagcttacagtctactagagggaaacagaaaataacaacaagatgagttattatgtaatgtgatggaattaatggtagactcttattaggaatagcaatgcattactgcagtcacatacatcagtgtgaatttacttctccttttctttccaaagggacaactgtctgaacaaaagttttgaatattaggaggagaggagggagagcacag

SEQ ID NO: 629830 - DNA, 545 bp, Homo sapiens
ccccacttctaccacttgcctcctgccagtgatcactcagcagccccttacctaagagaagacacctctgagagcctactcagtgactgtcatgccatcctatgacctgagactgaggttcactctggttgctgtattttccatactctaccctgggagccatgtgtaccaagaacagtcccctggcttctagcaggacatggctatctatgttttgtgactggtacattggagggtaattagaaatgtggcttaaaaaaatgagtgagttacatcatgttttcttttaggttggctggatatkcagcagagaaaaacaaggtctgctgtcaggaagcttacagtctactagagggaaacagaaaataacaacaagatgagttattatgtaatgtgatggaattaatggtagactcttattaggaatagcaatgcattactgcagtcacatacatcagtgtgaatttacttctccttttctttccaaagggacaactgtctgaacaaaagttttgaatattaggaggagaggagggagagcacag

SEQ ID NO: 629831 - DNA, 560 bp, Homo sapiens
agagggtgagaaaaaaaaattttgtgatttgtgttggttgttatgtctgtctttgctcagttatgaagagaaacrtacacacctagagaaaaatttacaaatttacaaacagaaatgaaggaggatagaggaagcccacaattctgcattcacgggattattgtttgggattggctttgtaatctcaaaaaataaaaaacaaaattaagaaaatcttgaaacacaaagactggttaaatatttatttactcttggcactttattctcttaattttggctcctatcattgccaaatatcattgctgctattgagaatagcagcctaattatcttttctttgagaggatttattttttttctctatgtgcttttctcatcttctcttgtcttcattgccctgaaatttgattttggtatgtctaggttatggttttatttatatgtaccctttcttgattttgtgctggtggagttatactcagttattatctctttcaatattgtctctcccaatgttttgtttttatctcttctggaattacaattggagtgttagatct

SEQ ID NO: 629832 - DNA, 455 bp, Homo sapiens
tgccttttggggtaccagctttatgaaaataaagtctgttgttatcttccatactttggttggtcttgcactgtgcctcattttgcctgtacccaaaaaacatgaagaacaaaacttgagttcaacatctttagctgaatttaggccaaaagtggtttctgtgttattttcattcatatgggtttctgtctgcatgtggattttgaagtcagtattctgtatatttcttccattaggttggtggggkttttgtgtgtgtgttttatctagaatttttttttcagagggaaatttggtttggttactaagtctataataactggaaatggaaagcctgtccaaactattttcttctgacaaccacattatctgttttgtttttgttttaatgtgttgtattacatcaaggctgaaactcctttgatggatttctgtttctcttaggataaagctaa

SEQ ID NO: 629833 - DNA, 455 bp, Homo sapiens
tgccttttggggtaccagctttatgaaaataaagtctgttgttatcttccatactttggttggtcttgcactgtgcctcattttgcctgtacccaaaaaacatgaagaacaaaacttgagttcaacatctttagctgaatttaggccaaaagtggtttctgtgttattttcattcatatgggtttctgtctgcatgtggattttgaagtcagtattctgtatatttcttccattaggttggtggggtttttgtgtgtgtgttttatctagaatttttttttcagagggaaatttggtttggttactaagtctatmataactggaaatggaaagcctgtccaaactattttcttctgacaaccacattatctgttttgtttttgttttaatgtgttgtattacatcaaggctgaaactcctttgatggatttctgtttctcttaggataaagctaa

SEQ ID NO: 629834 - DNA, 640 bp, Homo sapiens
attatatgttaatatactaccagattctatttttagtattttgtataactcagtaattttatttacattttatactgaggtaactgcttaagacatgccaactgatatgtttttctttcactacattacacgtcaatattaaaattgtggaatcagagtacacttctctttctttgtgtgccacaagccttagatttttggtttttggtgctgttggccttttacctcttcccaagtaagagctgccgtaacggaaattagccttacctttacctggcaataaccttgactctctcttttcagccctgtgccttcactaatgatgtcttttgcttactaatgattgcaggggctgtggtggggcttcaggaaatgatttattcccccttttgtgccaagaacctcaaaaatgactsaaagattcttaccacaatttgatagtggtagactccaaaccgagtagggtgtaggacagaaatctgagtatagaaattttaatctatctaaaatgtcgccaagaaccaaataaaacccattatcactgtgcagaccttccaagcatatcctcgtggagataatctcaccttcttaatgcacaagcttcccttggaggccccatctgccctgcatttccgggctg

SEQ ID NO: 629835 - DNA, 573 bp, Homo sapiens
ccctagtattaaaacattgcattagaattatatctaaagacccaacttcctgaccaataaagaaatcttgcaacatttcagctggtggtctcccagcctcttcatggacacctacaaagccaggaaatctggatgatatttaatagttctaagagctgataattcttaaaaaatgaatgctcttaggaataatatacttacyaccatggaaaacaattgagcgtagtggctaagaaggcaagctatggaatccaactgcctgggttcaaatcttgacctctaccctatgaaactctcctagtccctaaatcaccatcactgcagcatactctaaaggctacaaataaagattactgagatcatcttacattttgctcaggaagcatttgaggcaggaaggatgaaaacaggcacagaattattgtttattagataccagtgctttcagattaaaaaaacaatttctcctatacttattcaccttctcattctacatcagtgatgtaaagttccttttctcttcctctgaaaacttgaagccagtccagccagatgtaggagaagttgtgtttc

SEQ ID NO: 629836 - DNA, 594 bp, Homo sapiens
ttccctatctacaaaaataacagagaatagggcagtgatagagttattggtaggcaagtgctttattacgtgtataggtttgtctcagatactaaactttaaaaaatacattttataaggagcttcttgtttctattcatgtctatttgtatcactggatttcccaggtaaatgactcgagatttcattrtttggaaattccttactatattgaaaccttgggagaacaaaacactggttatatatctgggtcatgggattattgtgacttctattttctactttagatttttttctgcttctttgtagcaagcaggtattaacttaatgatcagaaaatgtcacaagaaagaagaaatggaaccttctcaagcatttcttggaactctgtctgtaatgtacgcaaagatgatgatatctgcccttctgatacaaggccccatggagctctagaccatgtgtactcccagaaaatttattcactggttgagttcatgagatctttcttaaaagaaatgctcctatcctgggatccatttttttctctcttacttaccctattcttccccctccccactttttctttgttttgga

SEQ ID NO: 629837 - DNA, 588 bp, Homo sapiens
aaatgaacttaagtagtctacagcaaaagagcctggtggtggagaacactgacattggaatccgacacttagttttaaatcatgcctctgttatttattagctgtcagaaaaccggcaagcttcttaacaactctatgctttggttcaaatagggataatcatatacctatttaaaggattatatgaggattcactaaaacattatctacagatattattaattataattattagtccccccttcatcattctttccagttcatttgwtctgcaaacaaacagtcctgctgcagaatgtagcttcaatccagctgctggcaagaggtatctttccagctcccagggtgcctcatgcaggtatttttatggttactgcagaacacattaacaagtaatagtgctgttttcctctgaaactacatctcaaagtgagaatggtactcgttctgccttaagcttagatcaatgtggacaccacttccagtattgatgattgcaaaagtgagtcttagattctcattgcctgctaacgaagatatattctgtaagtatgcaagtccttctgtatagttcttttcaaattctta

SEQ ID NO: 629838 - DNA, 610 bp, Homo sapiens
tgtctctgactttaaagagaaaattaaagccagctaatggtaattcctgatacactctcccaccaaactcacatagttatggagtccacacagtattctttattatttgtctgttaaataagacatattgccttcctgcctaaggataaactctctgtccgtactcctgtacctcctttcatttccrtaggtgacttgctttcctgctttaccagtcccttgcctctttcaatttatggcccatcaggatttaattatgcttaaatgtctcccctatcttaagaataataaattctctccaaaataatacacttccagctgctataatgtggttttctgtatctattatcacttcttcacctttcattcatgcttaaaccctctataatctggcctcagctcctcaacttcattgagactggttttcaagttcaccaatgatgttcaaagtcacttttccattcaaatatttccttaactttaagtgctaaacaacccttctcccatcctgaaactgatatggacaggaggcaggaaatactaggcagaaaaggggaggggtccctggcgaagccccaccctcaagcctgaatccatggcccaaagtgag

SEQ ID NO: 629839 - DNA, 550 bp, Homo sapiens
cattcatgcttaaaccctctataatctggcctcagctcctcaacttcattgagactggttttcaagttcaccaatgatgttcaaagtcacttttccattcaaatatttccttaactttaagtgctaaacaacccttctcccatcctgaaactgatatggacaggaggcaggaaatactaggcagaaaaggggaggggtccctggcgaagccccaccctcaagcctgaatccatggcccaaagtgagaacatgcattcctgttttcctgctcaaatgttrctttttggcctgccttaccctccatcatgtacccccaaaaacctgaggctctactggcagagggacagcaaagtggctgagtggcagagtggagcagcagagaaagagagaaaagaagaagcagccagatgtcagagagaagcagcttgacttcagagggatggcttatcaacaggactttggagaagactttggccagggatgtccaaactccaggggaagaccaccctcccactccatcccctttccagctcgccataccactgagaac

SEQ ID NO: 629840 - DNA, 587 bp, Homo sapiens
gaaaggacatagcaaaaaaagaaaactacagaccaatatccctgattaacatataatagatgcaaaaatccctaacaaaatactagcraaccgaatccagcagcatatcaaaaagataacccatcatgatcaagtgggtttgatactagggatgcagggatgctttaacatacgtaagtccataaatgtgatactccatataaacagaattaaaaacaaaaaaatcatgttcatctcaatagatgcagaaaaagcatttgacaaaatccagcatcgctttatgattaaaaccctcagcaaaattggcatacaagggatatacctcaatgtaataaaagccatctatgacaaacccacagccaacattatacttattggggaaaagttgaaagcattccctctgagaactggaacaagacagggatgcccactttttgtccagaacaatcggacaagagaaagaaataaaggacatccaaatcagtaaaaaggaagtcaaattttcgctttttgctgatgatatgattgcataactagaaaaccctaaagactcatccaagaagctcctagaactggtaaatgaattc

SEQ ID NO: 629841 - DNA, 587 bp, Homo sapiens
gaaaggacatagcaaaaaaagaaaactacagaccaatatccctgattaacatataatagatgcaaaaatccctaacaaaatactagcgaaccgaatccagcagcatatcaaaaagataacccatcatgatcaagtgggtttgatactagggatgcagggatgctttaacatacrtaagtccataaatgtgatactccatataaacagaattaaaaacaaaaaaatcatgttcatctcaatagatgcagaaaaagcatttgacaaaatccagcatcgctttatgattaaaaccctcagcaaaattggcatacaagggatatacctcaatgtaataaaagccatctatgacaaacccacagccaacattatacttattggggaaaagttgaaagcattccctctgagaactggaacaagacagggatgcccactttttgtccagaacaatcggacaagagaaagaaataaaggacatccaaatcagtaaaaaggaagtcaaattttcgctttttgctgatgatatgattgcataactagaaaaccctaaagactcatccaagaagctcctagaactggtaaatgaattc

SEQ ID NO: 629842 - DNA, 524 bp, Homo sapiens
aatagttgaaagcaaacatttctcactgttctataggactacaatttagtcttatatatgcctagcagctaagtgctgtgggaatgatttcctctgctattttgaggcctcacatctggaaaaggggctttggtcagttggagaccctgaaagaagcacctgcctctttaggaagtttttcaactcattgtaaagtgactggtaacaagagagcattataagcaaaatgtcctyattgggactccttctttatggcaagaaaattcatcactggtctgggaattcattacttttgctatttcttttgagacaaaacttgagggagaataataatccctgagtgtaaatattcatgcttaggcacctttaaccagatagtcaaactgtacagaggcactcaacagagtatctaaaactccattttagtatatccgtctttcataaactgataagactacactgtcttttttctccatggtatctacgaaactcaaagggaacagtatagtgtatatgggtggaga

SEQ ID NO: 629843 - DNA, 539 bp, Homo sapiens
attcatgcttaggcacctttaaccagatagtcaaactgtacagaggcactcaacagagtatctaaaactccattttagtatatccgtctttcataaactgataagactacactgtcttttttctccatggtatctacgaaactcaaagggaacagtatagtgtatrtgggtggagagttgtgacatcattcattattcattcattcatttatttaccaaatatttgggggcaacctaccacatgctagatattgtacttgatgctggggttagaacataagtaacacaaatccaatcctagtgcttgcatcttggggcatctagtctgtctaggtataagagcactaggcagaaaatcacacgaataattagaattgtgataaatcctctacagaaaatgtaaagggtgctataagagtgtgtactgggggaaataatttagtctggagagtgaggtgtcaagaaaagctttcctttttaaactgggcaccaaagaaagaatgggtggagataacaaggatgaggtgggagaagaattc

SEQ ID NO: 629844 - DNA, 539 bp, Homo sapiens
attcatgcttaggcacctttaaccagatagtcaaactgtacagaggcactcaacagagtatctaaaactccattttagtatatccgtctttcataaactgataagactacactgtcttttttctccatggtatctacgaaactcaaagggaacagtatagtgtatatgggtggagagttgtgacatcattcattattcattcattcatttatttaccaaatatttgggggcaacctaccacatgctagatattgtacttgatgctggggttagaacataagtaacacaaatccaatcctagtgcttgcatcttggggcwtctagtctgtctaggtataagagcactaggcagaaaatcacacgaataattagaattgtgataaatcctctacagaaaatgtaaagggtgctataagagtgtgtactgggggaaataatttagtctggagagtgaggtgtcaagaaaagctttcctttttaaactgggcaccaaagaaagaatgggtggagataacaaggatgaggtgggagaagaattc

SEQ ID NO: 629845 - DNA, 539 bp, Homo sapiens
attcatgcttaggcacctttaaccagatagtcaaactgtacagaggcactcaacagagtatctaaaactccattttagtatatccgtctttcataaactgataagactacactgtcttttttctccatggtatctacgaaactcaaagggaacagtatagtgtatatgggtggagagttgtgacatcattcattattcattcattcatttatttaccaaatatttgggggcaacctaccacatgctagatattgtacttgatgctggggttagaacataagtaacacaaatccaatcctagtgcttgcatcttggggcatctagtctgtctaggtatragagcactaggcagaaaatcacacgaataattagaattgtgataaatcctctacagaaaatgtaaagggtgctataagagtgtgtactgggggaaataatttagtctggagagtgaggtgtcaagaaaagctttcctttttaaactgggcaccaaagaaagaatgggtggagataacaaggatgaggtgggagaagaattc

SEQ ID NO: 629846 - DNA, 539 bp, Homo sapiens
attcatgcttaggcacctttaaccagatagtcaaactgtacagaggcactcaacagagtatctaaaactccattttagtatatccgtctttcataaactgataagactacactgtcttttttctccatggtatctacgaaactcaaagggaacagtatagtgtatatgggtggagagttgtgacatcattcattattcattcattcatttatttaccaaatatttgggggcaacctaccacatgctagatattgtacttgatgctggggttagaacataagtaacacaaatccaatcctagtgcttgcatcttggggcatctagtctgtctaggtataagagcactaggcagaaaatcacacgaataattagaattgtgatmaatcctctacagaaaatgtaaagggtgctataagagtgtgtactgggggaaataatttagtctggagagtgaggtgtcaagaaaagctttcctttttaaactgggcaccaaagaaagaatgggtggagataacaaggatgaggtgggagaagaattc

SEQ ID NO: 629847 - DNA, 615 bp, Homo sapiens
tcagggtaggaggaagggaagctcagggatgatttttaagttctgtgtcataaataaatatatagggaacaattttctatgttagggaacacaggcaaagaagaacatttggcagcagggcagaaaataactgtaaattgaatttcagccgtaatgcatttgaagtttctaagatgtatttatgtggaaaagatgtaaaaatatttggatttgggaaaatgaaatgcagaatcaaactctgagaaaaaatatatacatctagaaatgatctggcatttatttattaaacttttaacttgggtgtttcttctcaagactctaatgcggacrtaaagaagtataagacaatatttaagaagtaaaaatgcaatgatacaacccataaaagtagttagagttttgagaccataaagactctatactaataaaggcattgtgagtatttatttcatctctgcataactggttcagaggaaaatctgtaagatgaaatgaggctgaaggcaggcaaggtgatgatcaaaagattccaagtcttcaatttgtagtcttttgataactgaattgttgctggcaaatattttcagtttccaaatattttagccaatttttaaa

SEQ ID NO: 629848 - DNA, 583 bp, Homo sapiens
gtccccacatcctgacactccctcactatccttagcctctggtaaccatccttctactatctccatgagttcaattgttttaatttttatctcctacaaatgagtgagaacatttgaagttgtttttctgtgcctggcttattttaacataatgacctccagttccatccatgttggtgcaaatgactggacctcattcttttttatgtctgaatggtgctacatgtgtataggtaccatattttctttatccattcttctgttgatggatacttargctgttttccaatgttggctattgtgcatagtgctgagagtgcagatatctcttccatatactgattttcttccttttgtgtatatagcaatgagattgctggatcatatggtagctctatttttagttttttgagttttccatagtggttgtactactttacattgccaccaacagtgtatgagggttcccttttttccacatccttgccagcatttgttattgcctgtcttttggataaaagccattttaactggggtaaaatgaaatcccattgcagttttgatttgcacttcactgataatc

SEQ ID NO: 629849 - DNA, 508 bp, Homo sapiens
ctcggggaggtgggtaaaatttagggtttcattattacaaaactgaataattaaatgcacatacacgggtttacatgacgtttgtcactcaaagttcttgtaaaagaagtgtaaatggctcacggtattcaaatgctctaaagttgtaggtaagagcagatgtggtggatgtgtatagacaattggcaaaatgatcagatgtgaacttgatgtttgtattcaggyttcctgaccgtggatgtacaccagaattgcccacaggctttaaaactactgtttccagggctcacctcagactagtggatttgaatgttttttggttccaggtttgcattttcagaaagctatgcaggtgcttctaatgcttgaccagaactgagagctgtgccctagggatttatttcaaagttgatctatgccagatctggaatatatacaggagtgagtattccaacccacgcttcaattgtctgtcctccaaaggtttgaggggtcagttcctcaatat

SEQ ID NO: 629850 - DNA, 606 bp, Homo sapiens
atgtgggaccaaaaaaaaaaggactgccagttctgctgcttcaaagaagggttacaagatgyagtcacttactaataactaagggaaattgcctctcctcactttgatgttttgtgactttcatggcccttcacagagactttctaggtcactatgctctcctcttccttctgaactgccctaatccttggttacttaagtatctctgtgagtcagattttaacgataagcaattttattttttgccagagaaaagattttctgagataattctaatcatgtgagggtagtattagtaaatttttgggaattgtctgggaaaacagtctcttttgaaagcattccagttagtgtccaggataagtgaatatttgctatttattatatgcccagcagagtcttgggatacatacttttaaaagacatggttttcccaacatgatcagcttgtaaactcctacaggaggatgcccaatcttctccatttgtctgggaccgaggggtttcctggggtgcagaactttcatgcaaaaccaagaaagtcattagcaaattgagacaagtcggttatcctacaggcaaggagaagacaagttaatgcaacaa

SEQ ID NO: 629851 - DNA, 606 bp, Homo sapiens
atgtgggaccaaaaaaaaaaggactgccagttctgctgcttcaaagaagggttacaagatgtagtcacttactaataactaagggaaattgcctctcctcactttgatgttttgtgactttcatggcccttcacagagactttctaggtcactatgctctcctcttccttctgaactgccctaatccttggttacttaagtatctctgtgagtcagattttaacrataagcaattttattttttgccagagaaaagattttctgagataattctaatcatgtgagggtagtattagtaaatttttgggaattgtctgggaaaacagtctcttttgaaagcattccagttagtgtccaggataagtgaatatttgctatttattatatgcccagcagagtcttgggatacatacttttaaaagacatggttttcccaacatgatcagcttgtaaactcctacaggaggatgcccaatcttctccatttgtctgggaccgaggggtttcctggggtgcagaactttcatgcaaaaccaagaaagtcattagcaaattgagacaagtcggttatcctacaggcaaggagaagacaagttaatgcaacaa

SEQ ID NO: 629852 - DNA, 573 bp, Homo sapiens
aatatccataatgaaggtagaaagtgctagtaacttgtttctcaagttgtacaaaagggttttatagtatcatattccttccaaatcaaacacattaccacagttacatgtagtgtgtaatacctgtgctcctgatacagggccmaaggggtttggaggtctcatgacaggctggctgtatattaaggttggttgcgtcattacaggaacacttcccatttgtggaggctaaaaaagagaaaaatatcaaaagatactgactcctatcttccttattgtgactaagtaaataacaatgacaacagggatgacaggtcctagtacctttgcttgactcaaagggtaacttcctctgaatataagtaagactaacagctacaaactttcgagagtatttttttttcttttggtaagtaaagtctttaacatgctcatttttaaaatgtagtaacaaagcctaactttttcgattcaatgagttgcaaaatgtaaactttattgtattacaacagataaaatgatttagactaagagtttccaaatttatcaggtttagacatcaagaaaacttaa

SEQ ID NO: 629853 - DNA, 532 bp, Homo sapiens
ctgcaccgtgatctttatgtatgtattagagaaaataaatgtatttttcactaacatgcctaatgcatgaatttactgtatcttaatttgaaggaaatctttttgtcaatgtcatttaaaacctaagattagctaattttattttccaatttttccctaggttaatagcaatgaacttacaaatggggtaataaatgctgccttcatgctcctgttcaaagatgccattagactgtttgcagcatacaatgaaggaattattaatttgttgggtaaatactgctgtagcctaataacatttcttatcttgtgtcatatggataaacmatattgactgagttgttacttaaagctggctaaaaatttattatgatatattcattcattgtaacagttaatttggagaaaagagttttatacctaattacttctgcaagtgattacatatttttatacccaggatgttcagcaagatgaactttattttttagatgtatctatgttttttccacccattttattaatttttaga

SEQ ID NO: 629854 - DNA, 640 bp, Homo sapiens
cagccttgtgctattcactcgatagtcagttttataaaaacttgagatgttatttacatttcttaatgctgtgtctttgatacttgccttttcagacattctcattttacaagtgcttctacttctatcaacctgtgtcaacttttttataacatcrctgttctctgtgagacagggatgagaaacagcagtatccacattttacaggttaggaaaacagacaggtggaagttgaatgagtagtcttggaaatggattgcagatttgtgactgctgcccagttctcttgaccccaatcccccagcaaggactagatcacagtccccagcccagacgtgtttctatttcaattaaaggttgatgttagcaaccagaaaatttcaaagttttttggtggggaggtcatttatttacagaaatgattttaaagactgcatgtctaccaaagaaataatagtgtttttaaaattatcacatccctttaaaccattcccctcccctttcctcattctcttcctgacctagaatttgtcaagaaggtctgtccggtgcatagacagagagaagtcctggacttggacagggccctagagtgggaaagaagacaatttgtgtaggtgtaaatcctgcctaagcagca

SEQ ID NO: 629855 - DNA, 640 bp, Homo sapiens
cagccttgtgctattcactcgatagtcagttttataaaaacttgagatgttatttacatttcttaatgctgtgtctttgatacttgccttttcagacattctcattttacaagtgcttctacttctatcaacctgtgtcaacttttttataacatcgctgttctctgtgagacagggatgagaaayagcagtatccacattttacaggttaggaaaacagacaggtggaagttgaatgagtagtcttggaaatggattgcagatttgtgactgctgcccagttctcttgaccccaatcccccagcaaggactagatcacagtccccagcccagacgtgtttctatttcaattaaaggttgatgttagcaaccagaaaatttcaaagttttttggtggggaggtcatttatttacagaaatgattttaaagactgcatgtctaccaaagaaataatagtgtttttaaaattatcacatccctttaaaccattcccctcccctttcctcattctcttcctgacctagaatttgtcaagaaggtctgtccggtgcatagacagagagaagtcctggacttggacagggccctagagtgggaaagaagacaatttgtgtaggtgtaaatcctgcctaagcagca

SEQ ID NO: 629856 - DNA, 640 bp, Homo sapiens
cagccttgtgctattcactcgatagtcagttttataaaaacttgagatgttatttacatttcttaatgctgtgtctttgatacttgccttttcagacattctcattttacaagtgcttctacttctatcaacctgtgtcaacttttttataacatcgctgttctctgtgagacagggatgagaaacagcagtatccacattttacaggttaggaaaacagacaggtggaagttgaatgagtagtcttggaaatggattgcagatttgtgactgctgcccagttctcttgaccccaatcccccagcaaggactagatcacagtccccagcccagacgtgtttctrtttcaattaaaggttgatgttagcaaccagaaaatttcaaagttttttggtggggaggtcatttatttacagaaatgattttaaagactgcatgtctaccaaagaaataatagtgtttttaaaattatcacatccctttaaaccattcccctcccctttcctcattctcttcctgacctagaatttgtcaagaaggtctgtccggtgcatagacagagagaagtcctggacttggacagggccctagagtgggaaagaagacaatttgtgtaggtgtaaatcctgcctaagcagca

SEQ ID NO: 629857 - DNA, 412 bp, Homo sapiens
tcaggaatttacaatctaaatgatcaacatgttaacagagaaaataagaatagaaatgattccctactgtacgtacttttactttgtgacccaaaacaggacttcaaatattctaagtattgaaaagcataaaaacagatttgtagaaawatttttcagtggtgtcagcagcccaattacatctcatgttttcctcatcatagtgctcgcattccttttcatccaggatttggagctacaggggcagctccctcaagcacagtctgctcaaaggatgaataatttcatagtgcactcccactaaacagtgcattattcctttaatgaaacaataaggcctcacaaaaataaagcaaaacgatcaggacaacagacctggctattaccaatttccttcgctcctcggtggtat

SEQ ID NO: 629858 - DNA, 544 bp, Homo sapiens
agcagcaacaaatatttacttgaaaactgcctgaaaacagactatagagcacttaggaatacacaaactgagtayaaatacagtataaataagtatgtgaccctctggatatatgtcaatgtggcttgagaaaaatgtaacatagacttttgtctaagcagggaaaaatgctgaattacttagtgtacacactgtatactgatccatattacacacatcttcctcctgaggtagcaactacatcactattaaactgttcccaccaattagcaaaagcttatatacatggtccaggcacaaaacctttgtaaaattttgtatttccaaagaaacaaatttgaagtgcagataaagcatgcatggcagttaaatgttgcagaggaccaagaaggcacaatctgtaatttgttaaacagtaaactatacaagttgttcagataagtaaataaatatatatacaaatagaaattattttttagaatagccctataaatttgcatatgttaataaatcacttagaaataggtgacatgcattgcaaaga

SEQ ID NO: 629859 - DNA, 527 bp, Homo sapiens
tgtaatttgttaaacagtaaactatacaagttgttcagataagtaaataaatatatatacaaatagaaattattttttagaatagccctataaatttgcatatgttaataaatcacttagaaataggtgacatgcattgcaaagaattttggttaaaatcctaataaaagtaggaaatataaccacgaacacagttaccagatttaacaagggcataaaatagagaaatttaagaaaagcttaccaaaactaggttatggataggtttttcttaaacaagaaatctgtcttaggatttgtatagcattcaatatctactaagtgtttcaatgattaattttatcggcaagcctaccttatggataagcaaactaaagctctaaaggattaartaaatttcttaagatcacaggaaaagttggaacaagaggtcttgattaatccttaagatataatcatttaatcattaacgcactcaacaaatatttgactacttggtatgctgggcttatgataaaaaaaagata

SEQ ID NO: 629860 - DNA, 595 bp, Homo sapiens
tttaaagatttggttcagggccagggccagtttctttctagtaaacctagatatctttatcactaccagggaattttcaagttcctggtttggtttcaagactsctgggaaaaccttacagctggcaaggacacagggtggtcaaggcactctgatttttggtcaggacacagaaaaaaaaagtgaggggaactggggaaccctgcaggagttttattcagaatatataagaaatctaacatattaataataaagtgacacatgcaattaaaaatgcatgggagttttaatcagactcttcacaaagacatatatatggccaataaacacatttaaaaagtacttaacattattagttatcgagaaaataaaattcttataaggcaccactaaaaaaaatccactaaaatcattaatgttaataagactgacaacaccaaacattgatgaggagctagaacatctggaaggctcatacaatatcaaattgctcacagttcaatatttattcaccctatgacttctacatatttgcccaagataaatgaaaacataaataccccaaaaaagcttgctcaagaattcataacagctt

SEQ ID NO: 629861 - DNA, 595 bp, Homo sapiens
tttaaagatttggttcagggccagggccagtttctttctagtaaacctagatatctttatcactaccagggaattttcaagttcctggtttggtttcaagactgctgggaaaaccttacagctggcaaggwcacagggtggtcaaggcactctgatttttggtcaggacacagaaaaaaaaagtgaggggaactggggaaccctgcaggagttttattcagaatatataagaaatctaacatattaataataaagtgacacatgcaattaaaaatgcatgggagttttaatcagactcttcacaaagacatatatatggccaataaacacatttaaaaagtacttaacattattagttatcgagaaaataaaattcttataaggcaccactaaaaaaaatccactaaaatcattaatgttaataagactgacaacaccaaacattgatgaggagctagaacatctggaaggctcatacaatatcaaattgctcacagttcaatatttattcaccctatgacttctacatatttgcccaagataaatgaaaacataaataccccaaaaaagcttgctcaagaattcataacagctt

SEQ ID NO: 629862 - DNA, 425 bp, Homo sapiens
ctgtgctgcactgatgtgatccagacagaatgcaggtctacaatccattgcaatttcagtaactaagactgagaaatgcctaacggtttctcacttccagtttattcaattcttgggaaaactggttagctattaattttcaatacccaaagacctctgattttaaggttgtacacttatacatataatcctgcgtcaaccatggcatgacattgacttcagtattttgcaacttcttcttttgttgraaattactggtttttacacagactcataacaagtgaaaagttgatctctttcccatgcttttagttccaatttgactgcttcacaatgggaacacagtttattgttagatttatattcattcttttctctattctgatagtttagtcaaatattgcaggccacttgtgcttgctata

SEQ ID NO: 629863 - DNA, 445 bp, Homo sapiens
gtgtgacttaatttgaatccagttttaaggtatgtcagtaagaggaatcaaaggaagaaatatttcaattttatacctgtctttaaaraaaagtatttctccacggagtgtggtgatagcatcaaatgtcaaactggggtcacagggtttgggtgtgcttggtccagtaggttggatagggttgcttgaaagtcctggaaaaaaaaaaaaaaaaaaaaaaggtctttcttatgagagtaagtccggtgtgactcttgggtacatcagagacttctcagaaaggtgaagggtcttcatgtgaaggtaagtgctaccagactataccataaagtattaaagtaattgtatatttcatccttttaaagtttttgtttctttaataagagtaatgatggttttcagggtaagttccaggtcaagctgtgaagtaaagaaatttgaattc

SEQ ID NO: 629864 - DNA, 411 bp, Homo sapiens
acttaatttgaatccagttttaaggtatgtcagtaagaggaatcaaaggaagaaatatttcaattttatacctgtctttaaagaaaagtatttctccacggagtgtggtgatagcatcaaatgtcaaactggggtcacagggtttgggtgtgcttggtccagtaggttggatagggttgcttgaaagtcctggaaaaaaaaaaaaaaaaaaaaaaggtctttcttatgagagtaagtccggtgtgactcttgggtacatcagagacttctcaraaaggtgaagggtcttcatgtgaaggtaagtgctaccagactataccataaagtattaaagtaattgtatatttcatccttttaaagtttttgtttctttaataagagtaatgatggttttcagggtaagttccaggt

SEQ ID NO: 629865 - DNA, 579 bp, Homo sapiens
ccacggtatgtgggggatgccaagcctrccttgaagaatctcacagagtttgctttcctacagcaactggggatgcctggccttttgagattctagcttcactgccacttgctcgccattggtgatatcgatggccagataaaggtcccagaaggagccagacctgatcttccttactagtttatatttccctcaaacaataaattcggccttggatccgctgctgctcgccatcctaagagatgaagacagaggctgaggccaagtccagacgcctctgagaggaggacggaggcctctggggctcctccacggcggaaggtggcaggaaacgggacatggaacacggaggcctccctcatattcgcggcccggaatcagctgacggggaacctgatcaccgctgctcagtcaggtttcttgttgccaggctgcggtttgtgaaagggttcttgcagttacaaggctgggccacttgtttctgggcggcgccactgccttgctgtctcagctatgtgcaggctggaaaaaggggtgcggtgagctagagcagggataccattgccaccactgccagca

SEQ ID NO: 629866 - DNA, 568 bp, Homo sapiens
tatcaccataaagagtggcataatgaaaagagacctgaaatagggaacagaagaccaataactgctctgctaccaatgagctctatgcccccaaaagatctctttccttctctctgacttactttgctaatctgtaaaaaaagatcatacatactgattttcwaaatcaactatattttctgagaatcagttgacctaatacatgtagaaaaacaaagttgttacaagtacattatgttgcacaaatgcatgtggttgctaccatgtgattatagatgtaaatcagcatgaaataagtaacatgtgaagcataatagttaatcatagtggtgaatgttgttattattacaaatgcagatcacaaagaagaactgacatcttacctgtctttaaagaacatcacttctccccgaatcgtagttatagcatcaaaggttagcttactgtcacacgcttttggggtttgtgggccgatgggctggacaggattttgggaacgtcctaaggaaaataaaagacctagagttagtttgcctagtattagaaaactacatagacaatgaagaca

SEQ ID NO: 629867 - DNA, 504 bp, Homo sapiens
atgcataaaaaagggtgtctcataagggatgaggatcacatcacacaggcaaagtgctactctacagtcaggagactgtcttcttgtttttacaaaaaaattaggactaacattaattgacttctcttgaggtatttgttgcatcagtgcagttcctcttttttatcctcttcactactgtagaaaaggcttatttattctgctgaacaaacagaagcacagagaattaaggaattttccaagtgatgattcagattttaactcaccatgttgcctctcaaatgagaactgataatttcaaaataatttcaaatatcttttaggggaacagcaatatcattgatattagcattttattcaccaaagtaactctttggaagtgttaaatttagtcaaaatccaaagagtttagcctaaaaattacctattttaagtttggcttaaaagtttcttcatacayagtgaaatgtaacctaactagacctcatgctgcctgtgaacacc

SEQ ID NO: 629868 - DNA, 351 bp, Homo sapiens
cactttcagactgtgaaacaatggaaaaaaactattggttctgcttttataatgcttccaagagtttataaacagtccacaatctgatgctgggaaatatgattttactgtgtactgatttctagttcattgtaatctaccatcctcacattattttctatatctggaatttttggcggcaaagaaaatgcctgtatggaagcaccagacatatagyaacttgattgcagatatcctggaaggaaaaaccttaggtaaatgagaaagaaaatgataccattttataaataaaaccatttcttctacaaaagtttcccaactaggggtaactctacagcagtattttcccag

SEQ ID NO: 629869 - DNA, 568 bp, Homo sapiens
tatcaccataaagagtggcataatgaaaagagacctgaaatagggaacagaagaccaataactgctctgctaccaatgagctctatgcccccaaaagatctctttccttctctctgacttactttgctaatctgtaaaaaaagatcatacatactgattttcaaaatcaactatattttctgagaatcagttgacctaatacatgtagaaaaacaaagttgttacaagtacattatgttgcacaaatgcatgtggttgctaccatgtgattatagatgtaaatcagcatgaaataagtaacatgtgaagcataatagttaatcatagtggtgaatgttgttattattacaaatgcagatcacaaagaagaactgacatcttacctgtctttaaagaacatcacttctccccgaatcgtagttatagcatcaaaggttagcttactgtcacaygcttttggggtttgtgggccgatgggctggacaggattttgggaacgtcctaaggaaaataaaagacctagagttagtttgcctagtattagaaaactacatagacaatgaagaca

SEQ ID NO: 629870 - DNA, 531 bp, Homo sapiens
ctctctcccccaaaaatcaaatcagtcatttacacttcagtgcgaacaggagttgttcgccygttgagtagatatcttgctagaaaaaacaaacaagccaacaaagttttaaaaatgaaggtattgttcattataacatgagtttcagggcaagttaagaagaagaaagaaatttagtttgcccagaaaactcacaaggcaatgtaggctctttctgcctctctattactagcctccctcctgccccttcggcagcagcctattctcataaggataaggatattcttataaggataaggatatagatgtgggttctacagcaacatagcaggtgtatttttatagttcagttttgctttctaggcccgaggagatgacacagattgcatagatatagtctatttgttttttagttataaaataaaggatgagttgaaccagctggggtgagcacatgtgcctgaatcttgaatgatgagtaggagttgccaatggggaatgtgatccagtagaaggaacagcgtccgctaa

SEQ ID NO: 629871 - DNA, 531 bp, Homo sapiens
ctctctcccccaaaaatcaaatcagtcatttacacttcagtgcgaacaggagttgttcgcctgttgagtagatatcttgctagaaaaaacaaacaagccaacaaagttttaaaaatgaaggtattgttcattataacatgagtttcagggcaagttaagaagawgaaagaaatttagtttgcccagaaaactcacaaggcaatgtaggctctttctgcctctctattactagcctccctcctgccccttcggcagcagcctattctcataaggataaggatattcttataaggataaggatatagatgtgggttctacagcaacatagcaggtgtatttttatagttcagttttgctttctaggcccgaggagatgacacagattgcatagatatagtctatttgttttttagttataaaataaaggatgagttgaaccagctggggtgagcacatgtgcctgaatcttgaatgatgagtaggagttgccaatggggaatgtgatccagtagaaggaacagcgtccgctaa

SEQ ID NO: 629872 - DNA, 607 bp, Homo sapiens
tggacttgtatttagttccattagcttatgtctctgctcctgcgtaagttttgcaccactggggtcacagaggttttgtaaaatgtcttaatatttggtgggactctctccttctttgttctttgtcaaaattcttagctcctagtgtgtatttttttttttataaataaaagccttgcaatcaattttcctttcccaaatactgccattggaatttagttaaaattgcttcccatttacaaattaattttggaaaaattgtcatctttagagtattaggtcattccatacatgaagatcatattctatttttcttatatgtctgtaatagagtcttaaattctcatttttaaggggttgttctgtytttgctatgttatttcctaaagaggtaattgattttgctgtggctattaatattttgttttctatgtttgatctacttgtttattgtgcatatatagacatgtaaatgattttgatgtgttgatgtacttggaaacattacaatttttctcatcttaagagttttgattcttttgaggttttctatgtaaattatcaaattatctacaaataattataatttggactcttcccttttgat

SEQ ID NO: 629873 - DNA, 580 bp, Homo sapiens
tgtccctactattagttattgtgaagtaagaacttcatagtagagcaatttttgtagagcaagatttgcatactgttacaagtctacaatttgtggagacaagtttggatgttgttcctttagttcactctcacctccaactggaaaaagagagcgtatgcatggctagatacattttgggtggagggtgctgtttctagcaaaaaaaaaaaaaatctctttataagaaacctatccttaaaaaactctattacattactgcagaaaaatacaaactaaaaatttacattattgtcacaygcaatgcagcatttacctggactaagtccacatcttgctcttgtgtttctagagtcgctgggaagctgtgagacaccacaccccagaacagcagcagcagcagtggaggaaagctgtgcatactggcctttgtcttctttctcagtgcaaggtaagtgatggcttcccagcctcttgctgctccaatatcccagctaggaagctccctctgtatatatagagtccttgcccttccagaaagccagaggctgtctgactcatgctttataacatcctcttg

SEQ ID NO: 629874 - DNA, 507 bp, Homo sapiens
agaacactcctattcaccctcttcaccctactttgtcttcttagttcctgctgagcctccagttctcaggcttgacatagcttcctctgctgacctgtgggtctgggttggactttcttctgtgaggacctattacattgccatagtttcctktatctcagtactgatcctactgattttagttgccatttaattgtctatgtgtcccttagacagtgaagccctggagggcagcttctgtgtcctatatacaagggtatatttcatttttatgacagagcctgagtcatagtggatgttcaataaatgatcattgagtgactttatttaccaatgatttgtagagtatttctcatgtgacaacactgttattggccatatgacgctgtaggtaaaagatgacaaaagtctctgtctcatggagatgtgactaaatagacaaatttgtgcattatacattcatagcttttcaaatatttttccttatgcctagaatgtaattccacc

SEQ ID NO: 629875 - DNA, 507 bp, Homo sapiens
agaacactcctattcaccctcttcaccctactttgtcttcttagttcctgctgagcctccagttctcaggcttgacatagcttcctctgctgacctgtgggtctgggttggactttcttctgtgaggacctattacattgccatagtttcctttatctcagtactgatcctactgattttagttgccatttaattgtctatgtgtcccttagacagtgaagccctggagggcagcttctgtgtcctatatacaagggtatatttcatttttatgacagagcctgagtcatagtggatgttcaatamatgatcattgagtgactttatttaccaatgatttgtagagtatttctcatgtgacaacactgttattggccatatgacgctgtaggtaaaagatgacaaaagtctctgtctcatggagatgtgactaaatagacaaatttgtgcattatacattcatagcttttcaaatatttttccttatgcctagaatgtaattccacc

SEQ ID NO: 629876 - DNA, 563 bp, Homo sapiens
attggatttaagagacaaaaggatagtgaaatctttgatctctgcctctagctatgaaagtaaagcctggctgagcaaggggagtcattctgattttggcaagtgctaggatatttcctgtaactgtttgrtgaaacacacccgcagtgtcttcagactaataccaaagaaatattgaaacatgtctcagcagaagatacacaacagacatggttcattcctttcctctcttgcttgggtgacaatgttatcttacctccttcaatttcttgtctgcttgtgatgctaagtcatgtggcaatggcagcagccaatcccagattttgcctgctgctgcctgaacctcagccagtactgactttcgcccttttcactggcacttggaaaaacagttgcatcacctgttctgactgagcagtgagtggccatggaccattttgtgtgacagacttttagtttcacagaaagtgcaaagctgatctagaccgattatctggagatacatggtcgggaatgatctgtgtccttgtatactatccatcaggaccactacaacctgtgct

SEQ ID NO: 629877 - DNA, 563 bp, Homo sapiens
attggatttaagagacaaaaggatagtgaaatctttgatctctgcctctagctatgaaagtaaagcctggctgagcaaggggagtcattctgattttggcaagtgctaggatatttcctgtaactgtttggtgaaacacacccgcagtgtcttcagactaataccaaagaaatattgaaacatgtctcagcagaagatacacaacagrcatggttcattcctttcctctcttgcttgggtgacaatgttatcttacctccttcaatttcttgtctgcttgtgatgctaagtcatgtggcaatggcagcagccaatcccagattttgcctgctgctgcctgaacctcagccagtactgactttcgcccttttcactggcacttggaaaaacagttgcatcacctgttctgactgagcagtgagtggccatggaccattttgtgtgacagacttttagtttcacagaaagtgcaaagctgatctagaccgattatctggagatacatggtcgggaatgatctgtgtccttgtatactatccatcaggaccactacaacctgtgct

SEQ ID NO: 629878 - DNA, 576 bp, Homo sapiens
gactgagcagtgagtggccatggaccattttgtgtgacagacttttagtttcacagaaagtgcaaagctgatctagaccgattatctggagatacatggtcgggaatgatctgtgtccttgtatactatccatcaggaccactacaacctgtgctttcctgtgactctggaagctagacaccagacccaaggtaactattgccaatgacagaacaaaagaatgggggacccaaaaatctattgagcttgctcttttctttgaggcctacattgctacctgttaatatagtacagtttgatatttttgtcrgaacagtagtaaaacaccttgaatgccaggcagacccattgagaaaaataaaataaacttacttggtttgaagaaataagtcaaatataaggattaaggtctgattcctttgcagctgggcaagagttagaagaggaagttcatgctttgaattagagcctctatgggctatgaatccatatactgtcctttaattgctaactcaaaattaccacctccctagagtcttctttcaatcctcaagcaacagatgacttctgccactg

SEQ ID NO: 629879 - DNA, 586 bp, Homo sapiens
gtattttttttcatacatatagggattagggctccaaattgtagattgggtcctcctggttgtcttgaaatgcttttatagtgatctccataccttgcagggctctctcctttctcctcgcactaaacatcccttcatttgtgaccattgctaaaagttatagcagatcctttccccctccctgtgccagccctcctccccaacacaatttcctgatatcgtcagagatagacaaatgaaaagcagttccttctcacaaaaaagttcaggactcttttgcaggaatgtgttttctttttaggtcccaagagaatcaataaaataagctttttatcaatagtcatcgatatcatttattaagacagtacctgagccagttgcatattttcttcattttccrtcatccggactaagggaaatgcagaagaaaatgttataaagaacaaaaacagaagcagaaggcgcttcattcctctctttcttcagctgaagccggttctgttagcacagaatttagaaaataatagtgagacgtggcatgaattggcttgtatcatcatttaattaataacagaaagggacactt

SEQ ID NO: 629880 - DNA, 637 bp, Homo sapiens
gttagcacaaggtctttcagtaatctaaactttaatataatggataaaactcatgtcaataaaatttttgcmataggatttattccagcaagttgaaattcttatatagtactcacctttaaaaataaaaacggtgtccctgctgttaacttcatatgcagcatccaaatatgatggaagagagggccaaaatgcagaaatcaaatgaaattcaggttcagggttccagtgggatcttcgccaaaaatatctgtaatacataaaattacttgcaattgtctttctcttttagatatgtgaaaaaaaaattctttttttttaaatccatgctaattcacccattcatagaagtctgtattaaaccatcctcctgcatgtgattccagggtaatgaaatcgatggcaggacttgtgactggttccagtaaaattatttagcttggttccattctaaaagtccataaacagtgtgcatattatgtcctaatattttaaaaaatattatgtgtatattgatgcttgtatatgagtagaacatttttgtaaagagtcaaaggaaattggtagcagtggttgcacatatgaagggagctggaggacggtaggccaaagactggagagagattttttaactccg

SEQ ID NO: 629881 - DNA, 523 bp, Homo sapiens
tttccagcatcactcaccgtagagagactgaatgccattcacatcatcttgcgaaaggcggaactgggcgagctctgtgaatgagttgtagagtgggtacatcaaagcttcagtgttggctgagtgaaagagccccagggagtggccaagttcatgagcagcaacgaggaataaattggtgcctgtatgaaaatcataaatgttcagaattcaccagctctttcttccataaatacacatacagaacatatgccagctgtacaggccatccttgaaaccacaatgtcttttcagtatttgtggattggttcattgattggcacattccatactttatagaaattaatgtgtttttcaaggttgactttaagtcaatatataagacagtttttcaccgtatccctccctagatccctccttggtcaggaaaactaagacacttttcctatattgacaaatgagaagcattattttccaaagatttttttttgaaaggacmagactaatagcatgtcagtaaata

SEQ ID NO: 629882 - DNA, 500 bp, Homo sapiens
aaaaacttcaacagagaaagaaaataggaggtactagtgagaaatatattttacagtctacatatttattgtataataagctatattatattctaataacagcaaatataacattataatgattttgatatctggactcgctagacttggtcccataaatcctatagttcttaacaaaaaaacccatccgttagcaaacttacacatctaagctcagtttaatgcaacttaatgagacattgaattttatgcagctaacccaagttatctatagtgtgtgccctcctgagtaccccaggaaatagaagtaaagaactgacgaacatcagatccaactggcccatttgggtttggactctaggagagagcaaggaggaggcaggagaggaagtggtggttctcttttggcwgctgtcctgggaagatgcccagtagtccttagcaagggttctacttctgcattctgtgttgattcattttcatatgtgtagatgtactgt

SEQ ID NO: 629883 - DNA, 644 bp, Homo sapiens
aaggcttactttccttctctttgatggaatcactaatgtaagatggaatgtgtaagaactgaataagcctctgcaaatagtggaatattccaaacatattttcacggaggacaggtagaatggatacagtgatgggaaacaatgacttaatattgagaaaagtataagcaggacacaatgtaacgaaaatgcwtgctgaacttcccttcaacattctgaaagtggatacagccacatttgattttgcttcagccatatctacagttaagccatttattgcctcttgcaactctggtaactctctgagcaataagatcaaatgcgtaatatcttggtccactgaagacatggaagaaatctataaaaaaagagagataatttattgaattagcttatagaatatctcagatgtcttcagttagaaaaccctgcccctgttccaacataacattcaaatgcaaacatgctatttaaaaaatttaaacaccaggtgcggtggctaatgcctgtaatcccagaactctgggaggctgaggtgggaggattgcttgaggccaggagtttgacactaacctggtcagcatagtaagaccctgtctcctctataataaacaaaccaacaacacatttattaggtttttttt

SEQ ID NO: 629884 - DNA, 644 bp, Homo sapiens
aaggcttactttccttctctttgatggaatcactaatgtaagatggaatgtgtaagaactgaataagcctctgcaaatagtggaatattccaaacatattttcacggaggacaggtagaatggatacagtgatgggaaacaatgacttaatattgagaaaagtataagcaggacacaatgtaacgaaaatgcttgctgaacttcccttcaacattctgaaagtggatacagccacatttgattttgcttcagccatatctacagttaagccatttattgcctcttgcaactctggtaactctctgagcaataagatcaaatgcgtaatatcttggtccactgaagacatggaagaaatctataaaaaaagagagataatttattgaattagcttatagaatatctcagaygtcttcagttagaaaaccctgcccctgttccaacataacattcaaatgcaaacatgctatttaaaaaatttaaacaccaggtgcggtggctaatgcctgtaatcccagaactctgggaggctgaggtgggaggattgcttgaggccaggagtttgacactaacctggtcagcatagtaagaccctgtctcctctataataaacaaaccaacaacacatttattaggtttttttt

SEQ ID NO: 629885 - DNA, 568 bp, Homo sapiens
ccctgttgccctcctcactagttcggatgatcattacctcttacctgaacgaatgatctagattcctaactggactctccatctccagtatgtgctccctctaatttttcctaccattgcagcagggtttgtttttggaagcccatcttggatcacatcactctcatgcttaaaagtttcaatgtttacacattctgcaccaaataaggtccaaatacttccacttggtattgaaggctcttggtgcttgttcatccttgtctttcttggcttgtcttcttatttcacgtattccattcacatcgggctaacacccacattgtacattcactgtttctaggtcacaccctatgcttttyatcttcctcacatttgcttgaattgcttcctctccctgaaatactcttcccatgccccacgcaccaccttttaaaatctctctcatcttgccatgctatgtatgtcaaaggccaccttctgtcttgccttgtcctggaaatgagaacttcctctgcagaattctgacagcttttgtatctccttctctgtcatcactcactgtgtgctt

SEQ ID NO: 629886 - DNA, 568 bp, Homo sapiens
ccctgttgccctcctcactagttcggatgatcattacctcttacctgaacgaatgatctagattcctaactggactctccatctccagtatgtgctccctctaatttttcctaccattgcagcagggtttgtttttggaagcccatcttggatcacatcactctcatgcttaaaagtttcaatgtttacacattctgcaccaaataaggtccaaatacttccacttggtattgaaggctcttggtgcttgttcatccttgtctttcttggcttgtcttcttatttcacgtattccattcacatcgggctaacacccacattgtacattcactgtttctaggtcacaccctatgcttttcatcttcctcacatttgcttgaattgcttcctctccctgaaatactcttcccatgccccamgcaccaccttttaaaatctctctcatcttgccatgctatgtatgtcaaaggccaccttctgtcttgccttgtcctggaaatgagaacttcctctgcagaattctgacagcttttgtatctccttctctgtcatcactcactgtgtgctt

SEQ ID NO: 629887 - DNA, 568 bp, Homo sapiens
ccctgttgccctcctcactagttcggatgatcattacctcttacctgaacgaatgatctagattcctaactggactctccatctccagtatgtgctccctctaatttttcctaccattgcagcagggtttgtttttggaagcccatcttggatcacatcactctcatgcttaaaagtttcaatgtttacacattctgcaccaaataaggtccaaatacttccacttggtattgaaggctcttggtgcttgttcatccttgtctttcttggcttgtcttcttatttcacgtattccattcacatcgggctaacacccacattgtacattcactgtttctaggtcacaccctatgcttttcatcttcctcacatttgcttgaattgcttcctctccctgaaatactcttcccatgccccacrcaccaccttttaaaatctctctcatcttgccatgctatgtatgtcaaaggccaccttctgtcttgccttgtcctggaaatgagaacttcctctgcagaattctgacagcttttgtatctccttctctgtcatcactcactgtgtgctt

SEQ ID NO: 629888 - DNA, 571 bp, Homo sapiens
tcgggctaacacccacattgtacattcactgtttctaggtcacaccctatgcttttcatcttcctcacatttgcttgaattgcttcctctccctgaaatactcttcccatgccccacgcaccaccttttaaaatctctctcatcttgccatgctatgtatgtcaaaggccaccttctgtcttgccttgtcctggaaatgagaacttcctctgcagaattctgacagcttttgtatctccttctctgtcatcactcactgtgtgctttcaagttgtttgcacacatctctcctcttctagactatgcactccctgtagagcagagaaccacaacaaattgcccacagttcctttcacggtattccaagcattcaaagatatttttctgaaatgcactcatgaatgcataattaaaaggatgtgatgataagaaacaattcttagagcatgrgtagaattttagcaggctaattatcaacaggaagttgaacattgcagtaagagcatggatcttgccattatacctgggtttgaccccaatctgtcacttactagttgagggaccaagtacc

SEQ ID NO: 629889 - DNA, 604 bp, Homo sapiens
ctgaattatgtatgttgattttgcatcctgcaactttactgaatttatcagatctaatagttttttggtggagtctttagatttttccaaatataagattaaatcatctgcaaacaagaataattcamcttcttcctttgcaacttagatactctatatctttttcttgtatgattgctctagctaagacttctggtaccatgttgaataacagtggtgaaagtgggtatccttgtcatgttccagatctaagagaaaaggctttcagttttgccccattcagtatggtactagctgtgggcctgtcattttactatttattgcctgtcttcccctgctacagtggaagctccatcaggatgtgtggcagggagaggggtgggggatttgctatgtattattgttttgtctgtttattttactaatataatgcaaaatccaagtaagtacttaataaaagtttttaaataaattaacacagaattgatgctggattccagaaaagatggaaagttaataaaaaggtatatagtcagtttgaccagctcctgaaaaatttcttggcttcgtcttcattagtgcagaggctagaatattacagaca

SEQ ID NO: 629890 - DNA, 606 bp, Homo sapiens
tgtcttcaagttcatcccagtgggtggggagaggtccccaaacacctgtgggactgcggccccagccagtgtccacgttcttgacaccgtcgagagaatgaattcaaggacaagcaagaaaatagtgaaagtacagagatttattgcaaagcaaatagtacatactcaagaaaggggagtgtgggtgtactcaagcgagtcacacagtggagtttggggtttccacctttatgggtttctttaaccagggggtggaatattcatgaaaattcctggaaaaaggtgaagatttctcagaattgtagtgccacccatttttacaccaaatatgggtgttcctgaaactgkcatggggctggtgcgagtgtgatgtgtatgttaatgaatgcataatgaggtcctaagtgaaacctaggtcaaatccagcaccatgttgtgtccggttggtcttagccagcttggtccaaaactttggttttcagagtcttgtcaatccctagcttctgtagctatttcaagttttcttttgctagtcatgtaaaactgctgcctggaattttctattctcctgtgaccaccctgtattattcctgtgtcaaagcttgt

SEQ ID NO: 629891 - DNA, 608 bp, Homo sapiens
ttgtactgcaccttgttagaatggccaacagtatcacaatgactatatttattcatttattaaagacaaggtcttgctttgtcacctaacctggagtgtagtggcacaatcatggctcactgcagcctcgacctcctggactcaagccatcctcccacctcagcctcccaagtagctagggactactggcatccaccatcacacccagcatttttttttaactttttgtagagacaggactcatcatgttccccaggctggtctcaaactcttggctcaagggatccccccaccttgccttcccaaagtgttgggattacaggtgtgagccaccatgcctagccatgatgacttcataaaaagcgtrtggatgcttacattctctgtgctctgtaacggtgcaaatggaattggagttatctctttactactgccttgacataactcacctatgaatcatctgcacctggggcttttggggagtagcttgttgcctacttgccagagagatcatgtcattcccattttaagactcttcagtagcttcccactgctcctagaataaaatctgtactccttcccagggccttcaaggccctgcataacct

SEQ ID NO: 629892 - DNA, 499 bp, Homo sapiens
  misc_feature 484, 485, 486, 487, 488, 489, 490, 491, 492, 493, 494, 495,496, 497, 498, 499: n = A,T,C or G
gtggtttttaacaaatgcatagtatcaagtagacagcactataataccataggaattagttctactgccctagaaagctcccagtgcttcctcagccataggctccctacagctgatatgcttttttgtccctatatgttatccttttccagaatgtcataggagtgaaatcatacagtatgtagccttttkggtctggcttctttggcttagcaaaatgcacttaagattcatccatgctattgtgtgaatttacagctcagttatctgtatttctgaataggattccattgtatggattgaaccacaggtttttaaaacatccattcacctattgaaggacatcttggttgcttccagtttttggtgattatgaataaagtggccataaacattcatgtacaggttttcatatagactagttttccaatcagtagagtaaatacctaagagcacagttgctcagttgtgtagtaagtctatnnnnnnnnnnnnnnnn

SEQ ID NO: 629893 - DNA, 518 bp, Homo sapiens
atctatcctattagttctgttcctctagagaaccctgactaatacatcctccaggctcctccatgttgctgcaaagacattcaacttctgaacatactttttggaaagagagagacaacctgtgtagactcagaatttattggtgcagatttgacaccagaggagaagagtgctcaaggagcatataaactagtaaaatgtgaaaagcatyaagcatagaactttgggaaattccatgcgttttctttcttaaaacttttttcatcatagttattttattttttcagtaaagaaaatttgagatagaaaaagatagaaaaaattacttatatatctaaacataaccattattaaaatgcttttgtatggattcttctagcattttttcctacacataaagttttttaaaagttctatctccatttgaaatggagtagacaataacataagggacaggtagaataagaggaacctctgaagataattggaaggaggccagagcagaagctgttagagaa

SEQ ID NO: 629894 - DNA, 545 bp, Homo sapiens
gaaagaaaaccattttgactgttagtaccatcaacatgactgtgattgaaagcccttttatttgataactgggggtcttcactgatcttaggtagaacaattttatggaaaagatgattgtttggctcagtttaatttcagagttacttaaaactgtaggccatttttattaagctatgctttaagcataaataacacaaataaytgaaactactaaaggcctactggagaacccatataacaaagactataaagaagatgaaaaaactacaaatctttgccagaaaaatcaggaaaaaacccaaataacccataataccagctaatcatttcattcttctcattggctcagtttttctgggtgatatttgaagtctctgtatatgttctcagggggagaacattattttgaggatccttcatcacataaaaacatgaatagtgtttttcatgtaaattcaaactgtcagattaaaaaaataatgtgggccaggctaggtggctcatgcctataatcccagcactttggaggttggggtgggagg

SEQ ID NO: 629895 - DNA, 564 bp, Homo sapiens
atatacgaatgacagtcaagccaagagcaaaatcagaaacaaactcctattcacaactgccacaaaaagattaaaatgcctgggaatacagctaactagggaagtgaaagatctctacaaggagaactamacaccactgctcaaagatatcagagatggtctgggcatggtggctcatgcctgtaatcccagcactttgggaggccaaggcaggcagattatctgaggtcaggagtttgagaccagcctggccaacatggcgaaaccccatctctgctaaaagttcaaaaatttgtcaggggtggtggtgcacgcctataatcccagctacttgggaggctgaggcaggagaattgcttggaaccaggaggcagaagttgcaatgagccaggagatggtgccactgctctccggcctaggcaacagagtgagactctgtctccaaatcaaagatgacacaaacaaatggacaaacattccatgctcatggataggaagaatcaatatcattaaaatggccatacactgaactagagaaaactagaagtctgtatgaaaccaaaa

SEQ ID NO: 629896 - DNA, 598 bp, Homo sapiens
aagttctggccaggaaaataagacaagagaaagaaataaagggcgttcaaataggaagaaaagaagtctaactatccttatttgcagatgacatggtcctatatctagaaaaccccataggttcagcccaaaagcttcttacactgataagcatcttcagcaaagtctcaggatacaaaatcattgtgcaaaatttatgcatttctatatacgaatgacagtcaagccaagagcaaaatcagaaacaaactcctattcacaactgccacaaaaagattaaaatgcctgggaatacagctaactagggaagtgaaagatctctacaaggagaactacacaccactgctcaaagatatcagagatggkctgggcatggtggctcatgcctgtaatcccagcactttgggaggccaaggcaggcagattatctgaggtcaggagtttgagaccagcctggccaacatggcgaaaccccatctctgctaaaagttcaaaaatttgtcaggggtggtggtgcacgcctataatcccagctacttgggaggctgaggcaggagaattgcttggaaccaggaggcagaagttgcaatgagccagg

SEQ ID NO: 629897 - DNA, 582 bp, Homo sapiens
atatacaccatggaatatcatgcagccaaaagggaatgagatcatgccctttgcagggatgtggatagagagggaggctgttctccttagcaaagtaacacaagaacagaaaactactgcatgytcccccttttaagtgggagctaaatggtgagaatacatggacatgttggagggaacaacacccactgggaccttttggagaatggagggtgggagaagggagaggatcaagagaaacaacgaatgggtaccaggcttaattcctggttgatgaaataatctgtacaacaaacccccatgacacaagtttacttatgtaacaaacctgcacttgcacccctgaacttaaaataaaagttaaaaaaagtctgaaagatcacagattaacaagctaatcttacgtctcaaggagccagggaaacaagaacaaactaaacctaaaggtagcagaagaaaagaaataacaaatattagagcagaactaaatgaaattaatacaaacaaagaaataatgaaaaagattttataaataatgaaacaaaaagtggttatttaaaaagataaacaaaactgacaggc

SEQ ID NO: 629898 - DNA, 542 bp, Homo sapiens
tgtaacaaacctgcacttgcacccctgaacttaaaataaaagttaaaaaaagtctgaaagatcacagattaacaagctaatcttacgtctcaaggagccagggaaacaagaacaaactaaacctaaaggtagcagaagaaaagaaataacaaatattagagcagaactaaatgaaattaatacaaacaaagaaataatgaaaaagattttataaataatgaaacaaaargtggttatttaaaaagataaacaaaactgacaggccattagttagattaaccaagaaaagaagagagaagatacaaataagctcacttggaaatgaaactggagacattataaccaacaaccacagaaatacaaaagatcatttaagactactatgaacacctatatatattacacacaaaccagaaaacctagaggaaatggataaattcctggaaacatacaaccctcctagattaaatggaaacatacaacccttctagattaaatcaggaagaaatagaaacctgaacagaccagtcaaagcagtaaga

SEQ ID NO: 629899 - DNA, 393 bp, Homo sapiens
actatgttcctcagaatactccatttaacattgcaataaggaatatactgatgagggagccaccagcatcactcagggcttggagatgttcttcacaactccctcccagtagcactgaggatcatggggtcctggaatagctgagggccatgtagcaatattttaccacgacaggcaacataagaaagtgttatagatactattgtgctacacccagatgccctcttcttcaggrgtgacttactcacaccccagcttctgggaatactggctgctactggcttaaaggaactatattatccaaggttttactccttctcaggaaacagcattttgccaatgattagctaatgaaggggatgtaaaggcctggcactttgcaagaagaggtgg

SEQ ID NO: 629900 - DNA, 393 bp, Homo sapiens
actatgttcctcagaatactccatttaacattgcaataaggaatatactgatgagggagccaccagcatcactcagggcttggagatgttcttcacaactccctcccagtagcactgaggatcatggggtcctggaatagctgagggccatgtagcaatattttaccacgacaggcaacataagaaagtgttatagatactattgtgctacacccagatgccctcttcttcaggagtgacttactcacaccccagcttctgggaatactggctgctactggcttmaaggaactatattatccaaggttttactccttctcaggaaacagcattttgccaatgattagctaatgaaggggatgtaaaggcctggcactttgcaagaagaggtgg

SEQ ID NO: 629901 - DNA, 544 bp, Homo sapiens
gggccactgcactccagtctgggtgacagaggaaaaccctatctcaaaaacaaaaattattattttagaaaaatgtgtacacaaaaatgtgaaagaccagaagtatacactgaagtgttaatgtgtaatctcactatctagaggctaatattcaacttttttttcatttgttcagatcttttacaataaacatgtatgttttatgataaaaacaattaagtttaaatcattttaatttttttttttttagatggaatctcactctgtcgcccaggctggagtgcagtggcacaatctcggcttgctgcaacctccacctcccgggttcaagtgattctcctgcctcagcctcctgagtagctagaattacaggtgctcaccaccatgcccgggtaatttttgtatttttagtagagatggggtttcaccatattggccagtctagtctcaaactcctgacctcaagtgatctgcccaccttggcytcccaaagtactgggattatgagcatgagccaccatgcccagcccatgttaacattttt

SEQ ID NO: 629902 - DNA, 603 bp, Homo sapiens
ttctaatagctatccattaaagaacataaacttactttcctttagttaaacagcatgaatggctaacatgtacactaacacatgccagcttcttacactttacaaaagaccagtggagattctttttatttaaaaagactgcttcagaactggattctgccatcgaaattgtagtcctagaacttccactaatactctgtggatgtagtctagttactcaaacaatgccaaattctcagattcttcagctatagtggtgaaaatcytgagaaatataattttcaaagtataagattctttctgcctctgtcatttttctaggcacttctggctaattttttttcactttgcacaaacttcaaagacatgaaaaaaatacaaataattctctttattctagtggaggctttttacaaatataaactggaaacaattataaagctatttataaagactcactactacaaatggaattttctgtttgttcaaattaagaaatgaaagacaacttcctattgagaaatcaaaatctaagagaacttttacagaagtgcctacaaacataaatgacaacttttcatctatttttaaagtttactaatg

SEQ ID NO: 629903 - DNA, 603 bp, Homo sapiens
ttctaatagctatccattaaagaacataaacttactttcctttagttaaacagcatgaatggctaacatgtacactaacacatgccagcttcttacactttacaaaagaccagtggagattctttttatttaaaaagactgcttcagaactggattctgccatcgaaattgtagtcctagaacttccactaatactctgtggatgtagtctagttactcaaacaatgccaaattctcagattcttcagctatagtggtgaaaatcttgagaaatataattttcaaagtataagattctttctgcctctgtcatttttctaggcacttctggctaattttttttcactttgcacaaacttcaaagacatgaaaaaaatacaaataattctctttattctagtggaggctttttacaaatataaactggaaacaattataaagctatttataaagactcactactacaaatggaattttctgtttgttcaaattaagaaatgaaagacaacttcctattsagaaatcaaaatctaagagaacttttacagaagtgcctacaaacataaatgacaacttttcatctatttttaaagtttactaatg

SEQ ID NO: 629904 - DNA, 571 bp, Homo sapiens
taaaatcaaaatgaacagttaattatttgcagggcccattgattctgactgttattcttgcattctttcttttatactatattggtataatgaatggttyaagtataagcctgcatgttaattatttcttaaaagtctttcaaatactacttttcgtagttttttttttccaaaataaatatatcaggtattcttagaagccaaaggaggagaatctatgaatgaaattcagctatctgtgaggtggttaaaaaaaatacgtactacatacacacacaaatacaaacacacatagtaaaaatgcaaacatgtatactgtcctggagaatagattccaatattttaagatgaacacagggagccataatccaaaaaaatatcagaaccaccaatataaatgatttatggagtcccttccactctaaaattgtatgaccatgtcattaaatctgttaattataagttgctagatttttgtggtcaaatattttataattagcatggattgaaatgtaatacacactatattaaacttcagaaaaaagaataaatttaacttttatttataaga

SEQ ID NO: 629905 - DNA, 371 bp, Homo sapiens
gaagatacattcagtccatagcatttcacccctaggcccacaaaatgtatgtctttctcatatatacaatgcattcattccatctaacagccccaaaagtcttagttcattccagcaacaactctaaagtcctgagtctcatctaaataacatctaaatcagatatggatgaaactcaaagtatgattcatccacaggcaaattcytctttagttgtgaacctgtgaaaccaatcaatttatctgctttcaaaatatgatggtgacacaggcacagaacagacagtttctttccaaaagggagagataggaaacaagaaaggggtaatgggcctcaaataagtcaaaaacttaacaaggcaaacaatatta

SEQ ID NO: 629906 - DNA, 510 bp, Homo sapiens
ggttaggatttcaacatataaattgggaagatacattcagtccatagcatttcacccctaggcccacaaaatgtatgtctttctcatatatacaatgcattcattccatctaacagccccaaaagtcttagttcattccagcaacaactctaaagtcctgagtctcatctaaataacatctaaatcagatatggatgaaactcaaagtatgattcatccacaggcaaattcctctttagttgtgaacctgtgaaaccaatcaatttatctgctttcaaaatatgatggtgacacaggcacagaacagacagtttctttccaaaagggagagataggaaacaagaaaggggtaatgggcctcaaataagtcaaaaacttaacaaggcaaacaatattaaatcttaaggcttaagaataatcctcttcagcttaatgcttcactctctagacccactggggcaacagcrtcacacccctggcttggtggggtaatacacaagccctgagtct

SEQ ID NO: 629907 - DNA, 576 bp, Homo sapiens
ctttttgtttccatgtgccagtagtctagcaagccaagaagggagataccatacccgtagcagtaactgacctttataatcatgaaaagaggggaaggattgaagctacataataggaaggaatagatttgttactcaggtcatccactgaggtgtcaaagtactcccatgccttgttgtgtctgttaatgggccagtagggcaaccatggacagatgagtgcagagtaaccaggcccgagaccccacagagatgagattctaggttaacccctcagggagtacacagatcagtagaagtgctagacaaagtgaagggaaatctagaatgggaagagggaggggatatgtatcagttatggccttcagamaaattgcagcagctggggctgtagttcatgccactgaacttcctcttgaaagttttcccagaaattgtgactaatcacaatcttggaggagttgtattttgatagaataaacttaatgtgaaaagcaaatagatctgagcaatgcaagggcaaatggatgcagtggatgtcttggtgctcagaccatctttattattttggtatac

SEQ ID NO: 629908 - DNA, 527 bp, Homo sapiens
tctacctttgtcctattcaggtcttcaactgattgactaatgcccacccacattgcggagggcagtctgctttactgaatccatgcgttcaaatgctaatcatctggaaacacactcatgaacacatccagaaatagtgtttaatctgaacatcctgtggccagtcaagtygacacatcatataaaccattatgatatttaaaatttttatgtcaaatctatatattatttaaagcaggggtcagcaaactacagcttgtgggccagtgtctattttgtaaaacagctttattggaatgcagctatgtctattcatttatgtattgtttatggctgctctcagactaacatggcagaattgaggagttacaacagaggccaaatggccaaaaaaaacctaacctaaaaacctgacctttaataaaaagtctacagatcctcaatctaaagcacttttaaaaagaaactcacacacatatactcacacagcatgactcttaattctatttgttttctgcaaataatga

SEQ ID NO: 629909 - DNA, 530 bp, Homo sapiens
tcacaatcttggaggagttgtattttgatagaataaacttaatgtgaaaagcaaatagatctgagcaatgcaagggcaaatggatgcagtggatgtcttggtgctcagaccatctttattattttggtatacctatcttccagcagctgctttgaatgttgctaaagaaacagctgtcaaatggaggagattgtcaaacagagaagattagctgccaggatctgacttacytaggtgattttatttagtgtccccccaagcccctacttccccaggcagactaaaaccagtgactaacacgagggtacaaaggggtgcagccttctttccttaaaatgagactgtggttagtctgtccttgtgttgctgttaagaaatacctgagactgggtaatttattaaggaaagaggtttaatttggctcatggttctgcaggctgtacaggaagcatggtgccagcatctgcttctgatgagggcctcaggaagcttacactcatggcagaagatgaaggcgagccagcatgtca

SEQ ID NO: 629910 - DNA, 588 bp, Homo sapiens
atacaaaaatcaattcaagatggatcaaaggcttaaatctaagactggaaaccataaaaaattcagacgataactttggactttggcctaggcaaagaattcacgattaaaaggcccaaaacaaatgaaacaaaaacaaaaataaacaaatgaaaactaattaaattaaaaagcttctgcccagcaaaagaaataattatcacagtaaacaggcaactcacagaatggaagaaactatcacgagaacagcatgggaaagacctgcccctgtgattcaattacctcccaccagttccctcccacaacatgtgggaattcaagatgagwtttgggtaagggcagagccagactatatcattccaaacctggcccctcccaaatctcaggtcctcacatttcaaaaccactcatgccttcccaacagtcccccaaagtcttaactcacttcagcattaacccaaaagtccacagtccaaaatcttacctgagacaaagcaagtcccttctgcctataagcctgtaaaatcaaaagcaagttagttacctccttgatacagtgggggtacaggcatcggaataaatacacct

SEQ ID NO: 629911 - DNA, 477 bp, Homo sapiens
tcagttcccacttataagtgagaatatgtggtgtttgattttctgttcctgtgttaatttgctgaggatgacagcttctaactctatccatgtccctgcaaagaacatgatcttrttcctttccatggctgcatagtattccatggtgtgtatgtaccacattttctttatccagtctatcattgatgaggattaaatggttaattttatgttatgtggatttcacctctattaaaaaagcattggatcctaaatttcagcccccaccccaaaaaaaagtagcagaaaatttgatttgagtgatcttgattagcagtataattaaaattaggctactctggtaaagtacatgtattaggtaaagggtacatgggaactgtctgttattatttcttttcttgattgatacttaataaatgtacatatttatagggtacaggtgttattttgatacatgcatacaatgtgtaatgatca

SEQ ID NO: 629912 - DNA, 477 bp, Homo sapiens
tcagttcccacttataagtgagaatatgtggtgtttgattttctgttcctgtgttaatttgctgaggatgacagcttctaactctatccatgtccctgcaaagaacatgatcttgttcctttccatggctgcatagtattccatggtgtgtatgtaccacattttctttatccagtctatcattgatgaggattaaatggttaattttatgttatgtgratttcacctctattaaaaaagcattggatcctaaatttcagcccccaccccaaaaaaaagtagcagaaaatttgatttgagtgatcttgattagcagtataattaaaattaggctactctggtaaagtacatgtattaggtaaagggtacatgggaactgtctgttattatttcttttcttgattgatacttaataaatgtacatatttatagggtacaggtgttattttgatacatgcatacaatgtgtaatgatca

SEQ ID NO: 629913 - DNA, 547 bp, Homo sapiens
aatttcatatcttctcttccagctattttgaaatatactataaattgttaactatagtcatcctactttgttatcagacactagaacttcttccttctagmtaactatatgtttatacccattaaccatcctcctcattgaatctataattatgtaaaaataaaaaagtttaattaaaatatatcaagagtttgttgaaaagctgagaggtggcttaaactttgggatatacccagtagacacttaggatttaatatatttatctgttttctacttatttagtatacatacaggacttaatatgtattaggcacagtcctaagtgctttacaaaaattaactcagtaaatgaatatttttaacagccagttcctggagcagtgtctctagtagttggaacacgtgtggcacttagtaaacactaaatagatattgtttaatgattagatggtaatattttcaaagttgcttttactgccttcatgtcttgatttctacttctggattctttcttcattcctgatttctgctatctaaatatctctag

SEQ ID NO: 629914 - DNA, 618 bp, Homo sapiens
gtctcatggattacagcaatgggtgagtgaattatcgtagctgaagatagtaatcatggtcatttggggagaggatctagccattctgagagtaaagtaatttgtgatatggcatgctcacaggtgttggggctttatctgctgagtggggtagaggatttaggcattcggttatctccttgttttgggagcctctgcagatttagtacctatgagctgcggacactggaagggtggctggagatggagagatgtcttgtttccaggagtcagaataggtttggtttgcagtatttcaagtggagcaggccctctagggatgtgagagcagcatgccacttagtatgagtctaagggaattcagaacattttcttgactagttataagaaaacttggccatagggacacagaaacattgcactccatccttagaggataaaggaaaagagataaccagytggcaatgtctgctttctcaaaccaagatggcagaatcatatcgtgcttcttaaatttgaaatgtcagccctagcttgtctcaggagatggctgaagccattgagtctcaccctgattaactcagattacagttggcccttcctcatccctcagctcct

SEQ ID NO: 629915 - DNA, 602 bp, Homo sapiens
gatctccttttaaaaatttgttcctctgctgttcaattctctacacttgtaaattttcatcatatcttgaacacagttgtttgctttgattgatatcaagcactgtgccagatgctgaagacccggagataaataagaaaaaaaggttttctgccccagaagaactgayaggctactagagaacagaaaaaacataaattaaagtccagtgtcttaagagccttaggacaactggatttatttaagctgattcattattgtgcactgcagtttaaaatgatgcctagaagtaagcagctaatgtgggttttcttagcttccttttaaaaatacccatgaagtcaccataaaggaggaaaactgacaacatcacttaaaattaagacttaggggaactatggatgagaagtcaaagtgtgtgtttctgtttctgaccctgtgagaagggagctgtgggtttgatgattaaacaagacagtgaatgtgaaagcaactagtgaactacaagataaagagatataaagacctgaaggtagtctttcctatccaaagttggaaacagtactactatcatttcttgggaggagcttgaagaagtaaaa

SEQ ID NO: 629916 - DNA, 602 bp, Homo sapiens
gatctccttttaaaaatttgttcctctgctgttcaattctctacacttgtaaattttcatcatatcttgaacacagttgtttgctttgattgatatcaagcactgtgccagatgctgaagacccggagataaataagaaaaaaaggttttctgccccagaagaactgataggctactagagaacagaaaaaacataaattaaagtccagtgtcttaagagccttaggacaactggatttatttaagctgattcattattgtgcactgcagtttaaaatgatgcctagawgtaagcagctaatgtgggttttcttagcttccttttaaaaatacccatgaagtcaccataaaggaggaaaactgacaacatcacttaaaattaagacttaggggaactatggatgagaagtcaaagtgtgtgtttctgtttctgaccctgtgagaagggagctgtgggtttgatgattaaacaagacagtgaatgtgaaagcaactagtgaactacaagataaagagatataaagacctgaaggtagtctttcctatccaaagttggaaacagtactactatcatttcttgggaggagcttgaagaagtaaaa

SEQ ID NO: 629917 - DNA, 551 bp, Homo sapiens
ttatgggtactgatggaggagtagggaaaagaattctctgtttggagaatcctatcacacatggggaggagagagagaggccaaactagattttgggtttatttcttttgtgagagcctgcaaaatgtcagacactgctaagttttytgcatcttcactcccatttgatcctcacaatgttagcatagaaatattagtcttattttactaacgatttttataaaatgccgagagaagatacgtaacatagctaaggacctctagcttaggagtagcaggatctgaatttcagccccagttttactgactccagatcctggctctttccatgcccccatttctttagcaatcaaatactaactcctattataagtttagagtaaattgaattgctctcaaacttaacccttgaatgtgatgtaatgaattttatattaagtccattacatcataacaggtaataagaaagtacttacaaatcaactcaaagaaatatttttcaatagcacttcaaaacatctatattttcaacctgcaaaattcacaagagt

SEQ ID NO: 629918 - DNA, 585 bp, Homo sapiens
aggctccagcaacttttccacatccattcataatcccagcctggaccttttgtaggtttttcttgtctactactactgtctaggtaatgacatcttacagagtctataatgctgtgctgttgagatagaccattgtctctgtttcaatgaaagtcaaaggaatagcatgatagggaaaaacaaaaaacaaaaatctgatgagcctactaattctgcagaagcagcccacagttttcatagatatgtttatctrtatgcagaaagctttaagaactttcaagtgaattccatgttgaacctcaatctctttattattaatgtcattgttgactttgaattcctatggtttgctcattcaatgctgttatagtcctccatagacctcaaagatagaaaactgccataagcttctaccaggacttgcaattgactttttaatgactaagtctgacgatgtcaactctacaggggagggtacatgccataatgatttagagacattgagttaatatgaatatcaggctgtttctcttctcccaactcttaagtgttgttttctgaagtattccagacgtctaccaacac

SEQ ID NO: 629919 - DNA, 667 bp, Homo sapiens
ccttcacttttgggatctgctgcctctatatagagaacatttcggtccactctttgactaggtgttaatttccagagtcagcttgcagggttgggaaataattgaggagcagtaataatagttcactgccaacttgtatcttaacatgttggatttagataatccagttgctaactatggaaaattgggggagcagattyacaatcctgctcccgtcttcagaagactattttcctggtactttgagttactccaagcctattcatggatcatttagatgccaccacatctctctagccctggcaaatgttctgaaatgaattagtagtaatttgacaagacttttcttatgactaaaaaccagtttctatttttatttcaaattttcttgccaaataattcatctaaatttctgcattgagattaattgacaatacccagatactgcaataataaaacgtttcaatgctaacaattagataaccaattttaatgtaaactctcttgcattataaagctctcagagaagaattgaaatctgaagattagatccatttaagttatgccccaaagaagtaaatatccaaaattagattatcttaccctgtgagttaaagacaagaattaaagtaaaatgtaattgttaacaagttagaaaatattaaat

SEQ ID NO: 629920 - DNA, 354 bp, Homo sapiens
tgattaatgtaaaatgaataccagaattaggggagggggaaagagcaccattttacaattcccagtgaaataactgattcagacaatgatcaataatggatgaaaccaattgagacttggcagataagtatactaattatgaagggctgtgctgcactgtagtaataaccccaaaatttcagcagcttaaaacactgctttctcactcatgatgcatgtccaatgctagttgacaaaaggacctttccattcggagtcactgagggatccatctagaasattcctccctgattctgaagcaaaaaaggttatatgatgatttgcagactggctcttaaaagcttccacctgtaa

SEQ ID NO: 629921 - DNA, 354 bp, Homo sapiens
tgattaatgtaaaatgaataccagaattaggggagggggaaagagcaccattttacaattcccagtgaaataactgattcagacaatgatcaataatggatgaaaccaattgagacttggcagataagtatactaattatgaagggctgtgctgcactgtagtaataaccccaaaatttcagcagcttaaaacactgctttctcactcatgatgcatgtccaatgctagttgacaaaaggacctttccattcggagtcactgagggatccatctagaacattcctccctgattctgaagcaaaaaaggttatatgaygatttgcagactggctcttaaaagcttccacctgtaa

SEQ ID NO: 629922 - DNA, 623 bp, Homo sapiens
ggctcttaaaagcttccacctgtaaatgccatatttctttggctacatcaattcacatggttatatctaatttcaagagagttttggaggttcaattctgcttgtgctcgaagggaaaaatggaatatgtgtgaacaacactaatgaaggactttccaaaggagagatcagtcatcattttatcccactgatcactaatagaaaaaactgtcactgtctacccctgatagrctgcaatataagacacacaacaccacgtttggatatgcttgagaaatcaaacaccaaacaaacaaaaccaaacaaaaatattttaaggtaaacgagccctgtaaaggaaatggctgcactgtagtctagagtaggccgagtacagtacaacatccagtgcagtatagcacagcaggactggagcgcaggtgcacaatctcatgcattatataatctcagttatgtaaccatgttatgagtgggctcatcactgactctgaaccactgttgcctgtgaagtgcataaatatatcaacactgtgagaggacccacataatggagccagccgccttgcaggcggacaaagagacagccagccgccttgcaggtggacatcagggagccagaaagc

SEQ ID NO: 629923 - DNA, 623 bp, Homo sapiens
ggctcttaaaagcttccacctgtaaatgccatatttctttggctacatcaattcacatggttatatctaatttcaagagagttttggaggttcaattctgcttgtgctcgaagggaaaaatggaatatgtgtgaacaacactaatgaaggactttccaaaggagagatcagtcatcattttatcccactgatcactaatagaaaaaactgtcactgtctacccctgataggctgcaatataagacacacaacaccacgtttggatatgcttgagaaatcaaacaccaaacaaacaaaaccaaacaaaaatattttaaggtaaacgagccctgtaaaggaaatggctgcactgtagtctagagtaggccgagtacagtacaacatccagtgcagtatagcacagcaggactggagcgcaggtgcacaatcycatgcattatataatctcagttatgtaaccatgttatgagtgggctcatcactgactctgaaccactgttgcctgtgaagtgcataaatatatcaacactgtgagaggacccacataatggagccagccgccttgcaggcggacaaagagacagccagccgccttgcaggtggacatcagggagccagaaagc

SEQ ID NO: 629924 - DNA, 548 bp, Homo sapiens
gccatataaaatatatttcctgttgctaggtaagatgtgataaatgacacggcaaatcatgtgtgctattttaggagcttaccaatgacttaaaatgagactgacacattaccaaattgggctggataaagaaaatgacaatctagataaggagaaaagggactaaataagaatttgaatgttttaaattcaattaataggccaggcccaaatggagccarccaggttactgctgtccttgcccccttagcaaatgtagaacaagccagaacattaaaaaacacagcctgaacatgccttatgggtatgtgggtgtgccacataggcagaggcgaagccaaggacataaattaattaagaagcaaggaagggacttaggactgcgtgagacatgaaggagtccaagaaacagcaagaactgcaatcactgagaagatgacctgggaacctagcagccaactgtgccatcaagttaataagaacatgtcggccagttgcggtggctcactcctgtaatcccagcactttgggaggcagaggtgggtgga

SEQ ID NO: 629925 - DNA, 451 bp, Homo sapiens
ctctttccctctccctctccttgccataagaaattggctcacatgatcatggaggctgagaagtcccaagatgtgcaaattggcaggcagaaaacccaggagagttgttagtatagttccagcctgagtctgaagacctgagaatcaggagaaccaatgatgtaagttctagtccaagtccaaaagcccgagatccaggaaaactgatgatgtaaattctagttcragggcaggagaaaactgatgttctagctcaagtggtcaagcaggcagagttacttttttgttctattcaggtcttcaattgattggatgaggctgtccacattaagggagggcaatctgctcattttaccagagattcaaatgttaatctcatcaagaaacacccttacagacacacccagagtgatgcttatttatttatttatttttaaaattttagattcag

SEQ ID NO: 629926 - DNA, 575 bp, Homo sapiens
tgatataatagaaatctaacacaaagtaataatagtagaggagagcatatggggtggttggacaaggctttctaggacaggtgacaattgacttttatgataattagtaattcctcaagaggaaaaaggctgggagggataaaaaggatggcctgccgaaagtcacagtagcataacagcacacaacttgtcttcaataggaggtgcatgagtgtgggtggaacccagtaggttggattgagaggattcgttgtgtaacagcagaagaagaacctgaaaatgagttgaaagattgctgtattagtccattctcataccgctataaagaactgcctgagactgggtaaattataaaggaaagaggyttaatttactcacagttctgcagggctggggaagcctcaggaaacttacaataatggtagaaggggaagcaaacacgtccttcttcacatggtggcaggaaggagaagaatgagaactgagtgaaggaggaagccccatataaaaccatcagatcttatgagaacttactatcaccagaatagcactggggaaactgcccccatgattta

SEQ ID NO: 629927 - DNA, 575 bp, Homo sapiens
tgatataatagaaatctaacacaaagtaataatagtagaggagagcatatggggtggttggacaaggctttctaggacaggtgacaattgacttttatgataattagtaattcctcaagaggaaaaaggctgggagggataaaaaggatggcctgccgaaagtcacagtagcataacagcacacaacttgtcttcaataggaggtgcatgagtgtgggtggaacccagtaggttggattgagaggattcgttgtgtaacagcagaagaagaacctgaaaatgagttgaaagattgctgtattagtccattctcataccgctataaagaactgcctgagactgggtaaattataaaggaaagaggtttaatttactcacagttctgcagggctggggaagcctcaggaaacttacaataatggtagaaggggaagcaaacaygtccttcttcacatggtggcaggaaggagaagaatgagaactgagtgaaggaggaagccccatataaaaccatcagatcttatgagaacttactatcaccagaatagcactggggaaactgcccccatgattta

SEQ ID NO: 629928 - DNA, 625 bp, Homo sapiens
ttgttatgaaataacatgatgagaatcagaaaatttatttcccaaaatacatgagtgttctgtgagacagggtaatgtttatatgttatacttccccaraagacaaactgttactaatactattccatatgcctaatgttctgaaagttaggctttggatccacattttgttgacagagactttcttatcctttgaacttgaaagtcttcccatgaccctgcatgctcagacggctctccaccactcatctctcctcctcttcatctatcaaaataaactaatattttgctgttttgcattttattccacttcttcaatcctgctcttaatgtagcagacatcttacaatatttggcttttccattgtctaaggcaaatccctagtggtgctgtgattccatctttcttaccctcgttcagggattttatttcactgattaccccatccccttcctgtatattaattctgtctctacaaagaggctctttgcctgctccattgtctttcatgttagacataagtttctctctagctaatgccctctcttcttccctctaggctatatttgaaactttctcacctctcttcaccgcaactcacattcattcaccaacccactgcag

SEQ ID NO: 629929 - DNA, 390 bp, Homo sapiens
ttgttatgaaataacatgatgagaatcagaaaatttatttcccaaaatacatgagtgttctgtgagacagggtaatgtttatatgttatacttccccaaaagacaaactgttactaatactattccatatgcctaatgttctgaaagttaggctttggatccacattttgttgacagagactttcttatcctttgaacttgaaagtcttcccatgaccctgcmtgctcagacggctctccaccactcatctctcctcctcttcatctatcaaaataaactaatattttgctgttttgcattttattccacttcttcaatcctgctcttaatgtagcagacatcttacaatatttggcttttccattgtctaaggcaaatccctagtggtg

SEQ ID NO: 629930 - DNA, 536 bp, Homo sapiens
taaggtttatctctgatgagttttcagtctgctaaactgggaaacttataattttctgtcaatttaggctctaaatttcctccaatgggaagtgagttgggggtgggttcgtagagatcctctattaagctagcatccacaatttgccaccgtgggaatatatgcatttgtgtttcatgttcaaattttttgttggaagaataatgtcatgaactttaaatgggttgtagttttcttccatcgtttattcagcctgcaatttaccaaaataatrggctgttttgcaaagatcattaagtggaatttgttttgttttgttttgtttagtcacatattcctaatgtcttgtttgcaggaagtcttacttgctctttccccagctggaagtgatctctcacatatttttatttttggatttcttttatggcatgtgtcacttcctgtttcagcttatagatacctatgtgtgtcttatttttcccactagaatattcccaccactttgagaaatggtgttttgtatactatatttccag

SEQ ID NO: 629931 - DNA, 478 bp, Homo sapiens
tgttgtagagatggggtttcacagtgttagccaggatggtctcgatctcctgacctcgagatctgcccgcctcggcctcccaaagtgctgggattacaggcgtgagccatcgtgcccggcccaggcataggcctttttaaattgtcaacttagactttgagtttgcaactgttttatttctcaaccaaaaatctgacacattttccttagaataattatccccattctttttgtttattaatgaaatgcaccactttcctctcggcaaagctacagtttggacttctgaaacctaaaacagtgattagagataatgaaattaactagagtcagattcaactggagactaaatagtgtggagtgactcytgaacttagtagcaagcttctccagatccatccaatggcccgaggtgcaggtagtaaaatttgaacaactaggttagcactgactacctaggcctaggactagcaatttt

SEQ ID NO: 629932 - DNA, 553 bp, Homo sapiens
gcaactgttttatttctcaaccaaaaatctgacacattttccttagaataattatccccattctttttgtttattaatgaaatgcaccactttcctctcggcaaagctacagtttggacttctgaaacctaaaacagtgattagagataatgaaattaactagagtcagattcaactggagactaaatagtgtggagtgactcttgaacttagtagcaagcttctccagatccatccaatggcccgaggtgcaggtagtaaaatttgaacaactaggttagcactgactacctaggcctaggactagcaattttagcaagagtgctgtaagatcmttttacatattgcatgtatctattccaagttatatttcttgacatggaacttttgtgtcaaaggaatatactttttaaaaattgtctaaatacatttaagaaaagttaatccattttaaactccaaccaagagtatgtaaaaatttctatgaaccctctcaaatactaagtattttgatttcctctttacctttgacaagatagagcatgacatacta

SEQ ID NO: 629933 - DNA, 592 bp, Homo sapiens
ttaaatatctaatgtatcaaatactcccacattttaaatccatttacaaaatttcattaactacacgtatttgctttctcttcaaatggacttcaaaattttattagctatttttacttgtttattcttcaggagtactttaaaatcactaccacatttcaaaattactctcaagcctaatgggatttttataggcattataaattaatttagaaattgatttttaaataatgcttagcctttcaagaatgtggtatgccgcataatttagtcacttctacttttcatgtcccatggcagtttattttttttcaaataggttttgcttacatattattaagggacataatatagacagctgatgtacaaaagmaaataggtgtatataaatcaaagcacccattatacaatatacgcatacctacacaataataaagatttgctttggcacctgagacatctttctgtcctacttgtagtcattgctagaatacttatttgtaaccagtttcaatagtcagggtcctggcagaaaaatagatgacacactcaaagggattattgctaagaattcatgaaaagtctattgaaa

SEQ ID NO: 629934 - DNA, 552 bp, Homo sapiens
acaggtgtgaaccaccacacctggagcagacattctcttaaacatgattgatagagtagaaactaatatagccatattaatggataatttgacagtattgataaaaagtaattcattactagaatttcaaaagtatataacctttgatctaagaattcaaatttatgtatccattgcatagttttgtatttctttttttgagatggagtcttgctctgtcgcatagttttgtacttctaacacatacacagaaatatataagtattttcatcacagcattgtttataacmaaagaagtagaaatccattatttgtctatcaatagaagaataaatattgtaatacaatactgtgatgctcttccgtagcaactcaaaaaaaaatgaaatttatccatattcatcagcctggaaagatcaccaaatcatacttttagttggaaaatataaattgctaaacaacacctttccatttatatagaaaaccaaaactacattaagatggaacaaacagaaagaggtgacccttgagataagcattttaataatactg

SEQ ID NO: 629935 - DNA, 398 bp, Homo sapiens
gaattcagaaaacccaatgtatctgaaattgcattagagacacggacgcagaaatgaaaaggtgagtcttccatagaaatttgcaaaagttcctgtaactagggaaactgtgaatgcatttgtgatctgatcctagtgaagacaggaaaaggagagcaatagttcatgggctgcttatacatagaaaaaatgtttattccacatatatttatgacaaaacaatgtaactcaactacatggggtaataatatgctgtgttktgctgtcctgtgacctctctctcaggcaagactacactctgagtttactggcttcccctttcctgaccacagttgtgcatgagaacaaatcgttctattagcaaatatctcacattttaaactttgagaaattgaagg

SEQ ID NO: 629936 - DNA, 586 bp, Homo sapiens
agattgataatacagaaatatgtgaatacgaaggagtatttgctaagtatggcatgtttaatgttataccatagaaaaaaatatacataaaaataagcctacccataatctcagtatccaaaattgttactattaatattttgtgatgttactctcatcttttgcataatttacacatataaaatggaagtgcattatacagatttttggaaacctcctgttctctaaatataaaccatgaacattctagcctattaaattaagtagacggcataatactccataatgcagatatatcataattaatttgatcattatcccttttgttggatttgatgttgtttcaattatattataaataatgctgaagtaaatactattttaactaaatcttatatatatatttctgatttttttttactttttattataattcacaccaacatggcacatatatacatatgtaacaaamctgcacattgtgcacatgtaccctagaacttaaagtataattctgattataatatatattataatatataataaagtatatttctgatttcttaaacacaactttcaaaaagta

SEQ ID NO: 629937 - DNA, 573 bp, Homo sapiens
attggataatacttgtgagaaacgcactactggagttactttttctcatgagtctgtatgcttttattccaagtgaaaacatttgaatgaatgataacatagaagcttttactcatagcaaccagaaatctggtggagagggtacatgtaacccctggggaaaacaaagaacagtaatgggaaacatcctttcagctgtactaagctaaatgaggaatgtaacattaaaacattcctaagaaacatgacttttcagcctcagcaatttaagaaataacaattttcctattatttttccaggraaatgttgctgattctacacatattttaaagatatctttgaggctttgtatagtacaactaagtcaaatcctgggagagatggtggaggactctttcctataaatcacaggcttccaaactcattgatttaacggtcataaaaacttcggattacagtcatgtgtcacgtaaaaaggggaatacattcttcgaaatgcatcattaggtgattttgtcactgttgaatatcatatttacacaaacctagatggtaaagcccaccagaaacct

SEQ ID NO: 629938 - DNA, 575 bp, Homo sapiens
acagtaatgggaaacatcctttcagctgtactaagctaaatgaggaatgtaacattaaaacattcctaagaaacatgacttttcagcctcagcaatttaagaaataacaattttcctattatttttccagggaaatgttgctgattctacacatattttaaagatatctttgaggctttgtatagtacaactaagtcaaatcctgggagagatggtggaggactctttcctataaatcacaggcttccaaactcattgatttaacggtcataaaaacttcggattacagtcatgtgtcacrtaaaaaggggaatacattcttcgaaatgcatcattaggtgattttgtcactgttgaatatcatatttacacaaacctagatggtaaagcccaccagaaacctagtctttatggtagtctattgttcctagactacaaacctgtatagcatgttgctgtactgaaaactctagacaattgtaacacaattataagaatttgtgtccctatagctgtacattaaaaaggtaagtaaaaatacagtataaaagaaaaaatggtacacctgcataggg

SEQ ID NO: 629939 - DNA, 584 bp, Homo sapiens
ggactctttcctataaatcacaggcttccaaactcattgatttaacggtcataaaaacttcggattacagtcatgtgtcacgtaaaaaggggaatacattcttcgaaatgcatcattaggtgattttgtcactgttgaatatcatatttacacaaayctagatggtaaagcccaccagaaacctagtctttatggtagtctattgttcctagactacaaacctgtatagcatgttgctgtactgaaaactctagacaattgtaacacaattataagaatttgtgtccctatagctgtacattaaaaaggtaagtaaaaatacagtataaaagaaaaaatggtacacctgcatagggcacttaccatgaatgaaacttgaaggactggaagttgccctgggtgaatcaaggagtgagtggtgactgaatgtgaaggcctaggacattactgtaccctactgtacacttcataaacactgtacacttaggctacactaaatttataaaaaataaagtaattgtgctatgatgttacaatggctacaacatcacttggcaataggaatttttcagctccgttataat

SEQ ID NO: 629940 - DNA, 584 bp, Homo sapiens
ggactctttcctataaatcacaggcttccaaactcattgatttaacggtcataaaaacttcggattacagtcatgtgtcacgtaaaaaggggaatacattcttcgaaatgcatcattaggtgattttgtcactgttgaatatcatatttacacaaacctagatggtaaagcccaccagaaacctagtctttatggtagtctattgttcctagactacaaacctgtatagcatgttgctgtactgaaaactctagacaattgtaacacaattataagratttgtgtccctatagctgtacattaaaaaggtaagtaaaaatacagtataaaagaaaaaatggtacacctgcatagggcacttaccatgaatgaaacttgaaggactggaagttgccctgggtgaatcaaggagtgagtggtgactgaatgtgaaggcctaggacattactgtaccctactgtacacttcataaacactgtacacttaggctacactaaatttataaaaaataaagtaattgtgctatgatgttacaatggctacaacatcacttggcaataggaatttttcagctccgttataat

SEQ ID NO: 629941 - DNA, 535 bp, Homo sapiens
ctgggtgcagcaaaccaccatggcatgtgtatacctatgtaacaacttgcacatactgcacatgtaccccagaacttaaagtataataaaaaagaaatataaagtgatgcaaatccaaatatatataaaaccatatatatacgaatcatactatttccttcatattggcatatataaatatataaaacatatatacttaaaatatatacaaaataagtaattcaaacccaaatatatataaatatgtatatatytaaatacatacatatttatagatttgaatttgagttactttatacataacacatattttatatatattatgtatatagcataaatatattctgtcacctgttatttagcataattttggaaaattcacaagttattttccaaatatatttttgtaaatttttttataaataaatcagtaaagattacaaagaaatatatattgtggcattattggtatgaagctgtttaagtcaaaattattgaactcctggttgtcaaagttttgacaatataaacaaga

SEQ ID NO: 629942 - DNA, 611 bp, Homo sapiens
atactgctagctggtgctgctttgtctttttcctcagatactgaatgttccaggccttggcaccatttctttctgctctgatcatggaggctggctcagctgaacttgcagcagttggacttttacctctctgtacatcgakggctagcaccatttcctgttgatgagtgtcttctttgcttttatttttgcttagccaaacttccatctttccaaaatacctcctttagattttgcttttcagggtgaaagaagaaataaagaagttcagatgctgcctgatttaactctgatttgaaaaataaatgcacccaacaaaccaacatgtaatcctagtctggacttaagctgttattaaacaccacttcttacccaattcatcttgactcttcctttctataaagttataatactataaatttctcaagaatgatccctcagaagactaggaatagctgcatccccacctataattaatgcaccacttttacacctaccagaaatttttttgagtatttttctctaatcttcctgattatctcttcaaaatctctacatgtgtaatttattttgtacagctatctgacatttacaggggtagttgttcaatt

SEQ ID NO: 629943 - DNA, 568 bp, Homo sapiens
tggaggctggctcagctgaacttgcagcagttggacttttacctctctgtacatcgatggctagcaccatttcctgttgatgagtgtcttctttgcttttatttttgcttagccaaacttccatcttkccaaaatacctcctttagattttgcttttcagggtgaaagaagaaataaagaagttcagatgctgcctgatttaactctgatttgaaaaataaatgcacccaacaaaccaacatgtaatcctagtctggacttaagctgttattaaacaccacttcttacccaattcatcttgactcttcctttctataaagttataatactataaatttctcaagaatgatccctcagaagactaggaatagctgcatccccacctataattaatgcaccacttttacacctaccagaaatttttttgagtatttttctctaatcttcctgattatctcttcaaaatctctacatgtgtaatttattttgtacagctatctgacatttacaggggtagttgttcaatttctcttcctaaagactttctactcacagctttgagtggcaa

SEQ ID NO: 629944 - DNA, 527 bp, Homo sapiens
ttccagtctgctcattaggattacgccccctttctctgattttacagctacactccatctgatctagttaaaaattcaaatatttatctagtttataataccattttaaasagcaggtaggcagagtaaatctttttccttttttaatttatttcgtcttcaagtttttatttccttgtcatatctgtcaagtctgtcctctaaggtctaacctttattctaaggaaatactgcatttctccaatttatccaagctatctttcttaggttccctcagaagcagaccttgaggcaaggcaagtgcagtttatttggcaggtgttgccccaggaagcaccagtaggggagtggggaatgagacagggaagaggagggagccactacctggttcaattatgagcagataggctctgtgggcatctggggctcaatctaatgggtgctttgggtggatgtcccactgaagaatgaggaaggtgagaatttatcctccaactcctgtccatcatcggttgagagttacccca

SEQ ID NO: 629945 - DNA, 569 bp, Homo sapiens
tgattttacagctacactccatctgatctagttaaaaattcaaatatttatctagtttataataccattttaaagagcaggtaggcagagtaaatctttttccttttttaatttatttcgtcttcaagtttttatttccttgtcatatctgtcaagtctgtcctctaaggtctaacctttattctaaggaaatactgcatttctccaatttatccaagctatctttcttaggttccctcagaagcagaccttgaggcaaggcaagtgcagtttatttggcaggtgttgccccaggaagcaccagtaggggagtggggaatgagacagggaagaggagggagccactacctggttcaattatgagcagataggctctgtgggcatctggggctcaatctaatgggtgctttgggtggatgtcccactgaagaatgaggaaggtgagaatttatcctccaactcctgtccatcatyggttgagagttaccccacagtcgttataaatactgttgttccagtctcttccaagctctagagatattgcataagtaagccagtgcattactgtc

SEQ ID NO: 629946 - DNA, 604 bp, Homo sapiens
tggttatttaaaaagataaacaaaactgacaggccattagttagattaaccaagaaaagaagagagaagatacaaataagctcacttggaaatgaaactggagacattataaccaacaaccacagaaatacaaaagatcatttaagactactatgaacacctatatatattacacacaaaccagaaaacctagaggaaatggataaattcctggaaacatacaaccctcctagattaaatggaaacatacaacccttctagattaaatcaggaagaaatagaaaccctgaacagaccagtcaaaagcagtaagattaaatcagtaattttaaaaaatgccaacaataacaaaaagtccagagcctgatggattcacagctgaattctaccagrcattcgaggaagaattggtatcagtcctactgaaatcattccagaacactgaaaaagaggaaattctttgtaaatcattctacaaagccactatcatcctgatatgaaaaccaggaaaagacacaagaaagaaagaaaagaacagaccaatattcctggtgaacaaagatgcagaaatcctcaacaaaatactagctagcctaatccaaca

SEQ ID NO: 629947 - DNA, 397 bp, Homo sapiens
gttacagaatttagtgaaaaccaatttctgctttttaatatgccctttgttgtaggattcagatattgactaggaaacaaaacaaaacaaaactgtgatgtacatttactgtaacaaacttcccctgggacgatgaactccgtgcctgcaggtgtctcagtgtcrgactgctgttgtccaagcccccaagcaccgtggacatgttcagtggtgtctgatcccatcggcacagagcttggcttctcaggaggctcctcagagtcgcgtaaatagggtttccgatgcccggcctcaccagcttacagacgtgtctgaatctccttttcactcaggccacacttatattcactcttccctcctgaacattcgttagttaaaacaaaaaatgtgtgaggtt

SEQ ID NO: 629948 - DNA, 572 bp, Homo sapiens
gacgtaaaaacaattttaaaacatcaggaaatgggagtaaaatgaaaatcatcacgaaaaaaggcaacgtagaaagtagttaagagctaagattccaggactttgttccaacctggctcccttcttttctcagctacacaactttgggcaaataattttgtgcataaaacraagtttgtgttaagtacttatttgtggcattttccactcgtggcatcatatcagcactcaataagtttcagattttggagcattttgaattatggattttcagatggggatgctcagcctgtagctatatgaagtaggtaatgattttatcaccattttgcaaacaaacaaaaaaaaccctgaggctcagagaggcaaagtctcctgctgagcttcacggctagttaaatgctagaatgaggatttgaactcaggataggatgtattttgctgctgatgtctgaatgccatcactgacaggtcttctttgagtggacagaatgtgtatgggggacttgttaatttggtgtggactcagttttcagaggaaggaagtgaagggtgattcagagcccagggca

SEQ ID NO: 629949 - DNA, 520 bp, Homo sapiens
gagcattttccccagcctattctctagccacatggtgctggtgctctgctggtcctcccagaggcaggaaaaccttacctcaatcttttccagccactggatggtggcccaggagcccccaggtgtggatrgctctctggtactgagaatgaagagacaccaagcctgctggtccaggaagaggtgtgtctgctgtgagttatgtgaggaatccctccccacctcccagctccaccaacaatactggatgtggatctccctgctaagtcccttcttgactttccctttcttgggcttctcttcttttgccttatctggcagtatttgtctatgcctgttgactctttcaggttcgagtctcttgagtaccaaatccaagatataagaagtaaaaggaaaacccagatgctatggtttaaatgtagcccccaaaattttcatgttggaaatttaatctccagtgcaacagtgttgggaggtggggcctgataagaggtaattgggtcatgagggcagagct

SEQ ID NO: 629950 - DNA, 565 bp, Homo sapiens
tttaatgtagttaatgtgggagtgggtcagttatcatgacagtgagttgttataaaaacaaacccagcccctcatgctttcttatacttcttctcttgcctttctgacttctattatgggaggataaagaaagaakcccctcaccggattccagcaccatgctcttgaacttcccaacctccagaactgtgagccaaataaacttctattctgtataaattacccagtctgtggtattctgttatagcagcagaaaatagactaagacataaaattggtacttaaagtggatttgttgctataacaatatctgaaaatgtggaagcaactttggaactgggtaatggataatgggtagaggttggaagaatttgaagaaggaggctagaaaaagactatattgccatgaacagagcactgagggcaattctgatgagttcagaagaagaccccagaactatagagctgtgattgtgcaatgccaacctgagagggctgaaatgtggactgagcccagcaaagccatgaggtttgggatgtccaaggccctgatggtcaaaccccc

SEQ ID NO: 629951 - DNA, 565 bp, Homo sapiens
tttaatgtagttaatgtgggagtgggtcagttatcatgacagtgagttgttataaaaacaaacccagcccctcatgctttcttatacttcttctcttgcctttctgacttctattatgggaggataaagaaagaagcccctcaccggattccagcaccatgctcttgaacttcccaacctccagaactgtgagccaaataaacttctattctgtataaattacccagtctgtggtattctgttatagcagcagaaaatagactaagacataaaattggtacttaaagtggatttgttgctataacaatatctgaaaatgtggaagcaactttggaactgggtaatggataatgggtagaggttggaagaatttgaagaaggaggctagaaaaagactatattgccatgaacagagcactgagggcaattctgrtgagttcagaagaagaccccagaactatagagctgtgattgtgcaatgccaacctgagagggctgaaatgtggactgagcccagcaaagccatgaggtttgggatgtccaaggccctgatggtcaaaccccc

SEQ ID NO: 629952 - DNA, 565 bp, Homo sapiens
tttaatgtagttaatgtgggagtgggtcagttatcatgacagtgagttgttataaaaacaaacccagcccctcatgctttcttatacttcttctcttgcctttctgacttctattatgggaggataaagaaagaagcccctcaccggattccagcaccatgctcttgaacttcccaacctccagaactgtgagccaaataaacttctattctgtataaattacccagtctgtggtattctgttatagcagcagaaaatagactaagacataaaattggtacttaaagtggatttgttgctataacaatatctgaaaatgtggaagcaactttggaactgggtaatggataatgggtagaggttggaagaatttgaagaaggaggctagaaaaagactatattgccatgaacagagcactgagggcaattctgatgagtwcagaagaagaccccagaactatagagctgtgattgtgcaatgccaacctgagagggctgaaatgtggactgagcccagcaaagccatgaggtttgggatgtccaaggccctgatggtcaaaccccc

SEQ ID NO: 629953 - DNA, 587 bp, Homo sapiens
acttcaaatagcaagagaagaaaaaagaaataaaagtaatacaggccccagagtccacttgtgcaggtaagggtcacctgatcctttcatctgggaaggacagcctgacccaggtcagtgacagactggctgagcataagctggaacaaccttgtcattactttcaggttttaacaggggagtgtgtgctacatttgcttggacacttcctgtatgaaaaggacttggtacaagaactgataatgyctggaaagagcagagactcccagcctgaggaccagagcaggttttctatctacagtgccagctgatagcaggttggaggtgccatccctgtgatatcataaagccactgatggcaagttccctttgggcttgcattgctgcttcctgactcctggaaaatgaacagaggatagtttggcagatcaggctgtctgtgaactggccagctcacatctccagcctcagagctaccctcagtcccatcaaacttgtactataacaagtaatgtgcttgggcactgtgtgcctctgcctttctaagtggtctatagagatattatgggattttatcactacaactg

SEQ ID NO: 629954 - DNA, 552 bp, Homo sapiens
tggacatttccaagatggaatgactctgttctgggttcagcagttccttaagcagaatctattcttaaagaatagatagtgtgtcttacatacagtgcctggcatatatgtgatcaataaatattggatgaatggatgaatgactaaatgaatgttgctttgtttacaatcattttatgactcattcaacaaaccagatttctatttccatggaaaggaaaaaaaaacctcatttttccaaatcttatrcctctgcactgaacaagactaatttatatgcttcaaagaaaaattatattctttctttgtaaatgctacccaacacattcagaaccaaccaagtttcagaaaaagtgataatgttgatcaacatccagccatttaagatttatagtttcttcatgagtttgggtttgagttaattactgctaggtactgaagtccctcaccttactctcggggaagagtgggatcttgggttggacagaggaagcctggacttgctgttttttaggaaccttgttgactctaccttatgatacagacaacagg

SEQ ID NO: 629955 - DNA, 645 bp, Homo sapiens
tcttgtcaatttctttggtttatatgtacaatttacaaattgattttgatttctagttttataagagctataagcttaaaaatttatacccagtgttaactttgttcatatgtatgtaacactataataaaaacaatctacatcaacattgcagattccctgaaaatatttccctttgtaaggacattatttagagaaatactgatatacagcttccctctggatcctccctacagctctgtgaggcatattttctcatttcagtttatagaccaagaaatgtgggctcaagcaggtatgtggacagcccattagagcagatgtagacagtgacaaggccagaaacaaatcaaggtctgaatcaaaatctaaggctgtttcccagaaacaacttctttttagcaatgagacactatttcacactttcagcagaaatgttatttattatgtctcttcttagggcaatgatgttcaarcttcaggatttaaaaaataattcctctgaaaaatctagtttagcaaggctgacaaaacaggcagcatctaaattaaatttactgtaaaggttaaaaaaatgtgtaagttatttgagtgatatggtgccctcatgtgctttgcagatgaaacttaggagatagcagggtt

SEQ ID NO: 629956 - DNA, 583 bp, Homo sapiens
gtttccaatataaactgtgcagctcagggctcccaccctgccgagcgtccagtaacttttgctgagccatccaagcccaagggaaaataacccactgtgaaagaacaaaggcagccttagctcaggcctgtccccaccagtcaggagaggcaggcgacagcacctctgggccagtgcggtccctggagggcggccaaacaggctgttctgagcatgacaaggcaagggaggggcccaagaggccccagtcaatgagaaatagatctgcctgagaaataataatgaatgaaaaggcgcagtgacaaagccttgcctccgagctggtttggcacaccctcagatctaatgatatgttcagaaagaaaaatccacaggcaagatttggaatcctttaagccaactagtcatccrcaaacaggcccaatgatcttggttttaccagcaggcattccaagaaagggctcttgggcctgacagctgtccttcttcaacaggctcagcacttgtcagtgctggaatgtgaaatagcctatttgggagcagagggatggactagatgaacctatgagctcacgtaattcca

SEQ ID NO: 629957 - DNA, 467 bp, Homo sapiens
tgtgtgattcacgtagaattaacttctgtgtgtggtataaggtaggggtagaggtttattgtttgttgttgttttcttcttccatggggttatccagtcattccaacattacttrttaaaaagacttacctttccccattgaatcacttgcatattttgttgaaagttgattgactgtatatgtttggatctatctctacactcttaattctatcctattgatatattttatctagctttacaccacttccaaactggcttgatttttatagcactgtaattatcttggattcaggtaatgtgagtccaaaactgtcaccaattttcaaaattcttttggctattcgcatccaaacatttaccaagtgtatttatatcacacttctatataaactttggaatcaactctaatacttcttttatttttcagagtagtcaagtgtattagtaagaagggggagcaagga

SEQ ID NO: 629958 - DNA, 560 bp, Homo sapiens
catcatcactgaacacagtcacaggctggaggttgtgacaggcatgtgtctttagtctgtgtaccaagcattggcagtagtatatatgacatccttcatgctaaactccttttgaaaaccttccatattcatacctctgttcactgctgctagcatgcttttcaaaaagtgtttttatatttacttttcattgatagaaggatgctctggtcccatggctaaattaatgaagtcatatttgggggaaagtatatggcataaacattatttttaatgagaattccagctgaagaatgagcagaaagttgccagggaataacaaaatctttcaatagtcatttagtccagtttccctgcagtgagcctgagcagctggtacaaaatgtttgtgaaaccaatcagaaagatgttcctggtgatccatgcctttytgttagcataataatggactggtaagaaattcactccttaaaaacagtgaagatgcaagctgttgcctatcacagtatgtttacacttatgtgtgcctgctgcattagcacatcccagctcagttattc

SEQ ID NO: 629959 - DNA, 613 bp, Homo sapiens
tccccagtttaactttcagtgccatagataaatataaatccttcctcttttttaaattattgttacccttgggggtatctgcaggcctttttaacattttcaacaatattttacaatacatatcagagaataggcaaaaacacagtgagtaatgcatgttggtcttagccccatgtggggcattgtggggaacctacccttggtgtgcctgattatctcaatgccattttattatcccttgtgggcatgattgcwtgggggaatctgggcatcatcagaagagataggggcgtgaagagtcttttttccctcagagatgctaaataaatgatgtgctgcatgcctgcattttgaccgcaacccatcacatatggtcaggtcttattttccacgtgtcaggtcatgtgggtgataaaaaagtttcaaattttggagcacttcagatttcagattttcacattagggatactcaacctgtatatatatttttgaagctcaaaagaattctgagggtactcatttatacaagtttttcatcagctgctcattttttccatcccaactttttggtaatggctcaagaatctagctagggtcctcataattctgtatc

SEQ ID NO: 629960 - DNA, 595 bp, Homo sapiens
tataagcaactatacataatattcctaagagttaaatgtattgatttctcactatgtgtcagacactgctaacattttatataaattatgtcatggatattgcatgcattatgtcattatctcatttgagtaatgagttataaagagacaagtccagtgagtgatgtatttagagacaggtggggttatcctgccccatttttagtgatatcacacaggcagtagccctgatgccctgggcaggggccaacacatgaaaggagcctgccttgtcttccagtatcctcagctcttggcccaktgagtcttctgtgcatgctgctgggggaaatcagccagaactgctctgctggacaagattctcagaatagaggctgctaacaagcccaggtattcccatgctctgaaattcattgtttgccacaaactgggaagcaatacccaggctacagggcaccatgtaaggcttaaatagagaagtatctagaaaagactccctggatacagaatgtccatggttatctgttatttctgctgaataaacttgagggcaggaagagagaatcaaactggtttttgtgaatattgttctgct

SEQ ID NO: 629961 - DNA, 592 bp, Homo sapiens
cttggtgttcagttaaaattgttacaaaattcagctgaaggtttccttctccctgtggtctttccccaatttcactggcagccttccccaaggacccatgtgagacaaagtcagaaatggcttctctggggactgagagtgtccacagagctcttcccatttcatgcagctctctaagttcatctcagcgccaggtaaggtctaatccttcacctgtgatctggacctacaggttccccagtgaggatatgtgttcaggggtggacaagtatatcaacaagtcatttctttctattgctgacagtatatcattgtatgaatatgtcagttkgtcaatccattctcccactgatagacattaggattgtttcaaattttttgctattacaaataaagctcctataagcatttgtgtacaaacttttgtatggacacatctttcttttctcttgggtaaatccctagaagtagaataactagactacatggcgaatatgtgtttaactttttaaggaactgccaaactgctttctaaagtagcataccagtttacattttcattagtagtatacaagacttccagttgctctgc

SEQ ID NO: 629962 - DNA, 522 bp, Homo sapiens
gagcaagcaagttaattggtccatgtcacatagccagtgagtgacagaggaaaggaacacttaaacccagatctgtggctcttgatcctggcgctcccccatcacaccaggtataggagtgcaatgttctttagggatctaccagaatagcaaaggcctgattgagtgggagctgcttctactattatattagacttcctcagtatcattaaattcatttactggtttttcagataagagatctgagggcttgccagtgtaccacgttgcctctttgaagttacctacttgaagggaagttctgttcaccagagaaggggctttctaagtacagtgggtcagaagggtttgcaatgagaacatccaaagcatttgcctgatggcagctggctcccctgatattttaatgatcccmtatgtgtaaaaatagataccgttaagcacttgaaagcattttgttctcttaaaataggttaaaaacattcctcttttttgtttgcactcttaatttgcttaacaaaa

SEQ ID NO: 629963 - DNA, 589 bp, Homo sapiens
tatttttctcatattgtcatcagttaaccttcaagattatgctagcctcataaactgagttggggagtatttcctcttttctgtgctctcaactagtttgcaaatgttaataattatttttttcctttaatgtttagtagaactttttcagcttgctttatctgcatgggaagattttttttaacatggtttttggttattggccaggtttttcatttctcttaggtaggttttggtaaattatatttttctagggatttgtccattttatctaagttgtcaagtttttgacacaaaaagttcctcatatcttcttatctttttaatctctatcagataaatgctttggctcctttatgtactttctctcttttttatggatcagtcttgctgatgatttgttgattttgttagtcttttcaagtactaaatttttgctttgtagattctcccttcatttctgctctttataattttctttcttctgttttctttgtcttcattgattttatttttytaatccttaatttcaatgtttagctcattaatttttgaatagttggctttataatgaataagtttaatgcta

SEQ ID NO: 629964 - DNA, 546 bp, Homo sapiens
tttttctctcttctcaaatttcatgcacctgtgcccttccactctgaccttgtgttatatttcactaaagaaatagaagcagacattaaacaaagaacttcttcccacctccaaattcccaccctgtctgcactggagatgctcggtttcccctcatgttggtttgaatgaagcatccctgctcctggcaaaggtgatccgtatgcctttgccctggacctcaacttctcaccttttcctagaatctgctccggtaattatcctttcgactgttttgcattatggatctttccctctctactaatttatcccaatcagcacacaagaawgctgtagtatccttgtcttaaaatgaatagcaaaagagctcaagcccacatttcttccaacctctgccttattcccagttttccctctatagcaaacttcctccaatatagtaaccactagccacatacctgtgctgtgtattgagatgtgctgtgtaaacacacataccagatttcagagcctttgtaaaataaaaaagtaaagtattgccaggca

SEQ ID NO: 629965 - DNA, 651 bp, Homo sapiens
acacaattgctttggaagagaacatggggttgtggagaaaactaaaatcagggtctaaaaatctcagctttgttgttagtgaagttgaaagcttggtgaagtcaccaaatccttatatgtcctaatttttctcccatggtatggggacattaacagtttgatagcagatttatagtgttcwtgtgagaattaaatgaaattgctaatcacaacagtacctagcacagtgcttgagatataataggcccacagtaggcaactgacaggtattaatttgccctttcctgttgcttcacgaaagctttagatcatagaatttggcaaaccttattgtctattgacggcctgtttctatagtccagtgtttttcagacttaactttcaactccttttaaaagaaaaacatttgcctgaaatcctgccactaacttatgcatttttattataataatatttaaaatataaaaccattgctttatgaattagaccctaatatttataatgtatattcaattataagaccagagcaaattttcaaataaggtttgaatacaattaaaataaaataaaattcaaataaaatcattaagttaatgtgattgaggatgttatctttctgaaattaaatcacgatgtacaactgaatgtagt

SEQ ID NO: 629966 - DNA, 651 bp, Homo sapiens
acacaattgctttggaagagaacatggggttgtggagaaaactaaaatcagggtctaaaaatctcagctttgttgttagtgaagttgaaagcttggtgaagtcaccaaatccttatatgtcctaatttttctcccatggtatggggacattaacagtttgatagcagatttatagtgttcttgtgagaattaaatgaaattgctaatcacaacagtacctagcacagtgcttgagatataataggcccacagtaggcaactgacaggtattaatttgccctttcctgttgcttcacgaaagctttagatcatagaatttggcaaaccttattgtctattgacggcctgtttctatagtccagtgtttttcagacttaactttcaactccttttaaaagaaaaacatttgcctgaaatcctgccactaacttatgcatttttattataataatatttaaaatataaaaccattgcwttatgaattagaccctaatatttataatgtatattcaattataagaccagagcaaattttcaaataaggtttgaatacaattaaaataaaataaaattcaaataaaatcattaagttaatgtgattgaggatgttatctttctgaaattaaatcacgatgtacaactgaatgtagt

SEQ ID NO: 629967 - DNA, 629 bp, Homo sapiens
aagattttccccataggtaaacattctcattgattaaagcacaaaaataataaagcagttagagaatggctccaggagataatgtttcattgactggtgttctgtcagtaatgtgaatgccatcctgttctcattttctccctgaaccctgtagggaggccagattgaataagtaacccccacaaaagaaagaatttctgaaaatgtcaaaaacgcaaaacgtaatttggtctctaaaataattgattactttgcatggacagatccagaagagaggacatagaaaatttttcaactgtttctcccattcacccctactctagtagtcctctgtttctattatcgccatcgtyatgtcagtgggtactcaatgtttagctcctacttgtaagtgaaaacatgcaatatttgattttctctgtttgcattaatttgcttaggataatagcatctagctgcatccatgatgctgcaaagaacataattttaatgggcacctggattgattctatatctttgctagtgtgaatagtgatgcaaagaacattcaagtgcatatgtcttttgggtagaaagattggttttgttttggatatatacctagtaatgggagggctaggtcgaatgat

SEQ ID NO: 629968 - DNA, 594 bp, Homo sapiens
atggcctcctgttccatcctcattgctgcaaaagacatgatttgttctttttaatggctgaatagtattccattgtgtatatatgccacattttctttatccaatcatctcttgatagacacttaggttgattccatattgtttctattgtgaataatgctgtgataaacatatgcgagcaggcatctttgtggtataatgaattcttttcccttgggcagatagccagtagtgggattgctgaatcaaatggtaattctatttttagytctttgagaaatctccatactgttttccatagcagttgtactagtttaaaaatgtgtcacactttgatgctcaccctcttctcctaacattctccctcttaaacatcctctcatatctcctcttctaccaaatcagtcctttctcttgcttttctttgatgatgacagaaaccctctagcctcagggccttcgcatttgcttcgcccctgccccaacccacagaattacagatctatccctcttttcactcaggtgcacgaataaatattatcataaacaggagtctatctctggctaccttatctaaagtaacatttcccctgc

SEQ ID NO: 629969 - DNA, 467 bp, Homo sapiens
tgaaaatattttatatttatggattggaagatttaacattgtyaaaatgcccataacacccaaagcaatctgcgattcaaagaaatttctatcaaaataccatttaccttctcacataagtagaaaaagtattctaaaatttatgtggaaccacaaaagactcagaacagccaaagctatcctgagcaaaaggaacaaaactggaggaatgacattacctccagttatactacagagctataataaacaaaacagcatggtgatggcacaaaaacagacacatagaccaatgtaacaaaatagataacacagaaataaatccatatatcaacagtgaactcatttttgactaaagagtcaagaaaatacattagggaaaggacagtctctacaattaatggtgtttggaaaactgggtatccatatgcagaagaataaaactatactcttttcttgccgtatacaaa

SEQ ID NO: 629970 - DNA, 467 bp, Homo sapiens
tgaaaatattttatatttatggattggaagatttaacattgttaaaatgcccataacacccaaagcaatctgcrattcaaagaaatttctatcaaaataccatttaccttctcacataagtagaaaaagtattctaaaatttatgtggaaccacaaaagactcagaacagccaaagctatcctgagcaaaaggaacaaaactggaggaatgacattacctccagttatactacagagctataataaacaaaacagcatggtgatggcacaaaaacagacacatagaccaatgtaacaaaatagataacacagaaataaatccatatatcaacagtgaactcatttttgactaaagagtcaagaaaatacattagggaaaggacagtctctacaattaatggtgtttggaaaactgggtatccatatgcagaagaataaaactatactcttttcttgccgtatacaaa

SEQ ID NO: 629971 - DNA, 467 bp, Homo sapiens
tgaaaatattttatatttatggattggaagatttaacattgttaaaatgcccataacacccaaagcaatctgcgattcaaagaaatttctatcaaaataccatttaccttctcacataagtagaaaaagtattctaaaatttatgtggaaccacaaaagactcagaacagccaaagctatcctgagcaaaaggaacaaaactggakgaatgacattacctccagttatactacagagctataataaacaaaacagcatggtgatggcacaaaaacagacacatagaccaatgtaacaaaatagataacacagaaataaatccatatatcaacagtgaactcatttttgactaaagagtcaagaaaatacattagggaaaggacagtctctacaattaatggtgtttggaaaactgggtatccatatgcagaagaataaaactatactcttttcttgccgtatacaaa

SEQ ID NO: 629972 - DNA, 467 bp, Homo sapiens
tgaaaatattttatatttatggattggaagatttaacattgttaaaatgcccataacacccaaagcaatctgcgattcaaagaaatttctatcaaaataccatttaccttctcacataagtagaaaaagtattctaaaatttatgtggaaccacaaaagactcagaacagccaaagctatcctgagcaaaaggaacaaaactggaggaatgacattacctccagttatactacagagctataataaacaaaacagcatkgtgatggcacaaaaacagacacatagaccaatgtaacaaaatagataacacagaaataaatccatatatcaacagtgaactcatttttgactaaagagtcaagaaaatacattagggaaaggacagtctctacaattaatggtgtttggaaaactgggtatccatatgcagaagaataaaactatactcttttcttgccgtatacaaa

SEQ ID NO: 629973 - DNA, 282 bp, Homo sapiens
ggaaatttatgtcagactcacagaacatttgtcacttgatatatgtattaatatgtaagttagagaataaatgtgcattttcttattccaggaaatatttggttccagtgtttcaaaaaatcattttgtttacattttggaatcaaaagttcaataaaccctcccggcgttatgaaatcatgakagtgagactagttagaccctccatgacttgagaggctactgttgttttaaaagactggtttctctcaggataaactaattactcatcacaggagaatt

SEQ ID NO: 629974 - DNA, 587 bp, Homo sapiens
gaagttaggaatcctgcgttcaatctcggctcttccactcactgaatgtgtgtctttgacaagttccctactctgagcatcagttacctcattagcaaaatggagataatagatacctaatagagaatgggaggattctatgacgtaacagaaagctttttctatggttactggcacatgcaaggtgctcaaaatattagctgcttttttttttctctccaacatcaacattttatattttcaacatttttaaaatttaatttctkgacatacaaaatactgtacatcaagctggtccaacccttatcctggtaagccacatgcgactgcagcccaggatggctttaaatgctccccaacacaaattcataaactttcttaagacattatgaggttttttttttttttttttaagctcatctgctgttgttaatgttactgtatttgatgtgtggtccaagacaattcttcttccagtgtggcccagggaagccaaaagagtagacaccctgctgtacataattaatggatacaacttgatgagtttggaggtaaatatacacccatgaaaccatcagcacaaccaa

SEQ ID NO: 629975 - DNA, 542 bp, Homo sapiens
aatgtttctggtcggagatgtcatttatggtttatggtcatgctaaccttagccattaggctgatgccctttggatttaggcagtttttgatcaaggggagctttaagatggcagtgcttgtccaagatggcgatgctcctgccgtgtcaattatcacttatttgaatttgtcccagacttgactagtggaagctccttcaactggttcttatgtcttttgcacatgcccctagagtacctctggcacaacaggatgttaccagatcatcttgtattttccctgcctcagccctggagtcaggtactcttccccaggaagctctggctccctagtatctagaaacaaataataggacactatatgtgctcctcataactgcggtgtaattacatgtatgtcctctaaagagagtcagrtaaaaaaaatctatttatgcactattcacagtgaaaaagatatggaatcaacctaaatgcccattaacaataaactggattttaaaaaaagtggtacatatgcaccatggaatactatgcaacc

SEQ ID NO: 629976 - DNA, 602 bp, Homo sapiens
tcctcctgtctatgctaaataattgtcgtactttcaggattgtcctttgctgtctataatacaccttccacactgatgctgaagttttctttyaaaaaatctaatcttattgttactacatctaaaaaacccgatcctggctatccacagccaagagaaataattaaagatttcttgtcatatcatctaaaccctttgattatctgactcttacatacttattttttagtttggtttttattttttaagtatacaattcagtggctttttagggtattttcaaagtttgaaattacttatactgtctaatattagaacattgttatcaccctaaaaaaatcttgaacactttgtgttattttttattttttagagacagggacttactctgtctcccaggctgcagtacagtggtacatttatggttcactgcagccccaaactcctggcctcaagcgatcttcctaagtagctgggactacaggtgcaagtcaccacacccagctaagttttttatttttatttttggtagagatgaagtctctctttgtttcccaggctggtctcaagcttccagcttcaagtaatcctcctaagttggc

SEQ ID NO: 629977 - DNA, 514 bp, Homo sapiens
gggggataaagctgattagcttagggttgccttacaatgaaatacatggtagaagcaatgcactgttttctcccatagtatctccctcctttagagggaccaaaaatctagtataaaatggcacacttaattttagggatctgcctttgccttcagctgtgcctacttattaggccctamaaatgcatgctacctggcccagttccaccaaaggctccaccctgaagccagtaatccaattaagaaactgacaaatgaaaactcttacaagtgctgaatattctgtttgtgttgctatatatgtgttgtgtgtaatgtctacaataagagctctaattaattggcttaaaaaatagtgcttaaatcaaatatgttttagttcatgtgactttaatttttaagaaataaaaataatcttaaggattattggtaaaatgcaagggtcatcaaaatccaaataggtggtctaaatcgtaaaacagatactaggtttgctaaatgttcaaaggttgta

SEQ ID NO: 629978 - DNA, 590 bp, Homo sapiens
caaacctgctccgaattttgttcacaagagtataacttacttaattattaaaggctgcacatagttcaaaataagtttccttgactctgaaaaacaaaataaggatcagcaatattctaagcaaaagtcaaaaagattgctttagctttctgagtacaatccatttaagtcaactcttgtttcacttgatattcataaacatttcagttcttcatgagtcctgtacattttttccaatgttacaatcttcaaagctattggaaatctgcatttgagaacagctgttaaagtcttatagcttgattatatcccatcttttgagaaggaacayagcaagataacgattgtctgtaagtgacaaaattttcagggtagttacagttaaaaacatgactgacaaagaagtttagttatctccgtggtttacaataattttaaaattaattatgattgatagcatatacttagacattagaattttagaaatcccatacaattttggaacatatattggtattattcacaaaaatataagttaagactggacatcattttggcaatcccaatgtgattaaacatgtcaaataatc

SEQ ID NO: 629979 - DNA, 590 bp, Homo sapiens
caaacctgctccgaattttgttcacaagagtataacttacttaattattaaaggctgcacatagttcaaaataagtttccttgactctgaaaaacaaaataaggatcagcaatattctaagcaaaagtcaaaaagattgctttagctttctgagtacaatccatttaagtcaactcttgtttcacttgatattcataaacatttcagttcttcatgagtcctgtacattttttcyaatgttacaatcttcaaagctattggaaatctgcatttgagaacagctgttaaagtcttatagcttgattatatcccatcttttgagaaggaacatagcaagataacgattgtctgtaagtgacaaaattttcagggtagttacagttaaaaacatgactgacaaagaagtttagttatctccgtggtttacaataattttaaaattaattatgattgatagcatatacttagacattagaattttagaaatcccatacaattttggaacatatattggtattattcacaaaaatataagttaagactggacatcattttggcaatcccaatgtgattaaacatgtcaaataatc

SEQ ID NO: 629980 - DNA, 590 bp, Homo sapiens
caaacctgctccgaattttgttcacaagagtataacttacttaattattaaaggctgcacatagttcaaaataagtttccttgactctgaaaaacaaaataaggatcagcaatatyctaagcaaaagtcaaaaagattgctttagctttctgagtacaatccatttaagtcaactcttgtttcacttgatattcataaacatttcagttcttcatgagtcctgtacattttttccaatgttacaatcttcaaagctattggaaatctgcatttgagaacagctgttaaagtcttatagcttgattatatcccatcttttgagaaggaacatagcaagataacgattgtctgtaagtgacaaaattttcagggtagttacagttaaaaacatgactgacaaagaagtttagttatctccgtggtttacaataattttaaaattaattatgattgatagcatatacttagacattagaattttagaaatcccatacaattttggaacatatattggtattattcacaaaaatataagttaagactggacatcattttggcaatcccaatgtgattaaacatgtcaaataatc

SEQ ID NO: 629981 - DNA, 590 bp, Homo sapiens
caaacctgctccgaattttgttcacaagagtataacttacttaattattaaaggctgcacatagttcaaaataartttccttgactctgaaaaacaaaataaggatcagcaatattctaagcaaaagtcaaaaagattgctttagctttctgagtacaatccatttaagtcaactcttgtttcacttgatattcataaacatttcagttcttcatgagtcctgtacattttttccaatgttacaatcttcaaagctattggaaatctgcatttgagaacagctgttaaagtcttatagcttgattatatcccatcttttgagaaggaacatagcaagataacgattgtctgtaagtgacaaaattttcagggtagttacagttaaaaacatgactgacaaagaagtttagttatctccgtggtttacaataattttaaaattaattatgattgatagcatatacttagacattagaattttagaaatcccatacaattttggaacatatattggtattattcacaaaaatataagttaagactggacatcattttggcaatcccaatgtgattaaacatgtcaaataatc

SEQ ID NO: 629982 - DNA, 432 bp, Homo sapiens
cccagctctttttattcttgaagaatgataacagtaaactccttctggttctgtaactgaacaagttactcaccttatctttgcttttgattgtgtgtgtatacaaacaacacaaaattacttgcttgttggctttgtgttaccactattaatgccaatgggggaaaaaaracacgtgaaagcgttggacaggccataaatcattatagaaattgtccatatcatttttcaggaacttagtaaatgggaaagtatccccatgtattttattattttggaaagataaatctaaaagtcttttacattcagtcttttaaattttaatccttagcccttgccattgaagcctttctacattcacccatccgagcacctgttccacaatgtaccatgcctaccaccaggctttaaggttagaacaattaacagcaa

SEQ ID NO: 629983 - DNA, 587 bp, Homo sapiens
gtcttagctgaaagaggtgctgctgacatctagtaggttgaggtcagagatgatgtcaaacattctacaatgcataggaaagaccacctgaaaatatatgtatattsagttcaaactgtcaatactgctaaggttgagggcctttagagttagcctgaactcacaaaattttccgataaaaggcactttcctttcccttccaccttataagctttaattcatccttaaaaggttttggtgaagataattttctttgtaaaggagaaaacatgtaagctttggaaccaggaaaggatgattgtgcatcactacttactagccccatgtttgaccaactttgtttccttgggcgctataacaaaatacaataaaacaggtgccttagaacaacagaaatactgtctcacagttctggaggctagaagaacaagttgcaggaccatgctccctctaaaacttgtagggaaattcttccttgcctctttccagcttctgagggtttgacagcaatctttggtgttccttggcctatggatgcatcactccaatcctccatcttcacatgaccttctctctgtgtatgtctg

SEQ ID NO: 629984 - DNA, 575 bp, Homo sapiens
cccaaatgccgtgtgttaactttatatgctgcttttctctttctggcttaggctgcagactgcctaagggcagagaaaagtttttttgttttttttttgtttgtttgtttttttaatgagtttatcttttgaacctgatgcaatgccagtataacttagggtggaagaacttgggatctgtagttaggatgtctaggtttaaatcttacctttgctacttaatagtcatgtggacttgggaacatttaaaaatttcccccagactcacattctatctgggaagagaagatccaacaacttacttcaaaaggcttttgtgaggattaagtggtccatgtaaagcacttggcatggtatctagcacatactgagtattcaaaaaccattatattgttattaggtactcaaatgttaaatgaagagtaagaaaatgaatgtacttattcattcagaaaatatttattggtgctagacccatttctaagacctggaagggtagcagagagcacatccaagtkgctccctggtttttctagagcttacattctctcaaagggagaaagacaccaaacaga

SEQ ID NO: 629985 - DNA, 514 bp, Homo sapiens
ggttcttcaaaacagctattttgagttatctgaaaggtcacatatctctgtcactctgggattgctcattggtgccttatttagtttggcaaagtcatgttttcctagatggtcttaatacttttggatgtttgtcaatgtctggacattgaaaaactagtttattctaatcattgcagtctgagcttatttatacctataattcttgatagggctttccaggtatttaaagggaattgaatgttgttctaaatctttggtcactgtgtgcattagggkgcaccccaagcccagtaacactttaagtcttgctgactcatacaggtgccaccttggtgatcttcagtaagatacaagagaattcccagtattagcaggtaaagtcttgttctctttacttactttctcccaagcagtgtctctatgtctcttcgtactgagctgcctgaagttggagaaggggtgtcacaagccctcctgtgactaccattgctgggactcttcttggtcacag

SEQ ID NO: 629986 - DNA, 565 bp, Homo sapiens
agtaggcagaagtagtcaaacctagtgctcaaaatagtatagttattgattattccatcttctggaaaatgtgacctttttgtttttgtaaaagttactaacaaaaccattaaaaatctkgttaaggaaaccttaattttctgagtattttcttacccatacctgaatattgaggcaaattgaagatgataatcccctttttcatttcattttagataattttctatgaataattcaatgagcactttcatttgacttttaatttctttcatagtccccaggaatattacaacatttttctttacgtttgagaaaagaagaaaaatacctattatgattgctaagaaaaaggaaaattattttccttgaaagtaaagtggatattgttgacctttaattcactatgcagttattcacaaattgtttgtagtaagctggtaaagtacaggataagatatggatcctaccttgggattcaatggaacagagaaacagggcagcaaggatgtgtgctgagtcacagaataaccttaccacctgctgccactgccttagtccaagctgc

SEQ ID NO: 629987 - DNA, 494 bp, Homo sapiens
tggtatgtgatcaggattaaaggagcagaagcagcaggaaaccattaatacccactagggctgaaggaacaaggagagaaaacagtattgtgtgaccagtgagatatggaactgtaggccacatggctcacacctgtaatcctagcactttgggaggccgaggtatgtaaaacacttgaagtcaggagttcragaccagcctggccaacatggtgatatcccatatctactaaaaatacaaaaattagcctggcatgggagcacatgctggtaatctcatgtatttgggaagctgaggcaggaggattgcttgaacctgggaggcagaggttggagtgagccgagattgtgccactgcactccagcctgggtgacaaagcacgactccacctaaaaaaaaaaaaaaaaagagagagagagaaggcaaaaaaaagaagatatggaactgtaaaagagggaccaaccagtaggaattctcatcagagagggatgca

SEQ ID NO: 629988 - DNA, 437 bp, Homo sapiens
caagctagagatgaaaatagaaaatgtgtgtgtgtgtgtgtgtgtgtactggtgaggatgaagagtttggggacatcctgctttattaaaaagaagcatgagattcagagtgaaaaaaaaaaaagtagacaaaawttcagaaaaaaaagggatggcagggtagtcgggccatggatttacctggcagtggaaagtagaaaagaataatatgaacgagtctggagacactttttaccttagacaccagccactttgagcgaggaagtatatgagtaagaacaggatggcaatttggctaatatactacatgtacgataagttttagattgctgttaaatgttgtttggctagagaaacccaagattaatagaaccatgctttataaatcatctatttcccacaaggtttccaaggcaataatatactcaaggaacaag

SEQ ID NO: 629989 - DNA, 437 bp, Homo sapiens
caagctagagatgaaaatagaaaatgtgtgtgtgtgtgtgtgtgtgtactggtgaggatgaagagtttggggacatcctgctttattaaaaagaagcatgagattcagagtgaaaaaaaaaaaagtagacaaaatttcagaaaaaaaagggatggcagggtagtcgggccatggatttacctggcagtggaaagtagaaaagaataatatgaacgagtctggagacactttttaccttagacaccagccactttgagcgaggaagtatatgagtaagaacaggatggcaatttkgctaatatactacatgtacgataagttttagattgctgttaaatgttgtttggctagagaaacccaagattaatagaaccatgctttataaatcatctatttcccacaaggtttccaaggcaataatatactcaaggaacaag

SEQ ID NO: 629990 - DNA, 607 bp, Homo sapiens
tattttctcttgtttgtgtgtgtgttcaattaattttaaagaaataacagtgagattcagatttcttaaaaatatttttaaggacattattaatagctcaaataaagccattaatacatgcacgttatgatgatcaagtgatcctggttaaaattaagggaaaggtacactttaaaaatatgatttaaaaagcccccccagtcacttaacttcagaagcagggcccggtagcccaccctgtccttggtttttaacatagaaattaaggtggtagcttcggcaggtgttattaccaggggctcatgagtagaccctaaaaggtttgtgaaccctcttaggattatgtgcagcgtttcacatggatgggcacatatgcatttccctggggtaaaaggcatctgattctcaaaggagatatcaacaaaattgatgagaaattttggtgtagggaaaagtacgtaagaccaacatttaggaattctgggttttaattgtaataaggtgcttaccagttatataattgtaggcraatcatttctctgggccccagttacttcatctgtggttactgtgggccccagttacttcactgtggttccacacttgt

SEQ ID NO: 629991 - DNA, 543 bp, Homo sapiens
taacaatatgaaattaaatgcatttattacttattagtgaagctctatatgtggcttctaattacatatgaatagtttggtcaagagrggcctcaaaaaaatgagaacaagttttcccagttcatctggactgaatcactatatgcataagtgatacatgttttattctcaaacacttgggttttgtttaagcacaccaagcattctagtttggctgtttcccaagtttgctttaaagtaagattattggatcagactggtgtttcaaagaaataaatcaaaatgtacacagtcaaatttgttaggcagaaaaaaactgtcatctctccaaacgttttttggtgcctatgtttctcaagctcaaagaaaataagacatgccaaaaaaggagcatctgtcttaatgtaagtaaagaaaagtgataaaaaataatttgtgctgggtgcagtgacctgtaataccaatgacttgggaggcggaagagaaaggattgcttgaggacaggagattgagaccaacctgagcagcatagtgagacccagt

SEQ ID NO: 629992 - DNA, 543 bp, Homo sapiens
taacaatatgaaattaaatgcatttattacttattagtgaagctctatatgtggcttctaattacatatgaatagtttggtcaagagaggcctcaaaaaaatgagaacaagttttcccagttcatctggactgaatcaytatatgcataagtgatacatgttttattctcaaacacttgggttttgtttaagcacaccaagcattctagtttggctgtttcccaagtttgctttaaagtaagattattggatcagactggtgtttcaaagaaataaatcaaaatgtacacagtcaaatttgttaggcagaaaaaaactgtcatctctccaaacgttttttggtgcctatgtttctcaagctcaaagaaaataagacatgccaaaaaaggagcatctgtcttaatgtaagtaaagaaaagtgataaaaaataatttgtgctgggtgcagtgacctgtaataccaatgacttgggaggcggaagagaaaggattgcttgaggacaggagattgagaccaacctgagcagcatagtgagacccagt

SEQ ID NO: 629993 - DNA, 543 bp, Homo sapiens
taacaatatgaaattaaatgcatttattacttattagtgaagctctatatgtggcttctaattacatatgaatagtttggtcaagagaggcctcaaaaaaatgagaacaagttttcccagttcatctggactgaatcactatatgcataagtgatacatgttttattctcaaacacttgggttttgtttaagcacaccaagsattctagtttggctgtttcccaagtttgctttaaagtaagattattggatcagactggtgtttcaaagaaataaatcaaaatgtacacagtcaaatttgttaggcagaaaaaaactgtcatctctccaaacgttttttggtgcctatgtttctcaagctcaaagaaaataagacatgccaaaaaaggagcatctgtcttaatgtaagtaaagaaaagtgataaaaaataatttgtgctgggtgcagtgacctgtaataccaatgacttgggaggcggaagagaaaggattgcttgaggacaggagattgagaccaacctgagcagcatagtgagacccagt

SEQ ID NO: 629994 - DNA, 543 bp, Homo sapiens
taacaatatgaaattaaatgcatttattacttattagtgaagctctatatgtggcttctaattacatatgaatagtttggtcaagagaggcctcaaaaaaatgagaacaagttttcccagttcatctggactgaatcactatatgcataagtgatacatgttttattctcaaacacttgggttttgtttaagcacaccaagcatyctagtttggctgtttcccaagtttgctttaaagtaagattattggatcagactggtgtttcaaagaaataaatcaaaatgtacacagtcaaatttgttaggcagaaaaaaactgtcatctctccaaacgttttttggtgcctatgtttctcaagctcaaagaaaataagacatgccaaaaaaggagcatctgtcttaatgtaagtaaagaaaagtgataaaaaataatttgtgctgggtgcagtgacctgtaataccaatgacttgggaggcggaagagaaaggattgcttgaggacaggagattgagaccaacctgagcagcatagtgagacccagt

SEQ ID NO: 629995 - DNA, 533 bp, Homo sapiens
cacatctttgccagcatttagtttctttttttcactgtagtctttctaatacttgtgtgaaattatctaattgtttctaatttgcattcttctaatgtctaatgatggaaatattttcatgtgctaatttaccagggtaattagcatattattcacctcaaatacttgtcaaaatcatctcttcttgctactttgaagtatataataccttattcttggctatagtcacactactgtgcaataaaacaccagaactcattcctcctatctaactgtaattttgttccatttgactgacttctcccctcccctcttccctgctactctttccagcatctggtaaccactatcctactctctacttcaatgagctcaacttgttaagattccaattatgattggtatcatgcattattaggccttaggtgcgtgacttctttaacttaacataatgtcttccagtttcatccatgctstcacaaataacaccatttcattctttttttatggctgagtagtactccattgtgttt

SEQ ID NO: 629996 - DNA, 528 bp, Homo sapiens
gttaataaagcagcagcagggttttagtgtattgactccaattttaaaagcagttctactgtgggcacaatgttatccaacagcattatatgctaccaagaaatctttcatgaaaaaaaaaaaaaccggtaaatccaggtggcagactccatkgttattttaagaaatttgccacagccacccaaacattcagcagccaccgccctgatcaatcagtagccatcagtatcaagacaagatcctctatcagcaaaaacattatgccttgctgaaggcacagatattcattagcatgtttcagcatattttaaaattaaagtatgtccattttttaaacctaatgttatagcacacttcataaactacagtgtggtattataacttttatatgcactggaaaagcaaaaaattttgtgactcactttactgtgatatttgctttattgtaatggtctgaaatcaaaacagcaatatttcccttgtatgcctatatattcttaatattaaccccttttcaggtgcatagtt

SEQ ID NO: 629997 - DNA, 480 bp, Homo sapiens
gtttattttgttctcatttttctaggttttagaaatgcaacttttgcttatttctttggaatctttctacatttytgatataagtgtttttgctataaactttcctattataacttctttttcaacatcccataggatttggtatgttgggtttccattttcatttgtatcaatattcttcaaaaatgtttcttcacaatttcttcattactcattagttgcccaggagcatgttgtttaattttcatttatttgtacatttcccaaggttcttcatgttattgattcctagttttattatattttggttagaaaagttatctgatataattttaacatttttaaatgtgataagactattttttttacttcacatatggtctatcctggagaatgttccatgtgctgctgagaaaaatacatattctgaggctgttacgtgaatatttctgtaaacatttattaggtttatttggtcta

SEQ ID NO: 629998 - DNA, 480 bp, Homo sapiens
gtttattttgttctcatttttctaggttttagaaatgcaacttttgcttatttctttggaatctttctacatttctgatataagtgtttttgctataaactttcctattataacttctttttcarcatcccataggatttggtatgttgggtttccattttcatttgtatcaatattcttcaaaaatgtttcttcacaatttcttcattactcattagttgcccaggagcatgttgtttaattttcatttatttgtacatttcccaaggttcttcatgttattgattcctagttttattatattttggttagaaaagttatctgatataattttaacatttttaaatgtgataagactattttttttacttcacatatggtctatcctggagaatgttccatgtgctgctgagaaaaatacatattctgaggctgttacgtgaatatttctgtaaacatttattaggtttatttggtcta

SEQ ID NO: 629999 - DNA, 480 bp, Homo sapiens
gtttattttgttctcatttttctaggttttagaaatgcaacttttgcttatttctttggaatctttctacatttctgatataagtgtttttgctataaactttcctattataacttctttttcaacatcccataggatttggtatgttgggtttccattttcatttgtatcaatattcttcaaaaatgtttcttcacaatttcttcattactcattagttgcccaggagcatgttgtttaattttcatttatttgtacatttyccaaggttcttcatgttattgattcctagttttattatattttggttagaaaagttatctgatataattttaacatttttaaatgtgataagactattttttttacttcacatatggtctatcctggagaatgttccatgtgctgctgagaaaaatacatattctgaggctgttacgtgaatatttctgtaaacatttattaggtttatttggtcta

SEQ ID NO: 630000 - DNA, 480 bp, Homo sapiens
gtttattttgttctcatttttctaggttttagaaatgcaacttttgcttatttctttggaatctttctacatttctgatataagtgtttttgctataaactttcctattataacttctttttcaacatcccataggatttggtatgttgggtttccattttcatttgtatcaatattcttcaaaaatgtttcttcacaatttcttcattactcattagttgcccaggagcatgttgtttaattttcatttatttgtacatttcccaaggttcytcatgttattgattcctagttttattatattttggttagaaaagttatctgatataattttaacatttttaaatgtgataagactattttttttacttcacatatggtctatcctggagaatgttccatgtgctgctgagaaaaatacatattctgaggctgttacgtgaatatttctgtaaacatttattaggtttatttggtcta

SEQ ID NO: 630001 - DNA, 588 bp, Homo sapiens
agtcagcctaaaaaccctaaaaaatgggtttaaaaagaaaaatttctgccatttgcaacatcagcatattattcatttttgtaccgctaatgggacctgttagataactaacacatgttgaataaagaaataaattattgaatgagcagtacaaaataatcaatgtctatttccagattaaaataattgcccaactatgtgaccagcaatcaggattgccatattgtgtctagggggcgtcactctaataagctattataaaatatttcacttaaaacatgaacagagttgcacaataatcaaaatatttaccctgaggaccccagttttttcctcagatcgtaacagattttaataattcaacctcaaatactgtttaaagctagtgctttcactaatactatttgacctgaatttcatcagctgggatctggaagtatctgcctacattgaccctataaagcacacattggaaacaggatttgttaaagagtaactataaaactttcttctgtaacagagactggggaccccaaaagggaagaggkcaggaagggagtaagggttgaaaaattatttattgggtac

SEQ ID NO: 630002 - DNA, 617 bp, Homo sapiens
gcaaggttaacggttatatagatcacggtctttccaacattaatgagcataggaatcacgaatagtctkgttaaacaataaactctgattcagtaggtctgtggtggggcctaagagtctgcatttctaaccagctcctaggtgatgtcaattctggtggtccatgggccacacttgggttagtgaggcaagactacactttaatattttagtatttaccaaggactttaatccctactatttaggtaatattcagaataaccctgtgaggtaggcaaggtggttattattattctcatcataacagatgaggaaactgaggcaataatggttagccagagaatgctaggacacaccttacttggaactcagcctcatactcgctgattccttcatagcagataggctagtcctttaatcaactatgttatttctggtgacaagaactgtgccttgatcatccctgtgtcccctgcagtttctagtatggtgtttggtacatggcaagcatctggtgatgtttactccgaaatttctttttatatctcacccgccactatgcaatcttctgggtgctttattttatatttattattctaattctcacactcagtctt

SEQ ID NO: 630003 - DNA, 617 bp, Homo sapiens
gcaaggttaacggttatatagatcacggtctttccaacattaatgagcataggaatcacgaatagtctggttaaacaataaactctgattcagtaggtctgtggtggggcctaagagtctgcatttctaaccagctcctaggtgatgtcaattctggtggtccatgggccacacttkggttagtgaggcaagactacactttaatattttagtatttaccaaggactttaatccctactatttaggtaatattcagaataaccctgtgaggtaggcaaggtggttattattattctcatcataacagatgaggaaactgaggcaataatggttagccagagaatgctaggacacaccttacttggaactcagcctcatactcgctgattccttcatagcagataggctagtcctttaatcaactatgttatttctggtgacaagaactgtgccttgatcatccctgtgtcccctgcagtttctagtatggtgtttggtacatggcaagcatctggtgatgtttactccgaaatttctttttatatctcacccgccactatgcaatcttctgggtgctttattttatatttattattctaattctcacactcagtctt

SEQ ID NO: 630004 - DNA, 617 bp, Homo sapiens
gcaaggttaacggttatatagatcacggtctttccaacattaatgagcataggaatcacgaatagtctggttaaacaataaactctgattcagtaggtctgtggtggggcctaagagtctgcatttctaaccagctcctaggtgatgtcaattctggtggtccatgggccacacttgggttagtgaggcaagactacactttaatattttagtatttaccaaggactttaatccctactatttaggtaatattcagaataaccctgtgaggtaggcaaggtggttattattattctcatcataacagatgaggaaactgaggcaataatggttagccagagaatgctaggacacaccttacttggaactcagcctcatactygctgattccttcatagcagataggctagtcctttaatcaactatgttatttctggtgacaagaactgtgccttgatcatccctgtgtcccctgcagtttctagtatggtgtttggtacatggcaagcatctggtgatgtttactccgaaatttctttttatatctcacccgccactatgcaatcttctgggtgctttattttatatttattattctaattctcacactcagtctt

SEQ ID NO: 630005 - DNA, 433 bp, Homo sapiens
tgcttaaatttttaatcgaagggttgttagtcaagaaagagtgcagaaaaagttagtggtcttgttggtacccccaaggatgctctgagtagatgttaggaaaggactttatgccatagactcacaaaacatttgagttcttgctttctgaaagagtcagcgttcctaccagagcacggtctttcacagacattaagaggcaagagggatttttaaaaatcatgtgctgagcctggtcaactaactaatgtggcactttatttcatttattttatatatatwtttttgagacagagtttcgctcttgttgcccaggctggagtgcaaccgcatgatcttggctcactgcaacctccacctcccgggttcaagtgattctcctgcctcagcctcctgagtagctgggattacaggcacccgccaccacacccgg

SEQ ID NO: 630006 - DNA, 433 bp, Homo sapiens
tgcttaaatttttaatcgaagggttgttagtcaagaaagagtgcagaaaaagttagtggtcttgttggtacccccaaggatgctctgagtagatgttaggaaaggactttatgccatagactcacaaaacatttgagttcttgctttctgaaagagtcagcgttcctaccagagcacggtctttcacagacattaagaggcaagagggatttttaaaaatcatgtgctgagcctggtcaactaactaatgtggcactttatttcatttattttatatatatatttttgagacagagtttcgctcttgttgcccaggctggagtgcaacygcatgatcttggctcactgcaacctccacctcccgggttcaagtgattctcctgcctcagcctcctgagtagctgggattacaggcacccgccaccacacccgg

SEQ ID NO: 630007 - DNA, 535 bp, Homo sapiens
acattatatactatttattccattatcttgctagatacttaacatacattatcacrtttaatccccacgagagtcctgctgcatgtatgtaacaagcctcatttgacacaagaaagagttgaaaccaagagttaagtgaattgctgaacaccccttactgctaattgtaagtggcaggatttgcccctgggatgtttgattccagagcccatgcttttactattatgccatttgagatagctttagttacatagatgtttaccaacctatgtgtgcacacaaatacagtcacacatatatacatattttctctggagagaaatatagcaagctttgctatctggcctgtgtacatgttgacccttctgcctgaacatgttattcctgtggctttctgcatagttggcttcttgtcatcttatgagtctcagcttaaatgttacctcctgactttctatatctcccaatgtagagttatgaatatcagagttctcctcccactatcaatgacaacaaaatggaataaaatatatga

SEQ ID NO: 630008 - DNA, 529 bp, Homo sapiens
ctgcctctctagggctagttagatccagacaactaacttccttgccactcctcccagagtaagatgtgacaggctkcaaggaatcccatggcatgcaatgacctaaattagatggtgctcaagggcattttcttggctacacagggtcaaagggagactgggaaggagtctttgcaatgtctggggtccctataataaaaagtcacccagtgccttgtggggctaggagttcccttgttcctcctaatatcggtcaagcccccttacataaatgaatgtgtcattcctttgctctttcaacaacatttataacctctttccctgctcttaaccactgagtgtggatcagtgcagcctccatcatccatacttgctattgttcagccagcataccacatggaacccagaaggagatgaagaacagttttctctttctcactcaaggaacccaccaaagtctcatgttgactagagaatggtcagtgcttctttcactccattgagttcacagggtgtgctcagcctttgt

SEQ ID NO: 630009 - DNA, 504 bp, Homo sapiens
cagtgcttctttcactccattgagttcacagggtgtgctcagcctttgtccttcatgctcatgaatgctctgagggtctcttgggagcctctcctgtcctctcccacagctccttgtggtctcaaatgcctttgctcagcctttcgctcccatgtcccctagscttcacttttttttcctccttggcctttggcttgaattatcattcattatgtgttgtggagctgtagtggggtccctgaggtgaagaggggccgaggcgagtagcctcctagcatattctttcaagttgtgcttcagtggccttcacttcttttccatacctccactcacattacaaaatcctctgttgtatttttttttttttttttgaggtagggtctcactctgtcactggctggagtgcagtggcacaacctcagctcactgcagccttagcctcctgggctcaagcgaccctccttcttcaacctcccaagtagctgggactataagcacttgcca

SEQ ID NO: 630010 - DNA, 588 bp, Homo sapiens
ttcatagcttggtgtatactagggtctcagaaggaggatggttgttatacccctgaaagaaagttgggagaagagtaaagcatcttgccattcatttwttgatcccttcctcagtatgtacactctacaaagatgatgaaggcaaggccctgtccttatgacactctgttcttaagacactgtgggtttgatctaggagacagttgtaaaccacagttcccatggaaatcagccctgatagagcctaaatttcaggtgcaaggcattgtgggaacacagaggcatgagagaatagttttgagagccagcttggggaggttttaaggagaaggaggccttgtgccaggcccttaaggatgaaggtggttttatcacagagaagttgtgagggagagcattccagatggtaagagtgaggttaacaaagatatagaaactcactagtatatgtgaagacatttctgctcggggatgaagctagattagataccctggttctgtatctgccacatcactgatgtactgagtctctttctctagggcacaatgggtgacttagtttgttttgtgttgctataaaggaatacc

SEQ ID NO: 630011 - DNA, 588 bp, Homo sapiens
ttcatagcttggtgtatactagggtctcagaaggaggatggttgttatacccctgaaagaaagttgggagaagagtaaagcatcttgccattcatttattgatcccttcctcagtatgtacactctacaaagatgatgaaggcaaggccctgtccttatgacactctgttcttaagacactgtgggtttgatctaggagacagttgtaaaccacagttcccatggaaatcagccctgatagagcctaaatttcaggtgcaaggcattgtgggaacacagaggcatgagagaatagttttgagagccagcttggggaggttttaaggagaaggaggccttgtgccaggcccttaaggatgaaggtggttttatcacagagaagttgtgagggagagcattccagatggtaagagtgaggttaacaaagatatagaaactcactagtatatgtgaagacatttctgctcggggatgaagctagattagataccctggttctgtatctgccacatcactgatgtactgagtctctttctctagggcacratgggtgacttagtttgttttgtgttgctataaaggaatacc

SEQ ID NO: 630012 - DNA, 521 bp, Homo sapiens
ttgtgttgctataaaggaatacctgaagctgggtgatttataaaggaaaaggccttacttggctcatgattctgatggctggaaagttcaagattgggcatttgcacctggcgaaggccccaggctgcttccactcatggcagaaggtgaaagggagctggtgtatgtggagatcacgtggtgagagaggaagcaagagatgggtgggggactctttttaacaagcagctctcatgggaactagtagagtaagaactcactcacacccaagagagggcatyaatctattcatgagggattctactccatgacccaaatacctctcattaggccccatttccaacactgggatcaaatttcaacattagatttgttggtgacaaacaaaccacattgaaatcatagcaatgggtatcttgctcatccttaaatacccagagtctaatgcagtgcctggcatatataaaaggtgttcaatgaatgctgacttgaaaagttgattcatgaatgaatagatgatg

SEQ ID NO: 630013 - DNA, 586 bp, Homo sapiens
ttaaataggcaggtagtcctctatgtaattataagagcgtaatctctcctaatgtcattttatcctgcatgcactgaccccttcactcctgtaccctaccattctccttactgactgcagctccccacccctgtactcagagcattacggttgtatcactcacatttctcttgtcatgtacttctctggatgaagggtggtggtcgtattggcagcagtaatgttgggtttactctagagggttgcacttcacaatcaggctgagtcataggataacttaccactttgaggggctggatatcacccctttgtggctctgtttttaaatgcaagaaaaaattgaaaaagatcaggctgaacctcaacctttgaaataccccagcccaatttagatttaggaggccayacaagaagtgaggagattaggcttgtctcttgttccagcaatatgaagcgtgactcccagacatccccatctgtaaaatggaagaaatgatgactgatgcccagtctctcaggcctatggttttttaatcgcatgtggacttctgtgagaagcatttgcaacttcaattcaaaggacttt

SEQ ID NO: 630014 - DNA, 541 bp, Homo sapiens
atgttacaaataatatcacacagtatacatgcacagtgatattaggagtagcatctccctagaatattacaaatcatatcactgggtgtacaccttctgtgacattaaagtaatatctccctagaatattatgaataatatcacagggtgtacatcacctatgacattaaaaataacacccccctaggatattatgaataatatcatggagtgtacacaccctgtgtcattaggagtaacatgcccctaggatattaggaagaatataaaagggtgtatatcttttgtgacattaagagtaatatgcctctaagacattatgaataatatcacagggtgtacaccccctgtgtcattacaagtaacatccccctaaaatattacraatactattacagggtttacaccccctgtgacattaggagtagcattctccttggatattgggaataatatcacgctgtgacattaggaataacatactcttaggatattacgaatattatcacagagtgtacacccacagcgacattaggagtaa

SEQ ID NO: 630015 - DNA, 517 bp, Homo sapiens
ataatatcacagggtgtacaccccctgtgtcattacaagtaacatccccctaaaatattacaaatactattacagggtttacaccccctgtgacattaggagtagcattctccttggatattgggaataatatcacgctgtgacattaggaataacatactcttaggatattacgaatattatcacagagtgtacacccacagygacattaggagtaacatcctcctagggtattacgaatagtatcactaagtgtacactgcctgtgacattacggtaacatatctctaggatattaccaataatatcccagggtgaacaccccctgtacattaggagtaacaccccctaaaaatgatacaaataatatcacaggatgtacacccgctgtcacatgaggagtaacataccccaaggatattacaaataatatcacagggtgtacacccactgtgaaattaggagtaatatctcccgaggatattacttctaatattccagtgagtatacgcactga

SEQ ID NO: 630016 - DNA, 517 bp, Homo sapiens
ataatatcacagggtgtacaccccctgtgtcattacaagtaacatccccctaaaatattacaaatactattacagggtttacaccccctgtgacattaggagtagcattctccttggatattgggaataatatcacgctgtgacattaggaataacatactcttaggatattacgaatattatcacagagtgtacacccacagcgacattaggagtaacatcctcctagggtattacgaatagtatcactaagtgtacactgcctgtgacattacggtaacatatctctaggatattaccaataatatcccagggtgaacaccccctgtacattaggagtaacaccccctaaaaatgatacaaataatatcacaggatgtacacccgctgtcacatgaggagtaacataccccraggatattacaaataatatcacagggtgtacacccactgtgaaattaggagtaatatctcccgaggatattacttctaatattccagtgagtatacgcactga

SEQ ID NO: 630017 - DNA, 577 bp, Homo sapiens
acaccccctgcaatattgggagtaatatcatcctctcccccctggatcttaaaaacaaaaatatagggagttgtacacctgttgcaacattgggaktaacatcttcctctcttcccttggatattaggaacaatatcataggggcggtgtacaccccctgagatattgggagtaataacatcatctcccccagtagatatcatgtacaatatcacagggttgtgtgcacccccatcggtattgggagtaataacatcctctccctccctggatattagggacaatctcacaggagtgatgtaaaccccttgcgatattgggagtaatatcattctctcccccactggatattaggaacaatatcacaggggtggtgtaaattccgtgcgatattggaggtaatattatgctctctacacctagatattaagaacaatatcacaggaaggtgtacaacccctaccatattaggagaaatgtcattctctcccccactggatattaggaacaatatcacagcaggggtgtacagtttctgagatactgggagtaatatcctctctcccccagatattag

SEQ ID NO: 630018 - DNA, 615 bp, Homo sapiens
taacaataattatttgtcttctaaggaattactccattatcatgtgagttgagaaatgaatgtaaatccaccaacctaattttaaagcatcacagttttgcatcatttgttgttttattaatgcggatgagtcagggcaggctgcgaatgcctcaggaaagacccttaatggacaggagggttgtttccccctcaggcttttctttggggcctgtcttaagagcatacacacacagccatccctccactcagttcttgaaagctgccttctgctggagtcacaatttgtacaatagagaatatatgacctaaggattaggttttccctcccagcacttgtttgctataggagttaaatcattctctcaaacagtggtcctgttgcagactgatcagggaaatcttgtctgccagatagatgagaaattagcatgattcattttccttttccttttcctttccccctcctttgcctccaccctccataattccatgaatcaatggtcctgagaagtaaatgatagtacagacactatagtcagcatcgtccctgacctggacttaygtgattctggaaaattataatattagggaatcctggacctaaagaccaga

SEQ ID NO: 630019 - DNA, 540 bp, Homo sapiens
gttgggttcagtagaagagaaggaggaagaggaggaggaggaggaggcagtaaggaarctggtaagaagccaccaataaggttaaggacaacaaggaaaatgtggcctcaaagaaagcaagagaaaaaagttggaagccaggttgaggaagtgagagacaaagggtgggacaagatcagattgtgcttcaggttatgtttagaaatgtccctctggctatggtgggaaagacggggtggaaggcaggagaccagagaggagtctgtctagtcctccaagcctcagctgttttcatgacaagcagaaccttgccttgtgtgtctctgtgcacccaccatgcaagcatggggcacttgtgcaccaggtatgcttatcatgcctgtgaatgagggattgattaactgaatcctccagggacacttgggacagctctgcccacaagaagagcaagaacccaggcatcaatggggtggtgcagacatgggctcagggaggccctctgccatcccctcctgcctggaccaatgttttctgagaggc

SEQ ID NO: 630020 - DNA, 540 bp, Homo sapiens
gttgggttcagtagaagagaaggaggaagaggaggaggaggaggaggcagtaaggaagctggtaagaagccaccaataaggttaaggacaacaaggaaaatgtggcctcaaagaaascaagagaaaaaagttggaagccaggttgaggaagtgagagacaaagggtgggacaagatcagattgtgcttcaggttatgtttagaaatgtccctctggctatggtgggaaagacggggtggaaggcaggagaccagagaggagtctgtctagtcctccaagcctcagctgttttcatgacaagcagaaccttgccttgtgtgtctctgtgcacccaccatgcaagcatggggcacttgtgcaccaggtatgcttatcatgcctgtgaatgagggattgattaactgaatcctccagggacacttgggacagctctgcccacaagaagagcaagaacccaggcatcaatggggtggtgcagacatgggctcagggaggccctctgccatcccctcctgcctggaccaatgttttctgagaggc

SEQ ID NO: 630021 - DNA, 540 bp, Homo sapiens
gttgggttcagtagaagagaaggaggaagaggaggaggaggaggaggcagtaaggaagctggtaagaagccaccaataaggttaaggacaacaaggaaaatgtggcctcaaagaaagcaagagaaaaaagttggaagccaggttgaggaagtgagagacaaagggtgggacaagatcagattgtgcttcaggttatgtttagaaatgtccctctggctatggtgggaaagacggggtggaaggcaggagaccagagaggagtctgtctagtcctccaagccycagctgttttcatgacaagcagaaccttgccttgtgtgtctctgtgcacccaccatgcaagcatggggcacttgtgcaccaggtatgcttatcatgcctgtgaatgagggattgattaactgaatcctccagggacacttgggacagctctgcccacaagaagagcaagaacccaggcatcaatggggtggtgcagacatgggctcagggaggccctctgccatcccctcctgcctggaccaatgttttctgagaggc

SEQ ID NO: 630022 - DNA, 540 bp, Homo sapiens
gttgggttcagtagaagagaaggaggaagaggaggaggaggaggaggcagtaaggaagctggtaagaagccaccaataaggttaaggacaacaaggaaaatgtggcctcaaagaaagcaagagaaaaaagttggaagccaggttgaggaagtgagagacaaagggtgggacaagatcagattgtgcttcaggttatgtttagaaatgtccctctggctatggtgggaaagacggggtggaaggcaggagaccagagaggagtctgtctagtcctccaagcctcagctgttttcatgacaagcagaaccttgccttgtgtgtctctgtgcacccaccatgcaagcatggggcacttgtgcaccaggtatgcttatcatgcctgtgaatgagggattgattaactgaatcctccagggacacttgggacagctctgcccacaagaagagcaagaacccaggcatcaatggggtggtgcaracatgggctcagggaggccctctgccatcccctcctgcctggaccaatgttttctgagaggc

SEQ ID NO: 630023 - DNA, 553 bp, Homo sapiens
ccaggtagctgggactacaagcacacgtcactaggctcagctaatttttgtatttttttgtagagatgggatttcaccatgttgcccaggctagtcttgagctcctgagctcaaattctgttctttagaaggctwctatattgtgaactgttacttctgtattgaaaaaaggattccgtggtcaaataagattgggcacctttgagataaacgagcttaactagatttctttatgcaagacttctcagagtatttgaaatggtaatatccatatttaactacctttttttacaggcaatttattgacctcttccagaagtgtgggagggaatagaatttgggaaacacatattgtccaatagcattctttaatcctgggggactccatggtagagcaactcagaacaccctgtagtggccaaattcagagcatactgcaaagagttctgcagaaagccagtcaaatgtcataaatcatggacaaatggcacctagaatgccaccatgtagccatagcgtgagtagtgaaatgtaattagcaggccaagtggaa

SEQ ID NO: 630024 - DNA, 552 bp, Homo sapiens
ataaatataaacaaaaattgaaaacaaaataattttccataaaagatttttaaagttgtaaagatttcagaaaaaaaatttccaatataaaatcttcattttctcttttgttcttgatcataagatccagtatgcaagttagagtagatcagagaagccccatgctggccacttcaaatttggagacttcaaatttgaccagagaaaatgagaaacacatagttattccaaaatgttcccaatatttcagtttacaatagtgcccagagcatacaggaaattgcaagtactcaagtctatttttctttctgataattttagattggcatattctaagtaggattagagtaaagcttttacttgctgtgcagctctttttttcctaccatatgtaccaatatgacaatttaaccstacaataattttgtatgttaagcttttatatattacaccttcacatatttacatttagagtgcctgactacctatgtttccaaagacttaaaatgagtaatctatacttaacaaaaatagaaatttttagaaagtttt

SEQ ID NO: 630025 - DNA, 590 bp, Homo sapiens
ttccttttcctatgttcaggtgtgtaatagcccctgcttttgctagaatatctctccctaacaagggagtggggctttcaggcataattagaaaagcatgtgaaaacagtaaagctccctagtcacaacttagtggctgggagaagtatctagtgactggctgtcccaggacccctcgaatagtgacagatctggaggacagttgtccaggacaggagagtaagactgagaaggccgtgccagtgtccaggagacaattaacctcctggctgtcaatggtcaagcatacccagggctctgtgagggtgatggcatggactggcacttgccccgggcaccctcagagtttggacatattttgagtagaaaagaggattgaaaaatagaaaacaagtaaaccaacwcccagaactgtgtctgcattttggatataagcaattcacaagtaatgttttcagatttcagagcaatccacactcagcaatattgtgcagttctgacaaactcaatttttttataattcttttattgagttttgtgttattcacttcttgctgtacacacctgccttagagacactagattcaaga

SEQ ID NO: 630026 - DNA, 494 bp, Homo sapiens
ccagagctggttgtcccaatacaatacaatcaacaggtcttgtaatcaacagttcccgggaggctgcaggcttgctgcaatgtcagctggatttgtgaagcccaggaagcctcctggccctcattagactcataaaaatcatcctgaagaaacacagatgttaacaacaacactgatagaagacccaggtttggagggaatcactttttttctcaattatgcaacttcctaactggtcactgggaaggcaggggacaggtggacgggaaggatgatgattttagagagctgtatttccttcatttatctgagtgccccgaccaagatataaaaaggagagaccagggaagagagtttgcatttggtgatctgcacctaccatagtgcctgacacatagttcatgctcrataacaatttgttgaataaatgaatgattgaataaatcaatagtgtaatgtgaaaagttccccatgttacgtttctgggcatgaac

SEQ ID NO: 630027 - DNA, 650 bp, Homo sapiens
cgtcagtacctttgacttccctgtggctctgccactctcatgatgtgtgaggtgcccaatgcagactcaattctctcacctctttccttcgttccatctaccatatctcctttgcccacaccatatgtcattgcaatgggtttctcttgactctaatacattatttaggtatttgtgctgtttctctcttattagcatagcaagtgaagtggtaactcttgctgccaaagactagtacacacaggtgctgcaatcaagaggcagtacttggcatgagatggtcatcccaatgatccagaatgtgtttatcttttattataaaaattttaaagattaaattgaggatctctaagtgtctgtagctcccaattgaagaaacaccattaaaaggtaagtatcttaatagaggaactggaggtgcagctggaaggaagggaagaagggagagatttatcaaccatgctcaagttgtattagagtcacttcaatccaacaaatatatattgagcacatattacatggaaaacattgcgctaggcacaaaattaaagagatrcatataggaggaccatacagcaacataattaagagtggcctgtggcatctgactatggggtaccaatccaaggtctgacgcttactagttgtgt

SEQ ID NO: 630028 - DNA, 498 bp, Homo sapiens
gtggtggctcatgcctgtaatcccagcactttgggaggccgaggtggggggatcacttgaggtcaagagttcaagaccagcttggccaacatggcaaaaacccatctctactaaaaatacaaaagttagctgagcatggtygtggtgcacagctgtaattccagctacttgggaggctgaggcaggagaatctcttgaacccaggaggcagaggttgcagcaagctgagattgcaccactgccctccagcctggttgacagagaaagactcttatctcaaaaaaaaaaaaaaaaaaagaaaagaaaaaaaagaagtgtatgtatatgtgggtgtgtgcacatgtctgtgtatgtgtgcacatgtgtttgcacaagtgcatgtgtgtacatgtgtgcatgcgtatatgtgcagtgcagcagtgatggcaacccaggtgtttgctcttatgagctttgggcataaaactctccatttgaggcataaatgcccctcccatc

SEQ ID NO: 630029 - DNA, 521 bp, Homo sapiens
ctaggcatggtggcacatgcctgtagtcctagcttgaggtgggaggatgggcttggaccccaggagtctgcggctgcagtgagctatgatcacaccactgcactccagcctgggcaacgcagtggagaccctgtctcaaaaagaaaagaaaagaaatttgccagggtcacatagccaatgaatgatggagccaggacttgaacccagacagtkggattccagggtcctggtcttaaggcctggttatgcgacctccttgctaactgtcctatggtgagtataagctgagagaagttttcagaaagaacttgaattttggctttatgcacttacctgtgatttgaattgttttttcccaaaaagcacatccaattgttgttgcaaaacctctgtccctgagcttctgttccatggccacctgatgcagccaggaaggtgcatggcctccagggaggtgctaggttggccacgatcaaaggaaagggaccagggcttgggagaactgacatctaaaccactca

SEQ ID NO: 630030 - DNA, 521 bp, Homo sapiens
ctaggcatggtggcacatgcctgtagtcctagcttgaggtgggaggatgggcttggaccccaggagtctgcggctgcagtgagctatgatcacaccactgcactccagcctgggcaacgcagtggagaccctgtctcaaaaagaaaagaaaagaaatttgccagggtcacatagccaatgaatgatggagccaggacttgaacccagacagtgggattccagggtcctkgtcttaaggcctggttatgcgacctccttgctaactgtcctatggtgagtataagctgagagaagttttcagaaagaacttgaattttggctttatgcacttacctgtgatttgaattgttttttcccaaaaagcacatccaattgttgttgcaaaacctctgtccctgagcttctgttccatggccacctgatgcagccaggaaggtgcatggcctccagggaggtgctaggttggccacgatcaaaggaaagggaccagggcttgggagaactgacatctaaaccactca

SEQ ID NO: 630031 - DNA, 521 bp, Homo sapiens
ctaggcatggtggcacatgcctgtagtcctagcttgaggtgggaggatgggcttggaccccaggagtctgcggctgcagtgagctatgatcacaccactgcactccagcctgggcaacgcagtggagaccctgtctcaaaaagaaaagaaaagaaatttgccagggtcacatagccaatgaatgatggagccaggacttgaacccagacagtgggattccagggtcctggtcttaaggcctggttatgcgacctccttgctaactgtcctatggtgagtataagctgagagaagttttcagaaagaacttgaattttggctttatgcacttacctgtgatttgaattgttttttcccaaaaagcacatccaattgtygttgcaaaacctctgtccctgagcttctgttccatggccacctgatgcagccaggaaggtgcatggcctccagggaggtgctaggttggccacgatcaaaggaaagggaccagggcttgggagaactgacatctaaaccactca

SEQ ID NO: 630032 - DNA, 464 bp, Homo sapiens
gcccttgcacatgcgcaccatgcagcggccccatctctctccccctttgctgcctggccaggctcctccatgcccaaacctaactctgtccacaccacgcctgccccccgcagaggaggcaaaatctcatcacagaccccaccgaggggcaccagcagcaaccatcccactctggtccatcggctctccygcctctctgtcttcaaacttgccacacctccctaagctcaactgtctaccttgcttcgtatttcactggcccctcttgtcctcccaacacagagcttcgtttgtgtctgcacgatcaccctcatctcctgcagctggcaatgaactcctggggccactgtgctctgggttccgtcccctctcacagtctcaaggactctgctcaaatatccctcctgccaacaacatcaaggtttccctttctaacatgcgatccatcagcatacaagtgagtt

SEQ ID NO: 630033 - DNA, 646 bp, Homo sapiens
ttcatatttgaaaccaatccaattctcatattagtaaatatctttaattatttaattcccaatattttagtaaatgtggtaataattaagtaggtcattttaatattaattccatttactcagagaactgtatgagatattgagggttagggaaaagaataagaaatgacaggtctcatcacataacatgaaatttaatggatttgtttatgaaactacatgaaatttaaggtaaacataaaattttataagtgaaggttgtatgttaacaccatggggcagttttttatttgtttgtttagtttttaaaaaatgctttattttcttctatgtgttcagtacctggcatttagcagtcactcaatacatgtttgtttaatcagtgaggtttcacrttggaaacagttaactgtatccatttagattcttaaaagactatttggtaaaagttttattttccacatgtcttataaaattaaattatactcccaaataaaatgtgaaggctggtcaataatacagaaaaaggagccgtgctcttacaaatatcacataaggacaagacactaaacattagtaaggatgtactatgtgactttcaatgataattgtagaaagcaacaggagtttttgaatattgcatgcc

SEQ ID NO: 630034 - DNA, 516 bp, Homo sapiens
ggagctttacatttacgttttatatttaggtatgagatcccttttgagttaatttttttgtgaagtgtgtaaggtctgtatctagatttatttctttttctgcatgtgcatatccagttgtttcagcaccatttgttgaaaggcccatcttctctccattacattgcctttgatccttgtcaaaaataagttgattatatttgtgcagatctatttytaaactctctaatattttccactgatctttctgtcaattattttgccaatgttacactgtttaattactgtaggtttctttttttttttgagatggagtctcgctgtgtcaccccaggctggagtgcagtggtgtgatttcggctcactgcaagctctgcctcgtgggttcacaccactcctgcctcagcctcctgagtagctgggactacaggcccccccaccaccatgcccggctattttttttttttttttttttgtatttttagtagagatggtgtttcaccgtgttagccagga

SEQ ID NO: 630035 - DNA, 463 bp, Homo sapiens
gctctatcccctctccaggcacagtttctcaaacttagctgcaaataaaaaatagaaggcctgattttattcagtgctaaattagggtgttgatataagattaggtgactagtaatgcaaaagtgtgaataaagtaaaagaccttcctaattgtawgatttacaatatttaacaatcaaattaccagcaagtaatttttctggagaagattaaaagctaattctatttgccattactgaatgagtgctgatacaggccaaccactattttaatattttacaagacttacttatttaatcttcataacaatctgatagaatagacataattattattcccattttataaatgagcaaagttttgcccagaaagataacattaccaagatcgcacaagcagaagtgagagagtcaggtattacaagcagatgcattgcttaaatattagctcctcacttctgaca

SEQ ID NO: 630036 - DNA, 529 bp, Homo sapiens
ggctgatgtttcaaaagagaagcaagatttatgcacattgtgaaccctaggactcagggagtgtagtcctttcaccctgtttgcacctctgtaagtgaattaccttaccccaattcattctccttgttttttgctcagtattttaatcaatttaataagccatgtggtttggtcattttaatttggtctgaaagcctttctgttcctcgacctctgggatagctcaccagttagtgcttccactgcatcaaggcaatttcccacatattgcattctcagctaatgtagtgtctttctgtattgaaagargacttgggaaggaggcaaatgcttctcagcatcataatactaaggctatcatttttcaagtcaggtcaaagtctaattgatgggataaatttatattccttaatgagactaaactatgtgtgctttagagaaaatgtaatatacttagaactggtgtgtctgcccttaagtaatttaggaagaaattcatcttttatgtttactgttggagagaataggg

SEQ ID NO: 630037 - DNA, 621 bp, Homo sapiens
ctgtccctgaccatcaccattctactttctgtctttatgaatttgagaccctaggtacctcatatgtaagtgaaatcatacagtgttggtttttctgttgctgccttatttcacatagcctaatgttctgaaggttcattcatatggtaacaaatgtcagaacttkgtttttaaggctaaaattccattatgagtgtataccacattttgtttatccatttatcatttattggttagttgtgtggcctccacattttagatattgtgaacaatgcttctatgaatgtgggtgtataaataaatctttgagaccctgcattcaattattttagggacgtacccatagatggaatttctggatcatatggtaactccacttctaatttgtgcagaactttcatgcagctttcctcagtagctgtaccaattgaaattctcaacgacagatcacagggttctaattattctacatccctgcaaacacttgttattttctgtttgtttgtttgtttgttttgatgggaatcattctaatggatatgaggcgcactacgtcactatagttttcggcatcatcttctttcatcctattgttggggctaagtcacagtcagttttctt

SEQ ID NO: 630038 - DNA, 228 bp, Homo sapiens
gagtcccaccctatcatcttccacttgttttaaagsgtatccacagttctagtagggcatgcaatggcactgctcatagtggaatcagatgggaaatatggagaataagacttgaaattgatcatttgagaaagggaagccattcctggaatccatgaaaacactacacaaaacattaaatgggtttgataaataacagaatccatcatttgtgtttaaatggtgtgt

SEQ ID NO: 630039 - DNA, 574 bp, Homo sapiens
gccactcttgggactctaatgaaaaaaacaagatcttcagttcatttcaataggcacaccaaaaggagatgagggaaaaaagtgtgaaaaaaaaattgttctgaatttcatatttgtatttacaactactaaatatctttcgtaaaatgcttggttctgctactttttccttactttggcaagtcacttattctctcaccttttcaattttatattgataaacaatacagaatcaacaaaacaattttacctaatctccaggcctggaggttacttttctaccaaataattagatatactgcatacctcaaastcattatgtcaaaatcaaactctcttatcttccttaatccttaccttctcaaactatcctttctatccaagctaaaagcattttgccctacttatgagtacaattaagcttctactattctgttactcgcttcatgtgaaaggtggattttaatacatttatatggtattgtataatacctaatacagttgttcttcagtgtttgtgggggaatggatgctcaagtccctgatataaaatggtatagtatttgcatacgca

SEQ ID NO: 630040 - DNA, 546 bp, Homo sapiens
tgcagtgcctttggctgagaggaggggtcatttcagattgttgaggggcttagctttttttttttttkgagacagagtctcactctgtcacccaggctgaagtgcagtggcgcgatcttggctcactgcaacttccacctcccgggttcaagtgattctcctgcctcagcctcccgagtagctgggattacaggcgcctgccaccatgcctggcaaatttttgtatttttagtagagacagggtttcaccatgttggtcaggctggtctcaaactcctgacctcatggtcttccctccttggtctgccaaagtgctgagattataggcgtgagccaccacgcctggccagggcttagcattttattgttggtttacattcagttccccgagctcttttaagaagtgcatgtctccttagtaagccacaccttagaaataagcatattcagatgagtaatgctgtgatggaggcagagcctcctcagccctgctcacggaatgcttccaggactttgctgctggccttattgagctctgattccctt

SEQ ID NO: 630041 - DNA, 546 bp, Homo sapiens
tgcagtgcctttggctgagaggaggggtcatttcagattgttgaggggcttagctttttttttttttggagacagagtctcactctgtcacccaggctgaagtgcagtggcgcgatcttggctcactgcaacttccacctcccgggttcaagtgattctcctgcctcagcctcccgagtagctgggattacaggcgcctgccaccatgcctggcaaatttttgtatttttagtagagacagggtttcaccatgttggtcaggctggtctcaaactcctgacctcatggtcttccctccttggtctgccaaagtgctgagattataggcgtgagccaccacgcctggccagggcttagcattttattgttggtttacattcagttccccgagctcttttaagaagtgcatgtctccytagtaagccacaccttagaaataagcatattcagatgagtaatgctgtgatggaggcagagcctcctcagccctgctcacggaatgcttccaggactttgctgctggccttattgagctctgattccctt

SEQ ID NO: 630042 - DNA, 561 bp, Homo sapiens
caatgaatatttgtatgtatatgatgttccaaatattacgctacacagaagacaagcttcccgtcctcaagtcgcagactacttagagccaagatacacacagaggaagtgcatattgccattaaagatttaaattagtaggtcaatacaacaacaaatgatatgattcaaggaagactatgactggggtagtcatagtggagcccccagtaggaaaacaaacataaagttatgaatatgaaattaggtacaaagaatgtttgttaagaatgagaacagaaatcacaaaaatattacaaattttaaaagctggcaacacaaaacaaaatttagaaaaataacaatatgtttattaattccttagtctcyataatctttgctacatatttaggatctttgatcacctcatcatatgcccatgattttgtaatctgcctaggaaataatagttaagacttccctttagcatggttaattttaaaatttaatattaatagtttggaatggtttctttctacttcataattcattattgcaaatcatgcagagttttaaggacca

SEQ ID NO: 630043 - DNA, 582 bp, Homo sapiens
aactttctatagatgataaaggtcatatatgaaaaacctatagctgacagcatattcagtggtgaaagactcaaaagtttttcccctacaatcaggaacaagacaacgatgcccactttcaccacttctattmaacatgatattggaatttctagcaagagcagtttgtcaagaaaaggacaaaaaaggaatcgaagttggaaaggaagtaggaaaattatctctgtttgtagctggcatgatcttagatgtagaaaaccctacatatttccacacaccaaaaatattagaataaataaatgagttcaccaaggctgcaggatacaaaaccaacatgcagaacttctggttctcagtctagcatgcaaacagcttggaaaccctcatccatcttgacaacaagtaaaaagctgaacaacctgaaaatcaactcttcttagatttgtcagagaagtgaggtcacaggtcaaaacactgtctccagattggagaaacagacaggcagataaagaatcccaacctgcagagcagaaactcaggagaagaagcctctgcaggaaccaccagtaccagagtaggaaa

SEQ ID NO: 630044 - DNA, 508 bp, Homo sapiens
aatattagaataaataaatgagttcaccaaggctgcaggatacaaaaccaacatgcagaacttctggttctcagtctagcatgcaaacagcttggaaaccctcatccatcttgacaacaagtaaaaagctgaacaacctgaaaatcaactcttcttagatttgtcagagaagtgaggtcacaggtcaaaacactgtctccagattggagaracagacaggcagataaagaatcccaacctgcagagcagaaactcaggagaagaagcctctgcaggaaccaccagtaccagagtaggaaaacctaaactataaatgatgaatcattggaggctcagtgccaacaagtctgagagttaaaaactctatggggcccagtcttagcaggcccccccagacattctcgtgagttttatctccaggggtcctccctggttctctcagtgaagacgggagaaaaatccccccatactcctggcatagggaggggaaatgttagccattttgaaa

SEQ ID NO: 630045 - DNA, 508 bp, Homo sapiens
aatattagaataaataaatgagttcaccaaggctgcaggatacaaaaccaacatgcagaacttctggttctcagtctagcatgcaaacagcttggaaaccctcatccatcttgacaacaagtaaaaagctgaacaacctgaaaatcaactcttcttagatttgtcagagaagtgaggtcacaggtcaaaacactgtctccagattggagaaacagacaggcagataaagaatcccaacctgcagagcagaaactcaggagaagaagcctctgcaggaaccaccagtaccagagtaggaaaacctaaactataaatgatgaatcattggaggctcagtgccaacaagtctgagagttaaaaactctatggggcccagtcttagcaggcccccccagacattctcgtgagttttatctccaggggtcctccctggttctctcagtgaagaygggagaaaaatccccccatactcctggcatagggaggggaaatgttagccattttgaaa

SEQ ID NO: 630046 - DNA, 582 bp, Homo sapiens
tccccccaggctcccattggctgtgggttaacccttttgaaacgagatcctccctcccattggctgccaggctcccctcttctcccccaacccccatcccctccgcctcccaacagtcctgcgaggtcagggcgctcccggagccccctcccctggcttctcacctcaacaacccccgcaccaggacgcccctctccccgctctttccgtcactgccccgcacaggkctgcaggtgaaggcagatccagttcccgccaaatgcggccccaaggtggggctggcagaaaccctgttcccagatgcccctcgtgctggatttggagaccttggaagatacaaggtggtgcaatttcctgcccgtctccaacccctccttgaccagaagtacttctgcaacaggggatccactcagcctttcagcctcacccaaggcggtgggagagcgttcctgaacgcccgcgcttcttgggctggccaggaagagggcagctctagaaagaagatctggggctcttcaccgaagctaattccccgagtgccgcagggcaggcctgacccgatcaggaatgtgcagcatctgg

SEQ ID NO: 630047 - DNA, 434 bp, Homo sapiens
atctctaatcatgttgaattttataatacaagtttaaatgacctcaaaaaatttgtactacatttcagaggcaactgtaacttccttcatgaacattagcaaataatcttcaaaaattggaatgtgacctcagtcatcctcctccttctcccttccccttttcacttcaaccttaatgtayacacttgcaaattttcttccacttatattttcctttaaaggccactttctagcagacaattcaactaactgctgtatttttccatatatgatgccagggaatagaaacaagtgagatagtttcttatatgatataattgtttccattaaaaactcaggaaagcaggaaccaatccatcaacaagggcgaatgaaagatcgtgtaatccacaaactttaacttttgatcacttataaaatttaaaactaaacaa

SEQ ID NO: 630048 - DNA, 425 bp, Homo sapiens
tccttggagttttctcagaataaagggaagctgtggtgttgaagggtttttttggctcctatttacatatgatgcaaaatcaatctgtgtgaatctctttcctctgttgagctctactataggctctactatatgcagagccttgggtatttctgtgcgagggggattatgcaaaagaattttaaggcatgccacttgactttgtgaaaccaagtatttgtttaaagagacamgatattatagtgggaggctgttttgtgagaacccacactttcatgtcagcaccctgagatgggatcccattacgccctttaaccaggcaagggactttatgcagttcttcgtcaggaaaatggagacaattaaactgcttttctcataggttgttgtgtaaaaggcagcaagatgtggctgtgtaagaacat

SEQ ID NO: 630049 - DNA, 582 bp, Homo sapiens
aaagtgctgggattacaggcgtgagccaccacacccggccataaatagttttttaaggtttttggtacatagcatcaactcattctccagaaattgttatgaatatgtagtcccaccagaaattcaggagcatacatgcttcctacatactttccaccaggaagaaaaaccatttggtttctatgtttgccaatttgayaagtttccatttacatttctgccattaccttggaaacttaacttttgtattctggtagttctttttttatgtaagcttcttaagataataaatatcaaaaacagttaagtggctagacttcaaactttaaaattctataaaaatgtaatatccagcaaaatttaatccatgagaaaattgaaactgtggtttgacaatacctctgtctccctttgtttcctcttaaatgcttgcctttgaactattctgaaatagtcacagtggcttggtatagaaagaagaggaagtcaaaggactgtggctgtatcagagatccagactgagttcaattccagttaaataggtgaaatggggtgagtggggaccttatttcattcatgata

SEQ ID NO: 630050 - DNA, 642 bp, Homo sapiens
atatttctggaaatagatttggaaaaatgtacctataagcttaagaatattcataccttagtgattcctcttctattactatatatccagaaaaaaatctgaaacacaaagtcttctcttaataaaaatactcatgtacaaataatttataataaaggaaaattgggtccagtctaaatgaccagtacaaggtaatggtgtagtaaattagggtctatccatatgatggaacagtatgtagttaactaaaaaaattttttttcacaatttttaatgacatggaaaatgtctttgatgttctattaagtgaaaartgtcattaagttacatgttaaaatttaatcttgaaaattgcataccccataaaaatagaacaaaatacttcaatattgtattattattattttcttctttaaactttttgtagtttccaagttttccaaattgagcatctgctacttttaaaatcaggggaaaaaaatccatagaaataaaaaattaatatgaaaagacttcttgtattttgagatctggagttgccagaatacgcagaggaaggaaatgttttggtggatttactgttgtgacaagaaagattaattagcaatccctttctaaagctctttgctgaaaatcaagcaa

SEQ ID NO: 630051 - DNA, 352 bp, Homo sapiens
agaggggacactgggttatgaacccagatgcagaacttctcgttccactgctgctgctgatacctggtgtgactttggtcaaaacgtttcccctctctgcttctccatttcttttcccactgtcaacttggaaaaagcctctcataataaataaatcttgatgaggttttctagcagaagatacactctaaggaactttagccctaacactcaggctctggaatcctatacttctcatttccctgtctgcttgctctccctctcctctcctcccctctgcacatgcccccaccaaggcccaccaaagccttgacattttattagartttatttcattactacctttgtctca

SEQ ID NO: 630052 - DNA, 622 bp, Homo sapiens
ggatgaatacaagactcctgacttctgagccagtactccttgctcctcttgccttttcactggcctagcctacctggccatctctttctccaaaactgcccctcaggctaggtgacctaagtcttctgtaccatgggatgtgatactcatcaaagatatttgagacttcggacttcagggtcttcttcctggcccacgttgaagccagctgactctgaccagaaggggaggccactgtcaagcaagtcaccagagaaagagcatctactcctgcaggaacctggtgcagcaccccgtccacctacccrcttcgggattcctcctttatcacgcaattgatggcacaatttctgcaggaaaattcactgtcactgcaacctgctgtgggtggataaaggggaatatctctagctctgcaccaaaagtggccttccctgcactctccccattctttcactatcccatcccttaggttggcatcattctctttccttcccaggccttatatagtcatgaagtttcacaagaactcaggctgactgtgactgtctgccagcacctctaaccactctactgccaaggcatggctgaagcaagctgcaaactccggtcagggccagac

SEQ ID NO: 630053 - DNA, 613 bp, Homo sapiens
actctcagagatctgcaaaggggtcccccaaagtctttggctgtggcttgcctcttaagtttgcctatagtgtcttttttgagcagaattttaactaatattttaatcaaatttatctatttgtgctttttaaaaatcttatttaagacatccatctctcctccgagacatactccttattttttttctagaagttttaacgttttgttttttacagtttcggactttaatcaacctggaattcatttttgtatacattatctccataatttttgtatggaaattaattttccatccttttccccttcattgctgctgctttcatatatcaagttaaacagatgtgcctgcttctttttctgggctttcaactgtattctattggtctacgtgtctgtcactggacactagacatgtaatgacaaacactgctacattatcttaattactatggyctcataataaatctcggctgggcatggtgtctcacgcctgtaatcccagcatttgggaggccaaggttgtcggatcaactgaggtcaggagttcaagacgaccagcctggtcaacatggtgaaaccccatctctactaaaaatacaaaaattagccag

SEQ ID NO: 630054 - DNA, 551 bp, Homo sapiens
agcttcagctgcagagagacccagcttcaaaccccagttctgagagtgtttccctgtaggtgaaatggagaaaataatgcccayctcacaagattgaaaagattggatgatcgattcacagaaggcatttagcaagttctccctcaataagtggcatttctagctacttttatgccaatgtattacattttttaagtagtaaattatttcagggactagagtggcaggtccccagctggagctaccttcttcttggcattagtgctccagggaagcagaatcagtaactaagttaccagacgaacaccgtcggatcaaaggaagtgggaggggtgggggatacttcacctgagccctgggaaaacctcacagatcctgctggcctccacagaggcaacctctgttaagcagaacctgcttatgttccccacagcccttcctgcgacctgggctgctggacaccgattagcttggatctacggggcccatttcctctgcacccaggaccgctctttggtgactctttcactagatatgatgctagacagagc

SEQ ID NO: 630055 - DNA, 399 bp, Homo sapiens
agatctccttccatttctcagacctgaccctcccaggagaccagcctgggttagacgtgtgtatttgtccttctgttgataacrtgcttctgtgtatcagccctttaattctccaacaacaaccccaatattttgttcccatttgtcagctgaggaaactatagcctatggacatgaagtagtttcgggcagagttggggctggaacctggttctcttactggttcacactgccaggcttgtgaacaggctgaatggaacacaagtgtttgaaagccccaggttcatggtttgggataatatggcccatggaggaccccagtgatgtctgagcaggaggaataccggatctgtgtaatggattattggccaaatctcagctgatgaatgcagtgtggcc

SEQ ID NO: 630056 - DNA, 555 bp, Homo sapiens
tcacctctctgagctccaggcttaccctctgtagagtggggacaataaaacctgcttcaaaagactactgtgaggwttacatgagttgtctggtgggaaatgctgggctctcacatgggaactctctttcctctgccctcccattgaaactgccttggcaaaatgatgactgagacagtgaaagagatctaacttagcgactccatcttgcttctaacctccaaactgtccttgttcattcctaggggtaggcagaactaactttgggagaaacttagtttatagtttaaacaaagttggtaacagctctttcccagagcagactgccttcttgtctggggactagactaacgttagccccaagattagaaattatggtttaggagtcatgcagctggaggttacaagattctgaccctccccaaactgcttctaagatcagggcttgagatattttgcagaccctgcacctgacggatcagctggcaccacccagatcaataaactgcctcatctgatctggcggcccccgcccaggaactgactgagcgcaag

SEQ ID NO: 630057 - DNA, 607 bp, Homo sapiens
tgttccaatcactcaaattcttgctgcctcacctgtaagctcagccttctaatttgacagcagagaccagttacaagagatatgggaattgagggccagcctattaattcatcattgaagaacctcattcatttcaggacaaaaggtctccttcctccacctcagcccccttttccatttttatcactcttaaaggaaactaaggggaagagaaggagaatgaaataactcgaagggatattgaatggcatataagcaaagccccaggtcygtgagattgcctaacagacacatacctatagatacaagcttgtgcggactaataccacaagttcggatctacgggtttgtggcaacaggcctcaatatcttctctcttttggggctgtgacatgtctgaaaataaaatattacaaccattaatccaataaaagagtctaccattcaattgttttatgccataaatggaaaggacttcgtcccactctcacaaaagcaaaagttaagcaatatcttctatgttctccccaacgtgcttcccttggtttccactttttccacaaatccagtggactttaggtaaacctcatcattttactgtttatat

SEQ ID NO: 630058 - DNA, 601 bp, Homo sapiens
aaaatagtgtggcccttgacttcttaaagtctacatcctaagtcaagagcttatatttatttaagcctataacaaatttgaggatttcagaactcagtgagactctccatgtgcactgagcatgcactgtgagctaagccctttgccaggttttgcaagaaatcataaaggcagtattagatatggtctctgcccttccagagcttacagtatgagagggaagataaatatctactcctccgaccctcatctcccacacatgatgaaaagtgagtgactaacttctgctatctcatttacattgacctcagatggtgaatcagagtctagacaagaaaatcacacatgtacatggggaaactgaggaaagtttaatgaaaggataatttgtaaagattggacagagttaagagggaccaagaagagatggtgaagtgtcccaggactaacaatagcaggaagtccttacacccaaaggcctgaaagagcaagaagagggagtagttatcagaggycagagagagagctgaaactgcaagagatggcctctctcaggaaggaataaagctaggtcctctctgtagcctacaggaagtgagtc

SEQ ID NO: 630059 - DNA, 610 bp, Homo sapiens
ttgaagtacctgtgatcccattccatctgttctcacagataattataccaaataygctaaaaacatatttgcaggggaatcactagcaatgggggaaacattcacattctttgacttatgcttctatcccctagatagtccatttgcttaagtaataatatgctctttcctttatatatcaagctttaactcacccacatttaggtgaaaacatatgttaaagacacacagggagccacccacactttccttaaataatggccctgttctctttaaacaatggcatttggtaggtggccagctggacttaggctggactatctgagatcatggtacatagtgaggacagacaagtgtttgtgcagtagaaactaactgatctatacaaggattgaatttacatcttgaacgccaagtccaaaccagctgattatagaatcatactaggtaagaagattatctttttcattttaggttttcagtatcttctttgaaaaggcacattccccactgaatctcttaattgagattaagtgctgagtttgagaacccccaccatggtgggtcaccagggccttttttagacctttcagagaaaagaggttctaca

SEQ ID NO: 630060 - DNA, 527 bp, Homo sapiens
agccctgacttggctggtcaatctttttctctgcctcagggcgggttggagtcggacacctttctttaggatttttctggaaaagaggttagtcaagatctcttggtgacactgtcttccattttcatgaccacatgtacctgaatcatttcacatagagtaacttatttgatttacatcgttccaaaacaggtggttatgtatacgttctctctctctctctctctctctctcwcacacacacacacacacacacacacacacacagtacagacatttctattacacatattagaaaactgggtgtttggattacaggaaggaggaatctttaagtgactcctattatataccagacactttcaacagatgatctcatgaatcctctcattcccatgaagtagataagatttgcccatttaaggatgaaaactagtgacactcagagagtaaaagaactctctggtacatgtgaaacagatacctattatcatattatctattatgaaatctatgattaccaaagg

SEQ ID NO: 630061 - DNA, 567 bp, Homo sapiens
acaggtggttatgtatacgttctctctctctctctctctctctctcacacacacacacacacacacacacacacacacagtacagacatttctattacacatattagaaaactgggtgtttggattacaggaaggaggaatctttaagtgactcctattatataccagacactttcaacagatgatctcatgaatcctctcattcccatgaagtagataagatttgcccatttaaggatgaaaactagtgacactcagagagtaaaagaactctctggtacatgtgaaacagatacctattatcatattatctattatgaaatctatgattaccaaagggatggagctaatatacaaactcatgtatgtagattccgagcctgtttggttgctctttggcctgcagttgcaaagctgcacccctcacaggacttktgtcctctaacttctagctcagtgttctttgcctctaccaaacctgcggtgtaaagggacagcagctctcagaaaatactcttttatgtctgttttcttttatttgtgttcagtagagaccgagaagatctc

SEQ ID NO: 630062 - DNA, 526 bp, Homo sapiens
ggctaacgttttcactgaggaacgaaatgaacaggcagaaacaattaagcgagcagatacagtgaaaacaaacaccacaccgcactttcacagaaatggaagtgtatgaaggaattctgcttggaatttgatcccacagcagcaaagcttttgcttcttgtcatttttcttctgcctacccccagtgcacaccacttcccctgtatggggaaagaaagatctaggcacacaaaggaactcctaaatactcacaggcgtgggaaatattttctctgcttgttactagtacaggataatctccaaggaagaaaatccagctagatattctacactgcaaatgtctcccaaagcctgttaaatgttcacatatgtctgtatgaaatttgtaatatggattgtttatatagtcctgattaagagcatgaacatcattaaaaaggataaagtcagtttgaggacggaaaattataatgtcagctaaaacggttacctaccmaaaagtatggattttttttttaacttaatc

SEQ ID NO: 630063 - DNA, 606 bp, Homo sapiens
tttgggctgctataacaaaatagtataaactgggtggcttataaacaacaggaacttatttctgacatttctggagtctgtaggttcaatatcagagtacccgcctggttgtgcaggttcctctcctgagttatacactgccaactttttgttgtatcctcacatggtggaaagagaactctcygcagtcccttttataaggacactaatgccattcatgagggctccaccctcataacctaattttttcccaaaagccccacctcctaataccgtcacattgggggttaggatttcaagatataaatattggaggggcacttatattcagtccattgtaataataaaacgtataagatagatgttttaaaaatactttttaagattctttcatattagtgatcaagtgaatttgaagcaaaaggggaataaccatagtattgagctcatagggttgtaggggaaatgaagtgatattgtccatgtaaagtaacttagggcaatgcatggcccatggtaagtgactaatacattactgtagtaggtataagatggtgatgggattccttaagaaaaattccataaaattgacaaaattagggcgct

SEQ ID NO: 630064 - DNA, 598 bp, Homo sapiens
ttctgagtggtggttcacataagctttcaattttaaataacacaatccatttatttcactaggcgtctttatttgcttaaagtgaagaatcagagattgtcattgtgttgtaaataagtctaacctttctttccctttacaaaaaaaaaacctgtggaactgaaagaaatagaaattccagtaatcttttatgaactctgttattagagtgagtagaactaaatctgtggggaaaaaaggaaaaggaaatggaaaaggtgtttcagagcttttactttaagctattctagtgtccccttctctgctttctttccactaccctgacccatacctacccacagtgagaactgagcccgcagggcagctcagaagctgggaggagagaaagagtgagaatctgagttatttttcctcagtgatcttaaaagctccaggcagaaaagaccctgcctatagaacctcccttttgcayttctcaattgcatcggagaaactcctaaattgcatcagtgatcctgaagctgttaaagtaaagaattttctgtagaagaaagaaaagagaaagagaaagaaaaggcaaaaacttaatcatgcctgg

SEQ ID NO: 630065 - DNA, 542 bp, Homo sapiens
tcttcctttataatttggatgcccttttctttcttccttttttaacctaatagctctggttagtacttccaactctgtgttaaataaaagtggcaaaagtgagcatccttgtcttgatttttttttttttttttttaatgggagtttggctctttttggcccaggctggaatgctggaatgcaatggctcggtctagggctcactgcaacctccgcctcccaaattcaagtgattctcctgcctcagcctcctgagtagctgggattacaggtatgcaccaccatgcccattttacaaaaaaaaattttgtaaaaatacaaaaatttttgtatttttagtagatacagggtttggccatgttagtcagcctggtgtcaaactcctgactkggcttcccaaagtgctgggattacaggcatgagccaccgcgcccggccccttgtcttgttgttaatcttggaagaaaagctttcagtctttcaccattgaatatgatattagcagtggatttttcacatatggcctttattatgttgaggta

SEQ ID NO: 630066 - DNA, 598 bp, Homo sapiens
gtctctctcttcattatcctcaaaaagtgatctgtgctccaaaataaaataccaaaactgggttactgggttatccattttcatataagtccagcaaggtggtgcttgctcagagcagatgcagtcttccttaccaaaataatcaaaatcaatctatgtttcctccttagttgccaggaaaacagacacatttccccttggtggttggcttttaaaatgtgaaacatcatcatggtttgaagggcaacaaattatagctctggcatttagagtgattaccatatkgggaagtctggccagttttgacgagtttagaaaaatgctgcaatttttctaagtgtaagtgttgggcttaaaaaaaaaaaaaaggggagagaccctgaaaaagggaaccagtatttctccaggatctcctacctgccaaaaacttttatttatttaatccttatgatagccccatgaattaaatgttattttcaggagagaaaatgaagatttctgaaagtgaaaatgacatgcccagagtgccacagttagtgaaaaagcttcaagatgaagggcaaagattagagcccggttctctctgtttccatttcca

SEQ ID NO: 630067 - DNA, 565 bp, Homo sapiens
agagaggcctcctgttcacttctttccatctttcctggaagcctgatctccctttctgcctcccttctccctccatcctgaactctactgtcagcacagtcttccaaaaactgtggaaccatctagacctctgtggatgcggaactgtttccaaggccaacaactgcaacaattataactttatatttctattccacctccaacttccatttccaccacatggccaaaaacatagagaattttcagtcatttcatgtttaaattcacttaaatccagtgtcttctccattccctcttcttcccgggatgtatttcaggtttgcggttgtgtcattgtattggggtggggataggtgtctggtcttatgccgtagtccacttagatttccaatatctttgtctggagttaaggaaaactcaggcctttcactgggccctctgccttgggtccctacgtgccgcctcttacgtcccccacttcactaaggcatggcacatatttctggggtttgccaaactccagaaatatgcgtcataccayagtacaagcccattacacagccaa

SEQ ID NO: 630068 - DNA, 544 bp, Homo sapiens
aagaatcggaggagttgggcagcaggtgccccctgtagcgggggcaggggttctggacttgccatagtttcaaccctgcccactgttccttccccagcctastgcagcctcgatctcacaggcttaagggatccccttctccagttgctatctgttgggaagtgtgtgtgagatttgggggagctgggagcacttcttttgccagcagacacactgccctgattcagaccaccccacagccactcccagttctctagccgcagagcctgccaggctgaggcctggggaggtggtgggaggctgaccctgagtagggttctgatttcccttttcctcatggccatcactacccctcagcccctgcagcagggacaggcatcttctcaggcagcaataccatctgtaccagccgtgagggtggtggaaggaagggtgggagtgtggatcctggctcccagagaagccactgaggctggggcaacttatccacatccctagtcctgccagattggcagaggtgattacctaattgaggattaaggat

SEQ ID NO: 630069 - DNA, 555 bp, Homo sapiens
agatcttatagcttggggctgctctggcaagaatcggaggagttgggcagcaggtgccccctgtagcgggggcaggggttctggacttgccatagtttcaaccctgcccactgttccttccccagcctactgcagcctcgatctcacaggcttaagggatcccctkctccagttgctatctgttgggaagtgtgtgtgagatttgggggagctgggagcacttcttttgccagcagacacactgccctgattcagaccaccccacagccactcccagttctctagccgcagagcctgccaggctgaggcctggggaggtggtgggaggctgaccctgagtagggttctgatttcccttttcctcatggccatcactacccctcagcccctgcagcagggacaggcatcttctcaggcagcaataccatctgtaccagccgtgagggtggtggaaggaagggtgggagtgtggatcctggctcccagagaagccactgaggctggggcaacttatccacatccctagtcctgccagattggcagaggtgattacct

SEQ ID NO: 630070 - DNA, 546 bp, Homo sapiens
ataacaagtacttccttactttcctatctgctgaatcacagccattgtttgggttgtagttcctggtttaaattagattattcaatcacaatgatgctggccaaacatgctggtcatatgccatcaggaaaacttatcaaaaatatcatttgtgctgggcacagtggttcargcctgtaatcccagaactttgggaggctgagtaggaggatcacttgagcccaggaattcgagaccaacctgggcaacctgtagaaaccccatctctacaaaaaaatacaaaaattagccaggcataatggtcatacctgtagtcaagctcctcaggaagctgagatgggagaactgattgagcccgggatgtcgaggctgcagtgagccatgatcacaccagtgcactcccacctgggagtgagaccctgtctcaacaactacaaaaaatccagttgtgtcaagtcttaaacatataaacacacatacttttgcactaataaaatttaatctgtaccaaggcaccttttaacacccttttttccctccttctga

SEQ ID NO: 630071 - DNA, 546 bp, Homo sapiens
ataacaagtacttccttactttcctatctgctgaatcacagccattgtttgggttgtagttcctggtttaaattagattattcaatcacaatgatgctggccaaacatgctggtcatatgccatcaggaaaacttatcaaaaatatcatttgtgctgggcacagtggttcaggcctgtaatcccagaactttgggaggctgagtaggaggatcacttgagcccaggaattcgagaccaacctgggcaacctgtagaaaccccatctctacaaaaaaatacaaaaattagccaggcataatggtcatacctgtagtcaagctcctcargaagctgagatgggagaactgattgagcccgggatgtcgaggctgcagtgagccatgatcacaccagtgcactcccacctgggagtgagaccctgtctcaacaactacaaaaaatccagttgtgtcaagtcttaaacatataaacacacatacttttgcactaataaaatttaatctgtaccaaggcaccttttaacacccttttttccctccttctga

SEQ ID NO: 630072 - DNA, 399 bp, Homo sapiens
tgctctttccccagtgcctcgaatatagtaggcacctaataaaaaattaggtaaatgaatttagacagacattgaacattcattttccattttgcttttttcatttattattaaygcataaacattttatcacattgtcagaatactttaagaccataattttttgggctaacaatattccattttatagacataccacaagttatttacaatttgggactgaaaaaccaggatatttacaaatgggatattttggatgtttcttcctttgatatttgtgaacttcacttcacttttagaagtgaatctactagtgagaatatgtacctcacaggattgttgtaaagctgaatatgaactaataagtggacacagagacatcagttttgttactactgc

SEQ ID NO: 630073 - DNA, 472 bp, Homo sapiens
ggtaaaatgaagctgagacatactgggctgaattcccagacggttaaggcattctaagtcataggataagatatgaggtcggcacaaaatacaggttataaaggcctcgctgataaaacaggttgcagtaaagaagcctgctaaaacccaccaaaactaagatggtgatgagagtgacctctggttgtcctcactgctacactgccaccagcgccatgacagtttacaaatgccatggcaacgtcaggaagttaccctatatggtctaaaagggggaggcacaaataatccaccccttgtttagcacatcatcaagaaataaccataaaaatgggcagccagcagccctcggggctgttctatgtcttttattcctttacttccctaataaacttgctctcastttatggacttgccctgaattctttcttgtgcgagatcaaagaagcctctctgggggtctgaattggga

SEQ ID NO: 630074 - DNA, 430 bp, Homo sapiens
gttgccaatttctgaaccattgatttttagttaggtctatgtgtgaactcaactttaagtttttaagttagagcacatgaaatactttgatgccttctagtaataaacttattattaaaactgtaaggcttagttttttattcaaggtttaatttttattaaactttataatgatttacctgtggttatatctgccccagtgaccaagctggacccagstgtccttctatgtatataaaggatgtggttttatggagtggtctctaagaaggcttagcccatggtcttatccctcccctgcttagaaattcttcataactctgattgcaggataaaggccaaacaccttggcatgggaatccattgttccttactatgtaaccctagctggtcgttccaactttatattctgccataattccccatccca

SEQ ID NO: 630075 - DNA, 460 bp, Homo sapiens
ctttaccttttcccattcctatttgtatatttttttctcatttgcactggctttgtttaggttttattcattcattcatttaacagacatatatcaccttctatatgtcctggacactgacaatataacactaaacatacaaaaattcccacccttgtttttaccttctagagaccataatcaaaataaactatacacagtaacattcttatccgtttcccttatatgcttgttcactctagaaacaagctgagattttawaaacaaaacaaagcaaaacaaaaacaaaaaacttgcaaaattcaattctctgggatgttcaggcagtccatgaaaaatacaataaaataaaataattcaattctccaaaaattgtacattattcttttcatttgtaattctttaaagctgaatatgcagacttattggatatctgtatttaattcttttatgaacttcc

SEQ ID NO: 630076 - DNA, 578 bp, Homo sapiens
ttgactgaggattgaggggaccattgctcacagggtgacatctatcagatttaactctatatctatctgtgtacaaggtgagaattacatttgtatctttattctcacttgaagaatgaatgagttgtcagatgataaaaacatatggggaattctctcattatttagaacagaggttgagaaactttctgcattcaaagggctatatttttaggctttgcgagccatatagtttctgtcacaattactcaactctgcagttgtagcatgaaagtagccataggtaatacataaacaawtgaggatggctgtctccaataataacttatttgtaaaaataggcagtgggctggatttggcctggggtttgtactttgctaaccacttatctagaaaaaggctggagaaatatagctgttgaatgttagttggtgtaccacaatttggaatagtgagcagtctaactggttttctccctacctctttaatgttcattttgggatattttgctgttcagtcttacatgtgaataaatattttatcctttgttcttctaaataattactcaaaaccagcag

SEQ ID NO: 630077 - DNA, 633 bp, Homo sapiens
aaataattggatatatctttcaaaagtaactgtgaggtcataagaataaggaataccagggtttaggatgtacatgaagagagaattgagctaaactgagagctaattaaaagtcaaaatagtgtttattttggcaactctcgatttttcatggtaagtcaaaaaaatacctaacatttgcatggcacttttctcagaaaacattcctaggaaatatgtcaataagaaataactcaagacaatatggaaatcaagaaacaatcataagatatattaaaccatctattgccaacagttgatcagcattctttcctgaacctggacatagattcagctctttcaaaatgcagcacayaactacaaagtagacacatggaatgcagagaagcgccttatgttcaaggacagcatggtagatggggaagggcgacaatgcaagctgggcagggggagaggaggtagtgatgtgcagcaacaagtggcccaaaactctggaaaagaacagtagcaagtgagtgtgactcacatgctggcatcagagcccctcttagagcttagaacactgggcctctgtcaggcaaagaaaaggagtccctatgaatagccatctccacaaatagcagttactgtcac

SEQ ID NO: 630078 - DNA, 633 bp, Homo sapiens
aaataattggatatatctttcaaaagtaactgtgaggtcataagaataaggaataccagggtttaggatgtacatgaagagagaattgagctaaactgagagctaattaaaagtcaaaatagtgtttattttggcaactctcgatttttcatggtaagtcaaaaaaatacctaacatttgcatggcacttttctcagaaaacattcctaggaaatatgtcaataagaaataactcaagacaatatggaaatcaagaaacaatcataagatatattaaaccatctattgccaacagttgatcagcattctttcctgaacctggacatagattcagctctttcaaaatgcagcacataactacaaagtagacacatggaatgcagagaagcgccttatgttcaaggacagcatggtagatggggaagggcracaatgcaagctgggcagggggagaggaggtagtgatgtgcagcaacaagtggcccaaaactctggaaaagaacagtagcaagtgagtgtgactcacatgctggcatcagagcccctcttagagcttagaacactgggcctctgtcaggcaaagaaaaggagtccctatgaatagccatctccacaaatagcagttactgtcac

SEQ ID NO: 630079 - DNA, 512 bp, Homo sapiens
gcgatctgtcctggaagtaaacaacttaaattatagcacgttttatttttgaatgagttgacagtgacaattatggaagtaccctgaagctgtggggtcatttctgtgctttttctcttctcctttggctgaatgaaattggtaaaaaatcaaaagattcagaaattgagttttatggatgttgaatagaatgaacattatatttcttttgggataccgttggttgcatagctagcgggacacaggagaaatagttgttcagactggggctcttatctgaatgaactgtgctacttgttcttgtggtcatattgtgactatagttaataagggctgtgaagacactgaaatggacaaggtgtctcaygtggttgttactttgcactctatacttgggtctagggaatgccatcagtgacaatagaaataatgggctaacaggcctcttgtcctcccttctgtggacttttgattccttgtaggctcctgatgtgttgatacatgggctgagt

SEQ ID NO: 630080 - DNA, 531 bp, Homo sapiens
cagctgacacagattcagcatgaagcctgcagggctgctggcagtgaaaatacttcatacatattaatatcacatggaagaaaacaaaccgtgatttcaaattcaaggccctaatacacacagaaccaaagcctctgagttgcaggcactgatgtgcacttaaggtctatggaaggttctcaaagggtttgagtgccatgaaagctgagctgcagatggaaatcagaccatcctgaacaccaggcttcttgctccactgttgtctgtgtttcagtacaaaattttctgcagtgattatgtgaaatggcaagttcaagaaaatgttggaaatggaaaataggagaggacaataatcttaagtcagcttcttaaaatatttggaaagcatcttattccaagcaggacacatagccctatctgtagggttacmtcatcatcatcaccatcaaccaaagggtcacagccacaagtcacaaaggagctgagtcttgacctcagtcggttattgttagagtggaggggaagcctgaa

SEQ ID NO: 630081 - DNA, 561 bp, Homo sapiens
gcttttcctcatcttctcacccttttcatgttggartgccccaggaatgagaatacagctacatgcaaaagatattttgatgagggatagatcagagttcaaattctgcttaccacgggaaggtctgtggaagtctgcaacaaagggtggcaggagagtggcaagtgctctctggggacaagggaagcaggccacaggagggatgccaatgcacaggttacatcactttgcactgaaaatattcttttcctatttgagagttttgtccagacatagtagaaatgcacccaacaggggtctaccaataataggataaccattttgtgaagcatgagggtggaggggacttaataagtttcagggccagtgccatgcctacatatacacatttaatctccacaagaactgtataaattaggttataatgaccatttcagatggtaaagctggggattaaagataccacgtgactcactgaagtttatgagattaataaattgtggagctagaatttgtcctcaggtttgtttgcaaaacctgtaagatgaaccaaaagagtct

SEQ ID NO: 630082 - DNA, 509 bp, Homo sapiens
gaattctgttgaaggccttttctgcatctattgagataatcatgtggtttttgcctttggttctgtttatgtgatggattacgtttattgatttgcgtgtgttgaaccagccttgcatcccaggaatgaagccaacttgatcgtggtggataagctttttgatatgcgcacattgttatgaacagtgaatgatgaaaatccttcatccttggagggaaaattggagttttatttatttatcttaaaatatatataacataaaatttaccatttaaattacttttaaatgtgcagtcttgggagatgaacttcatttattttgttgtgcartcatcaccaccatccaactttagatcttttttcactgtgcaaaatggaaactctgtactcattaattaataactcccattcccccctccctccagctctctggtaactgccatactatggtagcttgaattttcagaaaccacctaacatcttttgaaaccacgagcaatggcttatat

SEQ ID NO: 630083 - DNA, 556 bp, Homo sapiens
gttcaagctcaaccaggattaagatttctgtaagagtgaattgctataggaatctaaaaatgaatgtttcagaaaacatcaggttaatgagaccaagatattcagctaatttgcatgatttagacaaaaatatctttattttccttagtggttgcttgtctggagcctggaatgtctagccttaatcagcgcacaagtacttaacaattatctgttctgtgcttacattatgttaggggccagcagctccaaaagtaattctcacacacataggaatttgtaaaactagtttctttatgtagaatcagcctcttttatgtgtatataagtgaactgtcccaatgcccagcggctttttaaaactcgcccagcaggtgrcaggaccatcaaccccatgactgcagatactaacagacctatgtgactggctggccgaaccgtctcagcaactagatggtcctgactcatccaattcaaactctcgcactctgactctgctgcacttacagtccactcctaaaatcatcaggtgaatgttttagaagacagaagctat

SEQ ID NO: 630084 - DNA, 598 bp, Homo sapiens
gacactactgcttaagaactgggtacaagttttacaaaggccaacataaaatatattctaactttataaaagtttagtcattacaaaatctatctacttatgactactttcttggcactttacattaggaaactactgggataaagaagcttttgttgatacatctgccattattccctaccttctaaccaaaccaaattaatatatgaacaaaattcaatgtattctcacattttggggtagtccacattaaatcccatggaacctgcaactcttctcaagcagttcagaaagctctcrgcaacatattcagttctgtcgctacataaaatcaaccaggtattcaaagactgtgcatttaaaatcttgcaagttcgaatatccttggaccagtcagcagcagacacaggttgacactgagaaaaataatgatcatgaaaggattgaacaaatttattcagagagcagctaaataaagacagtgtgaagatggccaacttttgttataactgtttaacacagtttgctattcagtcttaaaacacagatgcaggcactgcacatccgaacagaatacatgtgctttctgggagtggaa

SEQ ID NO: 630085 - DNA, 409 bp, Homo sapiens
gtgattgcaaatgttttctcccattatgtaagttgcttttcattttgttaattatttcctttgctatrcagaaacttttattatattgttgtatttttggtgtcatattcagaaaatcattgccaagatcaatgtcatggagctttatgttttcttctagaagttttgcagtgtaagatcttttgtttaagtctttaatccatttagagttaatatttgtatatggtataagggtccaatttcgtttttttacatgtgaatatctagttatttcaacaccatttattgaagagactttctttatcccattgtgtattgttggtgtttttgtcaaagattagttgactgtatacgtgtggatttatttctgggcgtcttatcccattccatttgcgtatgtgtcagtttt

SEQ ID NO: 630086 - DNA, 551 bp, Homo sapiens
gccgaaacattttatatatcagattcatttggtctaaagtataattcaagtccaatgtttccttattaattttctgtcaggatgatctatctgttgttaaaagtggagtactgaagctccctactattattgtattgctgtttctctcttcagatgttaatatttgatttatatatttagatgctcaactattaggtgcatacatacgtaaaattgatgtattctcttaatgaattgattcttttatccttatccaacgactttgatttttgtgaggttttttttttttttaacaaaagtctatttggcctaatttaagctaccccggctctctatkggttcccatttgcatggaatattttttctatcctttttacttttcaatctatatgtgtccttacagctgaagtgaatctctttgtaggtggcatttagttaggttttcttttttatccatttagctacactgtgtcatttgattggagaatttaatccatttacatttaaaatattgataagtgatgactcactattgtgattttattcattgt

SEQ ID NO: 630087 - DNA, 551 bp, Homo sapiens
gccgaaacattttatatatcagattcatttggtctaaagtataattcaagtccaatgtttccttattaattttctgtcaggatgatctatctgttgttaaaagtggagtactgaagctccctactattattgtattgctgtttctctcttcagatgttaatatttgatttatatatttagatgctcaactattaggtgcatacatacgtaaaattgatgtattctcttaatgaattgattcttttatccttatccaacgactttgatttttgtgaggttttttttttttttaacaaaagtctatttggcctaatttaagctaccccggctctctatgggttcccatttgcatggaatattttttctatcctttttacttttcaatctatrtgtgtccttacagctgaagtgaatctctttgtaggtggcatttagttaggttttcttttttatccatttagctacactgtgtcatttgattggagaatttaatccatttacatttaaaatattgataagtgatgactcactattgtgattttattcattgt

SEQ ID NO: 630088 - DNA, 608 bp, Homo sapiens
catgcctgtaatccccacactttgggaggacaaggcgggccgatcacatgaggtcaggagttccaaaccagccccggccacatggtgaaacctcgtctctatttaaaatacccaaattatcccggcactggtatatgtgcaccctatagtccccgctacttttgaggcttaggcacggagaatttctttaaccccggaaggcgaatgttgcagtgggccgagatctcaccactgcacttcagcttggatgatggagcaagactccatctcaagaaaaaaagaaaaaaaaaaaaaagaaagaaaagaaaaatgtaggcttatgagacattcattatggaaatagtgcatttattgtattgtttattttaaaactatttctgcatttctattctataaaggactttgcagaaataaagtgatgtattaatttaatgttttcaagttgcaaggtctttgtatttttctggctaaaacctacagaggttatagtagtcatgaaaaatttgattactraacttattaattttccccttacacaacacttccttttccaaagaatttcagaaatgtattgccagatacattaatgagtgtctacatgtgcgtta

SEQ ID NO: 630089 - DNA, 608 bp, Homo sapiens
catgcctgtaatccccacactttgggaggacaaggcgggccgatcacatgaggtcaggagttccaaaccagccccggccacatggtgaaacctcgtctctatttaaaatacccaaattatcccggcactggtatatgtgcaccctatagtccccgctacttttgaggcttaggcacggagaatttctttaaccccggaaggcgaatgttgcagtgggccgagatctcaccactgcacttcagcttggatgatggagcaagactccatctcaagaaaaaaagaaaaaaaaaaaaaagaaagaaaagaaaaatgtaggcttatgagacattcattatggaaatagtgcatttattgtattgtttattttaaaactatttctgcatttctattctataaaggactttgcagaaataaagtgatgtattaatttaatgttttcaagttgcaaggtctttgtatttttctggctaaaacctacagaggttatagtagtcatgaaaaatttgattactaaacttattaatyttccccttacacaacacttccttttccaaagaatttcagaaatgtattgccagatacattaatgagtgtctacatgtgcgtta

SEQ ID NO: 630090 - DNA, 369 bp, Homo sapiens
gccgccatagccttttctcattattattctgatccggtcagaggcaaaccagatgagctattagccctcttgcctcactaagtcactgggctgcgaccttgtctgcacatcacctggggagctttgaacccccgcagccccatcccattgctcaggccttgccctctcctaatgtaatcagaatcagtgggggagcccaggcatcagtgcttcttgttgagtaacatgagtccactggcaaaattagttttccacctgacgttatrataacagaagggaaagagttttcttgtggctcgtatagctaaagatttgctacttggtagagatggtagaagtgtcagaagccccagcctacggaaattagga

SEQ ID NO: 630091 - DNA, 621 bp, Homo sapiens
tgtttgttctcctttgttctatctctctgttctgatctagccatcagcttcctctgttctgctaaattaaatacctgaaatctctctgcttgactggccccccaattttgttctcctattcccattatgtggggatatgaacatatctcaaccacttatatttcttttttattgtcattttgtaggatattggagaaaatggtggtaaacaaacaaacaaagaattcagttcatcttatttaatgggaagtttaaatgttttaactaaaacaaacaaaagcttacacttactggtctaaagagaacaagaaaaaaatacaaattacttttattggattataaaatcaggctagctttgaatttctcttctgcaattacagattgctttggttmtttgttgttttaaggcctctctaatctaattatattttcttctaaatttattgattaaatgggatcttgagtcaagcccttcgtttccagttaggccacatttatgggttactaaggaaggctgtctgccacaaaataacttcacagaatctgacattttgtcatttaatagtagaatacacactttgtgtcgagaaggcttttaaaatttcataaatccttactaaa

SEQ ID NO: 630092 - DNA, 598 bp, Homo sapiens
gcaaaagactaatttccaatcagaataaatatctagcataattactatatagctattattttgctcataaagtacaactttttcttttatctgttttactatatattttatatatcacactatataaaatttataattctgatttgatacttttttatatcacattatataaagctcacagttccaatgtgtgtaaaaacaaccattgtatttttataagggaattaaaatatatgtttgtgagttaacaggcactcaaacaaggtctttgtctaatattaagcatgtaaggtatgtaagacataattttgagtgtcaaacctattcaatattgcgataccttgggaaagcagtgttaagcaaaagattagaycctttcaaagggggtttcaccatggagagaatgacttggactgtagtatggtccctaaaggatggaaagggttgatgaataaagatggtgaggaggaaggagctgctgcatcataaagcaaaggcacagaggcaggagcttggagaatgcttaataaattattaatcattgatagttaatagagcaggctgctggagtaatgtattcataaactacattatgctt

SEQ ID NO: 630093 - DNA, 407 bp, Homo sapiens
aatcacagataattacataccacattcagtgttgcacacatctgagaagaccatttttactcataatgattttgaaactgttattgacacaccattaggttttgttatttaatgcattaataaagaatcaggtatcttatcatatcacaaatttagttttaatactttgaaattgaatttcagttacatgtgtatacatgtgccatgctggtgcgctgcataactggttacttttgttgtctgtgtaatttatttcatacatttaaaagcgtagttctgagaaaagaactacagacttcaccagaatgtttaataggttaaggataccagaaattgttaagcactccagtctagaaggcaggaaagaaattaattaarcaagagattattaaatgacgtgacaagtg

SEQ ID NO: 630094 - DNA, 620 bp, Homo sapiens
ctcttgttgaaggaattttcagtttttcagagaatgagagttgtaatctctaatgcaaaaataaaattgaactttgaaaagatctctagaattttttttaaaaaaagatgtttgagtttctaatttcctaaacatttctgaaaacattctcagaaaaaaaaaaagaatccaacagagagaaaagctttttgattttttttttcttttkgtaattataagaaaacactactgcattcatatacaggtgagaattcactaaatattttctggtattagagatgtctataaacagagattgtgccttagaaaaaccttgcttgctactcagtctactcatagatgactattcttaccctattaagacaccaagcagcctatcttccatttttataaattatcaataagtgaagtacatctaaattcttcggatgaaaatcattttcagtttctatgttgatgtattctcatgagaaatatatgtaaatgttggttcatagcattgtcattctttttaaggagattataataattttctgaacgaggttgatagaatgtgatttaaataaaagtggtactttttaccacttattctgaatatggcttatcaattcttctaacta

SEQ ID NO: 630095 - DNA, 552 bp, Homo sapiens
atttctgttcctagcaggaaaaaacacaggatgaagtaagtattcaccatatgattcgcctaatttttatatcctactgagactagctcagttctaggaagtaattgtaaactcatgtcagggactgagagtgaatacatttgattgctcactattaaatttctttagtggagaaatgacactgaggtgattatctaaatacagagtgatttattgaacagcatgctaggtgacaaatgatgggrtcagtggtagcctctgttacttttaacggcaaacgttctgtttctcatttcaactctgtggttctgaggcaggttatttaaatttcttaatcttccacctttgactttctatgtaatgaagaagattaatgtaggattttattagtcatgataatcttttctatagctgtaaataaaaatcagcttcattccactgtggagtaacttataaggctgctgttcatttgagggaagtagattgcggattcttcataggtaaagaaattcatccctacaactctgggaaagtcataatgtataactcaac

SEQ ID NO: 630096 - DNA, 596 bp, Homo sapiens
gccaactacggtttctactgcatcataagaaatgcatgcttggctatgtcatttgttcacctttaaatgtctttccgggttcattctgagcacagcagcttttatacagaataaaacagtcttggaggttttattttccctctacaaacrcccagaggctctagttcagttaagaaacaaattaaattttgtgaaagagaaacagtaatatgtttgaaatatccagagctgttccccttcagctgcatttaaaaatgactaaactgatttaattcacattgtgatgtcaattgtcagattggaataagatcttgtggacctatctttaatgactaaaaatagcatggcaataaaaattctactgaaaaaactgccctgttcccactgatagtatcttaacaaagcattacatataaaaagtgcttgccacatggtttttaaatattgtgcactaaaattctactttataccagaaacatgtcaagtgtttggcagaatctgcttaattattttatccttgaatacataaaaagcaaatttagttgatagtctattgacttaaccagaagttgttgatttaaaaatatttatatagt

SEQ ID NO: 630097 - DNA, 581 bp, Homo sapiens
tgccctagctgttaactctgtttcgcacaggagacttccttgacaatttggatgttcgtagrcccaactgttaaaagtattatgaagattcactctgtgtaggcagaggtttttccctatcagaaaacagttccagaatcgcaaaccctcgctgagtgagaaaggcgagaaatatgtgacttccgaaaccaaatcaattttaagaacttagtctgatttgcttggaaaatgagagaagcatgcaattcttgttaaaggtgaatgtcaagagcaaggccatctaaaggctcagcttctcctgcaatctatcatgacaaacctggatccattcagagaagacaataaaatatctaagaatatttttgcagtgaatattggctgctgtatggaagctttgtccctcttggatagatgtccctaagacagacaagctccagttggaaaccatagatgaggcattgactagttgtcaggctcttactgccctggattggcttgtaatcagatgcaggtgtcccatggggaatgagaaactgacccaaagaagtctacaagtctagtggctgcaatagattgaaatt

SEQ ID NO: 630098 - DNA, 671 bp, Homo sapiens
ctgggaatgctatccatctgaattatctctgttgctattattatatgtaataaaatattaattgaatagttggagaaaaataacatagtaagcaagcaagatgaagattcgttctttacctgtgagtattagtggttataatggatggaattgtgaccagccaggcatgcaggttattttgctgtgcagtaggttacccaggccactctctgaatgtaaaaacaaacgtatcagtgaggtagcattcatctcttccctgagtaacagacctgyacttccaacagtctgtgggacatttgcatatgagggtggcacaggcaagttctagctcattagtcttcaaaccaaacatcacctttttctaaccaacacttgggactcaatttatgcattctggggatctcctgtgcctgtcttctcttctatacctgtaatttgctatctaatccttgaaaactctttacctattttattttggtcactttttatgacccatgctgtatttttagcaatgttcattctcctttgtctttctaattccacatttatttccatttatttttcttcttacactactttcctgagctctattctacagcatttttatctctgctctgtgttcttgcttagtgtaggtgcttgcttcagtaaattaaaatgattgccatatt

SEQ ID NO: 630099 - DNA, 497 bp, Homo sapiens
tgttacgtcatgctatctcacgtgcatgcagagtgtgagttggggtcaaaagcatggtaagcattaaaggaggggtgctaggcagtaaggaagagttgtgcttaattaaattcattcctggaaatgtgtagctttacygcctgaataaatggataaatatcttgacacagtattaaactaaatcatatgaaatgtctgtgagatttcataagaaggtaaggccttaaaattttacatttcttgaagctatcttgatttcctaaaatatttattgagaacttaagtatagcagactttatttcccaactctgttaatgctttagaagtgagaaagaagaaatcctcttaggactcatccacatttttttttttggtcgtttttcattcatataaaccccttaaacatacttggcagtgtatttaaaagttttgcactcagctttcggcagtaacagctggagcggcatcaacagcagatggactaggcagcataaaag

SEQ ID NO: 630100 - DNA, 497 bp, Homo sapiens
tgttacgtcatgctatctcacgtgcatgcagagtgtgagttggggtcaaaagcatggtaagcattaaaggaggggtgctaggcagtaaggaagagttgtgcttaattaaattcattcctggaaatgtgtagctttactgcctgaataaatggataaatatcttgacacagtattaaactaaatcatatgaaatgtctgtgagatttcataagaaggtaaggccttaaaattttacatttcttgaagctatcttgatttcctaaaatatttattgagaacttaagtatagcagactttatttccmaactctgttaatgctttagaagtgagaaagaagaaatcctcttaggactcatccacatttttttttttggtcgtttttcattcatataaaccccttaaacatacttggcagtgtatttaaaagttttgcactcagctttcggcagtaacagctggagcggcatcaacagcagatggactaggcagcataaaag

SEQ ID NO: 630101 - DNA, 573 bp, Homo sapiens
tccatgaactaattggaagagattccctatagtgacaggaataagggaaagggctatacaggattgtaagagaatagatgctcatactaattgctatgcatttatttctgtatatatttcatgttcttaagagtctgaagctaaaaaatgtagccaattctttttttccctttctgtatacacttaaaatggtaataatgggtaatattagttatttgcctacyatctgtcactctactacgcattttatatacgttttctcatttagatcctacaattgctttactattattaccattttacaaatcaaaggactgaaattcatagagattaacttgctcaagcctacacacaaacaacatttgctgcagaataacttatcctacttagtagtagttgccatatcattttaatttctgcacaggctcgtcatacacaggacactttcattaatactttgagtgtgaatcaatagtaatatcaacaataatgtgtagcagaggtaccattacataaataatagtatattaattactagcatttatttgacactacgtaccagacattaatgtc

SEQ ID NO: 630102 - DNA, 543 bp, Homo sapiens
aggatgatcttggcctagaacatagagaacagatagggactgagcggctgtgaggagctcctgttctactcaaagttggttccttggagagctgctttgatcagacctgccctgaaaaatctgacctaattcccacaccagccctaaaccyttataggcagtgggactgatgatgtttcaagatcttgaaacctgagtcaagatcttgagtgatgctctagagcttcaggaattttggtttgagctgcaggaattttggtttctactgcagctccacctctttctagctgagcatctctgagcaggttacttagtttctttgaaccttacttttcgataaaaggagaaaaaaatatatatcttatttttaggttgtcatgaggattgaatataaaaatgcacatcaattttccattacagtgtgtggcatataatgtgctctcaatacatgaaatttttacaattaaagatttctgaaaccatgcagctctggagcattccctctggagccctggatgggggtcactggagtgataagaagat

SEQ ID NO: 630103 - DNA, 348 bp, Homo sapiens
aatatgttccctgcctatgaacagctcacastacatcaaaggaggcaggtatcctactcaatagccacaaagatgacaggtacataaacatcttccatacaaagtggaaagtagtacatggaatttgagtgctcagcaacaatatcctgtctcattttccagagttagtagaaactgtcatataatgtatgtcttcataatgtcagacaggaagggaactcagccttggcagtagagggaaagctagagggggccggtgcatgcatggatgggggtggatgaaggccctgtgcatctaaacaggtggagggcaatgaagacactgagaaagttgaagaaatagagtgg

SEQ ID NO: 630104 - DNA, 569 bp, Homo sapiens
tgaagggtatttttgtacctgtcaaaatcattttctcataggaacacaataatggtacatctatcagctccactaggctgcctcaggcaatgacctatactcagtgcttcaaaaaaatgccacagttataatcaactgaaaaaagaattaagccacaggggaaaactacatctgaattcaactattgccttkgttttgccccattatgaaactttatatacttcatgttttatgtgccatggtgagcctaaatatagaggcatttaaagagtctgtacttgtcacttaatgccagcctcgctgttttggtactttcacattatcacacacctgacttaaacacagtgatcttcatttcaatgcagttttatcctgtgcctgtctcagtcatcagtgaaactgtgaatgcataaatgatgtgcattactatctcagggtttatgatattaccaaataatgcattgatgagctgtcactagaacatcagtcttgccaagtaagctactagaaggggaaaataattcaccggatagcaatgtaaacattaactataacacatgacatttgta

SEQ ID NO: 630105 - DNA, 592 bp, Homo sapiens
actattactaccaggctgtgatcattctattgaacatggtcttccaaactaaagacatgcartggcacactagaatagaaataactggtttttctcttaatttgatcttataagtcaactggaaattcctctctccgttgttttcatgttccagagaattcagtgacatggagaaaatggcacaacatattcagaggtgttagggccatgatactgacaacttattgtcatgagggcagtcactttcactagtcttctttttctatagaaattccagactcccaaatgttccccaaatgttgattttcaaaatgctttaaaatattttactgcagataaaaacaaaagctttagtatcacttcagttccatcaaaagaaaaatataaggcaagggtcttttgcaaacaaacaacagacttaaactacaaccttgtaagataacagcaggacttcagtttcagggctgtgatgtaaaatggggtgggaaaaataaagtacttcagaccccaaaaaactaaggctgttttgtgtgagatgagatttaggaggaggctaggtaatgtaaattcttatcagatattttaaaggaaa

SEQ ID NO: 630106 - DNA, 592 bp, Homo sapiens
actattactaccaggctgtgatcattctattgaacatggtcttccaaactaaagacatgcagtggcacactagaatagaaataactggtttttctcttaatttgatcttataagtcaactggaaattcctctctccgttgttttcatgttccagagaattcagtgacatggagaaaatggcacaacatattcagaggtgttagggccatgatactgacaacttattgtcatgagggcagtcactttcactagtcytctttttctatagaaattccagactcccaaatgttccccaaatgttgattttcaaaatgctttaaaatattttactgcagataaaaacaaaagctttagtatcacttcagttccatcaaaagaaaaatataaggcaagggtcttttgcaaacaaacaacagacttaaactacaaccttgtaagataacagcaggacttcagtttcagggctgtgatgtaaaatggggtgggaaaaataaagtacttcagaccccaaaaaactaaggctgttttgtgtgagatgagatttaggaggaggctaggtaatgtaaattcttatcagatattttaaaggaaa

SEQ ID NO: 630107 - DNA, 524 bp, Homo sapiens
tctactcctcttccagcctgttctttacttcccaaacaaactgtgtgcacacaratctttgttttaaggtcagcctctgggggaaatcaactatgacagtctccaagtaaaccattgtagtagtagaattgataatgtaaaaaaatacttttgttggctaatgatcccaagcttttcatctctgtatcattctatatttatatttaaatacttactctctaggtattattaaaaactcaggtgcataagataccatacctctatttggatatctaaactgttgaaaaaggtttactgtctcacataggctaataggaatgactcagtgtctttatttagtaaattatttctatttctaacaaaattttcaccttcaaaatgtcttcacttgtgaatatccattcttagtaccggttttttattatttctttttctgactattccaaatattaaaaaaaatgaccttcagttccatcctttcaggtcacagattttagatcactttatatgcatctctccccaat

SEQ ID NO: 630108 - DNA, 563 bp, Homo sapiens
gggaactggatgacattttgttaactgaaataagccaggcacagaaagacaagtttcccatgttctcactcatttataggagctaaaagttaaaacaactgaacttattggagatagtagaatgatggttaccagaggctgggaaggatagtgagggaggagggaaatggggatggttaataggtacaaaaatatagttagataagataaataagatatagtctttgatagcacaacagggtgactaaagtcaacaataatttattgtacattttaaaataactgtaagagtataactagaatgtttataacataaagaaagaataaatgcttgaggagatggatactaagttactctgatgtgatcattatgcactgtatgcctgtatcaaaatatttcatgcaccccataaatatacacagctactatgtacctataagaacattttyaaaaagataggtaatgtgaaatacaaaggtgaaacaaaagataaagatgtgattcttgtctttacaaagaatttactatctaggaaaaccgataggtaaactatccattatgc

SEQ ID NO: 630109 - DNA, 540 bp, Homo sapiens
tttgttaataatggtcatagaagtatagaacttaaatggaccttaaagacagacaaggttaatcaccttatttttgcagatgagatttcagaatttaagttggtgagaaaaccaggacaagaatttaggttacttaactaccagattagtgtttcttgttattttatatgatctgcccccatccctgtggatataaaataaggtctcatctgaaaggtgttattcaactaaagaaaaagcagctttcttagaayagacactgatattaggctttagattagatattaacacagggataaaggtgtcaaaaaagaaagaccaaagaattgtgttgggagttaaaacgtgaaggacacagtcaagtgcctgcaaaatcttgccatttttgagcctataaacagtaattactttgagacagcattcacacaaataaactatgatgggttcagacccctctgattattaagccatcttgtttacatccctctatcctgtgtttcttttcctttggctatccttattatataaataaaaacagtt

SEQ ID NO: 630110 - DNA, 483 bp, Homo sapiens
tattgggttgataattatccttacttgaaagaggagatttagggtaagtagagtaggaaatcttctgtctatactatttatggatattaacatgtctatatatcctcaaaacttacctatcccacaaaataaagtaaaagtaaatgtgattcaaaaatatatgtttttggcttctcactatagtaacaatcctctawataaggtgggtatgatctggcacctgttcaaggggcttatctaccaaagtgcctaaagaaattaatagtaaggaatttcaactcaattagaattctttaaatgaattgaaattcatgaaaaagcagtttcacaatctggctcctgaagacagaattcttagcaaggctccaatgtactatgctgttgcatggtgatgtgtattgggtcattgaaagcacccttttcattcctgccctcactcctgtactgagagttggtgattctttctctgtattccatttgctt

SEQ ID NO: 630111 - DNA, 609 bp, Homo sapiens
tgttaaaaaaaatagtgtggcccttgacttcttaaagtctacatcctaagtcaagagcttatatttatttaagcctataacaaatttgaggatttcagaactcagtgagactctccatgtgcactgagcatgcactgtgagctaagccctttgccaggttttgcaagaaatcataaaggcagtattagatatggtctctgcccttccagagcttacagtatgagagggaagataaatatctactcctccgaccctcatctcccacacatgatgaaaagtgagtgactaacttctgctatctcatttacattgacctcagatggtgaatcagagtctagacaagaaaatcacacatgtacatggggaaactgaggaaagtttaatgaaaggataatttgtaaagattggacagagttaagagggaccaagaagagatggtgaagtgtcccaggactaacaatagcaggaagtccttacacccaaaggcctgaaagagcaagaagagggagtakttatcagaggccagagagagagctgaaactgcaagagatggcctctctcaggaaggaataaagctaggtcctctctgtagcctacaggaagtgagtc

SEQ ID NO: 630112 - DNA, 406 bp, Homo sapiens
aaaacctcattactaaagtcagtagaaattcaatcctagtarggttactttgtcttcagaagcagggtatcccaaacactagcttgctcttgggaatcatggatgtgtaaacccactcaggtttatcccattgaaaaggagaggatcttattgttttgtagaaaaagataacatgattttttttaaaaaaagaagctttataaatgtataaacagtataagtaggtcctcatctgtgtcaagtggctacagatgtttaatatacaaactcatccaacacagatacaggtaacaagtatgcttaatgttaaactcataataaatgtcacaaagtaatgacagcatcttctaaagcaaggcatagtcccttctaaagaatgaaagaatgagctaagaaataaagacgg

SEQ ID NO: 630113 - DNA, 598 bp, Homo sapiens
aggcaggagttttttatattgtgaaatgaccagacctacatgrttttcccaagagctctgttcttgaccccctgtcttgtttattttattaaagccttggatgaaaatagattacattcttatcaaatttgcagatattgaaaatgggagggaaacaaaagctatgccagatgacaagatcaaagctcaaagagaactccaacaagaggtcaaaatgaagagcaccaaatgtgacataaataaatacattttgaatgttagattcaaagctccaactgaactgggtgggggaagactccgtacaattattattctaaaaaaattctcaggagagaaggtcaggataagggtgagagggcatggcttatttacaaggaaaagatgaacaaagtcaagtgttttgcttccaaaatggccaatgcacacttaggcttagttaatagacttacattggctaaaagaagggaggggctagctacatggtgttcttcactgatgggacagctcaagaatattttcaattctggtttctgtgtcagttgacaaatacatggagaattatgaaggatctagaaatcatacatatagtatagacata

SEQ ID NO: 630114 - DNA, 530 bp, Homo sapiens
tgcaaataacagtggcatcaggtgacacaaatttttcaccactctgcacatgtccataaatgattacagaagttctgcaagtattaatttggggatttcaaatacattttagtgagtgggctaactcacaatatggaatctatggataatgaggattgactgtacctataaacacatgcaatgattgtgaacttcttggctgtcaccttgagtcaataagaaaataagtataatgatatttgcatttgaaatgataaaaggaattcttgaaagattagcaacttagtaagtaacttagttctatttcactttatggtcttttcccccatcctgactacactgaggatttctctagtatcctggcttcatcaatgctagtgatatttgtctcctttccattttagtcatcggtatacacagccacaacctgaacttcagtgtcagtatccccaactgcttcacyttcaggaaatcccttcctaattaccacatatcccactatgcacttctattgaatctattcaactcct

SEQ ID NO: 630115 - DNA, 588 bp, Homo sapiens
catcatcataaaatgtatttcttagttaaaaaaaaaacttcaaaaactgtactaagagatgtagctctgtaggaaggtacaactgtagaagtttagtaacatcaaagcaaagcaatttatcaatttcatgactatgatggttttatttacatctaatgaacaatatagaaaagggtacatcaaggcccagccatttaacaagggacatttctccccagtaagttttgttttgttgcaggaaaattgaatgtgattactctaaaattttaaaaaaaaattaggtaatgaaaataagtcagttctgtactgataagcattaaaatatttcttcctgaggtattttctatatacttatggtttaatgaaccctttaatttctggtgattcccaacatgctaaggtaacttttcaaaagctaagcctcaactgcagcctagtgtcattggctgttgaacgtgtttcagatkggatcatgtgcactgaagcaacagcagaacgaaaggtgaaaattctgtagatgctaaaagaaacctctatggaacttacacgaagggtataaaggagacctgagattaacatttcctaaat

SEQ ID NO: 630116 - DNA, 654 bp, Homo sapiens
tggtattctcgcttaataaaccttaagactctgcaagataaggaatatattattgagtgtggtggctcacgtctgtaatctaagcactttgggaggcaaaggtgagaggattgcttgagcctaagaattcaagatcagcctgggcaacaaaatgagactctatctctccaaaaaaaaaaaaaagaagaaaattagcggggagtggtggtgcacacctgtagtcccagctacctgggaggctgaggtgggaggatccrctgagcctgagagttggaggctgcagtgagccctgaccacaccactgcactccagcctgggaaacagaatgaaatgtggtctcaaaaaataaaaataaaaaaggaatatatactacagtccatattgaatttattgtcagaagtgcccctgagagatgtcatcatctgatacagaagaagttgagagtgacttactggggcttttagcatttacaggtgactcttcaacatgggtttgaacttcatgagtccacttataagcagatttccttctgtctctgccacccctgagacagcaagaccaacccctcctcttcctctccctcctcagcctactcaatgtgaagatgacaagaacgaagacttttatgatgacccacttccacttaatgaatag

SEQ ID NO: 630117 - DNA, 580 bp, Homo sapiens
cttgtcatttaattcaacctaattccctcttgttgagcttattctttcctttgtgtgaaaaaaatagggaaatcaaaatgaataaaagctagtctcatacttaaagggaagtagacaggtaaactagcaattacagttataatttcacatccctgaggttagtgacaggcacgctgtatacttartactttccaaagtagcacataggacttatttaataaatgatttaattaattcagagtagcatgagctgtaattactgtacaaacagctagggaaatgtaaagaaaaaagacaacaaccccacatggatgaggccagagaaggcttctgaaatggtctgaagctgaagctgagacttaaagaaagattagaagttgccagtgagtgtagggcatacagactctcttagcgcagggaatagccattgcattccgttaaaggcaagagagaatctggtttattcagagaaccaccaatcttcagtatgagttgagtggcgcatacctaagagacacagtgaaagattggtttgggaagataaacatccatccctcctgtcaccactcctggtcatttc

SEQ ID NO: 630118 - DNA, 517 bp, Homo sapiens
ttcccttctcttagcctttctgaatttcttaacattttccagtaatcactcactgacttatttattcatttgctaatatttgtaaactaatacatctgaatcttctttatgaggtatttcacagatactgtagatgctgtttatctctttcttctttaaataataagatctagtatctgagtactcatatttcctttgagtcatacattacaacacgatctatgtaaatcttttctttctcttggagggtaacaactgtgttttagggtactttatactcttttcagtcctaatgcagggcaatgattatagttgttatgcaagaactacataagaagtgatataacagtgaattaacctcrtgctattttgcaagcaacccattaaaataaaagaatagtgttctgggcaaacgaaagggaatccttcaactaaggcaactaatgaattttgggaagtcctgatatgaagtgtgttttaaaacaaaacacttcaaaactgtctattaagtgttggc

SEQ ID NO: 630119 - DNA, 365 bp, Homo sapiens
aaaaatcttttaatatgtataggttattaatttatgttactattgaagagctgccatgtataataaactaaatttaacaatcttttgtatyaatttttatagggattcaaggatatttctcttgagaggtttatacatggtggagccaatgttactggattccagttggtggattttaatacacctatggtaatcaaactaatggatcgctggaagaaactagatcagagagagtatccaggatctgagactcctccaaaggtatttgtttatttttatctactgtattactgatagtttcaaaatttaagatgaaaagtttattatacagtttttccattaacattttgccaaacatagtatgg

SEQ ID NO: 630120 - DNA, 478 bp, Homo sapiens
aatatctcctggctcttatacagataagtacaggattggtggggtggggggwgtgtagaatttagagaaaagcaaacaatcaacactctcctttctttccactttttctggagttggtctaagtgacaggagatttggcattatgcctgtattaatttcagtagtctcctatttggattccctgtcctccttctctttccactcttcggatgcatcatttccactatatcaaactagcattataaaagcagttttataaatctgtctcttctctgctccaaagcttcgaaggtttctactgtttcagtattgtttcacaatgatcagtggagtaatttctaaactttcagtatttaattatccaaaactatttatcgagtcccttttagatgccaagtcttcttctaggcacagtgaacaaaacaagcctcctgacttcatgagcttaccttttagtatgggaaagagacaataaaca

SEQ ID NO: 630121 - DNA, 571 bp, Homo sapiens
agttctctgacatgggaatgagatggtaattgctggcttttactaaggtcctaaaatatataactgactatatgactccactgttagagatactataaactccccagaatcagagttcaatcatgatgttgagatgtaacagtttggggaggggaagctgtaagggttatcacaatgataaattccccagaacagttcaatcatgatattgagacataacagtttggggagtggaggctgtaagagttgtcacagatcattataaaaaaaacattgaagtatggaagcttgagaatacttattttttcttactatggctgattcaagaatatgtctaaaataagaccacactcacccacccaatgtcattacaccatgctttttttttttctttctgagacagagttttgctctgtctcctaggctggagtgcagtggcatgatctcagctcattgcaacctctgcctcccaggttcaagggactctcctgtctcagcctcccgagtagctgsgactacaggcgtgcaccacgacagctaatttttgtatttttagtagagatggggtttc

SEQ ID NO: 630122 - DNA, 597 bp, Homo sapiens
cctgtctcagcctcccgagtagctgggactacaggcgtgcaccacgacagctaatttttgtatttttagtagagatggggtttcaacatgttagccaggctggtcttgaacttctcacctcaagtgatctgcccagcttggcctctgaaagtgctgggattacaggtgttagccaccatgcctggccctcacaccatgctttcttgactgtaaaggaaggggctgaaatgccatgtcattaggaatttgcattatcttgggtgtgcctatgggaggaagatgcaaatgtgagattgcagttttaaaaaaaaaaaaaagttgataatcactgactgcaagaagccactcttttaatgatattcaaaatctttatggccccagccttctctacytcctccatgatctctgcctaggacatacttgatatttgccattcttagaacatgttgcctctctttacctctatttcttttgcctggagtgttcttcttcttccactctccagtctctttgaagtactttccaactctccaactgagagtcacacacctctaattgcagtatctaccttgctttataagactgatgtgttaatgg

SEQ ID NO: 630123 - DNA, 646 bp, Homo sapiens
tcatcatcaccaagggcatgcatcagcagcctcattataatggaaatcacatttactgaccagtgtctatgtgccatacactgtgtacttcctatgcatcatctgatatttttaatatgcactcttgtggggcatagcaggaggaaatgagcaaaaaaatggcacagagtcctgggacctgtgaagaaggccttgatcttggaatatgctctacattttatctcttgcatggttttgttccagtggtttcttcctctttcagggattcccttctccacctagaaatatcccaactgtgcttcaagaccccacctacacagcattttatccatatttttggtcactaactatcctcaatgagttagcttctctcctctgtacaatccagaggagatgtgttgtgcaatcccagcacctacccatggtgttttcgtagaggttaccaccggtatcgtaccacagtattgttcattaagttgcttaccttccccacgagccagaacttcatgagaagaaaggatgccttmgtcagctgattcatgtttgtatcctcagtaaccaacacagtgctaggcacatagtaagtgcaaataatatattatgttttaaagtaagcaagtttgtctttgagacatttctaccaact

SEQ ID NO: 630124 - DNA, 398 bp, Homo sapiens
tttctccttcctttttccatgagttctgatcttaaaaatctttctgttgacatctcattagaaactggtccccatgtgtttcacataacagagtctcccccttcataatgtcgatttgtaatgataacagataattaaacacagcacttactttataccaggcattgttctaaaaacttgaaatatagtaacttatttaattttctcaaaaatcttgtaagtactgttatcaccttcattttacaggtgaagaaactgaagwacagagttgttaaataacttgtcctaaatgatagctaacaggtagaagaacccaaggaatccagcttcatagtctacccttctaactaataagtaacattgctattatctctaatgaggtatgcatgtgttttctt

SEQ ID NO: 630125 - DNA, 363 bp, Homo sapiens
ccagtttgttattgggtatactgtatgatgctgatgtttggggtataattggtctcatcacccagkcactaagcatagtacccaacaggtagttttcaaccactgctatcctctccccctcagtagttcccagtttctgttattggcatctttatgtctatgagtacccaatgtttagcagccacttaaagtgagagcatgtggtatttggttttctattccagcattaatatgcttaggataatggcctccagctgcatccatgttgctgcaaaggacatgattttgttattttttaatggctgcatagtattctattgtgtatttttaccgcgttttccttatccaatacaccactgatgg

SEQ ID NO: 630126 - DNA, 627 bp, Homo sapiens
tgtctactcatgttttatttaatcctaaaccttataaatggtgtattttcctcttatttaaagaagattggatttgatacttgcagacttaatttacttgtacttcagcttttttatattaagaattgtttataagagtcattacatttggactagagtagccttattcctgagatgtgagatttctgaagtgtcatttaattatctgaagtttcaacaaggtctctctattctggctggttggaactcagatttttccaatggatatacaagctttggaatcttcactgagttctcagcaacttggtaggtatcctttgcccagcattttcaagtatcatcctgtgtgtgcatactttaataatcagccaaagactaaataggagtcttatgtaggaagcaatctagagctccttttcttcacagttattgattctcttgtactctgactgcaaattagattctgtagtactctgactgcaaattccagtcccttacattatgtccaaaacattatgtccaaactttgatttctgtctcytcagctcagatacctgtgtgcctcttggtcttcagctccaagtgctatgggtgcctcagagctgaaagctgggcaatcatgaggct

SEQ ID NO: 630127 - DNA, 538 bp, Homo sapiens
ccccaatgtgaaggtgttgagaggtggggcctagtgggaggtatttgaatcatgggggcagatacttcataaatgtctgggtacagttcttgtggtaatgactgaattcttgctctgggagattgattagttcttacagaaatggattagttccactgagcatgttttgttataaagtgagggtgccccttamttttgcttcttcacatgtgtccacttcctctttgacctcctctgccatggcttgacccagcacatggacctcactagataccaacaatgtgcttctcatacttcccagcctgcagaattgtgatctaaatagacctcttttctttataagttacccagtctcaagtattctgttatagcaatacagaacagactgagacaattattatgtctttctctccttcttactttaaatctgtttttgtctttatatttaaattgggtttcttgtaggcaatgtatagttgaattttgcttattttgttgttgttttcaaaatccagtctattgacttctaacttttttg

SEQ ID NO: 630128 - DNA, 547 bp, Homo sapiens
ggtgtaaggaagggatccagtttcagctttctacatatggctagccagttttccyagcaccatttattaaacagggaatcctttccccatttcttgtttttgtcaggtttgtcaaagatcagatggttgtaggtgtgtcatattatttctgagggtcctgttctgttccattggtctatatctctcttttggtaccagtatgcctggaatcagcattggcctacaatgccgggtggagctctctgatcccagaccagaacctttggactcacgttgtcatttcttttctttggggctctctttaatcctctactctgtggtagagttaaccaaatgctccaaggaactctggactcatgcctgtgtgttcttccaagaacccagtggttccaggagggtagcctgtcaagcagattgttcctgaagaccagaaagatatttcattcatgggatcacattaaattagaaagccattacggttctagcatccttatttgggataactcaaattatttacagacaggtgctccacacaaaaaatttattc

SEQ ID NO: 630129 - DNA, 547 bp, Homo sapiens
ggtgtaaggaagggatccagtttcagctttctacatatggctagccagttttcccagcaccatttattaaacagggaatcctttccccatttcttgtttttgtcaggtttgtcaaagatcagatggttgtaggtgtgtcatattatttctgagggtyctgttctgttccattggtctatatctctcttttggtaccagtatgcctggaatcagcattggcctacaatgccgggtggagctctctgatcccagaccagaacctttggactcacgttgtcatttcttttctttggggctctctttaatcctctactctgtggtagagttaaccaaatgctccaaggaactctggactcatgcctgtgtgttcttccaagaacccagtggttccaggagggtagcctgtcaagcagattgttcctgaagaccagaaagatatttcattcatgggatcacattaaattagaaagccattacggttctagcatccttatttgggataactcaaattatttacagacaggtgctccacacaaaaaatttattc

SEQ ID NO: 630130 - DNA, 547 bp, Homo sapiens
ggtgtaaggaagggatccagtttcagctttctacatatggctagccagttttcccagcaccatttattaaacagggaatcctttccccatttcttgtttttgtcaggtttgtcaaagatcagatggttgtaggtgtgtcatattatttctgagggtcctgttctgttccattggtctatatctctcttttggtaccagtatgcctggaatcagcattggcctacaatgccgggtggagctctctgatcccagaccagaacctttggactcacgttgtcatttcttttctttggggctctctttaatcctctactctgtggtagagttaaccaaatgctccaaggaactctggactcatgcctrtgtgttcttccaagaacccagtggttccaggagggtagcctgtcaagcagattgttcctgaagaccagaaagatatttcattcatgggatcacattaaattagaaagccattacggttctagcatccttatttgggataactcaaattatttacagacaggtgctccacacaaaaaatttattc

SEQ ID NO: 630131 - DNA, 584 bp, Homo sapiens
tcattgtcaaggtcctaactttagtttgcagtgacggatttgcaggtatttattaaactgtgaaaaaaaatgaccattcattcataaaccmatggtgacagtataccataaaccagaaatatgattaataaaattgtgtccaccctgagtcccaaaaaccaaaataaaaagtaaaaaaaaaaaataagcaaaacagaataaagccagcacagacttagaataaataaaaatataaagaagaacataacaaataataaaaatagccttttgaattactggaaaagaatagactctttaataaatagctttagcacaattaactattcatcacaatacctcacaatatacacttgaataaattctaaatgttttaaaagaaaatagtaaaataaaattttaaaaataggaaaaataaaaatttaagaatgtttatacgccattgagaagacaaaaaattaatctgtcaattacaaagaaataattagcagatgtccctagattttaacaatttaaaatttgacttaaaaccttggtatgactagttataaataatgtttcaagaaaaagggtggtttgtaaaaaaa

SEQ ID NO: 630132 - DNA, 597 bp, Homo sapiens
atcatgaatcagccagtatgtttacagagttggtgccaaagtcctacctgctgatacttttattaacattcctatttgaaaaattgtaaatatttwactattgtaggttttgcaaacactggtatttttatacctccagcaatccctagcttctaaatattttatcttgggtagcatgcagtatgtgaaatgacattcttgggaaataccctatttcccagatcttaaaaacctaaaggtcttgaagttaatattgaacagtgttaagaggggtatttttaaatttctttcgtagatttgttgttgttcttttttaataaaactgaaaagcagcagaaatatttgtaaatggaaggattttccccaaaatttctagagcagatacacatatttgcctaaattttgcttggatttaaaaaacaccagcccatacgaaattgtgtttaagaactgagaaagaaagaatggctttagaatccatttaaaggcaaaaccaccattacaggataaatgagatgaatagtttcctcttccacttttaatgctcaatgtacttttcagctccaggataaaatagcttttcttactttctgagac

SEQ ID NO: 630133 - DNA, 548 bp, Homo sapiens
attttcctgcatttctctgagcagtcagatttcttaagaattaaagtcaatgcttttcaaacttttcatgatttgttcagtgtatataaatgcttccatagagtcttcagatatcatacccaggaaaaaacatagtttccatggtgatctccttttcttcaataatctcttgctcttccatttcaaccagacccctgtggacctctattggcttactgaggttgtatatcaactcagaacagtggcgatgtaagaattatggacagttgcaggggaataaaagacattttttggtcattataytggaagttttatttaatctaaatcattgtttcaagttgatcattctattattaaagttaggttggagaatagaaaaaatacagtgaagtataaaatctaaaatatactttgcaaataatgtttcataattatttttaaggatgataagataaaagaaattacgtaaagctgtcttatagaataaacacctaatctatggcatacaaatcagaatgaaagggttagaatttagtcttttcctacat

SEQ ID NO: 630134 - DNA, 639 bp, Homo sapiens
agagtttgccttttcctaaatctatttaaatgactgcaatattcaaacaggaagttgtggataaattagcttttaaaaatgtttaagaaaaaataatatgtgcatttataaycattcatcacagagtcagctcaccaaatttaaagcacattgtttggcaatcagaaaagctgatgaacaaattgaaaaaaagtaattacagaaaaagtcagtgaataagcaattactgaagaataaattacccaaaaaaggtagattagaaagtacagcatggagaccatacctttgtgcacaggatgagcctctgcagtgtcactgtccagcacttgccctctgagcaagaagaacctagttaccttccctagcatccttactcactggctatatgcaacaggcagaaaacacctcttctcaccactgctttcctatcataattgcatgtgtttcatggcaggaggaaaggatgcaaacccattgtctgcagtacagattagagatactcataccttttaaacattcttaactgccaaatgtagtagaatggggatttaaaaatgagtatcaaacttaaaatatcttgatggaaatagatcatctatctagtaaacatgacaaagttcttaatgttgaaggaacaag

SEQ ID NO: 630135 - DNA, 639 bp, Homo sapiens
agagtttgccttttcctaaatctatttaaatgactgcaatattcaaacaggaagttgtggataaattagcttttaaaaatgtttaagaaaaaataatatgtgcatttataatcattcatcacagagtcagctcaccaaatttaaagcacattgtttggcaatcagaaaagctgatgaacaaattgaaaaaaagtaattacagaaaaagtcagtgaataagcaattactgaagaataaattacccaaaaaaggtagattagaaagtacagcatggagaccatacctttgtgcacaggatgagcctctgcagtgtcactgtccagcacttgccctctgagcaagaagaacctagttaccttccctagcatccttactcactggctatatgcaacaggcagraaacacctcttctcaccactgctttcctatcataattgcatgtgtttcatggcaggaggaaaggatgcaaacccattgtctgcagtacagattagagatactcataccttttaaacattcttaactgccaaatgtagtagaatggggatttaaaaatgagtatcaaacttaaaatatcttgatggaaatagatcatctatctagtaaacatgacaaagttcttaatgttgaaggaacaag

SEQ ID NO: 630136 - DNA, 635 bp, Homo sapiens
tcacatatcttctcctgcagtccaatctttacactttctgtcatgcttttgttttgccttctccttccttakcataaaagttatcagcgtgtcttgagttaaaaaaaaaaaaaaaggtcagccaaacacagtaataaattcaatgtagcaaataattttagatgctacataggccataccaaagtctataacattagggcagtttggatgggaccatgagtggaatgagggactttcctgatggactatgattataagtggctctcaaagccctttttatatgggatggcccttttaagattggtagtgtaagcacagctccggtgattgcattattctggaataatgtactgcttaagttgaaccggtgtgggatttgctcctggcttagaatccttgaccttctatgccctgtttatcaacctcattgcaaggcagcatatactactgttcagttagggttgagaatgaatgctttagcagccttaggaaatatgcttccatgtgccttcaggctgatgtttatagagctattggtgataaaacttgaatgacgttagtgaaaggaggataaaattctttagaaaaaatattacacttactttatggaatgttgagttccaagttctccaaaa

SEQ ID NO: 630137 - DNA, 587 bp, Homo sapiens
tttctagaaaatatagcagtgccttacttaatatactaaaagtttggtggccttattatagaaatttccttttctctggaatattggctatatccttttaaaacactggcatttgggtttcactccaccacttactagccgtatgagctctttttcaacccttcatttctttctctgtaagatggacttattaatactcatccttttcttctcccaaaagtaagacaatatcaaacaggataatcaaagtattcacatatcttctcctgcagtccaatctttacactttctgtcatgcttttgttttgccttctccttccttagcataaaagttatcagcrtgtcttgagttaaaaaaaaaaaaaaaggtcagccaaacacagtaataaattcaatgtagcaaataattttagatgctacataggccataccaaagtctataacattagggcagtttggatgggaccatgagtggaatgagggactttcctgatggactatgattataagtggctctcaaagccctttttatatgggatggcccttttaagattggtagtgtaagcacagctccggtgattgcatta

SEQ ID NO: 630138 - DNA, 608 bp, Homo sapiens
ttatagttacatatctttctgcataggatgtaagctccttggtgtaaggaccacttgagtttttcatcatatctccagcatgcccgtcagtgtctcgttcagagataagtcagtaaatatttgttgaatgaatgaatgatggaatgactatggggaaaaaaaaaacggaaggagtagagagagacaagctggctwcctgttgcagaggtaaagcaaataagattttccaagggtaagacagttttgctttggcactgttttcaaataatcactgtttctataagaagaaagcctgaacaaaccatccaggtaattccatgacttctggcagttgtatcttatttacacttaaagaactgtttatttttttagcccataaatggttaggatggagagattatatgctctgatgtcccaagaaagttgccattcctgagcttataggggaatctaagttccctggacaatttaatcatatttctatctttaggacattggggtagagaggaataatggtgccccttccctgattctttttgtctagaaactttcttcccaactgtgggacctatttagtaattaaggtaaaaggagcttttcttgatata

SEQ ID NO: 630139 - DNA, 608 bp, Homo sapiens
ttatagttacatatctttctgcataggatgtaagctccttggtgtaaggaccacttgagtttttcatcatatctccagcatgcccgtcagtgtctcgttcagagataagtcagtaaatatttgttgaatgaatgaatgatggaatgactatggggaaaaaaaaaacggaaggagtagagagagacaagctggctacctgttgcagaggtaaagcaaataagattttccaagggtaagacagttttgctttggcactgttttcaaataatcactgtttctataagaagaaagcctgaacaaaccatccaggtaattccatgacttytggcagttgtatcttatttacacttaaagaactgtttatttttttagcccataaatggttaggatggagagattatatgctctgatgtcccaagaaagttgccattcctgagcttataggggaatctaagttccctggacaatttaatcatatttctatctttaggacattggggtagagaggaataatggtgccccttccctgattctttttgtctagaaactttcttcccaactgtgggacctatttagtaattaaggtaaaaggagcttttcttgatata

SEQ ID NO: 630140 - DNA, 572 bp, Homo sapiens
cttacaggcagaaagaaccttgggagccacaccttccgtctttgcacccggtgcagtaaacctctggactgcattcttcataagtagatacmcagctttacttgaatatccacagtaatggacattttattgtttccttaggcagcccattccactattgagggctctaattattatctgtctccataggaagtctactattagcgattgtgcaccagtaacaaaagtcctgcctaagtgttgttgacaatggcactactcctgagagtatttgcattaagaaacaggctgtcagaagacaaaataccttaacaagaagcagtgaagctctaaaagtgtgataacaggcatcttggtccttcctacatgggggaatcctagtttgtcttatggacacatttttggcacctgttcctgccatgttgtcttagttacactcttgctgtggtggattacagtaactggaagtatgataagggccctttaaaaacctgaaagcacagttgggaaccagtgagaaactgatgttcttccccattcccatctcaattaaattttttaataagcattga

SEQ ID NO: 630141 - DNA, 572 bp, Homo sapiens
cttacaggcagaaagaaccttgggagccacaccttccgtctttgcacccggtgcagtaaacctctggactgcattcttcataagtagatacacagctttacttgaatatccacagtaatggacattttattgtttccttaggcagcccattccactattgagggctctaattattatctgtctccataggaagtctactattagcgattgtgcaccagtaacaaaagtcctgcctaagtgttgttgacaatggcactactcctgagagtatttgcattaaraaacaggctgtcagaagacaaaataccttaacaagaagcagtgaagctctaaaagtgtgataacaggcatcttggtccttcctacatgggggaatcctagtttgtcttatggacacatttttggcacctgttcctgccatgttgtcttagttacactcttgctgtggtggattacagtaactggaagtatgataagggccctttaaaaacctgaaagcacagttgggaaccagtgagaaactgatgttcttccccattcccatctcaattaaattttttaataagcattga

SEQ ID NO: 630142 - DNA, 610 bp, Homo sapiens
ttcatgtcatgtttttgggcaatgatgttttttttttttactgtgacccagaaagcacaagcaacaaaagcaaacacagacaaatgggatcacaccaaactcaaaagctcttgcacaggaaaagaaacaattactagagtaaggagacaacctatggaatggaagtaaatatttgcaaaacatacatctgataaagacttaatattctaaacatatttgraacttaactcataaaaagaaaacaataacttgatttaaaaatgggaaaaataccgcaatagacatttcttaaaaggtgtagaaacagccaacaagtatatggaaaaaaatgatcaccagtagtcatcagggaaatacatatgaaaaccacagtgaaattcatctaatacctgtaaaatggctttggtcttatgtgacaaatgataagaagtattggcaaagatatggagaaaagagaatccttgtacactgttggtgggaatgtaaattaatacatcattatgggaaacagtttggaagttcctcaaaaattagaactactatatgatccagtaatttcactactggttataaatccaaataatttgaaatcagtatgtagaagagagat

SEQ ID NO: 630143 - DNA, 610 bp, Homo sapiens
ttcatgtcatgtttttgggcaatgatgttttttttttttactgtgacccagaaagcacaagcaacaaaagcaaacacagacaaatgggatcacaccaaactcaaaagctcttgcacaggaaaagaaacaattactagagtaaggagacaacctatggaatggaagtaaatatttgcaaaacatacatctgataaagacttaatattctaaacatatttgaaacttaactcataaaaagaaaacaataacttgatttaaaaatgggaaaaatacckcaatagacatttcttaaaaggtgtagaaacagccaacaagtatatggaaaaaaatgatcaccagtagtcatcagggaaatacatatgaaaaccacagtgaaattcatctaatacctgtaaaatggctttggtcttatgtgacaaatgataagaagtattggcaaagatatggagaaaagagaatccttgtacactgttggtgggaatgtaaattaatacatcattatgggaaacagtttggaagttcctcaaaaattagaactactatatgatccagtaatttcactactggttataaatccaaataatttgaaatcagtatgtagaagagagat

SEQ ID NO: 630144 - DNA, 425 bp, Homo sapiens
atctggtcctgggtattttttgctcaggaggctattaattactgtctcaatttcagaacctgttatyggtgttctcagggatttgatttcttcctggcttagtcttgggagggtgtatgtgtccaggaatttatccatttcttctagattttccagtttatttgtgtagtggtgtttacagtattctcttatggtaatttgtatttctgtgggatcagtggtgatattgcctttatcatttttattgtgtctatttgattctgctctcttttctttattagtctggctagtggtctgttttgttaatcttttctaaaaaacaccttctggattcattgatgttttgaaaggttttacgtgtctctatttcctttggttcttctctgatttcagttttttcttattttctgctggcttttgaattc

SEQ ID NO: 630145 - DNA, 498 bp, Homo sapiens
ctttcaggtacaccatcatatgtaggtttggtcttttcacatagtgccatatttcttggaggctttgttcaytccttttcattgttttctctaatcttgtcttcatgctttatttcattaagttgatcttcagtctctgatatctttcttccacttgattgattcagctattgatacttgtgaatgcttcacgaatttctcgtgctctgcttttcagctccatcaggtcatttgtgttcttctctaaactgattattgcagttagcaatccctgtaaccttttttcaaggctcttagctgccttgcattagattaaaacatgctccgttagcttggaggagtttgttattacccaccttctgaagcctacttctgtcaattcatcaaactcattctctgtccagttttgttcccttgctggagaggagttatgatcctttggaggagaagagtcatctggtttttggaattttcagcctttttgggttggttttttct

SEQ ID NO: 630146 - DNA, 498 bp, Homo sapiens
ctttcaggtacaccatcatatgtaggtttggtcttttcacatagtgccatatttcttggaggctttgttcactccttttcattgttttctctaatcttgtcttcatgctttatttcattaagttgatcttcartctctgatatctttcttccacttgattgattcagctattgatacttgtgaatgcttcacgaatttctcgtgctctgcttttcagctccatcaggtcatttgtgttcttctctaaactgattattgcagttagcaatccctgtaaccttttttcaaggctcttagctgccttgcattagattaaaacatgctccgttagcttggaggagtttgttattacccaccttctgaagcctacttctgtcaattcatcaaactcattctctgtccagttttgttcccttgctggagaggagttatgatcctttggaggagaagagtcatctggtttttggaattttcagcctttttgggttggttttttct

SEQ ID NO: 630147 - DNA, 498 bp, Homo sapiens
ctttcaggtacaccatcatatgtaggtttggtcttttcacatagtgccatatttcttggaggctttgttcactccttttcattgttttctctaatcttgtcttcatgctttatttcattaagttgatcttcagtctctgatatctttcttccacttgattgattcagctattgatacttgtgaatgcttcacgaatttctcgtgctctgcttttcagctccatcaggtcatttgtgttcttctctaaactgattattgcagttagcaatccctgtaaccttttttcaaggctcttagctgccttgcattagattaaaacatgctccrttagcttggaggagtttgttattacccaccttctgaagcctacttctgtcaattcatcaaactcattctctgtccagttttgttcccttgctggagaggagttatgatcctttggaggagaagagtcatctggtttttggaattttcagcctttttgggttggttttttct

SEQ ID NO: 630148 - DNA, 308 bp, Homo sapiens
ctatccatcggacacaagagaaatgttagactggagtaattttatcctagtcaggagcctagcgaaagatcctttatttaatggtttttatacattttgctgttagaaagtaaactcctagtgcttttattgtctctacctgttgcttataaatgtgttaatagattttagtcttgtgttctttgatcagggaccatcttttatactttatgggtatctccaactatgyaatacattgctttgaagttgaaaacatactataatactttgttaattaaagtaaatgaccagagatgttgcagaaagtc

SEQ ID NO: 630149 - DNA, 634 bp, Homo sapiens
ttcatgggtcaacgcccaattacaagaaaatctatagaatattttaaacgaataattaaaatacaatatatcaaaatttttctgagtagctaaagcacaggtaagtagaaaacataacttcaaatgcatatatcaggaaaaaagaaagatctaaagttcataatttaaggcctatcctaagaaactagaaaaagaataacaaagtaagtagaagaaagattttataaagaaaacccagaaatcattgatattgaaaagaacagatggtagaagaaagtaagtaaaaatctgttttttaaaaaaatgaaaattggcaaacctatggctagaatatcatgagtaaaagagaatacaaatcaacagtatcagtaatgaatgcttaatgtgtaggatttgttacaatagactctatacattaaaagaacaaagaatattataaacaactttggactaacaaatttgatcctttacatgaaacagatttcttaagacataacttataaaaatttatacaaaatgaaaraaaaagctgaatagtcttatgtaaattaaataaactgaatctgttaccaaaattctccctctctttcaaaacaaaacaaaataactcctctaggccttgggtttcactgtg

SEQ ID NO: 630150 - DNA, 596 bp, Homo sapiens
tacaaatcaacagtatcagtaatgaatgcttaatgtgtaggatttgttacaatagactctatacattaaaagaacaaagaatattataaacaactttggactaacaaatttgatcctttacatgaaacagatttcttaagacataacttataaaaatttatacaaaatgaaagaaaaagctgaatagtcttatgtaaattaaataaactgaatctgttaccaaaattctccctctctttcaaaacaaaacaaaataactcctctaggccttgggtttcactgtggggttggcattsacttctatgaatatgcttcccttggggacatcactgcatgctccctgtgtggagtgagtaggggtgagatggtgggaaggtacacaggagactgcagcagaacaagactcatgcacaggatgctttggtttcatgaccaaagacattcttctttcttgttatgacgatcaatttaacgtcagcagccacaaatcaagcgggagaaaggaagaatcaaaggacagaaagacgggacatgtcctttcaccgaccctcaataaataatgtcagtgtcctgggccaaacatgtctatagacctt

SEQ ID NO: 630151 - DNA, 626 bp, Homo sapiens
tttcagagcctttagactacttaaaggcagtatttagaatggcatttcatgcctaaacgagtgggaatgttgaaagataaactgttttcattgctgtttgtttggtctgaatcatctgggaaacatgctaattctactttttccccagctattacccctgtatgcacacaagttgaacctaacggcattaaaagaaaaggtaagaaaaacagatagtatatagctggggagggagggtagtttccacttactgaattttaaaaactcatatgaggttgaagttgttgtatctctttgatcctaagattaaaccctgccatgtgtagctttgcagagagcctgggtctttctgggaactctgctacctggaagtggttggctgagctctgaaattcactgaagtacccttgtaggggagaagaggttttcctagacacttttagggtctctagctgggtctgaaaatcaaactaacaaaaacagattaacaggagaaaaacatacaaatttatttaataagtcttagatgagacaggaarcttcataaggaaatgaagacctaaagaaacagttaaactatattttttatgctaagtttgatgaaaaagtgcacagtcatgagatta

SEQ ID NO: 630152 - DNA, 548 bp, Homo sapiens
agtttttgatattaccttaagcattagctcaataacattttatttttaaaatttttgttgttggctatagtagtacagtacagttgattttttgcatattgaccttctattcaacaaccttgctaaaatttacagattagttctaataatttgtggattcttttagatgttctatatctacaatcctgttatttgtgaattataacagattttactttttcctccccattctttacatttattttctatattgctttagccaaggtcttcaatacactgttgaatagtgatatcaggaatctttgtctttatccagccaagtgatgaagttaagaattgaacttaggaagtttgtctccaaactctacgtttaattattactctataatttcctctaatatttcaatatagatctctggggatagaattcgaaactgtcgtgaaaacatgctgctaagatctctagctgcaggtagcagaattgagtgatgatcttagctgatgcccttctgatcaactacsacattcatgccaatgactgaacaaag

SEQ ID NO: 630153 - DNA, 567 bp, Homo sapiens
ttctttctcccccaataaatttttgtatatctagttctgtcttggcttctcctcagcaaatccaaactaacacagctttgaragagtaacaaatattaattctcacctaataaaaatgttagaatgaagggattatgaagacaggagactttagaaagcttctaggactttggagttggtgggagcctagtttgagtctatgtctcttcttgataggtggtttctttagggctcatgcacatctttgactttccattgtctttaagtttgaaaattttttcttagaagtcactctggattatgaaattctagtgaggcctgtatgagactactcttcaaacaagactttggtgaaagagagaaggaaacggtgttcttcaatgctatttagacctgctcacctggtagcagatgagcagtgataccgggcacaattttctcctttgccattcagctgaagtgttcttatagtatctctcaggaaattaaacacataatatagtttcagtagagaatcccaaaacagcaaatgggcattagaagaaatcttaaatcaactgtgaaatc

SEQ ID NO: 630154 - DNA, 567 bp, Homo sapiens
ttctttctcccccaataaatttttgtatatctagttctgtcttggcttctcctcagcaaatccaaactaacacagctttgaaagagtaacaaatattaattctcacctaataaaaatgttagaatgaagggattatgaagacaggagactttagaaagcttctaggactttggagttggtgggagcctagtttgagtctatgtctcttcttgataggtggtttctttagggctcatgcacatctttgactttccattgtctttaagtttgaaaattttttcttagaagtcaytctggattatgaaattctagtgaggcctgtatgagactactcttcaaacaagactttggtgaaagagagaaggaaacggtgttcttcaatgctatttagacctgctcacctggtagcagatgagcagtgataccgggcacaattttctcctttgccattcagctgaagtgttcttatagtatctctcaggaaattaaacacataatatagtttcagtagagaatcccaaaacagcaaatgggcattagaagaaatcttaaatcaactgtgaaatc

SEQ ID NO: 630155 - DNA, 497 bp, Homo sapiens
tcatttaagcctactttactatctggttttctacaatagccatcaaatcaatccctccttgtgttacataattgccagattccccacttgccttatcttcttgtagagtgcatgactaatttatattataatagcttcataccatggtgtcttctctgttttargcactaagcgtgcctgacttatccttgtaacatgaagcaaataagtattaatattcctattttgtatgtagggaaactgagccttgagccagagagaatttaaattatctacagtcttacaactgaaaatgttggtggggctaggatcagaactcattttgcctaactgtaaaatctatgctttgaccatttactgcttttttaaaaaactgctcttttatcttggatgcctaatatgtgctaaacatatatatatatatatatacacacatatatatacacacacacctatcatctatctatctatctatctatctatctatctatctatct

SEQ ID NO: 630156 - DNA, 497 bp, Homo sapiens
tcatttaagcctactttactatctggttttctacaatagccatcaaatcaatccctccttgtgttacataattgccagattccccacttgccttatcttcttgtagagtgcatgactaatttatattataatagcttcataccatggtgtcttctctgttttaggcactaagcgtgcctgacttatccttgtaacatgawgcaaataagtattaatattcctattttgtatgtagggaaactgagccttgagccagagagaatttaaattatctacagtcttacaactgaaaatgttggtggggctaggatcagaactcattttgcctaactgtaaaatctatgctttgaccatttactgcttttttaaaaaactgctcttttatcttggatgcctaatatgtgctaaacatatatatatatatatatacacacatatatatacacacacacctatcatctatctatctatctatctatctatctatctatctatct

SEQ ID NO: 630157 - DNA, 584 bp, Homo sapiens
tattataatagcttcataccatggtgtcttctctgttttaggcactaagcgtgcctgacttatccttgtaacatgaagcaaataagtattaatattcctattttgtatgtagggaaactgagccttgagccagagagaatttaaattatctacagtcttacaactgaaaatgttggtggggctaggatcagaactcattttgcctaactgtaaaatctatgctttgaccatttactgcttttttaaaaaactgctcttttatcttggatgcctaatatgtgctaaacatatatatatatatatatacacacatatatatacacacacacctatcatctatctatctatctatctatctatctatctatctatctatctatctacctatcatctatctatcatctatcaatctatcatctatctatctatcatctrtctatctatcatctatctatcgagagagaattaaatgaactcagtattttacttgtgaacaccctggttatgcagctcagaaaacagcagagggcagtgcaagagcttcacaacattaaatgaaagtagacaataaaatgctataaaac

SEQ ID NO: 630158 - DNA, 582 bp, Homo sapiens
tgggctttcttctggagattttacattcttttcattctacattatctmatctggggtaaaactaccagttcttgttttagtaactttcatgaacaacgttaatcattgcttattcaggtacttaaagtgcattaattattgtgagaccttgagcgagtggctgttttaaccataaacaacaatagtaatggtatctcctcacattgtaaagaaataaatgcaataatatctataaagtacctaatgctcaaaatattagtaattatatttcaaatattattatagatctcctataatatgctgtactttatcaaagcactcatcttcatttaatggttcatttgtcctcctgtctagactgtaagctctaagagactgagaatagtggtacatagtaataagttcagatataaaatgaatgaatgaatgaatatctgattcttagatatttattgagggatttccatagattattttgcttcctatccgtattttctatacttgttgactattactagaaatagtatttttattttaaacctaatgttgaaagtgtaacattgagacaatgccatgtgttca

SEQ ID NO: 630159 - DNA, 582 bp, Homo sapiens
tgggctttcttctggagattttacattcttttcattctacattatctcatctggggtaaaactaccagttcttgttttagtaactttcatgaacaacgttaatcattgcttattcaggtacttaaagtgcattaattattgtgagaccttgagcgagtggctgttttaaccataaacaacaatagtaatggtatctcctcacattgtaaagaaataaatgcaataatatctataaagtacctaatgctcaaaatattagtaattatatttcaaatattattatagatctcctataatatgctgtactttatcaaagcactcatcttcatttartggttcatttgtcctcctgtctagactgtaagctctaagagactgagaatagtggtacatagtaataagttcagatataaaatgaatgaatgaatgaatatctgattcttagatatttattgagggatttccatagattattttgcttcctatccgtattttctatacttgttgactattactagaaatagtatttttattttaaacctaatgttgaaagtgtaacattgagacaatgccatgtgttca

SEQ ID NO: 630160 - DNA, 584 bp, Homo sapiens
gcacatgccacgcagagcaaatttgatttgcatcatcaactctagatcactcgatatttctccaaataaacctccatccatcaccactacagcaagccaactgttgcyttggaaattttctgttaaaccaaggaattggctcacagaatccttgataagggaaatagcagaaggaggtgaatatggacataggcttgagaattataggacttcagttcaaacctcacgtttgaaatttcctagctaggtcaccttaccaaattcattttgctgagccacagtttctttatctgcaaaatgcagataagaatctctacataatgatgttgttgagaaaatgaagtaatgcatgaaaaggattataaatggcagcccgttgtgtatttggataatacacaaatcatctgcaaaagatgggacctgtgaatatgttgccttacatggcaaagggaactttgcagaagtgattcaagttaaggaccttgagatgggaaatagttgcctggattttctaggtgtgcccaacttaatcacttgtattcttaacaacagagaccctttccaggttatgaagagaggtgtgc

SEQ ID NO: 630161 - DNA, 611 bp, Homo sapiens
aaacctcacgtttgaaatttcctagctaggtcaccttaccaaattcattttgctgagccacagtttctttatctgcaaaatgcagataagaatctctacataatgatgttgttgagaaaatgaagtaatgcatgaaaaggattataaatggcagcccgttgtgtatttggataatacacaaatcatctgcaaaagatgggacctgtgaatatgttgccttacatggcaaagggaactttgcakaagtgattcaagttaaggaccttgagatgggaaatagttgcctggattttctaggtgtgcccaacttaatcacttgtattcttaacaacagagaccctttccaggttatgaagagaggtgtgccagtggaagacaggtcagagagatgcattgttgctggctttgaagctattagaaggtgtcatgacctaagaaatgtagatggcttacagacgctgagaaagtcaagagaactgtttctttcttagatcttccagaaaagaactcttcattttaaagaactgacaccttaatttcagaccagtgaaactcattttagacttctaatattccaagctgtaggataataattttatgttgttttaagc

SEQ ID NO: 630162 - DNA, 609 bp, Homo sapiens
atcaccttcattatttcctttaaggcaaccaaaagccgagcaggcttgagactatcatcctcttacatgaaaatgagtctctgagaggctaagtaacttttccaattattgcagtgagtggtttatttgaaactaaaactcagttatgttttactccaaagtctgcctgacctcactgtgctgtagcaagaaaaggctagacgtctttagcaacttactgctgccctgagcatccttgccctcttcttccttcagtggccaaaacaggaatttgttacttaattttccagaaactgactaatacttagcatatgctccgcagagtgctggatctctggtgtgawgtgcagaaaatatttgaaaagcaatacaatatgatattccacaccaagatggtaaagtctgagcaccctgggttaaaaccctctctttctagtagtatgaattagggcaaattatttaatgtctttaagcctcatttccttatctataagatgagaaaagtaatagctacttgacaaaattgttgtttgaaataaaagatatatgtcataacataaaatttggaagatgataggatctcaaaaacatgatgttattcatgtcatg

SEQ ID NO: 630163 - DNA, 427 bp, Homo sapiens
atacatgtacaagcatcatttatgtactaatctgtacctttccttcttcttcagctgctcttctggtaaacgttcaagaacaaggggrttagaagggacctccctgcctgctccttccacactgctggaaacatgcaagaaaccaggtttagcgctgctcttaggggatgaggagcaataagctgtggtttacatcaaggattattttatctttcttgtaatatattagagccaatttctcacacacgtagcccaatggattggttgtctaaaaggtgaaatgaagtactgcactgttgaactccaaagggacaatggaggcataggctacttccaaggagacaccactagcaattggtgctgtctgcaagtggttcattgtgatgcttagacaaaacatttaatactgcttcaaggaaaagatttt

SEQ ID NO: 630164 - DNA, 548 bp, Homo sapiens
tggttcattgtgatgcttagacaaaacatttaatactgcttcaaggaaaagatttttccctaattagtgctcatgtgactctaaagggaaaaacacacagaacagaacactcactaataactttgttttcctcttatcagcaatagtttttaaagtttgaaaatatgagtgtgaaaaaagtatgaccttatgtttttctccaaatggaagaactccttgattattaggccaggaaactgctgatgtgcctgcccaggaagtacagacaaaggaaagaaggtgggagcagagggccccttacttcccacccttctccacctccctctgactgattctacagcagagtttgctggggccaaacaagaatgcttgcaatgagcacacatgacctcccaaatccaaaccamatgtgctgttcttccctgtgcccaggatggggcctagtttatttcttctcatctttcaagaatctgctcaagatcacctcattgaaaaagcctttcctaacttgttggctggactactttttcctgtgtgtatgcagtaat

SEQ ID NO: 630165 - DNA, 539 bp, Homo sapiens
atctctcccataactgacttcaaacaggccggtctctagccataatcgaaacttcctgccactccctgaatcatagaggttctcttcatcctctgtgtttttgcataagtttctcttgtactaattctttcccacttcaacttggaaatctctaacttatttttcaagaaaaatttgattcatttatgaattcattcacttactgagtagtcattatgtgctagatattgcactagtrtatccatttcaggaggactagcctagtgcaaactgaaaacatgggaacccttgttaaaaaaaatattcgtaagaatgtcaagatagcaacagcagagcattaaaccaagagtaagacccttctaagtataaggccatgtgtacctgcataggtcacactctcatgaaaccagctctgacccaccctctctcatctagattaggttggttcacaatacattccatgagaaagagcaaaacccctcaacttttactatccttaaagaaaaataattacacaggaatgcgaagagtattagtaa

SEQ ID NO: 630166 - DNA, 610 bp, Homo sapiens
aatatttgggaggcagaagtaaatctgtggccattgccttggaaggtatttgaaatcagttatgatgatggttgaatacagacataactgggtggagccaacctgttcttgctcttctctggtttgcatccagctcagctttctgaatgctggttgtccagatgaacagaaatccaggcccactaccacatgcttggcagcagaccagaagatattttagctctgtagctaattgggataatacctctcagggtaaattttagagttcagtgggcaccatagtagccaaacagtgatccaaattgttatttcatytttaaagactaacattttgtctccacgaggcagttttaatctcagtgtttagatcttgggggacattagatacaagacagaaaaattaaaatgccataaagaaggaaagaatccattgtaatgggagagtcttctaggcaaaacttaatctaaaagtcatttaacctttagctaaaaaccaaatctactttaggatagtcacaacaactattcataggcttttctggaaattgtaagtagaagacattggtggagcttcctgacattcaagaattggactttatgattatctcaa

SEQ ID NO: 630167 - DNA, 481 bp, Homo sapiens
gactatgaacacttaatatttaactagtgcttaccctgtatcagatactattctgtgtgttttaaatgtatcaattaattgaattaccatggactcttaacaggtaagtgaaatttttacgtttataccacagatgaagaaactaagatccagagagttaaatcacttrcctcaactcagtgagctagtaaacggcagagataagatccaaacccaagtcacctggccctaatctgagtgacactatgtattgtctcacactttatgaaacagaatacttaagagttatgaacaaagatgctgaaacccttcacagttgatatgtcaagattgatacatggaaatgatcagtatcacatagaatatcttgaaatgtggaacattatgttctatagcttggatatgagtgtccctgaaaatctcatgttggagtttgatccccagtgctggagttgaagcctaatgggaggtgtttgggtca

SEQ ID NO: 630168 - DNA, 481 bp, Homo sapiens
gactatgaacacttaatatttaactagtgcttaccctgtatcagatactattctgtgtgttttaaatgtatcaattaattgaattaccatggactcttaacaggtaagtgaaatttttacgtttataccacagatgaagaaactaagatccagagagttaaatcacttacctcaactcagtgagctagtaaacggcagagataagatccaaacccaagtcacctggccctaatctgagtgacactatgtattgtctcacactttatgaaacagaatacttaagagttatgaacaaagatgctgaaacccttcacagttgatatgtcaagaytgatacatggaaatgatcagtatcacatagaatatcttgaaatgtggaacattatgttctatagcttggatatgagtgtccctgaaaatctcatgttggagtttgatccccagtgctggagttgaagcctaatgggaggtgtttgggtca

SEQ ID NO: 630169 - DNA, 481 bp, Homo sapiens
gactatgaacacttaatatttaactagtgcttaccctgtatcagatactattctgtgtgttttaaatgtatcaattaattgaattaccatggactcttaacaggtaagtgaaatttttacgtttataccacagatgaagaaactaagatccagagagttaaatcacttacctcaactcagtgagctagtaaacggcagagataagatccaaacccaagtcacctggccctaatctgagtgacactatgtattgtctcacactttatgaaacagaatacttaagagttatgaacaaagatgctgaaacccttcacagttgatatgtcaagattgatacatggaaatgatcagtmtcacatagaatatcttgaaatgtggaacattatgttctatagcttggatatgagtgtccctgaaaatctcatgttggagtttgatccccagtgctggagttgaagcctaatgggaggtgtttgggtca

SEQ ID NO: 630170 - DNA, 578 bp, Homo sapiens
tctcatgttggagtttgatccccagtgctggagttgaagcctaatgggaggtgtttgggtcatgggggcaaatccttcatgaatgacttgattccatctttgaggtagtgagtgagttctcattctattggttcccacaagagctgttgttaaaatgagcctggcacctctttcctctttctcttgcttcctctctcaccatgtgatctgtgcacgtcagctcctgttcaccttccagcatgagtggaagcagcctgaagccctcaacagaagcagatgttagtgctatgcttcttgtcaagcctgaaaaaccatgagccaataaacttcttttctttatgaattacccagcttcaagtattcttttacagcaacacaaatggactaagacattatgtgacaaagaatgtggcaacagaaatgaaaatgaaaggtgatccagatcagggctaaaatgataaggagtgagggagagagagagagagagagagagagagaragagagagagagagagaatgagaataaacaaaaaagggataatttaatttggaggatagacacacaactaggccatata

SEQ ID NO: 630171 - DNA, 578 bp, Homo sapiens
tctcatgttggagtttgatccccagtgctggagttgaagcctaatgggaggtgtttgggtcatgggggcaaatccttcatgaatgacttgattccatctttgaggtagtgagtgagttctcattctattggttcccacaagagctgttgttaaaatgagcctggcacctctttcctctttctcttgcttcctctctcaccatgtgatctgtgcacgtcagctcctgttcaccttccagcatgagtggaagcagcctgaagccctcaacagaagcagatgttagtgctatgcttcttgtcaagcctgaaaaaccatgagccaataaacttcttttctttatgaattacccagcttcaagtattcttttacagcaacacaaatggactaagacattatgtgacaaagaatgtggcaacagaaatgaaaatgaaaggtgatccagatcagggctaaaatgataaggagtgagggagagagagagagagagagagagagagagrgagagagagagagagaatgagaataaacaaaaaagggataatttaatttggaggatagacacacaactaggccatata

SEQ ID NO: 630172 - DNA, 585 bp, Homo sapiens
tcttattctggtatcagaatctagggagcaaaaccataaaacaaaccattttaaatgtcactatcatcatcacttatatttttgtggcaaactgtcctttactgctgtctgctgaatgatcatctgctctctcatcaaccaaatcacaaggtcagctactacttttcagatgacttattatactccaggcactgggataagcgtttaacatctatctcatttaatcttcctaacactcatgtggtgagtattattatcctaaacttaaatattagaaaactgagattcagagaaattaaatgagcactcatagtttcttggtcagtattccttgagagcctgaataagaacccggctcactcaccccaaattactgctctgmttactctactatagtgcatctgtatcctgtaaacaggtctgcattaacacaagtatcaaatcattttggaaaatgcaataattttatagttattggataaatcacagcagcaggtggagtgctattgttgaaaaagtatattttaggtctgtagtcctcgtttttactatattcaagtatttgtgaagttttgaactgaaaaa

SEQ ID NO: 630173 - DNA, 595 bp, Homo sapiens
catttttgttgcctaacattctgtgaattttttccatgacttctgcgtagcaatggtttacctattttcattacattccaytgaatgaacataccccatattaaccattctattactgatactgattattgtttccaccgttgactattacaaataatgctacctgtattttagtgaatatatgtacatatttttgttggatatatatacatcaaagaacagaactccagagtcataggctcagctttataatatagtggttaatactttaccaaattggttgtatgaatttacatttctaccaacagtatctgagagttctatttacctgctgtcttcactgacacttgtttgtcattcatttttgccattctggtgtgcatttagtagtaagccattgaatacattatcatatgcatattggccattgaaatacccttttccgtttcccatgaagagactattcagctttttgtccatttttaaattggattttttcctatagactatatttttagagcaattttaggtacacaacaattgagtggaaagtatgaatagttcccatatgctttctcgtctcacatacgcacag

SEQ ID NO: 630174 - DNA, 595 bp, Homo sapiens
catttttgttgcctaacattctgtgaattttttccatgacttctgcgtagcaatggtttacctattttcattacattccactgaatgaacataccccatattaaccattctattactgatactgattattgtttccaccgttgactattacaaataatgctacctgtattttagtgaatatatgtacatatttttgttggatatatatacatcaaagaacagaactccagagtcataggctcagctttataatatagtggttaatactttaccaaattggttgtatgaatttacatttctaccaacagtatctgagagttctatttacctgctgtcttcactgacacttgtttgtcattcatttttgccattctggtgtgcatttagtagtaagccattgaatacattatcatatgcatattggccattgaaatacccttttccktttcccatgaagagactattcagctttttgtccatttttaaattggattttttcctatagactatatttttagagcaattttaggtacacaacaattgagtggaaagtatgaatagttcccatatgctttctcgtctcacatacgcacag

SEQ ID NO: 630175 - DNA, 509 bp, Homo sapiens
tccagttgtcctggcaccatttatggaaaaaaatatcctttttccattgaattgtttttgcttctttgtcaaagatcagttgactcaatttgtattatatttctttcttaactctctgttataaatttggtttaaaattgaatatgtttacttttctttcttattgatttgccagtgtataggggtgtgtgtgtgtgtgtatatatgtgtgtgtgtatatatatrtatatgtgtgtgtgtgtgtgtatatatatatatatatatatatatatactctgcataatagttctttgtcaggtctacatatgacagatatctcaatctgtggtttccctttttattttctttgtgttactttttgatgaacagaagttacaaatataattaagtccaattcgacaatattctttatgtgaatgcttcttggtcctgttaaatgaatctttccctactccttgttcatagagaaatttttttatgtttacttctattttttcaccatttgcatt

SEQ ID NO: 630176 - DNA, 519 bp, Homo sapiens
gtggacataatgaggaaagccatcaactagtatttttgaaatgttaactattctctctgggtcgatgattcctcaactacaaaactgtgatgcaaatgctaccttcacagtgttcccataagaattaaatgagccagcatctgtgcagtgccttgctcagagcaggtgcttaattaatggtagtgatgattagtaatgctatcattaaatgcatccaaagcaccgacttcttctttcctaaaacaacctcagaattattkgtttacatgaggaataatatcaccatcttttaaaaaatgtatctgcattagattgtcaaaaagctgccacacacacacacatgcacacacacacacacacacacacacacagaattaattgactcttacattggagcaagatacaaataccttctattctctagtactaattatgtttgtttgtgtgtccctactaatgaatcaagtttatgcttaaggacaaaataaataaataaattatttccaatttaagactaag

SEQ ID NO: 630177 - DNA, 519 bp, Homo sapiens
gtggacataatgaggaaagccatcaactagtatttttgaaatgttaactattctctctgggtcgatgattcctcaactacaaaactgtgatgcaaatgctaccttcacagtgttcccataagaattaaatgagccagcatctgtgcagtgccttgctcagagcaggtgcttaattaatggtagtgatgattagtaatgctatcattaaatgcatccaaagcaccgacttcttctttcctaaaacaacctcagaattatttgtttacatgaggaataatatcaccatcttttaaaaaatgtatctgcattagattgtcaaaaagctgccacacacacacacatgcacacacacacacacacacacacacacagaattaattgactcttacattggagcaagatacaaataccttctattctcyagtactaattatgtttgtttgtgtgtccctactaatgaatcaagtttatgcttaaggacaaaataaataaataaattatttccaatttaagactaag

SEQ ID NO: 630178 - DNA, 521 bp, Homo sapiens
tcacaaatatgtgaaaattgaacaatgtgttcctaaacaaccaattggtcaatgaataaatcaaaagagaattttttttaatcttgagcagaaaatggaaacacaacatttaaaacttatgggatgcataaaaataasagtcctaagagagaagattataataataaattcctacatcaaaaaagaagaaagatcccaaataagctaacattaaaccttagagaaacagaaaaagaagaataaactgagctgaaaattagcagaaggaagaaaataataaagatcagagcagaaataaataaaatacagattataaaaacaatagaaaagatcaacaaaactaaggattgtttccttgaaaagacaagcaaaattgacaaacccacagctagactatgggagaagtctcaaataaagggagaagactcaaataaataaaaagagaaatgaaagaaatgacataacaacccatgccacagaaatacatttgtcagacttacttagggtaggtgaattttatt

SEQ ID NO: 630179 - DNA, 487 bp, Homo sapiens
tagcagaaggaagaaaataataaagatcagagcagaaataaataaaatacagattataaaaacaatagaaaagatcaacaaaactaaggattgtttccttgaaaagacaagcaaaattgacaaacccacagctagactatgggagaagtctcaaataaagggagaagacycaaataaataaaaagagaaatgaaagaaatgacataacaacccatgccacagaaatacatttgtcagacttacttagggtaggtgaattttattaaagtatcataagagactactaaaacaattatatgccaacaaatttaagttaaatgaaatgaataaattcctagacatataaaatccaccatgactgaatcatgaagaaacagaaaatctgaacagaccaataatggttaagagcatagtaaatcaataataaaaattctcccatcacagaaaaatctcaggaccagatggcttcaatgctgaattctaccaa

SEQ ID NO: 630180 - DNA, 415 bp, Homo sapiens
gattttatttcttcattccatgtaaacaaaactgttacaattgtcatgatttttctcagtgttatcatttttagcttaaactttccrcctttgaatttgaattcaaaaaaagtcgtttgtctctcaatatctcagccttgtgaaaacctctgctttcaaggttgttgcttcttcaatgaattttaaaagcctgttttggaacttaatgccaacattttgactctgtgttctaagcaatatatgccctccctcagagggcactgaaaagctacttttcactttctgcctaaatggtgttaaaagggtagtacaaagaagcattggtgtatctggagtgtgaaagagcctgcttggtaacattttaaaaatcttcctttttatttaataatatccttttcttttgttcttacttcca

SEQ ID NO: 630181 - DNA, 626 bp, Homo sapiens
ttgtaaatgggagaaatttaatctcttacagttctagaggctaagcaatccaagatcagggcaccagcagattcagtgtctggtgagggtctgtttttgcttcataggtggcaccttcttaccacatcctcatacgatgaaagagctcccygaggtctcttttataagggcattactcttattaatgagggcagagttcctgtgacctaatcatctctcaaaggctccattctctaatactgttacattgggaatatctggttcaacatatgaattttgggggcctacaaacattcagagtatagaagcatgctattatatcaatgccagaaattagggaaaaaaattcctaagcatttatatcctgtttcatttgtattcttaatttttttatttgttttcctttttgaaatattttaaaatactaccagatataactgaaaaaaatatttatgacagtggcagagtaaggtaaaatatttaaatcaagacaagtattttattgtttattaatcaatgttgcactgagcttatcaaagatttaaagagaaaacaagtgagtgaagaatgtactgctaacaatgaaatgtttttagtcctgaaatcttacaaggcatttagtcagg

SEQ ID NO: 630182 - DNA, 570 bp, Homo sapiens
tatgacagtggcagagtaaggtaaaatatttaaatcaagacaagtattttattgtttattaatcaatgttgcactgagcttatcaaagatttaaagagaaaacaagtgagtgaagaatgtactgctaacaatgaaatgtttttagtcctgaaatcttacaaggcatttagtcaggtattccatttyccctgatggctggctagatatttgagacaaatgaaattctggatctggactggtacaagactatagcctgttaggaaccaggctgcacaccaggaggtgagtggcaagtgagtgagcaccactgcctgagctccacctcctgtcagatcagtggggtattagattctcataggagcgcgaactctattgtgagctgtgtatgcaagagatctagactgcatagtccgtttgagaatctaatgcctgatgatctcaggtggaacaatttcatcccaagaccatcccccacaaaaatctgtggaaaaattgtcttccatgaaaccagtctctggtgccgaaaaggttggggactgctgatgcatagaaaatattttcttcaaaact

SEQ ID NO: 630183 - DNA, 570 bp, Homo sapiens
tatgacagtggcagagtaaggtaaaatatttaaatcaagacaagtattttattgtttattaatcaatgttgcactgagcttatcaaagatttaaagagaaaacaagtgagtgaagaatgtactgctaacaatgaaatgtttttagtcctgaaatcttacaaggcatttagtcaggtattccattttccctgatggctggctagatatttgagacaaatgaaattctggatctggactggtacaagactatagcctgttaggaaccaggctgcacaccaggaggtgagtggcaagtgagtgagcaccactgcctgagctccacctcctgtcagatcagtggggtattagattctcataggagcgcgaactctattgtgarctgtgtatgcaagagatctagactgcatagtccgtttgagaatctaatgcctgatgatctcaggtggaacaatttcatcccaagaccatcccccacaaaaatctgtggaaaaattgtcttccatgaaaccagtctctggtgccgaaaaggttggggactgctgatgcatagaaaatattttcttcaaaact

SEQ ID NO: 630184 - DNA, 624 bp, Homo sapiens
tttaaagagaaaacaagtgagtgaagaatgtactgctaacaatgaaatgtttttagtcctgaaatcttacaaggcatttagtcaggtattccattttccctgatggctggctagatatttgagacaaatgaaattctggatctggactggtacaagactatagcctgttaggaaccaggctgcacaccaggaggtgagtggcaagtgagtgagcaccactgcctgagctccacctcctgtcagatcagtggggtattagattctcataggagcgcgaactctattgtgagctgtgtatgcaagagatctagactgcatagtccrtttgagaatctaatgcctgatgatctcaggtggaacaatttcatcccaagaccatcccccacaaaaatctgtggaaaaattgtcttccatgaaaccagtctctggtgccgaaaaggttggggactgctgatgcatagaaaatattttcttcaaaactccaaaatgctaatacaaacaaagtttgagatttaaagttttccacatgacacagatgacctaatacaaggagtaacttacttacaggacatccctaagtcccagattaaagtggattattttaccagagttcgaaagtttgac

SEQ ID NO: 630185 - DNA, 588 bp, Homo sapiens
tgagtgagcaccactgcctgagctccacctcctgtcagatcagtggggtattagattctcataggagcgcgaactctattgtgagctgtgtatgcaagagatctagactgcatagtccgtttgagaatctaatgcctgatgatctcaggtggaacaatttcatcccaagaccatcccccacaaaaatctgtggaaaaattgtcttccatgaaaccagtctctggtgccgaaaaggttggggactgctgatgcatagaaaatattttcttcaaaactccaaaatgctaatacaaacaaagtttgagatttaaagttttccacatgacacagatgacctaatacaaggagtaacttacttacaggacatccctaagtcccagattaaagtggattattttaccagagttcgaaagtttgacaggcctatggctttgttctttatggctggaaaaagcatagcacagctasgctgtcttcactggatctataaatatctcaagggtaaaagtagttctgtttcagtcagggaccattcaagacataaaccatgctgactattttaacacataaaatttaatataaaaattg

SEQ ID NO: 630186 - DNA, 608 bp, Homo sapiens
gaaacaagtctgtttttcctatctatctatctccctctggcatgtcctattggcagagccagttgacagagaggaactgtgtgttgcagagtctcagctacagagtgtacatatacctccccagtctctcatcctttcatggacaaaccttaatttggtattttcacacttgcacattattggtaggaatataaagtagtacagttattacagaaaaagtatgaagattcctaaaaataagtaaatatagaactaccatatgatcgaggaatctcactattgggtatatatccaaaggaaatgaagctagaatattgaagagatatctamgctcccatgtttagtgcagtgtttttcacaatagccatgatatgaaatcaacctaagtgtccactaacagatgaaaggataaagaaaatgtgatgtatatatacaatgaaatactattccaccataaaaaagaaaatatcctgttatttgtgacaaaatggatgaacctcaaggatattatgttaggcttaggaagacaaatacctcatgatctcactcatatgtgacatgtaaaaatgttgatctcatagaagaaggaagaagaatgatggtcacca

SEQ ID NO: 630187 - DNA, 514 bp, Homo sapiens
atgttaggcttaggaagacaaatacctcatgatctcactcatatgtgacatgtaaaaatgttgatctcatagaagaaggaagaagaatgatggtcaccaggagtggacgtgatggtcattaagggagttgggaagatgttactcaaagattacaaaatttgagtttgctaggaggaataatttcaagagatctgaggtagaacacggtgtctaagagagtagattttaagtgttttcattgcatgaaataaagcatatgttaattagcttactttagcyataatacaatgtaatgtatatttcagtaaactgtatatttcaaacatcatgttttacttgataaatacatacaattttgtctataaagttaaaaagataaaaaataaaatacaaaaatacatatatcaggagggatgataaagtattctaattcctttgcattttcatgggtaaaaataaaggtatcaattaatattcgattttcataaattaaacatgcatgttaaaaagtaac

SEQ ID NO: 630188 - DNA, 514 bp, Homo sapiens
atgttaggcttaggaagacaaatacctcatgatctcactcatatgtgacatgtaaaaatgttgatctcatagaagaaggaagaagaatgatggtcaccaggagtggacgtgatggtcattaagggagttgggaagatgttactcaaagattacaaaatttgagtttgctaggaggaataatttcaagagatctgaggtagaacacggtgtctaagagagtagattttaagtgttttcattgcatgaaataaagcatatgttaattagcttactttagccataatacaatgtaatgtatatttcagtaaactgtatatttcaaacatcatgttttacttgataaatacatacaattttgtctataaagttaaaaagataaaaaataaaatacaaaaatayatatatcaggagggatgataaagtattctaattcctttgcattttcatgggtaaaaataaaggtatcaattaatattcgattttcataaattaaacatgcatgttaaaaagtaac

SEQ ID NO: 630189 - DNA, 448 bp, Homo sapiens
tgtatgtaccaataatccctattattttgtgttattcaacatgtcatatacatggtatcatgcagtaaaaaaataaggaagaatatgtaccatatattttaagttagccagtaatcaaaaagtggaggaaaactggtcctaacggtgtgactttgttgttaataattctatgagccaatggttacattctttccactgtggtaggggcaaagttctattagcatacatgtagatagcaaatagagtctaytcataaatctttctttctgaaatgtaaatagggtcatacacctacttgcttgaaattttcaacagcacaatgaatagaaggaaaaaaaaaaaaacctttttaccggtggatacagcagtgtatccgtacatgtctgcagcaacttcaattcttgcgtcctcagaagaaagaattcagctgaggggcataaggcagaag

SEQ ID NO: 630190 - DNA, 582 bp, Homo sapiens
tggatcatcaagagagtgtctctcccaggtgccctggtgccagctgccgaattatcattgttagaaaggcagtgtcataattgkggaaccacgctcatgcctatctaactacctgtaacaaattcatgaatataaaatacctacacaattggcctcttcttacctcttcaggcctgatttccatccctatttttaagaaccacgttatggtctgtacctcttttgcttgcagggccctctatttggaatatttactcctttacccactttctttgctgtagaatctttcaggggctgctgctctcagttgtacggtgaacatttatttttcctcttttctcttcataattgttccctcattgtggttgtcttaaaccttttattgtgttgctttttaaattccaggggaaagaaaaagtcaccaggattatatttattatttgaaaaattctaaaaacttcccttaaatacatattactcatattttatatattaagtacataagagttataaaaatgtaagaaatttcctggtgatcttttatggttgaaaagtgattgaaattggggagaaaatgaaatg

SEQ ID NO: 630191 - DNA, 630 bp, Homo sapiens
tgaacttgaacaaaattcttgccaagccgtagtttcctactctgtataattgagatttataatggaaatttaagagttattaggagaactaaataatatgatgtatgtaaagcagttagcaaattgactgactcagaaagagctcaatcattttattattatatgttaagacccagttaaatgtcacttcctgtcttttccaaggagagttagtatttttcttctttggatttctttgcatttttattttttaaaaaaatatataaaaagcaatgtcacagtaaaatcaccatatgcttttaagtaataaaagattataaaatagcaagtgcagcatgtgtgtgcattaactacattaatgatgaaatattttcttttggcacctttatttttcaaattttttacaataaatatgcataatcttataatctaaaataaagaaagcaatgtaatattgttctgaccatccacattaaattcattttatcaaacaaagatatgtacatagtcctatttcctgttactcctaccactgaatcctcatccctaggggatatcattttcaaaacttttcattgattctcgtattatataccttyatatttctaaataacatgactatgttatcac

SEQ ID NO: 630192 - DNA, 569 bp, Homo sapiens
ttcccacctccaatactgtgagaaaagatatttctgttgtttaagttacccagtgtgtgttattttgttatggcagccctagcaaactaacacagcatccctaatagtcaatgaggactcttttttctgaactccttcctttcttaatttgttccttcattttyactaatattctgattgttttataacaggtgcacaggagataatgcatgtctgataattcctttattttactatataatttaactgaatgactagatgtaggattcttgatggaaataattggtcttccagaaggctccattgccttctagcttccagagttgttggtgttgggaagttcgatgctattcttgattcattctctctctctctctcacacacacacacatacacacacacacactcactctctctctctctctttcaaaagtgttcttcattccaggtgttctgaaatttcacaatgatgtatgtgccttactggtggtccttcatcttttgcagtgttaggtacttgataggctcttttaatctggaaatacatgttcttgattactgggaaagtt

SEQ ID NO: 630193 - DNA, 569 bp, Homo sapiens
ttcccacctccaatactgtgagaaaagatatttctgttgtttaagttacccagtgtgtgttattttgttatggcagccctagcaaactaacacagcatccctaatagtcaatgaggactcttttttctgaactccttcctttcttaatttgttccttcattttcactaatattctgattgttttataacaggtgcacaggagataatgcatgtctgataattcctttattttactatataatttaactgaatgactagatgtaggattcttgatggaaataattggtcttccagaaggctccattgccttctagcttccagagttgttggtgttgggaagttcgatgctattcttgattcattctctctctctctctcayacacacacacatacacacacacacactcactctctctctctctctttcaaaagtgttcttcattccaggtgttctgaaatttcacaatgatgtatgtgccttactggtggtccttcatcttttgcagtgttaggtacttgataggctcttttaatctggaaatacatgttcttgattactgggaaagtt

SEQ ID NO: 630194 - DNA, 322 bp, Homo sapiens
taagctggaaaatcttctgaggctagtaagtccttctgaggtccttcaaaaaggattcattcacagttgagcattgagatgactatacctgtcaacacatggtttgaagycttgtgagagaccctgaccaagaaccatctgcaaagacattcccagattcttggcccacagaaactgtaaagtaaaaatgtatgttgcttttagacactacgtttttgggcagtttttatgtagccatcattatctaatacatgcttgtacttggattgttttaatccactctgaccattttttgctttgaactgtaatattttgttaaatt

SEQ ID NO: 630195 - DNA, 664 bp, Homo sapiens
gcagcgggaaggaagctaagatcctacagcacttcggagacgggctctgccggatgctggacgagcggctgcagcggcaccgaacatcgggcggtgagcgcctcggaaaggggtcggtgatcccccacctcccccaggtggagcctccgtactctcctgggagcccttggcttttaagctccccactcctgtcccagttgccgttcggcctagggctagtggctggcgctccctgagcctccctcaccggtctcacgtaaccatctgagtaggttgcatcccagatcctcgcagctgccggattcgtggagtgtggagttaactcttttctctcccgcaggtgaccatgccccggactcaccatctggagagaacagtccagccccgcaggggcgacttgcggaagtccaggactcttccatgccagtgaggaaggggcaaggggagtggaaggcaaagtgggagtgcgggagtatgattttctggcttgggggatttggcaagcctgagtccaaatctcaccagtgatgcctggccttgagcaaatgacttatcctcttttcgacttagtattttaacytgtgaatagaaatattggtaacagccaatgagagaattccatgatcaagctacttaaggatcccagctcagttagttacggggt

SEQ ID NO: 630196 - DNA, 566 bp, Homo sapiens
tagttcaacaaccccttccctcattttacaggatagaaatgcaaaactcgtgaaaagcagaaccttgaccaaaatgtgaacccagaattaaaagatccaccggctactgactcayttgctactcacagtacttgctctcagcctttggataaaactggtgatttagaacttcggatatggaggacccaaacacctgagccaagactcctcttcagaaagagccaagaccccacaatgctagatgggaccccaaggacaccgaacagttacaacaaacccaccagaactgcttaatacagttactacacaaacgacccctgttcccagctaggctctttcccaaccaagacaagaattgcaacccccattaaggacctgcccgacaactcccttcttccgggaatggtgctaggccccagaagtcgctgataaaaattaacatgccaaactcaagtgcccagaggcctcgaggtctttaaactcttcctactctgcgtcgtgcttcggggtgcccgagccaggagagggaggggcaatccaaggtaaatctggtcccccaaactccc

SEQ ID NO: 630197 - DNA, 480 bp, Homo sapiens
ttgtgcattcaattcaaggcttctttacatgcctttacgtgccaatgagaagaaatagatattaaaccagacttgaacccagctctcgagttgatagccaggtacatggttattctaacatccgaaaaactgagacaagttctgtggtagtatatgccttaaaaaaaaaaagaaacgagcgggggactccgggatgattttgttgtyctagaacagtgaccacagcctcacactctgcaggaaaagactgggtcgcaaacaagtcagaggcaaacccagaaagggaactgggggccctaatcctataaacggaattaagggtgtaaacggagagcgatgcctgggagtggggtaccttgcagagcataccgggggttgtagtcggggacattccacagcaccgcccccgcccggactcccggcgctccaggtggagacagcagcttgaccccgcctcccgcgagcgaccctacatgaata

SEQ ID NO: 630198 - DNA, 480 bp, Homo sapiens
ttgtgcattcaattcaaggcttctttacatgcctttacgtgccaatgagaagaaatagatattaaaccagacttgaacccagctctcgagttgatagccaggtacatggttattctaacatccgaaaaactgagacaagttctgtggtagtatatgccttaaaaaaaaaaagaaacgagcgggggactccgggatgattttgttgtcctagaacagtgaccacagcctcacactctgcaggaaaagactgggtcgcaaacaagtcagaggcaaacccagaaagggaactgggggccctaatcctataaacggaattaagggtgtaaacggagagcgatgcctgggagtggggtaccttgcagagcataycgggggttgtagtcggggacattccacagcaccgcccccgcccggactcccggcgctccaggtggagacagcagcttgaccccgcctcccgcgagcgaccctacatgaata

SEQ ID NO: 630199 - DNA, 547 bp, Homo sapiens
tacaggtgtgagccaatgtgccaggcgttggcaaattttagaatgaaaaactccagtgtctcagagcttgggactgtcgagtcccaggatctcacagcaagaaggtgcccaggaccctgacctccatygggggggcccttctacctccagcatccccaaatgccagtggctccaggcccccagagggatttccctttgcagctgccctttgagctgagaactcactcccattgaccagcaggcctcttgccttcaggatctgcagccagaccctggccagtcaggaaatcccaccaagagcttgcagggaaggaactaaaatgtcccagagcagtgtgacccggctctttccaaagccttctcagtgagatggccccaacatgggaagtgcctcctttccttcctcgtggctacttgtttgcacaggtgcatccagcacaccacaccacgtgccctggcacagggcttctaattctcattgaagctgctattggcccacagggcagcactgctgaggagacgtctctccctgatctgcgcaggcact

SEQ ID NO: 630200 - DNA, 536 bp, Homo sapiens
ggtagctctatgagaacaataagctaaactgtaggctgactagtgtaccagagagaaccaggggaaaagacagcaaagaacagccttcctggggtcaagacaaacctcaaagagtgtctttcaaaactacccctgcaaaggggcccaaatttagtggattagattaccgagcaatttacaccccaggttatagcataagacagtagagcaatttgttggcaattagtggaacctaacagttgagtgcmaatagagatgtaaaaatcctcaacaaaatactagcaagctgaatccagcaacatataaaagggattatatgccatgaccaagtggaatttatcccaaaaatgcaaggtcgttttaacatatgaaagtcatttaatgtaatccatccactatacaatattaatagaaaagaggacaaaaatcacatgatcatcttaatagaggttgaaaaagcatttgaaaaaccaacaccccaatgtcccttagcaataaaaatacgcagcaaactaggcatagtagggaaattccta

SEQ ID NO: 630201 - DNA, 489 bp, Homo sapiens
atatatgtgcgtgtataaaataatgaatgatagatacgaaaggaattaagcagacagtaaatgttctgggagttgaggtgtggaagaaatgactgagaatttggatggtcaaggaagcctccctggatgatggtttgaagcaagcatgaatccaaaagtatctgagacatgtatcaatcaatttggagagttcattttgccaaggttaaggatgcacctgttgacacatcttcaagaggtccagatgacatgtgcccaaggtagttgggtataagctygctttacaagtttgtgcaaggggtacagtttgcttttatgctttttagggagacataatacatcaatcaatacttgcaagatgtaccttggtttgatctggaaaggtgggataacttgaagctgtggtggagggtggtggcttccaggttataggtagatttaaaatttttctgattggcaatcagttaaaggagttattatctaaagacc

SEQ ID NO: 630202 - DNA, 430 bp, Homo sapiens
gttccggccttcatctttctcctgtgttggatgctctaagttcttcagcttttgcacccttggacttataccagtgatttgccagggtctcaggccttcagccccatactgaaggttacactgttagcttccctacttttgaggctttgggacttggactggcttccttcctcctcagcttacagacagtctactgtgggacttcaccttgtgatcatgtgagccaattctcctaataaactccccttcatatatacatacatcctattatttctgacctttagagaaccctaactaatacaatatccatgttagtggtggcaaatccataggggtctacagcaacctcaatgtttgcctcctcagaagaaagaattcaaccaagaggcataaggcagagtragagaccaaagcaagtcttagatccaga

SEQ ID NO: 630203 - DNA, 598 bp, Homo sapiens
agcaggctgcagagagaatacatggtaaatgtttcttatcagacttaatgtctgtgttgatgttaatgctggtcggcttttcctgaattccaaaagggaggagggtataatgaagcatgtcagaccccctgccttcccatcatggcctgaactagttttccaggttaactatggaatgcccttggttgagaggaggggtttgttcagatggctcaagggagccttagaatttaatttttggcttacgcaaaaatacgacttagataagtgaagwgggccaggagtgggcagaagagcatttgaggcaggagcaattgtgagctatgcaccacacttagtgtccctgtgagtgcatgccatcccagcccagaagggccctgaggtcagcaatcccagtatccttcctcttacccagggttttatgtccaaagctcagtgctctgaattcatctacagtaccatagccctgctgctcctcagagctctaatgcacacctgccccttgctcctatagatgtgccaggtgtctggatcctctgccttcatcccattttttctaggtctcagatgtagttcaaaatcctggatgcggtagctc

SEQ ID NO: 630204 - DNA, 354 bp, Homo sapiens
cttaaaaaaaaagaattcaactatgaaaacccagtaaataatttcttctaactttaaaaggaagagctatatagcaactttaatttttccatgcaaaccttcctttagtcagataatttctgattagcagccttcctcacattgtataaaggatcagaaagctgagccttattgcacccttttctgaccaccttcctgaatcaccttaaagcatgtcacttaccttctttggactgtgccttggtcctcttatctatacagtaaaartactaaaattataaatattgaaattgaattaataatttaactcttggattttgagactaacatcctactttttaatactgtctaaat

SEQ ID NO: 630205 - DNA, 354 bp, Homo sapiens
cttaaaaaaaaagaattcaactatgaaaacccagtaaataatttcttctaactttaaaaggaagagctatatagcaactttaatttttccatgcaaaccttcctttagtcagataatttctgattagcagccttcctcacattgtataaaggatcagaaagctgagccttattgcacccttttctgaccaccttcctgaatcaccttaaagcatgtcacttaccttctttggactgtgccttggtcctcttatctatacagtaaaagtactaaaattataartattgaaattgaattaataatttaactcttggattttgagactaacatcctactttttaatactgtctaaat

SEQ ID NO: 630206 - DNA, 555 bp, Homo sapiens
gcttagccggggcaaaatgcagttagaatggaaaagctaatggcaaggcatcccaacaacagcctcctcctcctcaagcacatggggcacttgtgtgtgtctctcagcctgagagctcctgatgactstcctggggaggttcccaaccacactgtcttggcagctggtggaggcaggtggtgattccaatttactgccatccccgagtcttcaaaatccatcctattgaaaagtgatctggtgagctccagcagcatgtgggttagggtctcctgcttggggttcaagagcttgcagtcctgttcattgaaataggctgtcatggctgctcagctctctgacatatctctcagactggcaaagatattaggtctgataccaaaagtacaatccatagaagaaaaaggatggatacattggacttcattaaaattaagaatgttttctccttgaaaaataatgttaagagaataagaagataagccacaaactcggaaaaaaagtaattgtaaattacatatctgataaagtacttgtacccaaaatatgcacaag

SEQ ID NO: 630207 - DNA, 505 bp, Homo sapiens
tagagaagtattcaagctcataaatgaagagtgaatcatagaactagaatgtcacaacttggcaatccctaatgaaataatgggtctagacaatggtcatcactgacaagcagacattactttggatcgaattaaactatggtctatgaattattctttaaaaaatccagcattaattgatcaagcctctatatctaacaaccaatttacaggaaatgtagaggtagaagaacatgttaaatggcaccatggggatacatttaacaaaatccagactgtggaaaattctacagaacaaatgatctggtttatttaacaaataaatttccaggaaaaaaagagattaactgggggattatccgattaaaggagagaatgcactgtggagattcatttggatcccaatttgaacaataaagaaaaataagacaattggggaagtttgaacattgactatatatttgaggacaaggaattattgttttagrtgtgatattgatattat

SEQ ID NO: 630208 - DNA, 570 bp, Homo sapiens
ttaaaacaattcagttatcttaattcggaaaagacaaaagggaaatgtagtagctatcttcaaatactwaagatctttcttacgttgctccacaaccaggaccagtggatagaagttacagagaggcggccgggcacggtggctcatgcctgtaatcccagcactttgggagaccgaggcgggtagattacctgagatcaagagttcgagaccagcctggccaatatggtgaaccccatctttactaaaaatacaaaaattagccgggcatggtagcacgcacctgtaatcccagctactcgggaggctgaggcaggagaattgcttgagcccgggaggcagaggttgcagtgagccaagatcgtgccctgcactccagcctggccgatagagcgagactctgtctcaaaaaaaaagaagttacagagaggccacttttagctcaaataagaaagaatttatgagttgcctcaggagataatgagctccccagccctggaagtatacaagcagatggatggccatctgccagggctgccctagagggtattccagcagtagattaggagg

SEQ ID NO: 630209 - DNA, 435 bp, Homo sapiens
atgtctgacttcagcatgtcaaaagaaaggccagctctcttgttaggggccatgactttaagttgaagccmatgattgtttaccattctgaaattcctgggacccttaagaataatgctaaatctactctgtctgtgctctataaatgaaacaacaaagcctagatgacagcatgtctgttaagacctactgctcagaaaaaaaaaaagttacttttaaaatattactgcccattgacaatgcacatggtcacttaaagacttctgatggagatgtacaaggagatcaatgttgtttgcaggcctgctaacacaatatccattctgcagctcatggaccaaggagtaattttcactttcaagtcttattatttaagaaatatatttcataaggtgattcctctgattggtctgggcaaagcaaactgaatacctt

SEQ ID NO: 630210 - DNA, 410 bp, Homo sapiens
gaaaagtgcaaagcaagaagaggtagatcgttcagaagaggccagtgggaccacccatccgattcccttggaaatagctgagtaagctttggggtttccttgtcaacatgtctgttgttgagccagcaaaggcagaagtagaggaagaggaagagggtaagaacatgccctggagtgcccttcccctgcccccacctgctttgtgaaggttcattccaaaactgacctcctctgtgaagcttccttgacatctctaggtgtggctggtggttgctctgtgcatgttccatgygtggtgtccacactcaatcacagcttctatcacattgggtcatgacccagttccttgaggatgctgtcatgccctttgtatcttctgggcctagcatgtgtaccgggcacagagtagg

SEQ ID NO: 630211 - DNA, 490 bp, Homo sapiens
catctaaataagtctcaggctgggctgaggcaggggagagagagggcagtttccttccttatccagccacctccctaggggtgtggaggggaagagatggaggctcaggaagcccagaaggaaaaccctaacatctccctgggaaccctgcagagraaggtggagggaaaggcactgccagattccctcaaaagaggagccccttccctaaacctggaagggaaggttggataaagagtgggcgcagcccttttccctcctcctcaaagccccagtccggagctccaggtgttaacgagagccattcccaggtgctgggctccagaggctgggcactgaccagaatttcaatctctccactgccgctgctcttttccctgacccagagaaagcctgcggctctgggagtcatcctcaccagcagaggatcaggccagctctgggaccatcggaggctctgagccctaacaaaggagagaaggaaaagtgg

SEQ ID NO: 630212 - DNA, 569 bp, Homo sapiens
ttaatatttagcttttcttattttccaatataagcatttaagactgcaatgttccctctaagtgcttttaaagtataatactaagaactaaacaataatcaataaccacacttcaaagcttctgtaagggggtgaaartactccatcatagttggattgttgtttagttctcagtatactttaaacctccttacaatttcttgctttacctatgcattaagaagtgtgtgttttaaatatccaaatatatagtgatttttatttgcttttgttattgacttctaacttaagtgcaccaaggtcacaaaacatggtctgtatgatgtacagatgccttgaaacgtgttgagacttgctttatgacctagtacatggtcagttattaaaagaattatatttcatatgtgcttggaaaattgtgaattccttcatggttgggaagaaagttctatatgcctataaattacacatatcaactgtgtttaaatttctttttttttttttgactgtttatcctaccaaaaatcaagatcagcactttaaaatctaccactaagtggaaggattta

SEQ ID NO: 630213 - DNA, 538 bp, Homo sapiens
ctggccagcggagatcagaggcaaatgccacggcagctcggccctgttgtcagagcgagtcactggctgggaagatggattgggcctgggcctcggagccagggccacagcggcctccttccgggacattgggagggcagtgctgagcccagggctgcactgggagagccacggaagggcccgagtgtcctagccttggaagaaagcctgggcccagactcagtgccccctcccagttttggctgcaggaggagcctcacaggctggggacacttcatagtttgccgttgagtgactgaggacttgggaagaaatcctgtttagaacttcaaacgttcattcccagagcttcaacctgacactggaggggcaaagaaggtggcattgggagattgggggagggtctccccccaggtgtggagggacctcatgcctagaagggactgggacgagctatgttcaggagtggcrgctccccaacccgttttggcagatttcattttcagtttgtaggcagtggggcctcagatgtgaaggc

SEQ ID NO: 630214 - DNA, 299 bp, Homo sapiens
ccatccattatcaggaaaacaaaaggaatagtaggataggccccaaatggcaatgcaaaaggctacctcccattgctggaagtgttaagcacagactaacactgactgaatgatgactcatagatacacttacacgaacattctttttcattatccgaactccattcagtctcgtctcccactcctgttkggaacgaactgtctccagtgttgggggagttgacctttcaagaaaccaacaggaatttacagatttaaagaaagccctgctaggaacagtgactcacgcctgtaatccc

SEQ ID NO: 630215 - DNA, 434 bp, Homo sapiens
ttcaacaccagtccaggaagctagtgccagggagcccacaactaaagcaactgtgtggcttgcactatgatttctaactaagcctgcrtcagccagtctctgctctctggtggcttggactctctccccatctgtctgtaagaaggacgccctttcttcctacctggcgcggctgttgtaagtgccaaatgagaacttggatggcattgtattctgaacaagaaaaagtaaaatttggggagcactttctctgtgctaggcaattaattggtggtgcctgggggctgatccacaaagagacaagaagacatgttttctgcccacatagagttacagtggaagtgaaagggcggaagtgacgagtacaaggtcatccatgcagatatactcaaagcgaggtcggcaaaccctcattggagtcagctaaaaatgta

SEQ ID NO: 630216 - DNA, 346 bp, Homo sapiens
atagaatagaatacatggggtcaaactcattaaaaaatgcaaacattttccagccctttcctacgtggactgtatgttcatttaaccatatgtttatatgttatatatgagaaatgttatatcagtatgtgtacatggatatctaaatatgtatacatacagatacacaattacccaaacttatatctcatagtagctaatatgatacattgttatgtacagtgttgaactaaattagctatatagtcatcccacagtatatgctggagattggktccaggacccctactgaggataccaaaatctataaatgctcaagtcccttacataaaatggtgtagtattt

SEQ ID NO: 630217 - DNA, 556 bp, Homo sapiens
tctgaggcatgttggagcataaatatttctactaggatatgagccctttaaactatagtggtttattcttttyactaggatggatttttaaccttccagtggaatgtataaaggctaagtcacttttcctaagcaaagttttaagatgatttttagaacaggtttaggtttacagcaaaattgagagaaaggcacagagatatcccatatactcctgcccccatatacacacagtctccctactatgctgtagccatatttacagcaacttttccggaaatgtaggattagaagttaggctttctgtattttttcctttaatttgtttttagatttttttaatatgtgaagacattgcttttcttctgttagatatgttaggtttgtgattatagaattttttagactaaaaatcaatttcttcagaattttgaaggccttgttctaataccttttagcttccagtaacactattaagaaatataattaaatttttatttatgattctcacattgtgtttttgttctttatttcctctttctgtaagatgttagaa

SEQ ID NO: 630218 - DNA, 612 bp, Homo sapiens
ataacacaattaaaaataggtgaaagatccaaatagacattcctccaagaaaggtatataaatggctcacaagtacatgcaaagatgctcagyatcattagtcatcagggaaatgtaaataataaccatggtaaatcaaggagttaccactttacatctccattaagatggctagaataaaaatgttagataacaagtgttggtgaggatataaaaaaatcaatatctccgtacactactaatgggaatataatatagtgcagccactttggaaaacagtctggcagtttctcaaatgattaaacttacagataccatataccccagtaatttaactcttactaatatatccaagagaaatgaaaacatgtgtcccccaccacatagaaacttgtatacaaatgtttatagcagcaatattcacaatagctaaaaggtggagataacagaaacatccatcaatggacccatgaataaacaaaatatggtatattcatataataaaatatgattcaaccattacaaggaatgaaatacggacagtcctcaacaatgatttgacttacagcttttcaattttttgactttaaaataatgaaaaaatgaatgata

SEQ ID NO: 630219 - DNA, 618 bp, Homo sapiens
gatctcattctcatgaaagcccagaaagacatatagacacagaaggtagatttgtggttgctcagggctgaggcagctaaaggatgacatttagaggctacggagtttgtttttgagatgatgaaatgttcaaaaatggactgtggtaaaggttgcacctattggtgattatgctgaaagtctacagaattttacattttaaatgggtgaacatgtgatatataaaatatatctcaataaagctgataaggggaagaatgataggaaatgttgcagggcaaagagacttgtgtttaggtaaggcctcactgaagargggacctttagggaaaaagatgaagaggaggagtgagatatttagatatttctaagaagagtattccaagtgtaaaaatcctgaaatatgaagtaaagactgttacaaattatctgtgtttgtaaactgactttagttttaccttctgtgtctgtgtttaatgtgtaatatatccaattaacaacactgtttgggtgatattcattcccagactagaaatgaattgcattgttttagttgctaaggaaaaaaaataatgaactaaatgtacatgatctttatccaataaggagaaaggcact

SEQ ID NO: 630220 - DNA, 515 bp, Homo sapiens
aggagtgagatatttagatatttctaagaagagtattccaagtgtaaaaatcctgaaatatgaagtaaagactgttacaaattatctgtgtttgtaaactgactttagttttaccttctgtgtctgtgtttaatgtgtaatatatccaattaacaacactgtttgggtgatattcattcccagactagaaatgaattgcattgttttagttgctaaggaaaaaaaataatgaactaaatgtacatgatctttatccaataaggagaaaggcactatttaaatgtagtggaaatttgytgcatacctccttagcaaccattccttactttcccattaccagagcttccagtcactgtttagaaatccatttggttctgggtaattcaaccatacctccagatccacagacgcaccctatgacctgggataagccaagcaatacaatctattccctgcacacagagtaggtaacaaggtagagatgtaatttaagttgtttaaagaaagtgaatctc

SEQ ID NO: 630221 - DNA, 637 bp, Homo sapiens
tttttcagaagaggaaatctcagtaataagtggaaaaggtacagcagtattaaacaggaaggtttcttgtcatcttttctaatgagtttctttgatcmctggctatgctcttccccgctaaaacctgctactctgaaggaacatgagctgttgcatttacctccttgttgtcccatggcttcagggcctgcagtggatggagctgacttcatttctttcttctcaatgctagggatgatttctattatgtacttcttgtgaagtcttatgccctgatggatatcatgtattttcagaagtcgtctgggaacataattccatatcctactgatgttgctgatacgaacagaaggcaagggagatactgggtagaagagggcagttccccagcaaagcctcaagcctggaaacctacggccctaaatgggaacaggcattcctgtttctgcacccaaacgttgccttttggcctgccacgccccccatcctgtacccatataaactccaaaccccaggctccatgagcagaagagcagaggaatagaagagtggcaaggcaaagaaggagagaagagaagaagcatctgaatatcaagaggagttcagctgggggcagttggagagaagatcagccgca

SEQ ID NO: 630222 - DNA, 637 bp, Homo sapiens
tttttcagaagaggaaatctcagtaataagtggaaaaggtacagcagtattaaacaggaaggtttcttgtcatcttttctaatgagtttctttgatccctggctatgctcttccccgctaaaacctgctactctgaaggaacatgagctgttgcatttacctccttgttgtcccatggcttcagggcctgcagtggatggagctgacttcatttctttcttctcaatgctagggatgatttctattatgtacttcttgtgaagtcttatgccctgatggakatcatgtattttcagaagtcgtctgggaacataattccatatcctactgatgttgctgatacgaacagaaggcaagggagatactgggtagaagagggcagttccccagcaaagcctcaagcctggaaacctacggccctaaatgggaacaggcattcctgtttctgcacccaaacgttgccttttggcctgccacgccccccatcctgtacccatataaactccaaaccccaggctccatgagcagaagagcagaggaatagaagagtggcaaggcaaagaaggagagaagagaagaagcatctgaatatcaagaggagttcagctgggggcagttggagagaagatcagccgca

SEQ ID NO: 630223 - DNA, 607 bp, Homo sapiens
ctgggtgtacacaggctgctagatgtgcccaagtgtgagcgtgctggaagttagaaagctgatgaaacattttaatctgagctttgtgccttgaatgaactctgkgttcctcctggtagcctactttaccctaggaatcaaaatagagttttgaaccattttctttataaactgtcctcctaacccccatcccctgcagttcccacacacactgaggccagctttggcccactttgcctttcccaggcttcaggagcccaagagacactaaaacctggatttgttggagtcgtctatcctgcaatttccccaaacacatactgaataaagaactctaaaactagttttcatgggctatttgttctgtcttcccccaatctctttatacttaaattatgactgaagtcagctccaaagtacttaagtgccagtgattttgctattcgtatgctatgtttctattgactttaaaactaatctgatcattcaaaaagctgccaaacccagcccagaggaataaagaaataagaggcaacctttaaataggggagggtgggcatccatggctgccggttaagagagcacttcccccaggtgtgactatatt

SEQ ID NO: 630224 - DNA, 607 bp, Homo sapiens
ctgggtgtacacaggctgctagatgtgcccaagtgtgagcgtgctggaagttagaaagctgatgaaacattttaatctgagctttgtgccttgaatgaactctgggttcctcctggtagcctactttaccctaggaatcaaaatagagytttgaaccattttctttataaactgtcctcctaacccccatcccctgcagttcccacacacactgaggccagctttggcccactttgcctttcccaggcttcaggagcccaagagacactaaaacctggatttgttggagtcgtctatcctgcaatttccccaaacacatactgaataaagaactctaaaactagttttcatgggctatttgttctgtcttcccccaatctctttatacttaaattatgactgaagtcagctccaaagtacttaagtgccagtgattttgctattcgtatgctatgtttctattgactttaaaactaatctgatcattcaaaaagctgccaaacccagcccagaggaataaagaaataagaggcaacctttaaataggggagggtgggcatccatggctgccggttaagagagcacttcccccaggtgtgactatatt

SEQ ID NO: 630225 - DNA, 577 bp, Homo sapiens
ttgtgtgtgtcctatccatttttttgaattagtattttgtagttttccttgcagagatctttcacccctttgattaaatttattactatgtttgtttgttgttttttggcagctactrtaaacggcactgcgttcctggtttctttctcagacagttcattattggtataaaggaaatgctactgatttttgtatgttgattttgtatcctataactttaatgaatttgtttatcaggtctaagtgtgttttggtggagtctttagtttttttctagatcttcctgagacttgagatacttgtgaacagtttgatccttttatttcttgctttggagatttgttgggtaggaaaagaacagcatttagtctaggcctagttatgttccactaatgagataagactttctgagacttttacctaatgccctataaattacaaggtttttctctctgtcttgttggaacaatccaggcagtgttcccatacagtgagaatatgagctaccatttcttctaatcattttggatgctctttctcctgtgtcatgtaatttcctcatacacatatactgaag

SEQ ID NO: 630226 - DNA, 570 bp, Homo sapiens
agcagggagagtgtggccacctaaagatgtgaaggcaccgtaaagacccacttgaatctttgctcacctcaacgccatccaacaattgaagcctgggcaaagtgaaacacccatctcctgattcagtctcttggctcttggtgagccaatgctcacctcttggcttgaagtcagagtgaggggtgtcaataggactcccttatgtcccactttccccacatttcagttcctggccctggaccccactctccacttgactccatcccagatagctgatgctggttctcccacrtctcccctatcaggcagccaatgctgttgcctaatttagcacagagtaaatttattttgcctttatacttttacaatatgtttaaaaaatgtggactctgtttctcagttcaaatgtgataattgattatgtcacgttgaaagatcagttatctgtgatctcctgaaatagacatattaatgtttgaaatttctgaaatgataacacatttcaaatagctttttaaaaagattaccattcagttgcatgtccctgaactcctgtggcagacaattcta

SEQ ID NO: 630227 - DNA, 607 bp, Homo sapiens
gtaaagggtgcaaaggtgtacagatgaaaaacaaaatatttttttcagtcccagggcctgttttagcttctggcaccttmtcccagaactcatatttacccaagacttaataaaataaatctagttcttcaccataaagtctatagaactttgaaactccatatactttaaaagaatctcataacaaaggacaaaatgtccttgaaaaaatagtagttgcttaataagttcttcaaaggaaaaccttccatataatcttttttttttaattaagaagaagcaaagttaaaaaaaaaaccctcccatataatgaaaggaaaaaatactgggaaacaagaccatattaaatttgcccaatgaggcaggctcatagggggaaaagtagtgtgctcagacctactgctatgatcatggtaagtttgaagaaaatgagatcagagagggttaaaagatgttgactcaaagagcaaagcagcaatatgacaagtgcgttttggaaaagagacctgagttcaaacctcatatctgtcttttactaactatgtgacctcgagtcatttgcctaataaaatgaactttatcttccctgtttgttccatgccacctg

SEQ ID NO: 630228 - DNA, 607 bp, Homo sapiens
gtaaagggtgcaaaggtgtacagatgaaaaacaaaatatttttttcagtcccagggcctgttttagcttctggcaccttatcccagaactcatatttacccaagacttaataaaataaatctagttcttcaccataaagtctatagaactttgaaactccatatactttaaaagaatctcataacaaaggacaaaatgtccttgaaraaatagtagttgcttaataagttcttcaaaggaaaaccttccatataatcttttttttttaattaagaagaagcaaagttaaaaaaaaaaccctcccatataatgaaaggaaaaaatactgggaaacaagaccatattaaatttgcccaatgaggcaggctcatagggggaaaagtagtgtgctcagacctactgctatgatcatggtaagtttgaagaaaatgagatcagagagggttaaaagatgttgactcaaagagcaaagcagcaatatgacaagtgcgttttggaaaagagacctgagttcaaacctcatatctgtcttttactaactatgtgacctcgagtcatttgcctaataaaatgaactttatcttccctgtttgttccatgccacctg

SEQ ID NO: 630229 - DNA, 542 bp, Homo sapiens
ctttactcttgtactccattttacagatgggaaagctgaggcacagaaggttgaaaacctccccaagcttacatagttaataaggagtggttctaaaacaacccatgcttttaaactgctaagctaccctgaaaatatatttttcagcttatttttctctctttctgtagtatcagtcaccccaatctgtcctccctgtcttttactcatctattgagacccatctccctgtagcaaatgtcacattcctctgcaacttaaaacagatactctccaccttctctggattctatagttctgtgttctattaatcattttatattgttattatctacttataagtttgttttccacattaaatgttgaattcctttaaggcatggacttttttttttaatctcctttgattggcagtggtgatacggtgtatggccatagagtaagtctttggcagatcttaatkggataaataaagttctggagaagcagcttgctaagccatttttacaaccatattaaattattttaacagttcaggtaca

SEQ ID NO: 630230 - DNA, 607 bp, Homo sapiens
tgagccagttcaccaagggacacagcagatgggaagccgcagcctgtcagtgtcaatagacactgaggtgctggtggagcggggcatggaggctgattcagatcagcgagcttccattaggtttcctgccatcagcagcgctgcaccagagtccactacacgcttttcccctcctctccctcttgacagctgtggggccatgggctgctgccagccaccactctggggtggttccactctaggagggccagagacccagaggaaggcagccaggatggtgggggccccaaaacgaccacattccatcacatctaagaggccactgatggtgggatgtacccaatttcagagatgttaaaatggaagaaaaaaaaagycttttagaataaagagaagcacaataagtcacccgagaaacttctctttctgtagtcattgcccttgttcatgctttccattcttttatttttgctctcatttttatccctgctccccttaaaactgaacactcagaaaagtacgaagaaaagcaaacacccatgtaaccacccccaggtcaaaaaaataggatactaccagcaccccacaaacccccttctgtcccccc

SEQ ID NO: 630231 - DNA, 595 bp, Homo sapiens
ttgaccgtttttactctggttgtttgttttttgttgttacgttgggagagttctttatgtattctggatagtaaccccttaccagacacatgatttgcaaatattttctctcattccataggttgtcttttctgttgatagtgtcctttgatgcacaagtcttaaattatcatgtagttcaatgtatctatttttttttttttgagacagtcttgctctgttgcccaggctggagtgcagtggtgtgatctcggctcactgcaagctccaccttccgggttcatgccattctcctgcctcagcctcccgcgtagctgggactgcaggtgcccgccactatgcctggctaatttttttgtattttttttaatagagattgggtaatttatctatttttgttgttgctgcctgtgcttttcatgtcttatctaaaaaattattgtagaatcctatgtcatgaagtttttagtttatgttttcttcttagggttttatagtttgaactcttaaatttargtatttgtttcactttgacttttttttttttcttttggagacggggtctcattcggtcaaccaggcgggagagcagggg

SEQ ID NO: 630232 - DNA, 647 bp, Homo sapiens
tatcataattatgtataataattttatacatcaattataattatttaaacagggtcttactctgtcacccaggctggagtgcagtggcatgaaatggctgactgcagcctttacctcccagactcaagcagtcctcccaccttggcagcccgagttgctgagactgtgggcatgggccaccatattcagctaattcttgtattttttgtggagacagagcttcactatgttgcccaggctggtcttgtactcccgggctcaagcaatctgcctgcctcagcctcccaaagttctgggattacagggatgagccactgcacttggcatatatatacatagatatacacacacatatacatatatatatataattartaaatgatattgtttaaaataattcctaaaagagtatttcctcaggactgggaaaaattagtcttgtaataaaggctgctctggtcctccctaacaaagtttaaacatcatccccatccttgaaagtaagtgttccaagcaagttaactgtatccctgaaaaaaagctcaagaatatgtatataaatataaaaatatccacctcccaacaagaaaacattcagagcatcttacattcaaccaaaaatgcccagacatggaaaaatcaggaaa

SEQ ID NO: 630233 - DNA, 639 bp, Homo sapiens
tgtctaaattttaaagattgtccataacaagtgttagtgagaatatgggacaattacagctctcaaactgggcaacagtttggtagttccttaaaaatttagacatgggagttaaatgatgagaacaaatggacacacggaagggaacaatacacactgggccctactggaggatgaagggtgggaggagggagaggatcaggaaaaataaccaatgtatactaggtttaatacctgggtgatgaaataatctgtacaacaaacccccatgacacaatttacctatgtaacaaacctgcacatgtacccctgaacttaaaataaaagctaaaaaaaaaaagttgaacatacacctaccatatgactcagccattccacacataggtttttatcyaagagaaatggaagcatatgttcacacaaagacctacagaaaaatgttcacagcagcttcatttgaaatatgcaaaaagtagaaaaaaaactgttcatctataagcgaatgaataagccgctggtgatatatccatacaacagaatactactcaacaataaaaagaaatgaactgttgctatacttaaaaacatggatgaatacctaattacattgagtttaataagccagacaaaagaaaatgt

SEQ ID NO: 630234 - DNA, 352 bp, Homo sapiens
gtgcattcctgtaattccagctacctgggagggtggggcaggagaattgcttgaacctgggaggtggatgttgcagtgagccgagatcgtgccactgcactccagcctgagtgacagagtgtgactccatcacacacacacacaaaaaattagccaattcttagagatagcaaagggctcagcaagccttctatatgcaaactaaccaaagccaagccctgccgcctctacctgacctytacatcccaggaggcagagtcctcttccttagtcatcccagagtcaggtactaggcactaaggaccatccctagtgtttacagcttgcagaaattactcaaactagccagtcc

SEQ ID NO: 630235 - DNA, 603 bp, Homo sapiens
acatccaggctggctccaggtctcttgtgcccaccgtgcaagccggygggatgccagcaggtggcatcctctccagcgtttcttcgccaggcgtggagtccggaggccgaatccatcagtccccagccccctccccaagcctccggtgccaagtgctgggtcctgtgagcccctggccccgccccccacctccgccagcggggcgagccggagctgggtgacccagaccctcgcggaggcgggagcctacagaggatgccggccggccccaggttctgctgctggctggccaagaagtgacaggagggcaaggctcccccggaaagcgtccaagccctgctctcctgctcttccaagccttgctgcgtgttgcccccagggttttctgagatctgggacgaagagagtgatgtgcaaggttctgggtcccggtgcaggagtgaggggtacggctgtcgagtgctcggagcaggctggcgtttgggcacactgcagacctcagctcaccgccactttctcctgaccttcctcgtggctgtcagcccaatgtctatcatgtgttattccctcggtttgttcaaaggcctgttttggatacttaaa

SEQ ID NO: 630236 - DNA, 524 bp, Homo sapiens
agggtgggactgctcaggctatgactgagcagattgcacggaggagatggcattcaagttatttcttaaaggatgagcagcatttccaagggcaggatagatagacaatggggggctgtggtagaaggctattccatgtgtkcccagcgtgaacacaaaaccaaattgctaccaccctccacatttatcaatcccatatctatctcctataccaccccctgccaggtctatctgcctttcttccttgtttctacctgttcttccacttgcagatctacccctggcctctgttttcctccagttattttctccttattttatctctcttgtaatcttgaaaccaatgcagacaatttttaaataaatcaaataatatagaaaggtataaaatgaaaagaaaaatcttctttctccacctcctactccccagaggtaaggactgtgtcacaggtataaaacatggacacaaattcttgacacttctgcctctgaaatgcagagtttatttccctccccttgaatct

SEQ ID NO: 630237 - DNA, 500 bp, Homo sapiens
agacaacacaaacaaatggaacacatctcacgctcatggatgggtagaattaatattgtgaaaaggaccatactgccaaaagaaatctacaaattaaatgcaattcccatcaaaataccaccatccttcttcacagaactagaaaaaaaaatcctaaaatttatatggaaccaaaaaagatcctgcgtagccagagcaagwctaaacaaaaagaaaaaaatctggaggcatcacattaccagacttcaaactctactataaggccatagtcaccaaaacagcatggtactggtataaaaataggcacatagaccaatggaacagaatagagaacacagaaataaagccaaacacttatagccaactaatctttgacaaagcaaattaaaacataaagtggggaaagtatacctgttcaacaaatgatgcttggatagttggcaagccacaggtagaagaataaaactggtcctcatctctcaccttatacaataatcaac

SEQ ID NO: 630238 - DNA, 667 bp, Homo sapiens
ctaattctatcacttctacaagtaaaggctgaaatttttccatgaagaataccaccaatacacatacacatatacttttttttgttaactttttatcttgaaataatactaagcccacragaagttgcaaaaatattacagagagatccagcgtaccccaaacttatcttcccccagtgataataacaccttccatattatgttatcaaaaccaggaaattgactctggcacaacgtgatgaactagactacagatcttacttggattgtaccactttttaaaatgctaactttaattttaattttttagtatcccattggactctatgtttattatgttatactccattaccatcattattctttttgatgctcacattgtctcaagtttaactagcgaggactccttcaagccagctcatgactttttttgataagcctccatctgtctttcagctctcctttgctttctgggacaagaagatgttccaggctgcagaactgtaattagccctgtctccaagaagtgttggtttcttttagcagggaatggtatttaggaactaagatctgggtattctggtaaccataagttctgatgtccaggcatatgtcctgatcccaggtcccatatgcccactgcttactggacatttccatgtgtgta

SEQ ID NO: 630239 - DNA, 667 bp, Homo sapiens
ctaattctatcacttctacaagtaaaggctgaaatttttccatgaagaataccaccaatacacatacacatatacttttttttgttaactttttatcttgaaataatactaagcccacgagaagttgcaaaaatattacagagagatccagcgtaccccaaacttatcttcccccagtgataataacaccttccatattatgttatcaaaaccaggaaattgactctggcacaamgtgatgaactagactacagatcttacttggattgtaccactttttaaaatgctaactttaattttaattttttagtatcccattggactctatgtttattatgttatactccattaccatcattattctttttgatgctcacattgtctcaagtttaactagcgaggactccttcaagccagctcatgactttttttgataagcctccatctgtctttcagctctcctttgctttctgggacaagaagatgttccaggctgcagaactgtaattagccctgtctccaagaagtgttggtttcttttagcagggaatggtatttaggaactaagatctgggtattctggtaaccataagttctgatgtccaggcatatgtcctgatcccaggtcccatatgcccactgcttactggacatttccatgtgtgta

SEQ ID NO: 630240 - DNA, 667 bp, Homo sapiens
ctaattctatcacttctacaagtaaaggctgaaatttttccatgaagaataccaccaatacacatacacatatacttttttttgttaactttttatcttgaaataatactaagcccacgagaagttgcaaaaatattacagagagatccagcgtaccccaaacttatcttcccccagtgataataacaccttccatattatgttatcaaaaccaggaaattgactctggcacaacgtgatgaactagactacagatcttacttggattgtaccactttttaaaatgctaactttaattttaattttttagtatcccrttggactctatgtttattatgttatactccattaccatcattattctttttgatgctcacattgtctcaagtttaactagcgaggactccttcaagccagctcatgactttttttgataagcctccatctgtctttcagctctcctttgctttctgggacaagaagatgttccaggctgcagaactgtaattagccctgtctccaagaagtgttggtttcttttagcagggaatggtatttaggaactaagatctgggtattctggtaaccataagttctgatgtccaggcatatgtcctgatcccaggtcccatatgcccactgcttactggacatttccatgtgtgta

SEQ ID NO: 630241 - DNA, 617 bp, Homo sapiens
actctaaattaagtaaaaatatctaagaaaaaaataattgttttgaaaaaaaagacattgcctaattcctgtgtatgcaaaattaaaattaactagttgagatcatctaggctgaatccagaaaggtcaggatgagcaaaggaagagagcaaacccttgtcatgatactgccatcggattcaggtgactggcttcctgagtggtgatgttcaagaaatcctgcctagagacaggggmataaaccacatggcccctcaatatttcatctgcatctacattcactcttgttggatgagcattgaatctggtttgtgttcattcctggtagagttacagtatcacgttaaactagctgcagtaaaacaaggaaaaaaagcaagcaatagggaaatggagattgccttgtaaaattggcaaggacttccacttgctttttcctggcgcgcttaaattcaaggcttgttttaatgttccaggagccctattttgccactgactgacactcagtagaaaagacaaggagtttagggggcagtttttccctattttacttctttgtttagcatgtgaatttcctggttaacataatgagattagcttcgttctgcagtgaaagt

SEQ ID NO: 630242 - DNA, 474 bp, Homo sapiens
gaatacaccttattcttcatctaactcctgagctcctttctctcttctttctgctttatttcattctgtggggtttgatgactttactcacctctaccaatccttttcattctcttaaatttctcaatccaagtgacaaaaacttcacttgacttgcagggaactaaattctcattttgcttccgtctcagctgcctccttctcacttcctcaagctctgaatgtggaagtgccccaagactaccctttggccacctgccttctcccttgatgaccgtgttgactattactgccaagtactccaaatgtatctccctctctggcttccaagtgcatgattggtcatgtttcctgtatctcctgacacctcctatacttggctagggccatgtggctagttttgtcaatgrttcgtgagcgaaagtgacacatgtctctcctgaactagaatttcattgccaaagcaaaccctcc

SEQ ID NO: 630243 - DNA, 534 bp, Homo sapiens
agaagtcattttgggctcatttctctcttgtgtcctttttattcactaaatgtttaaacactgaaatgtctatcgcatttgccctttccttttattctcattaacatcattctaagggatgacccaattacctcctaccaagatcattgcaatgacctccaaacaattctcctgcttccctctgaattcaattgcattctgccagtgccctggaaacatccttcccatgttcaaatgttctggtgttcagtagctccttcctaaagccacgtttgtgatccctaaccccaygctagtaataatgcacatttactgagtgttgtgtactgaaaggcttaacgggaattttcttatttaatcttcatgacaaccctgtgaagtagctaccatagataaggaaactaaagtttggaggttaaatgatttgccaaaagtggatacatgacagagccagaatttcatccaagtagcgtaaggccagaatctttactacgctgcctttcaataaatttaacatcattcctcatatgagac

SEQ ID NO: 630244 - DNA, 576 bp, Homo sapiens
agctctcagcttaaacgatccttgctgcctgctgttcataccctcatgtagtcctgtctcgctgaatcatggctgttctgtgtgatcaacagaatactgtgaaagtgacagtgtgggactgctgaggctaggtcataaaagacatcccagtgtcagccttagcctctcttggattgctcactcagttgggggatgccagccgccatgctgtgagggcactcaagcagcctgtggagaagggcatgtgggcagacactggcctctgcgcagcaacctgcatcatcttgccagccatgggatgagccatcttggaagtagatccagccagctccaggtcagccttcagatgacatcgcaaaagatcctgggccagaactgtccgtctatgccactcccaaatgtttgatacacatagactatgagggtaatacatrtttattgttgttttaagccaattaaaaacaagaaaccaagtgtgagtgttaagtgaactgattgccactggagtttgttgcttctaggccatttcaatggacacatctgagtttagactgattcttctcattggaattaaac

SEQ ID NO: 630245 - DNA, 608 bp, Homo sapiens
atgtcaatattggataagtgtttcctttatatcactgcaatttagcataagctgcttggaaacaaatgtcttccataagcatacaatgtttcagtgmgtacacagtcaacaccactatgaacattaaataaatgtcagctattccttggcatacttggtaacaagttaaagccatggaaataacggccagcataggtgaatctgctctgtgtggagctgttctgttggggcatgaagggtggaaagaggaagtcatccttcttctccttggaaataactgcaaagggggcagccaaacacagacacctgcctgcatcccctggacaggtttttcctggcatctggaagccttcccacgccctcctgaccccctactgaacacatacacacacacacacgcacacaccacttaatgttaaatcagtgtgatatctccagaatcagccacttttctcaaatgggagctatgctctcaccctactctttgcctgtcttcataggcaaagcaaagtagatttatctgaggctgatttttttttttggataattgaaactaaaactgcaatggatggcctatgtatgtcagtataagaaaggatgtgtgcgca

SEQ ID NO: 630246 - DNA, 608 bp, Homo sapiens
atgtcaatattggataagtgtttcctttatatcactgcaatttagcataagctgcttggaaacaaatgtcttccataagcatacaatgtttcagtgagtacacagtcaacaccactatgaacattaaataaatgtcagctattccttggcatacttggtaacaagttaaagccatggaaataayggccagcataggtgaatctgctctgtgtggagctgttctgttggggcatgaagggtggaaagaggaagtcatccttcttctccttggaaataactgcaaagggggcagccaaacacagacacctgcctgcatcccctggacaggtttttcctggcatctggaagccttcccacgccctcctgaccccctactgaacacatacacacacacacacgcacacaccacttaatgttaaatcagtgtgatatctccagaatcagccacttttctcaaatgggagctatgctctcaccctactctttgcctgtcttcataggcaaagcaaagtagatttatctgaggctgatttttttttttggataattgaaactaaaactgcaatggatggcctatgtatgtcagtataagaaaggatgtgtgcgca

SEQ ID NO: 630247 - DNA, 613 bp, Homo sapiens
actgcaatggatggcctatgtatgtcagtataagaaaggatgtgtgcgcatcatgctgaattatctagatggtctgctcacttggcctgtattcagtggatkgttgttgcaagtttctttttaacttatgcagattctttttaacttatgcctggacaactggaatctgaaatctgaggccaagagttgcagcaataacaaacaaacatcgctgtcactattccacattttcccccaggggctccacatagtctagtgtctcagtgggtgaaatatgctgctccttcctttgtgatcaaataccattttatgacactaaggctcagcccttgaccactcagccagcactcactgtgggcctcctatgcagtaggcactgtgctggggcttttgatgcaaagataatgaagaccatgtttctgccccagagctcttagtctggttggggagcagacacttcgattaaggttacaatatgatgggttcagagctgtcagagtgttctgaaaacaggtggatcagcaaaggcatcagaaaaggttgcacagaggagatgacatcatgcttgatattataggatgctcaagagttctctaaacgaagcatgaaaagc

SEQ ID NO: 630248 - DNA, 627 bp, Homo sapiens
agaacagaatgcgatatgttcagaagccatgggcagtatgatggctagagtgctgctgtgttagggaagtgggagaggaaggttgggaagggaagagtcaactcgtgaatggccatgggtgccattatacatcttttgaggatggattgagataattaagtaaacacctgagaaacattgctagtagcctatgggtttgtggtcctctctacatcacgggtttagggatcaacatgttatttttacttcttggtatttcttgtgtttcacatggggctaaaaatgtaaaattgaatggaaatatactttttaatmgttctttctagctgatggatgaagtgagcaagagaataagtatggggggaactgaccttaatggttagtccacattccagagaggaggcacagaaggatggtgggtagatgaatgccagaatgatgtgttagctaaagaatgtggaagagaagaaaaaagatcatggaaacacacagaggcaggactgctggctgcacgctggacttgagcagaaagagtgcattgaggaatgagatttgccagtttgtggatccccttggctagttagaggcgcaggcagcctaacattgaagatgggtgctaaccagaag

SEQ ID NO: 630249 - DNA, 618 bp, Homo sapiens
taattaaggacatactgcttgagtagctccttttgtggctgttctgacaaataataataataataaaaaggaaggaagcaaaggcagggactttgcttctcttaattggttgattaaaatccaagtcttttatcacccctggtgtctagcacactattgggcacatagaaggctgtgaataagtgtggaaatattggaatggaatgaggggtaatgagaggagaagccagcagtgcttgtaatatcagcacatggagagatgctgagagggcccctggcaggaggcagaagaagaacctgactaagtgaagtgtggacgtgccctgcaggaagttgttcctttctggaaggctttgaatgccctttgggtcaccagagacaacgccaagagaaacagcctctgccaagccacccactgctcagcttcaacaggaaaccatcgcgtccttctgttctttaatgcatgtcagtgcccatttctgtcagtcacctgcaaatgtcacaggtgactcggctctggtgcagtgtgacagtccacctgtcacccttggcaatgctgggagcartgacagcttcagagtaacactggggcccggttggttcattgcacaggaagct

SEQ ID NO: 630250 - DNA, 462 bp, Homo sapiens
cccttgccgctctctctgcatcagggtgagctgccactgcccccttcgtccccacagtgccagcctttctgggcagtggagttgggctgaaggcaggattgctgtcttcattttactgatagktctactagcaaattccaggtgacttcttcagcatctcttgtagaaaagaaaactttttgcataagttttgcaaaaccttacttcaaactgcagagttgatgctacaagggtagaagaggaaacatagagctgcatagtttgagaatttactgaaaataatggggactgagctcctcctcaaattaaaagatgttataccaacgaggtgtttgaccttggccctgctgccccccgaccccttgatttggccactttttccctttctcctttcaccaagagctgcgttagtgttttgggataccttaatagaaagctgaactgaggagggaggagagtggt

SEQ ID NO: 630251 - DNA, 605 bp, Homo sapiens
cctttgcgtgttcctgacaggtaattatctcacatatcaaggaagtattagggtctttctatggttcctgggttatctgagttcgtagattctctatcaccgtggttcttcaagtgtggtctgcaggtcaacttggagattgttagaaatccccatttttggaccccagtccagaccttctacatcagaagggttttgaccagcagcctgtgttataccgagcccaccagctgctcctgaggcctgctcagcttggagcacaggtgccatcaaggctgagtcttgcttccttatggtgtcccctcattttcacctccrtgtggacactgctgatagtaagtctacaagggagtcgaaagtcactttctaaccagagaatttaaggtgactcgtgggagctgcctctcatgttttcatgttacatcaggaatcgggatctgtcctgggcataagaagccaaacttacgataaggtcatacctatgatgtggaacacagcagctatgccaatccgtcactgacatcattgccttcctctcacaactggaaagaaatcaagagtgcttcctttcagcagggctttcctccctgtcccaccccagtgga

SEQ ID NO: 630252 - DNA, 608 bp, Homo sapiens
ctctgtatttttaaaaaaatattcaaggtcaatacaaccacaagtattgatattcacttcattgtgaactgggatctgctagctgcttattgtcattttatttttcaattcataaaaaaaaatgttctcatcactaggcatctgggcctcttttttcaacccaamtcaccaatgggaaaccaaatgcatgagctgatgaacccagcaaccaagaggggcttggggggagccagccacagatttaaaggccccctcatcccacagtggatgccgtgtacaccctgtgtgcatccccaggtggctgagtactgtagtgatggtagaggaagggggaaaggcacaggtggtggattgtacaggccagagaggagagacagagaaacagaaagactaagtgagctggcgtgtttgtgagatactcattttaggcttcaggagatcactaggctatatagtgtccagaaacaacagctttaactctctcccatccagtaggggggtcatgaaggcacatgccttatactcaaggttttgaagtttcctttcatcattgaactatgtcagtagctccgctgtgacaataaccaaatcatcagctttgcacagag

SEQ ID NO: 630253 - DNA, 579 bp, Homo sapiens
ctgtaatgcaggctaattcctgcatgctgcgtctgccctgctgcaggctgaagcctccactggcaatcctgggaggctgtaatgcaggctaattcctgcatgctgcgtctgccctgctgcaggctgaagcctccactggcaatcctgggaggctgtaatgcaggctaattcctgcatgctgcgtctgctctgctgcaggctgaagcctccactggcaatcctgggaggctataatgcaggctaattcctgcatgctgcgtctgccctgctgcaggctgaagcctccactggcaatcctgggaggctgtaatgcaggctaattcctgcatgctgcrtctgccctgctgcaggaaaataatgtaattttctttcaaaacctgagggaggtctcaaggtctctctaatggaggcaaaaacaacgacaacaaaaatatgggctacaaggttcctctgcacttgtgccttggcccaacagcagtaattacacagattagaaattgtgcttaaaaaatcctctttcccatgtgccccacctcacttcctagggcccctcatggctcctgttcaccttcctgacag

SEQ ID NO: 630254 - DNA, 533 bp, Homo sapiens
cactgtcaaacatgccaggagaaataaaaaggtgctaatgcaatatagcccagaaatagaaaataagattagaggcaacgcttgagatttcaggctgttgggcgggggaaatagcacagggtttagttaccagcagaactgtcagacaaaaagcctctgagttcattaataccagaaccttcattaaggcaagtggataaaattaaagggtgttttgtgaggatttaatttttcctggaggtttgcggtctctgaagggcgtctggtgctggctctgaggccaaggcggcgggccctggagtggggaatcaggatgctggagttctcattttttgtcgtcttctcagtgggccctgctgagaacaggctgcatgagggggcgcctgtgcagtgctgagccgctgcatcagggaactgcatctccttgtccccaagccacgtcctgtgaaacagcayggagtctcctgcacagctggaacaagcatagctcagccttagcatgggtggggcagggtagaagaaaagctgtgtcg

SEQ ID NO: 630255 - DNA, 513 bp, Homo sapiens
tatctttttgtggttttgagcggatctcctagcacagcactcgagctctgctaagggacagactgactcctcaactaggcccctgatccccgtgcctcctgactgggggacacctcccagcagcggttgacagacacctcatacaggagagctcyggctggcatctagtggtgcccctctgggatgaagcttccagaggaagaatcaggcagcaaagctttgctgttctgcagcccctgctggtggcacccaggcaaacagggtctggagtggaccttctctgtattcttaatgctattgtgtagggtcacaaatcagggcattcggatcaatctttaccttgctctgggatgccgagtaagatccgcctttggcattctgtcattcccaggaaagactggatggtgataacgtgcctgttctttcaccctgggtgggggatgaagatggtggtggagtatgttgaggttcttcatgttttccttgtgtgttgatggaaatgagctctctatg

SEQ ID NO: 630256 - DNA, 515 bp, Homo sapiens
ctctgaatgtagtaacatcaccaaagaatcacactatctatgtctccagcaatggtcccagaccaaatggaaactcagaaatgatggataaaagattcaaagcatagattgcaagaaagctcaatgagatccaagacaaggttgaaaatcaacacaaagaaacttccaaagcaatccaggaaaggaaagaagagataaacttcaatcagattaatcttgtgaaaaatsaatcagagcttctggaatagaaaaactcaaggaattttgaaatgcaatttaaagctttatcaatagacaggactatgcagaagaaaaaatttcagaccttgaaggccagtcttttgaactaactcagccagacaaaaatacagagaaaaattttttaaacaaaatctttgagagagaaggagaaaaaagcaaataacctcgaaaacatatttgagaaaataattgaagaaaatttccctaatcttgatagagatgtagacatccatatacaagaaatccagagaaga

SEQ ID NO: 630257 - DNA, 584 bp, Homo sapiens
ctcgctttcagctggatatcagggataactcctaggaggagatggaatttgagcaaaggatttgaacctgtggaaatgaacactgctctccaggttgagtgaaccygtgggacaatggcacatacctagaaatgctgatatatagtgaatagcaagcagttcagcctggccgaaacacctgggctgggtgaagggagggtgatagatgtgatctgtctatgttagattgtggggaactctgggttcaaattaaggaagcttaaattttggatcttgtgtatcaggagacaggatgtttttgagacagatcagtaagacaatcggagtagtgctttaggaagatcactttgtagggatctgtaaaacaaattagagatgtagaagactagaggcatcaaaagtagttaagaggctattacagtaatccaaatgaataaggattgtgtgaattagggtggtggcagaggttggtaaaggaaatatgaatgactcaacattgacaaagctcaaaaaagggaaagatgatgacgaggttatggggcttgagatgatggagatgtcataacacacataaggaacacagc

SEQ ID NO: 630258 - DNA, 598 bp, Homo sapiens
aattaattcttatcattagctaagtggattaggcaagtcacttaacctctccaatcctcagtttccgcatctgtaacatgggcataataataattgccctgccccacttgctaaggtggttgtaaaactcaaaccaaatataatgaatgaagatgtgctttgtaaattgccacacactgcataattgtaaagcagtctgagcattcttcagagacccagtcaaaccaaacacaaaaggaatagacacaagaggaaaatgaacattcagcttctaatctgggcctcttacctgatacttccttggcctatcttgattttgtaataggccgaggtttatttccatggttccttatattttataaagcctttcgtggtgagaaaactttgggaaaatcttattagatacagcaaagaccaaaatcagcacaaaactcacatataaaagccttagcaaaaaaataaggayttctctagaggctctatatgtgcttaaatggtgcagagagctaaattgtgaaattacaaatgagatgtggaatggcatatttgattatacagagtcatcttcaatgcctcataacatgtaagaaatttgaga

SEQ ID NO: 630259 - DNA, 579 bp, Homo sapiens
atgacataatttatggatgaactaatgtcagttcattgtattttacccaagtttttgttttgaaaatttttaaacctgcggaaagttgaaaatatagtgaaaactcatctttcgttcccyttgattgctaacgttttgatctgtttgtgttctctctttctctctgtgtttgtgtatttatctccctcagttgaatatttttgctaaaccatttgaaaattagttacagatatcttaaattttctaagaactagttatgaacaaatgaaagaatgaatgaagccatgcatgaatccataaatttctgaactcctttcgagttctctatggctctttctaactctaggagttgccatgtaccacaagagcacactgaaaataagcacccacatttcacagggtaggggatggaggagataattttcagctagaacagttgggaaaggtttcagctaggcctggatggggaagatttgaatatacttatgaaaaggggagaacattccaggacaaagggagtgcagcaacaaggtacagtgggcaggagaagcaagccctccaggcaccacgcttactcac

SEQ ID NO: 630260 - DNA, 223 bp, Homo sapiens
gctagggcatgaatgtcttattcaaagcatcagagtttatatggaaaacaggagcaaaggtgccctgcctcagtttcccacactgatgaggcgttgcgaggccmctgtgacccctgaaggtgttttcttcttagcttgctctttcagtttgcttacctgcccatctttgcctattatgagacttcaggtctctattcctattttttttttaacctacatttca

SEQ ID NO: 630261 - DNA, 508 bp, Homo sapiens
ctgctcagcactgcaagatttccaacatttttactgataggccctgcacagtcttaggaatcgccaggaagaatgaacamgtgagtcatcggtcagtcaccccaaagcgtgtgaagataggaggtggggagggacaagtgctgtatctttcaaagaaaaaaatactttagctgcttacctccactgtgacatgcatttttgaaagtagagcctagtccctcctgtcttccgcagctgtctttgcgtattgagatgacacctgcaagaaggagatggcaacacctggaggtatgcgtgggtctgcaaatttgtggctacgacaggacacctgggattttagggaaacactaaggagtcattgtggatcatgcaaggggcattggaccctaccaggctggactttcagaggggcaggtgagttcctaaagcaatttagtcagggaatgagggaagagagaaatgtggaaggtgcccaggctgggccgaactgagacatgacacagccctg

SEQ ID NO: 630262 - DNA, 508 bp, Homo sapiens
ctgctcagcactgcaagatttccaacatttttactgataggccctgcacagtcttaggaatcgccaggaagaatgaacaagtgagtcatcggtcagtcaccccaaagcgtgtgaagataggaggtggggagggacaagtgctgtatctttcaaagaaaaaaatactttagctgcttacctccactgtgacatgcatttttgaaagtagagcctagtccctcctgtcttccgcagctgtctttgcgtattgagatgacrcctgcaagaaggagatggcaacacctggaggtatgcgtgggtctgcaaatttgtggctacgacaggacacctgggattttagggaaacactaaggagtcattgtggatcatgcaaggggcattggaccctaccaggctggactttcagaggggcaggtgagttcctaaagcaatttagtcagggaatgagggaagagagaaatgtggaaggtgcccaggctgggccgaactgagacatgacacagccctg

SEQ ID NO: 630263 - DNA, 508 bp, Homo sapiens
ctgctcagcactgcaagatttccaacatttttactgataggccctgcacagtcttaggaatcgccaggaagaatgaacaagtgagtcatcggtcagtcaccccaaagcgtgtgaagataggaggtggggagggacaagtgctgtatctttcaaagaaaaaaatactttagctgcttacctccactgtgacatgcatttttgaaagtagagcctagtccctcctgtcttccgcagctgtctttgcgtattgagatgacacctgcaagaaggagatggcaacacctggaggtatgcstgggtctgcaaatttgtggctacgacaggacacctgggattttagggaaacactaaggagtcattgtggatcatgcaaggggcattggaccctaccaggctggactttcagaggggcaggtgagttcctaaagcaatttagtcagggaatgagggaagagagaaatgtggaaggtgcccaggctgggccgaactgagacatgacacagccctg

SEQ ID NO: 630264 - DNA, 602 bp, Homo sapiens
atatgaccacatttaaccttaatcgcctcctaaaagccctagctccaaatacagtcacattggaggttagggctttaacctatgacttttaggaggatacgattcagttcatagtagtcaccaagatagagcataaacttgttatcatgatatatagggagtgtcaaagcaacatagctttcctgtcctattgccagttccctccttcatagcctgaacctcggtcttgccaaattcctctttattgattagagacagcagacactgttactcttccatacctttcttatacttgtttcctcatcctggtgtgtctttctcctttcctgtgtctttttgcckagtaaataggtactaattgctcgagaatcagctggaatgtcatccatgagaagttcacttcacctcttcctccgctcagtcaaaaatgaattgcctattcatctaggtttccacagtattcttataaactcttattatagaactgtcaatatgctaactatttatttacatgtttaccttccaaactagagatgagatttttaaggccaaggaccacctttcagaatttatttttgcctgttttagagtatatatgggcc

SEQ ID NO: 630265 - DNA, 560 bp, Homo sapiens
gagtccaatttgaattgagttgatggttcagtgtttttctgaggtctgcgtctcttctttgtcttcttcagctgctgtctgcctgagattgggagcaggcagaggcagagactcctccttcattttgttttgttgtgctagctcttactggcacaacaaaattggttttttatcgtataaaaatagaggatatagaataatacagtggttcccaacaaggggtccctgggccaacagcatcacatcccctgagaattgcaaatttttaggcaccaccctgggacctcctgaatcaaaacctctgaggtggggcccagatacctgttttctaacaaaactcctagataattctgatgcatattacatttgagaatcaatgttattagaaccaccrtgggccatcacttgacaccaacaataaccaagctatggcaaatactgttctatctatcttccctgcttccttctgtctcactggattattctgaagcaaactcagatatcatatcctttcattcgtaatatttccacatgcgataagggctttaatatggatggaa

SEQ ID NO: 630266 - DNA, 560 bp, Homo sapiens
gagtccaatttgaattgagttgatggttcagtgtttttctgaggtctgcgtctcttctttgtcttcttcagctgctgtctgcctgagattgggagcaggcagaggcagagactcctccttcattttgttttgttgtgctagctcttactggcacaacaaaattggttttttatcgtataaaaatagaggatatagaataatacagtggttcccaacaaggggtccctgggccaacagcatcacatcccctgagaattgcaaatttttaggcaccaccctgggacctcctgaatcaaaacctctgaggtggggcccagatacctgttttctaacaaaactcctagataattctgatgcatattacatttgagaatcaatgttattagaaccaccatgggccatcacttgacaccaacaataaccaagctatggcaaatactgttctatctatcttccctgcttccttctgtctcactggattattctgaagcaaactcagatatcatatcctttcattcrtaatatttccacatgcgataagggctttaatatggatggaa

SEQ ID NO: 630267 - DNA, 539 bp, Homo sapiens
gattcggatgttttatcaatgtctttctgtcttggtttctgttactcattgagcagttttggcaaagggtgagagtgaagccagcaactcctttcagacatacaccctgacctccacgcctggcaaccttattactgtatactctcctaattcagcagcccaccctggactcctgcagaaacaggataatgatttatagtagtaaaagcagccctccacctgctctgtagtacatcatactaaagaaggaaagcaacctcatattaaaaatatgcaggcctgtaatcccagcactttgggaggccaagctgggcggatcacctgaggtcaggagtttgagaccagtctggccaacatgtagtgaaatccgtctctactgaaaaatacaaaaattagctgggcgtggtggcacacacctgtagtctcagctacttgggaagctgaggcaggagaayaggagaatcacttgaacctgggaggcggagtttgcagtaagccgagatcacgccactctactccagcctgggtggcagagagag

SEQ ID NO: 630268 - DNA, 612 bp, Homo sapiens
tttatgtcggtcagtctaaagtggactccaaaatgtcttgtgcatatttttaaatgatgcttgaaattttagaggtaaatatttattgacaatgatgatgataggttttgcacagctttcttttttggcartaaatgacttcccatttcacagatacataaaataagcacataaaatagtttaaaagggcttcttggacatcaaataactcatattaaacatactgatgagttaagtgtaaataaatgagaagcacatggataaaattttccttaaatacataaagctttagacattaagtgaaaaagagactgacaaaacacatctggggttttgcccactgcaaagttatttttagttttgtatattaaaacaaattacaattcaatgtgtccagccccagtataaaatcttgatttataaaataactctgtcattatgatgatgggaagatagcatagacagttaggagaacttagccctgacccaagagggagaaaattcttcaatctcatttaaaagcaaaaggtcaatttttgttgctgttatttttagcaagggaagtttaaggaaacacatttctacacttcactctgcaaaatgaacacatgg

SEQ ID NO: 630269 - DNA, 560 bp, Homo sapiens
  misc_feature 532, 533, 534, 535, 536, 537, 538, 539, 540, 541, 542, 543,544, 545, 546, 547, 548, 549, 550, 551, 552, 553, 554, 555,556, 557, 558, 559, 560: n = A,T,C or G
aaaagtccatgataagggatattaaaagactcatcacattgactaatttttacttaatgttcaaataaattctaagagtaaaaaaaatagttctaaatatcacccttgatattgaggatgcagtattttttaaataaatgcaagaatttagaagtccaaggcctctccaaccacctatttactagacacagaccaatatttggtattttaaccttctctgtgatctggcttccaagagcctttaagatcatgattctcggctgggcacagtggctcaccctggtaatcccaacacttkgggaggccaaggcgggaggatgtcttgagctcaggagttcaagaccagcctgtgcaatatggcaaaaccttgtctcaacaaaaaatttaaaaattagctgggcatggtggcacaagcctgtactcccagctacatgggaggatgaggtgggaagatggcttgagcctggaggttggggctgctgtgagccatgatggtgtcactgtacaccagcctaggcaacagagtagaacnnnnnnnnnnnnnnnnnnnnnnnnnnnnn

SEQ ID NO: 630270 - DNA, 517 bp, Homo sapiens
agcagccgacaagtacagaaaataagttcctgtaatggattttttattttttttgcaaatgccagggaagcaatagaagaaatactatttagaagaaatatagtaaagaaaaaaaatctgcagtatttttcaaaggaacagatttaaaaatcagaaatttttctttgaattcttagccctgtattttctttatcctttgttatctcattcagttagctctttggctagttgactagcagatacctaatttaagttttttaaatgcagacagtttagaatagaatatatgctgtgtattccccctactctgtagttgaaagttaacaaggagcgttcaaattcagatggcataaggccgcattggaaatagccctcaaaattaattcatttcaactattcttttaggtttatgaaatttatattaggactaccctyattttcctaagcttctattcctcatatcagtaagctgagaggttattaagaaaaatataaatattattacttagagttacag

SEQ ID NO: 630271 - DNA, 580 bp, Homo sapiens
tctccctcctccttgaacttctttacctgtgatctctttggcttgcctcctcccgctctggcctctcctccttttcttcctgtctctcctataaatcctcccagagtccttggccttctgcctgcccccatccacattctgcatgtagacatctggggtacccctgtgtctgcagctctgcagagatggggttaataagagcctacccacagccagcaaattctcacagtcacagactcataatcctaaagaggaaagacattcaatgtgtcataatccactttcccacttagtgcctgagtcaccggttcttggatccaaagtgtaaagatcaagctaaataaatgtgagttaccatcatcatcatcatcgtcatcatcaggcttgtagayggtatggcagatgagcttcacctggtggcctgggtggtccttgcctctgtggtcagatctctgaggccctgagggtcctgagaacccctctgcctctttctcccgctcccaggcatgtgcctgcctcttccttaaaattctggattccctttatatgcaggtgcccaccggaaaggactcttgaaggt

SEQ ID NO: 630272 - DNA, 664 bp, Homo sapiens
taataagagcctacccacagccagcaaattctcacagtcacagactcataatcctaaagaggaaagacattcaatgtgtcataatccactttcccacttagtgcctgagtcaccggttcttggatccaaagtgtaaagatcaagctaaataaatgtgagttaccatcatcatcatcatcgtcatcatcaggcttgtagatggtatggcagatgagcttcacctggtggcctgggtggtccttgcctctgtggtcagatctctgaggccctgagggtcctgagaacccctctgcctctttctcccgctcccaggcatgtgcctgcctcttccttaaaattctggattccctttatatgcargtgcccaccggaaaggactcttgaaggtgccgtagtcatttacacctgagtatgaccaaattggccacaagcaggccaagagaactttgcaaggagaggaggctccaggtgccggggggcatgtgcccaggactctgcagtgtagggcagggaccagggctggggaggctgatggagcaatggcagctgtggacccgcagtgcgaaggctcctgctcttggctctgccactggtgggatcaggcccagtgcctgcttctttctgaggcccagttaccacttgtgcagaaggaagggtcagaccc

SEQ ID NO: 630273 - DNA, 617 bp, Homo sapiens
tctgcttttgaaccatctgagttgaattctcttccctgctgagcccctggctgatacaacagtgcatggcagtctctgctgtggatggtggctccctggtgggcagcatctgttaggggtgtcagtggcagaaacccaggccagaacactagacctacacatagtacttttctctgagactggcaagcctgacctcccactctaggtcggtgagctgctaccccatttgcctctctcctcccgcttcctgtcaagcatgtccagcccaatctccaaggtggatagactcagccacagagcacgaaaaggccgtgttggtgtcaggagacaaggccacagggacttaccaccgctggggtcgaggatagccrcatgcaggtcccggaagagagtcagtcccctgccctgctgccctcccccagctgctgtgcctctttacgaaggagaccttctctgctgggcattttgctagtgcctagaacactgtctggtcccagtagatggtgagtctcccaagggcagggctgtgattttgtcagttcctcattctcactgcttagcactctgcctggctaagtattggctgactcaaccagtcaacactcccccttgtctag

SEQ ID NO: 630274 - DNA, 373 bp, Homo sapiens
tgctagtctctggctccctcatcccgggctcctgggacaatcaagccacttggtttcctatctcatctgccactggagccctcacagagaagctagaactagtaggaaaggcaggcagagagcaagattcaacgaggggaaagatgtctgtgaacaaacgggcttggmccgccccatctgagcatgaataaataaacaacagcaatgatgagctggccgccttgccacacagctctgccggccgagagagaattccttcaaaagaatggagcctcgtgccagttcattatttatgagcagggcccaccaaggtggggcctctgttgtttgttgcaatttaacacaggcctcggtggagagggagggaggggca

SEQ ID NO: 630275 - DNA, 562 bp, Homo sapiens
cttaggggtcataggtggtaatgtgtcctctgcttccagtgcggagctcaaggaatttcatggagtcagggacagctgtctgaaaggttgcaatgtcacccttttcagctcagaaccataattccttgagcccagataacagttcaaaatttaggatatgaagccaaagctgaactctagctgaaatcaagagtggatataataaccaagaaacaaatggttctgacaagcacagctttactctgagcatgactcaagggcatctggtagaaaatgaagaaggatcccagcagatgttagggctagggagatcccctcggttgggggatgtaagtgttttaatattgtgtgggcaactctgctttgaatgtatgtctggaggcacctacaccatccaaagccttctggtgcaaaagcaggactcctagagtatattccagtattttttccctgatcccagctgaaaayagccatagaagagcctccctttttgaattatggctgtctgtccgctggggtggagaatggccctgggagacaagagacagcccatggagcaggt

SEQ ID NO: 630276 - DNA, 663 bp, Homo sapiens
cctgatgcaaagagacttgtttaagttcctttgaatttcccacactcagttgaacacagaatcctgttttgagaaagcagctttgagcatcccttggacacatttgagaagcaatgagatgctttagtaagagccactaytgcaagtcgctgaaggactctacttctctagatctgatttttcctctctttctctgccacaaacctcccaaacaattgtaaaaggaagtgtgcttctctgggcaaaacaagggcatgtcaagcccaagagatcatttacttttttctttcttttttggtaactagttggttttttagaatcataacttgctttggttatgtgttggaagcaacgaagcatattcctctcatcttaatcatttttgtgtaaatgtcatgtaaaaaagtggggctttccttgacttctccaatcccaggcttgtatctatccggccttaacgtctttctcagagcactctagtttttcttcatagtacctaccacatgtataattagatattcacctatgcaaaagtgtgatttgtgtcgctctcccattggactacactcaatggaggcagggtcttcctctgttttgttcacctgtgtccccaaggacttagcacaatgcctggcagagtatgcactccaaaactatttgtca

SEQ ID NO: 630277 - DNA, 332 bp, Homo sapiens
cacagcaggggctctgcaaatgtcattgactcctcaactttttcagtccttcaccatggctttcactatttttaatgcaattcatttctatttggacaagtttgagaataaatttttgttttctttaaacaacaggcaagcaatacgttaggaaaaggggtggaggcatrtgggaacaccagaaggccagaggaattgcaaaaataaacttctgctaatggtaacactcttgtcttccagggcaggaataattaattgtatatgtttaatcacttagcaaccctgagctcttattctgaaaatctcaaaatatttcacatatgcagtgagta

SEQ ID NO: 630278 - DNA, 552 bp, Homo sapiens
tttggctctgtgtccccacccaaagctcccataactcccacatgttgcgggagggacctggtgggagatgattgaattctgggggtgggtctttcctgtgctgttctcatgatagtgaatgggtttcatgrcatctgatggtttttaaacaagctctctttttgcctgctgccatccgtgtaaggtgtgactttctcctccttgccttccgccatgattgtgaagcctccctagccatgtggaactgtaagtccaataaacctctttctttcttttataaattgccccatctcgggtatatctttaccagcaatgtgaaaacagactaatacagtgtaccatagaacagcactagcttaatccattttctgtagctataacggaatatctgaggctaggtaatttataaagaaaagaggtttatttggctcatggtgctcatggttctgcaggctgtacagaaagcatggtgccagcatctgcttctgatgaggcctcagaaagcatacaattgtggtggaaagtgaatggggagccagcgtgtcacatagc

SEQ ID NO: 630279 - DNA, 597 bp, Homo sapiens
ctttgggaaacaatgtgtctgccatttagtttaagatcaaaatctcagagtatgagaatttttcaaatcacctcaaagggaaggcagacttgaacactgaaatgctttcccaagagcaagccccatttacccagccagtgctatgtgtccaaggcaatgaaagatcttatgtcacatctcagtgcacacatgcaagaggcyggaattacaggtgccatgggagctttaacctcgaatttctagacattgtgtgggtttcacatgtctactggaatctaacactccagtagcagaattgttaggtctgaatatatgggtattcattgatgttatgggaaaggaatcggagagtgagcaattctgcagtaccattcatgtagcaaaagtgtgaaaacaaacaggttaatattagaaaattactctgctcatgagttgttttaagttactgctgttacagtctatggaaaagcgtatgtttcaattgaaattctcatgtctacagagtcattttgtctttagacatttatgactgaattcatactcattcatgtattcaatactcattcatgtattcattcacccaaatgttgaataata

SEQ ID NO: 630280 - DNA, 487 bp, Homo sapiens
aatagctacataccaggtggcaggggatgttgatttgcttccgtaaaaagacaaacagaacacagtatctgggacagcagattgcactgaagtcaccacatgattaagtttacaawaatccactgtcgttcttgatgatcctttatcttctgaacaaacaaaatatgtgcgttgagtggagtaatggcaggaaccaccatccggcactttctaagtctttgttgatggtactaaccgcttcagtcttttcaggaatgcagtgttgtttttggtttactattttgaaagaggcagttctgctgtcttccatttaaccttttctgtcataatattccttatttcatgggtcagggaactaaattggggattctgtcagttgctgaggctgtccattcccactatgctgtgtggacctgggttcagggacccactaggccaactgtgagatgggcccaagccaaaactccatggatcacttgaccagcat

SEQ ID NO: 630281 - DNA, 588 bp, Homo sapiens
gtgtgaccaaggcctctgtgattttttaaaacttcccatgtgtttccagcgtgcatcaagattgataaccactgagctaatccacactgaggtgttagcagctgaagaccatttattagaattcctttacagcaggcacaacgcctgaagccaaagaactatgtgaaagagcagtgttggagacactagggacagctctttcaggaagacagttgggggaaatggactatttctggcatcactcaaattttactgtatctggctagtcctatttctagggatgctctgggggcttaggaggaagaacaggcaggcaaagtcattccatttgctccctccacccccttcaaaactctaacacagtggttctcagcatttggctccattagaatcacctggaggtgatcacggaactagattgcagggcccggtccccagtttctcattcagtagggtgaggtgagtcctaaaagtgcatttctaacaagtgcttctgaggcaggagaatagggtctataggcaggkaacttagggcccattcatgctgacttcctaaagctgaatcaagagaaaacaccaaggtctggg

SEQ ID NO: 630282 - DNA, 204 bp, Homo sapiens
ctttaaacaaatcctttttattatgattgtattactttaaaatttaaatgataattttataaatcagattgtaagataatatcttgtccatgttagtatattagaactttattttggatatgtttgtttttaagrtcaagataaattcaaggcctgcagagtgactcatgcctgtaatcccagcactttgggaggcccaggtgg

SEQ ID NO: 630283 - DNA, 481 bp, Homo sapiens
acctaactcatagccccactgccttttctactattctgtgcttttcccagaagggagtctccaggaatttcttaatatctccaggaactcttttatttacgttccctaatgcaatcaaaagattattttgatatgtttatgaagctttttatgtgatttttgactctcatacagccagaaaactgtattaaactggttagtaaaatacacaaattatggtgattgtggatatttatatatgcatatgtgatacatagatagtgacttctgatcagttttccaaaaattaggattcagtgaagtacatttaatattaacaatggcacgggcacggtggcttatgcctgtaattccaacactttggggraccaaagcaggaagccaggagtttgagactttcccaggcaacatagcaagaccctgtctctaccaaaaaaaaaaaaaaaaagccaggcttggtgttgcacatctggagtcccag

SEQ ID NO: 630284 - DNA, 610 bp, Homo sapiens
tccaaattgtagaaaatagtaaaaatagaaaaacattaggaaagaatagaatctaacaacaggtatactatagtttctgaaacacaatttttctctctccagtttcccatttttactaaaggcaaatcatggtagggctggtttgctttattatagttggcctgattatttgtatatagtacagcaaggataattattttttacataggcttttaaatttgctttgatggaactttgttctgtagaaggaatctcagataagacttttttaaagctgagcccagccatggatttgtaccatcaaatacctatcagttgggtgagcctctcctcttgaagttccaagataaaatgtgggtctcctaggcctgtcagaaagtgacattccttacttacmacaggtcagaaccctgtacggggactgtgtagaccagtatgaggcccgttttcccaggggtttttattggctccacaagtcaggtttaatttcttaaaggaaaacacaccattccagtcaaagcattggtaaaataaccagtttctccaattgtgtactgttataaatgaatacagagtcttattacacttatgcaaataactgtattgtcat

SEQ ID NO: 630285 - DNA, 553 bp, Homo sapiens
tggccttgttatataaataaaatccctttagtagtcaaaatcaaaataatwaatctttcctctttttttttctttttttggccatttttcttccccaccacaccaccttttttggtatgtgttgggggaaatttaaccatttcagaggactcgttccccataatttgcaactttcctttggacttgagtgagtcagatagtgttggtaaaacccaatgggaaaaagattaaaagaaccacaaaatcagaaacatacaacaacaacaaaactgttaaggaaaacaaacaatcacaaaacttatatgattactgagtactcttatggtaaggagaaattaaaaccagctggttgttaactttagccaagacaaaaccccaattcagctacttacttagggatgggtctcaggctgaagactgctctccaccatcctagaagcaggaaaaaaaacctatcttcccttttggaagccagctcaaactgcataaaggagttacctgccttccctcatcattgaagcaggaaaacttgccttccttgttggaagcaaat

SEQ ID NO: 630286 - DNA, 618 bp, Homo sapiens
acaagttcttagtgctttcatctttcttgaaaatatgtttgttgtttattatgggatgtgtgttatggtgccaagcaggtggctgaatttcaaggggaacttgtgttgaatgctactgtatagaagacatacatgcagtaaggaagtttatacaaacctttgttaaagttgttcctttgggcttttatggtgctatacagcatgctaagtctccaaactgagctgatttgtattcctgacgtcatcctggaaccacgtggaggccaagcctagtaaaaggaaaatgagtactaggtggtccctagttccttctctgaactctgatgggtacaaagtgcctgaaccatgtggcagcccgtgtttagtgtctattacccgaaatcatggtgattgatgcatgccaaccttagttcccctataaggctgtgaaagccaaatatcttggtgcccccaaatcactaagctaaagagaaaagtcmagctgggaactgtttagggccaacctgcttcccattctattcaaagtcacccctctgctcactgagataaatgcatatcttattgcctcctttggagaggccaaaccagccaacatataacttacatgattactgagca

SEQ ID NO: 630287 - DNA, 618 bp, Homo sapiens
acaagttcttagtgctttcatctttcttgaaaatatgtttgttgtttattatgggatgtgtgttatggtgccaagcaggtggctgaatttcaaggggaacttgtgttgaatgctactgtatagaagacatacatgcagtaaggaagtttatacaaacctttgttaaagttgttcctttgggcttttatggtgctatacagcatgctaagtctccaaactgagctgatttgtattcctgacgtcatcctggaaccacgtggaggccaagcctagtaaaaggaaaatgagtactaggtggtccctagttccttctctgaactctgatgggtacaaagtgcctgaaccatgtggcagcccgtgtttagtgtctattacccgaaatcatggtgattgatgcatgccaaccttagttcccctataaggctgtgaaagccaaatatcttggtgcccccaaatcactaagctaaagagaaaagtccagctgggaactgtttagggcmaacctgcttcccattctattcaaagtcacccctctgctcactgagataaatgcatatcttattgcctcctttggagaggccaaaccagccaacatataacttacatgattactgagca

SEQ ID NO: 630288 - DNA, 618 bp, Homo sapiens
acaagttcttagtgctttcatctttcttgaaaatatgtttgttgtttattatgggatgtgtgttatggtgccaagcaggtggctgaatttcaaggggaacttgtgttgaatgctactgtatagaagacatacatgcagtaaggaagtttatacaaacctttgttaaagttgttcctttgggcttttatggtgctatacagcatgctaagtctccaaactgagctgatttgtattcctgacgtcatcctggaaccacgtggaggccaagcctagtaaaaggaaaatgagtactaggtggtccctagttccttctctgaactctgatgggtacaaagtgcctgaaccatgtggcagcccgtgtttagtgtctattacccgaaatcatggtgattgatgcatgccaaccttagttcccctataaggctgtgaaagccaaatatcttggtgcccccaaatcactaagctaaagagaaaagtccagctgggaactgtttagggccaacctgcttcccattctattcaaagtcacccctctgctcactgagataaatgcatatcttattgcctcctttggagaggcmaaaccagccaacatataacttacatgattactgagca

SEQ ID NO: 630289 - DNA, 618 bp, Homo sapiens
acaagttcttagtgctttcatctttcttgaaaatatgtttgttgtttattatgggatgtgtgttatggtgccaagcaggtggctgaatttcaaggggaacttgtgttgaatgctactgtatagaagacatacatgcagtaaggaagtttatacaaacctttgttaaagttgttcctttgggcttttatggtgctatacagcatgctaagtctccaaactgagctgatttgtattcctgacgtcatcctggaaccacgtggaggccaagcctagtaaaaggaaaatgagtactaggtggtccctagttccttctctgaactctgatgggtacaaagtgcctgaaccatgtggcagcccgtgtttagtgtctattacccgaaatcatggtgattgatgcatgccaaccttagttcccctataaggctgtgaaagccaaatatcttggtgcccccaaatcactaagctaaagagaaaagtccagctgggaactgtttagggccaacctgcttcccattctattcaaagtcacccctctgctcactgagataaatgcatatcttattgcctcctttggagaggccaaaccagcmaacatataacttacatgattactgagca

SEQ ID NO: 630290 - DNA, 431 bp, Homo sapiens
ttacaaaatttgtaatttgttctaccactatgacaactgaacataatctattacatgaatagcaaatgccaggataaagagagaaaaactcttatttttaaaatatattatcctactttaaaataggttaaaaggtatacaagtgttccatgtactatttttctaacctttttgtaagtttgaaattatatcaaaatatgtgcatttcaataaaagtgtcactttccttattttcatcaaactggtttatctctagtcaagtttaatttcttaaagtccataatayacaaatgcacacagataatatacaaaaataaaaactagagtgttgacaccaccatccatgatcctgttaatcctcgatttgcagaaaaatgagaatgacagatcttgaaaagaagaccaaaatcctatgctgtgaaagcacagaa

SEQ ID NO: 630291 - DNA, 560 bp, Homo sapiens
atttcattttcacacaatttcaaaacttaatttctgctgccttttccctagacttcttcccactatcttattacttcaaatgaattttatctgaattcttcagaaaactttactgagatttttgtcaatgcaataagtgttgtgcctaatgaagtcatcaagtcacatatttgttttctttgcaagcacatttagtgtgctcatgaaaatgaggacctgtgcaattctgatgttcccttgtttgtttgttttaatgtttattctgtttcccaaagtcaaaacyacccccaattcagaaaccattttcccaaatttgagtattctcacatttgggagctcctctaccaagaggcagtgacattacatatactatctcatttaatgtccacatcataatatgaggtgctgaagtaggtgttatcctgatttcacagagggaaaaaaggacaatccatcagctagaacttgccctacaatcccagagctagtaggtagagaagcaggtatttgattttgattgtttgattccaaagtctgttctctcccaacaaaccattatt

SEQ ID NO: 630292 - DNA, 560 bp, Homo sapiens
atttcattttcacacaatttcaaaacttaatttctgctgccttttccctagacttcttcccactatcttattacttcaaatgaattttatctgaattcttcagaaaactttactgagatttttgtcaatgcaataagtgttgtgcctaatgaagtcatcaagtcacatatttgttttctttgcaagcacatttagtgtgctcatgaaaatgaggacctgtgcaattctgatgttcccttgtttgtttgttttaatgtttattctgtttcccaaagtcaaaaccacccccaattcagaaaccattttcccaaatttgagtattctcacatttgggagctcctctaccaagaggcagtgacattacatatactatctcatttaatgtccacatcataatatgaggtgctgaagtaggtrttatcctgatttcacagagggaaaaaaggacaatccatcagctagaacttgccctacaatcccagagctagtaggtagagaagcaggtatttgattttgattgtttgattccaaagtctgttctctcccaacaaaccattatt

SEQ ID NO: 630293 - DNA, 611 bp, Homo sapiens
  misc_feature 566, 567, 568, 569, 570, 571, 572, 573, 574, 575, 576, 577,578, 579, 580, 581, 582, 583, 584, 585, 586, 587, 588, 589,590, 591, 592, 593, 594, 595, 596, 597, 598, 599, 600, 601,602, 603, 604, 605, 606, 607, 608, 609, 610, 611: n = A,T,C or G
ctgtattatgcttctatactcatagcatttcttttatgggtcatttctgattagtagaatattttcctttatatggatcaaaacttagtctacctatgtccttttgatccatgcagtgtaaattagacttatagaggtcaagtgcagggcaagttcctggtgtctgggctagggtgtagctttagtttgtacagtgagacagctacagacatcatacctgggaggacacaagttgtcattgggtactcaagtcaagccaawtaatgcagacagcagaattcgagagacatagtaggacttaaatcctaaaggcaaaggtaatagtgggcatcagaagtttgagctcatagcatgaatagacacccattagtattgggggcactagtagtagcttaaagaagtgggcaggaatccagacgaactgtagccaaaaaaagaatagaggctataaatgctatgaccaaggtatgaacagagggatggaggaggatgacttgaggaatgaggccataatccattatggggcccccttctgctttggacagggaacttctgagtcctttttnnnnnnnnnnnnnnnnnnnnnnnnnnnnnnnnnnnnnnnnnnnnnn

SEQ ID NO: 630294 - DNA, 591 bp, Homo sapiens
ggtcattttgcttgtcatttcttgacattggtgwtataaacgtctggtcctcaacataggctttgtagtatacacttagccaggtaaaagcctagattatattactaaaatacaaatatattagcattattacttagaaaagctatacccacatatttacgtaacagttattttcacttagttgtttatttattttgagacagagtcttgctctgtcacctaggctggagtgcagtggcatgatctcggctcactgcaacctccgcctcctgggtttgagtgattctcatgcctcagcctcctgagtaactgggattataggcgtatgccaccatgcccagctaatttttgtatttttagtagagatggggtttccccatgttggccaagttggtctcaaactcctgacctcaggtgatccacctgcctcagcctcccaaagtgctgggattacaggtgtgaatcaccatgcccagccttcacttagttatattaagctataaattccatgaaggcagaagccagatttttttctttttcaacccttttagccttagcgcttgacccagatcctaatagtagaccctcaga

SEQ ID NO: 630295 - DNA, 654 bp, Homo sapiens
agtcatggctgttactcccaccagctgtgtgcctgtcacctgtctgggtggcaggctcctctgtcacatgagagtaccagcaaacactccacttctgaaatcatccttaaccttctcacttttggctaacaaagcaaattcccagtatctgcattatgggctgctatatatggataatatgttcattcttgggggttagttcctgttgccactaaattatctaaagatgtctcccaccctttggtcataagtaattacctttgtgaactgcaaaactttccactctgtgggaaaaaagggtaacaatcaaactgcatacactgtagaacaggaccacacagtccacacaggcatggagcaaagcattctataatgatagaatatcactgctctcaaagcatctggaagtctttcagattaaatcactgtagtctacaaacagtgtagaaataattcaatcatccccaccatggctgaggaaattgaaggatgaacagttttcagaaggaaatttgaaagcaagatccaatttaccaatrttttctacaagaaaagcaatagagttgtagaaaataacagtgaaacaaacagtaatccattttatgtattattattatagaaagagaccagaacttgatatacccacctgccacc

SEQ ID NO: 630296 - DNA, 572 bp, Homo sapiens
gtaaaacataagttattcactttcagaaataatgatgatgacaacaatgttttactacttacaagcagctttaatgtacactttcaataacaacagcaatagtcttggcaagatgtcttactttttcaaagttcttacatacttaaatcttacacaaagctatgagggccagtgctctgaaaagttaagtaataacttgcctggagtctaagagctggactccaactggaataggttttctgcttcccaaactggatgctctttcatggcatatcatagttaatccccaaagaatgatgggcattaaaactgggaggggctaggcrtattggctcatgcctgtaatctcaacgctttgggaggctgaggcaggaggatcacttggagccaagagttgaaattgaacctgggcaacatagcaaggccttaactttacaaaaaatgatttaaaatcagctgggtgcagtggcttgtgccagtggtcttagctactcaggaggctaaggtgggaagatcactgagcaaaggagttcaaggttgcagtgtgctgtgatcataccattatactgtag

SEQ ID NO: 630297 - DNA, 587 bp, Homo sapiens
tctgctttatttatgtacatctgtatcctgcatagttccttccttctttccctcttctctcctgtcctcctctttattcccattctcccccattaatgcacaactacaataagtaatttaagaaattgcatatatattgggatatcttccatttttcttaaacttttagcaatctgctmttatctaaatactgaacaattatgattaaattatattaacgttcagctactaaaatgcaattgctataaaatatgactgggaatttatttaatgcattttatttgcttttaaacttgcaaaggctatcagaagtttgcttaaattcacgaatgaataatttataacagatgaatgattttattttttcaacccaaagatacttagtagggaataccaagaagaatagagcaaaattagccagaagaaatagcattaagcgggaggaagggagtgatataaattatcactttgctgaagctccctccccttgctcccatacacaaagccactttcccccactctaagttaggggttagaacatgtaaaaagaaatatttttgaggccctaattagctcagcttgggatg

SEQ ID NO: 630298 - DNA, 589 bp, Homo sapiens
tttgttataggcaatgggagaattcccagaagtttttggagagaagaatgagagaattaaagtacgattcaggtgatattactttggyagccatgtgagaaagagatgaggtggggaagaaatgttctggctggtggtgggatgaccacattcatttaggaaacattagcctacatgggtctagtcccagtgccagagagacagccatgcagtgtgacctgtactactagaaatgtgtatacttttatgggagactgacgttttctggtggggcaaagaaaggttttctgtgaaggtgactttgatctgagttttgaagcctaaatagtatgctgttttacgtgctttatatgtgatccttactctacctatgtgaactgtatcaaagaagtctaacttccacagggagaattgggtagtatgtgcacttgtgttcaacaagagcctctgatgacagaaatgggaaagagaggttagagagatgtgaaaattaagaattagaagagtaatggagccaagagaaatagttctgggttggcgaggctgtgattcagatcttgtgtaaatagttcaggaaagcaataaacta

SEQ ID NO: 630299 - DNA, 521 bp, Homo sapiens
gaggaatgcttgagaccaggagtcccagaccatcctggatgaggccccagttctataaaaagtaaaaatttagccaggcatggtggcatgcacctatagacctagctactcaggaggctgaggctgcaggatcccttgagcccagaagctgaggttacattaaactatgatcacaccactgtactgcagcctgggtaacatgttgagaccctgtctcttaagaaaaaaaaaaaagaaacggtgaagttgtttgtagccatgagattcttcttgggcatttttaggaaaaatttctaaaccaaaggcaatgccattatcaaccacagctgaactcttctaaaagagacctgtgatattttattaaatttgaggaagtaaactaccttctcatttgctgaatcmaaaaaaaaatatccatcattctttacagaccctcattacaaccacttaaatgtggttatataaatcaggaagtcgtgtattaaagtggaacatttctaaatgcctaaattgtttatacc

SEQ ID NO: 630300 - DNA, 489 bp, Homo sapiens
agctgaactcttctaaaagagacctgtgatattttattaaatttgaggaagtaaactaccttctcatttgctgaatccaaaaaaaaatatccatcattctttacagaccctcattacaaccacttaaatgtggttatataaatcaggaagtcgtgtattaaagtggaacatttctaaatgcctaaattgtttatacmaataacattttctttttaactctgcagaggaagcatattttactttttaatagctctcagttggacaattgaattattgttttcctgttttttttttaaaccacccttatttttgtacccacacagaaaccacccacaattaatgatggaagcagctgggaaagttgcacatttcaggtggtgttcctctcttaaaaaaaacacgctgcttgagagagatgcttttatcatattagctgtgtattttgaagcactttatttgacttaatttgaaattcaaaagcttaggtgt

SEQ ID NO: 630301 - DNA, 332 bp, Homo sapiens
cattccaccactcctagggatgtcagcwggggaacagctgggaacagcagaaaggcaggcccaaccacccccagaccctcaggtctccgatgggggttaacaaaggcaagacacccctggggaccccagggaaagaggtgggaagaagaaagcaagataaatgttcagctttccaacccagctcatggagctttattcagacgggagtgacaacatcctgcttcgttcttgctgcccttgaaggggcaggccctactgagccatattccctagaaacccaatgccgaaggcccatgtttgacctcccactttattcaagtcgcctaggacta

SEQ ID NO: 630302 - DNA, 563 bp, Homo sapiens
tcaaaagctgtgtcaggcaagccattctgtcgccagactatggttccaccagaaatggacaacaatattctccaacatttaaaacagtgaaatattaagtgccatgttggtttggtgacaagggcattctcagacatttgtggcagcagcaaaaggggttcaagcctttcagataggatttagcatggtatctcaaattgttgcaccttttgacccattaatttcacttcaaggaatttaaagaaataagaggaggctgggcgcggtggctgacgcctgtaaccccagcactttgggaggccaaggagggyggatcacgaggtcaggagatcgagagcatcctaactaacacagtgaaaccccgtctctactaaaaatacaaaaaattagccaggcatggtggggggcgcctgtagtcccagctactcaggaggctgaggcaggagaatggcgtgaacccgggaggcagagcttgcagtgagccgagatcgcaccactgcactccagcctgggcaacagaccgagactccatctcaaaaaaaaaaaaaaaaagaggaagtgtc

SEQ ID NO: 630303 - DNA, 645 bp, Homo sapiens
tgctgctagtctcattcaggtatatatcagaataaacttggggcacagtttttgtcataccacagctctgtgttaataacaaacaaacttacaagtctttgattccttggtttgaggttcaagattctcctagctctctgaccccacctcactcttcaagccctttctcccactgcttccatgcctcctctctgctttctcttcctccccacacctctctgtttcyatctggggaaatgctacctgtgtgtttcaaggtccaaattaaaatggcacttcattttcgtaatccttccctattctaaactggttagaatttttctttacagcttttatggaagttagcacaccagtttgaaattaatcttcaagtcatatttcttatctcctgtgaattacaacctacctcagtgcggatgctgggcttaattcatctttgtatacttcctacagtttcctataggagtgccttacacatagtaggtgctcagtaaatgtttgtggcataagattagggggtgcctgttgaccatctggtgggcttccctttcagccttggtgaagttcgctattcagtggggggaaatgctgtgattttgtcttctaagagtcagacatcttttgttttcagccatgtaggagaag

SEQ ID NO: 630304 - DNA, 570 bp, Homo sapiens
aagtatttcctatgctgtttttatagcttattagcctagggcaaggtggcttggcccctctgggtaacctgccaggtgagatctcggtgtttgcttgcatgtgcctcctggcctatccgtccyagagttggaggaggaggagccccaagatcagggttttcactctttggatgtgagtgtctctcagatggggagtatctttctaagaaaggggtacagagcatggaattcttaggctacaggcaggcagcgtctcagggtaagtggtggtaaattttgcaagtgagcactggcgcacagatggggcagccatttcctttgtgagctgtgaggctgtaggcctttggaactatcaggtggagaagggggtggggttctgggaaggaccctttgaggtgggagcttgtgtgggctttgggccctgaaattctgggagtgggagttagcactaagagaatgagggttcagcagaagcaagggcccatgagctgagagatcggtatagtttaacaactctctgggaccaaaggtcactttggtgttatcttgaggtaggtctggtgttccctt

SEQ ID NO: 630305 - DNA, 611 bp, Homo sapiens
aatccgttggccaggctagagtgcagtggtgtgatcatagctcgctgtagccttgacctcccaggctcaagcgatcttcccacgtcagcctcccgagtagcagggactacgygagcatacaggcgcaagccacctcacccagctaaaaatttttttaaattattattttgtagagccagggtctccttatgttgcccaggctggtcttgaactcctggcctcaagcagtccttccacctcagcctccccaagtgctgggattacaggcatgggccactgcgcctggcctaaaagttgtttttaaatgtgaaagtgtttaactcaaataaatactatcatgtctgtagagaaatcattgatttttaaaaatcctcttaattctatagtgcatgcagctaacttaactattaagaaatacaaatgttatgtctacttcattattttaattttattaaccataatagtgctttatgtttattagtttttcttttttctttttttttttgagatgtctctgttgcccaggccacagtgcagggacactatcatagctcatggtaacttctccagctcctgggctcaaatgatccacctacctcagcctcttatgt

SEQ ID NO: 630306 - DNA, 611 bp, Homo sapiens
aatccgttggccaggctagagtgcagtggtgtgatcatagctcgctgtagccttgacctcccaggctcaagcgatcttcccacgtcagcctcccgagtagcagggactacgcgagcatacaggcgcaagccacctcacccagctaaaaatttttttaaattattattttgtagagccagggtctccttatgttgcccaggctggtcttgaactcctggcctcaagcagtccttccacctcagcctccccaagtgctgkgattacaggcatgggccactgcgcctggcctaaaagttgtttttaaatgtgaaagtgtttaactcaaataaatactatcatgtctgtagagaaatcattgatttttaaaaatcctcttaattctatagtgcatgcagctaacttaactattaagaaatacaaatgttatgtctacttcattattttaattttattaaccataatagtgctttatgtttattagtttttcttttttctttttttttttgagatgtctctgttgcccaggccacagtgcagggacactatcatagctcatggtaacttctccagctcctgggctcaaatgatccacctacctcagcctcttatgt

SEQ ID NO: 630307 - DNA, 611 bp, Homo sapiens
aatccgttggccaggctagagtgcagtggtgtgatcatagctcgctgtagccttgacctcccaggctcaagcgatcttcccacgtcagcctcccgagtagcagggactacgcgagcatacaggcgcaagccacctcacccagctaaaaatttttttaaattattattttgtagagccagggtctccttatgttgcccaggctggtcttgaactcctggcctcaagcagtccttccacctcagcctccccaagtgctgggattacaggcatgggccactgcgcctggcctaaaagttgtttttaaatgtgaaagtrtttaactcaaataaatactatcatgtctgtagagaaatcattgatttttaaaaatcctcttaattctatagtgcatgcagctaacttaactattaagaaatacaaatgttatgtctacttcattattttaattttattaaccataatagtgctttatgtttattagtttttcttttttctttttttttttgagatgtctctgttgcccaggccacagtgcagggacactatcatagctcatggtaacttctccagctcctgggctcaaatgatccacctacctcagcctcttatgt

SEQ ID NO: 630308 - DNA, 567 bp, Homo sapiens
tacttcattattttaattttattaaccataatagtgctttatgtttattagtttttcttttttctttttttttttgagatgtctctgttgcccaggccacagtgcagggacactatcatagctcatkgtaacttctccagctcctgggctcaaatgatccacctacctcagcctcttatgtaggtaggacttacaggcacatgtcaccatgtccagcttgcttgcttgcttatttatttatttagtagagacaaggtattgttatgttgcccagggtggtcctaaactcccagcctcaagcagtccccctacctcagcctcccaaagtgctgggattacaggtgtgagccactgcacctggcctactttatattttttaatgtgttcttgcatccataatcccatttgagctcacactggtcctttgaagtagataaagtagggattccatccatttggcaagggaggaaactagtgcagagagaaataaagtttgtaacaaaggttgctggcaagtttgtggaggagctgggcccaaagtgtgtatgtactggctcccagcccaaa

SEQ ID NO: 630309 - DNA, 608 bp, Homo sapiens
taaaaatgtattaataagattttatatctttgtgggagtgtatagcatatatgtaatatttaagttttgaatagatatttcaaaactcaagagccacaaagggctataatataaaatgtattaataagattttatatgtttgtgggagtgtatagcatatatgtaatatttaagttttgaatagatatttcaaaactcaagagccacaaaggactataatataaaaatccaagggatacagaaacttataatgtaaacgttcaagaaatacaaagagctataatacattcaagagctacagagagttataatgtaagagcctttcttttcccacctcagactccctgctgtcaagttcctctctttagaagcagtggtagtaccaatttattggtgtatccttccaaaatactcccagtgctggaacatcttaggaaagtttaagcttttatttagttgaagccaaaggaagggctctctgatggttgcatwtcaggtggctgtaactggatgagtgagtgcaacggcactccttcctgaaattaaaaacctgagaatcatcagttcttgtattcctatagtctacaactgtaagcactcacattaag

SEQ ID NO: 630310 - DNA, 591 bp, Homo sapiens
ctctttgtaggtgtctaagaatttgttttatgaatctaggtgctcctgtattgggtgcatatacatttaggatagttagctcttcttgttgaattgatccctttatcattatgtaatgctcttctttgtctttttttatctttgttggtttaaactctgttttgtcagacactaggattgcaacccctgtttttttttgctgggattacaggcatcggccaccatgcccagctaattttctatttttggtacacacgggatttctccatgttggtcaggctgctctcgaactcctgacctcaggtgatccrcccgcctcggcctcccaaagtgctgggattacaggtgagcaactgggcccaacctaaatcacatctcatctttatacactgtatgatcaccaacataggtttatatttattgctttatgcattgactttctttttactgtatttaagatatacaatattatgtttgtgtatatatacatatacatatatacttagggcaatgattgccataatcaagcaaattaacatatccatcatctcacatagttacttttttgtggtaaaaatatctaaaatctac

SEQ ID NO: 630311 - DNA, 400 bp, Homo sapiens
tccattattttatctttcaactccagaatttctatttgrtttctttttaaaagaacattataaaataaataatatttttttaaaaaacatttttgatagtctgtattttgtgagatatcattctcatgtttttttttaaaaaaattgtctcttattgatattctctatttttgtgagatatcattctcatgtttctctttagttccttagatgtcatttcctttagctctttgaacatatctaaaatagttgatttaaagtctgtttctattaaggccaatgtctggatctcctcaggggtagtttttattaactgcattttttcttttccatgtgccatactttcttcagttttttctttttgtatgtctcatactttttttgaataccagacatttta

SEQ ID NO: 630312 - DNA, 400 bp, Homo sapiens
tccattattttatctttcaactccagaatttctatttggtttctttttaaaagaacattataaaataaataatatttttttaaaaaacatttttgatagtctgtattttgtgagatatcattctcatgttttttttwaaaaaaattgtctcttattgatattctctatttttgtgagatatcattctcatgtttctctttagttccttagatgtcatttcctttagctctttgaacatatctaaaatagttgatttaaagtctgtttctattaaggccaatgtctggatctcctcaggggtagtttttattaactgcattttttcttttccatgtgccatactttcttcagttttttctttttgtatgtctcatactttttttgaataccagacatttta

SEQ ID NO: 630313 - DNA, 553 bp, Homo sapiens
gaatactatgcagccatgaaaaagaaaaaatcatgtcctttgcagcagcatggatgcagctggaggccattattctaaccaaattaacacagaaacagaaagccaaataccatatattcttacttaaaagtggaagctattgggaggctgaggcaggcagatcacgaggtcaggagattgagaccatcctagctaacatggtgaaaccctgtctctactaaaaatacaaaaaattagtggtgcgtggtggcacacagctgtagtcccagctactcaggaggctgaggcaggagaatcgcttggacctaggaggcggaggttgcagtgagccgagatcatgccgctgccctccagcctgggyaacagagcaagattctgcctcaaaaaaaaaaaaaaaagtggaagctaaacactgaatacacatggacacaaagaagagaacacagacactaaggcctacctgggggtggagggtgggaggagggtgaggattgaaaatctacctattgagtaatatgctgaatatctgggaaagttatctgtatactaaacc

SEQ ID NO: 630314 - DNA, 353 bp, Homo sapiens
tctctggctttgttatacttttcaaaaaatattttgaatattagtcttttggaacatttatgcaaacctaaaattattaaggcataaattattaatgaagaaataaattagcaaatgytcataaatacatcagctaacatgaaagtgatcaaaagtagtcaaataaaagctatataaacgttatattatatatgtatatagaatttttcaaaaaagactgacacgatatatgaaagtttacaaatttaaaaaaatatcaattcagggaaatatgccaataagaaattgaacagaaggtaaatttgttttgggtaagttggattttggtcaattgattcttgattaaaggcatg

SEQ ID NO: 630315 - DNA, 574 bp, Homo sapiens
cagcgtgattctaagtccttctcactgcatccacggaaattaatgttgtgatataatatgaagtgaacatctaaattgtttctttttccaaaggcacttattaaatatgcatcctttcctcaactgccatgtgatataaccattataacatattaatgtcaaataaactctaaagtgtattagagagtgcctctcttcttttgctctatatgtatatacttctgtcaataagtctgaaaataaatgtgaatatctgggaagaaattttcttcctcatgaatgaggaatatgaatcwgaatatgaattaagtaatttaatcttatctttttgacttaaactagtgcccttggcatgatgatatgtcacagtcatcggtaaaaagggagattataactctttggcttcatgctcaaagcatacctctttaaattaagcttcccatgtagaaagaagcacatcactggtaggatgaattgttccactccttttgagtgaagcaagggacagctcccaaatagaggaattggcactatcttaggctacatgctgtgtcagtaggctgaactctacagt

SEQ ID NO: 630316 - DNA, 574 bp, Homo sapiens
cagcgtgattctaagtccttctcactgcatccacggaaattaatgttgtgatataatatgaagtgaacatctaaattgtttctttttccaaaggcacttattaaatatgcatcctttcctcaactgccatgtgatataaccattataacatattaatgtcaaataaactctaaagtgtattagagagtgcctctcttcttttgctctatatgtatatacttctgtcaataagtctgaaaataaatgtgaatatctgggaagaaattttcttcctcatgaatgaggaatatgaatcagaatatgaattaagtaatttaatcttatctttttgacttaaactagtgcccttggcatgatgatatgtcacagtcatcggtaaaaagggagattataactctttggcttcatgctcaaagcatacctctttaaattaagcttcccatgtagmaagaagcacatcactggtaggatgaattgttccactccttttgagtgaagcaagggacagctcccaaatagaggaattggcactatcttaggctacatgctgtgtcagtaggctgaactctacagt

SEQ ID NO: 630317 - DNA, 610 bp, Homo sapiens
aataaaataaataacagaagaatcacataccctataggtacttataaaaaatatgtttctaagaaaaaaagataaaaatgttaaatatgtagaacaataagaatatgaagtatcagyaggcagtgtttgattatttgaagtgcaatgtcagtctgcttcctcatccagttctgaccaaatatcattttcattactaatagagacctacttagataatatgggttaaagcctgctaatcatgtgaccttgctaacattgcacctgagaattaggtgcatgaccattccagtcattccagcacttgaagcaggtctcccctctactgccccctgcccctagagaagtagaaaagaagacctgctttctacaagtaggctcactaggaggagctgtagagctgaagacttggtaactcagcatgcctggttagttctttccaaactctccatcagataactccatttcctggggccaagaaaattaaagggcagggaggataccaggagtatgacatggcatgagtgtcacaaagatggaaaacatctagaatgaggccaaattacctcacaaacaaaattcaagagtttgtatttttttaaccacaaagctt

SEQ ID NO: 630318 - DNA, 610 bp, Homo sapiens
aataaaataaataacagaagaatcacataccctataggtacttataaaaaatatgtttctaagaaaaaaagataaaaatgttaaatatgtagaacaataagaatatgaagtatcagcaggcagtgtttgattatttgaagtgcaatgtcagtctgcttcctcatccagttctgamcaaatatcattttcattactaatagagacctacttagataatatgggttaaagcctgctaatcatgtgaccttgctaacattgcacctgagaattaggtgcatgaccattccagtcattccagcacttgaagcaggtctcccctctactgccccctgcccctagagaagtagaaaagaagacctgctttctacaagtaggctcactaggaggagctgtagagctgaagacttggtaactcagcatgcctggttagttctttccaaactctccatcagataactccatttcctggggccaagaaaattaaagggcagggaggataccaggagtatgacatggcatgagtgtcacaaagatggaaaacatctagaatgaggccaaattacctcacaaacaaaattcaagagtttgtatttttttaaccacaaagctt

SEQ ID NO: 630319 - DNA, 610 bp, Homo sapiens
aataaaataaataacagaagaatcacataccctataggtacttataaaaaatatgtttctaagaaaaaaagataaaaatgttaaatatgtagaacaataagaatatgaagtatcagcaggcagtgtttgattatttgaagtgcaatgtcagtctgcttcctcatccagttctgaccaaatatcattttcattactaatagagacctacttagataatatgggttaaagcctgctaatcatgtgaccttgctaacattgcacctgagaattaggygcatgaccattccagtcattccagcacttgaagcaggtctcccctctactgccccctgcccctagagaagtagaaaagaagacctgctttctacaagtaggctcactaggaggagctgtagagctgaagacttggtaactcagcatgcctggttagttctttccaaactctccatcagataactccatttcctggggccaagaaaattaaagggcagggaggataccaggagtatgacatggcatgagtgtcacaaagatggaaaacatctagaatgaggccaaattacctcacaaacaaaattcaagagtttgtatttttttaaccacaaagctt

SEQ ID NO: 630320 - DNA, 610 bp, Homo sapiens
aataaaataaataacagaagaatcacataccctataggtacttataaaaaatatgtttctaagaaaaaaagataaaaatgttaaatatgtagaacaataagaatatgaagtatcagcaggcagtgtttgattatttgaagtgcaatgtcagtctgcttcctcatccagttctgaccaaatatcattttcattactaatagagacctacttagataatatgggttaaagcctgctaatcatgtgaccttgctaacattgcacctgagaattaggtgcatgaccattccagtcattccagcacttgaagcaggtctcccctctactgccccctgcccctagagaagtagaaaagaagacctgctttctacaagtaggctcactaggaggagctgtagagctgaagacttgstaactcagcatgcctggttagttctttccaaactctccatcagataactccatttcctggggccaagaaaattaaagggcagggaggataccaggagtatgacatggcatgagtgtcacaaagatggaaaacatctagaatgaggccaaattacctcacaaacaaaattcaagagtttgtatttttttaaccacaaagctt

SEQ ID NO: 630321 - DNA, 227 bp, Homo sapiens
aagcagtgaaaattatgcccttagtgttccataaaggatttcaattatttgttcycataaattgtattgctttgcagtgtaaactgtacttccaaagcttttcctcgtgatcaagaaagaaataattctcagagaggtgagaaaaagcagtaaatgctggattcttgatcagagatgctaatgatcctaggccattctggcttcagtaaatggagcagtcagcaata

SEQ ID NO: 630322 - DNA, 227 bp, Homo sapiens
aagcagtgaaaattatgcccttagtgttccataaaggatttcaattatttgttcccataaattgtattgctttgcagtgtaaactgtacttccaaagcttttcctcgtgatcaagaaagaaataattcycagagaggtgagaaaaagcagtaaatgctggattcttgatcagagatgctaatgatcctaggccattctggcttcagtaaatggagcagtcagcaata

SEQ ID NO: 630323 - DNA, 227 bp, Homo sapiens
aagcagtgaaaattatgcccttagtgttccataaaggatttcaattatttgttcccataaattgtattgctttgcagtgtaaactgtacttccaaagcttttcctcgtgatcaagaaagaaataattctcagagaggtgagaaaaakcagtaaatgctggattcttgatcagagatgctaatgatcctaggccattctggcttcagtaaatggagcagtcagcaata

SEQ ID NO: 630324 - DNA, 551 bp, Homo sapiens
ctgttcacatgacaaacccagtgtgattttaggtgattttaagcttagtatgaaccagttgtgtacctcagctaccaaaatattctgaataatttaaaagatgttcgtagaaatatgctgtctgctgtaagagaggtgatagtgccactgtggtctgctctgctgaggtcacaaatattttgttctaagcatggcatattaaaaagatytttaactggatcatgtgtagaagaaggcaacctggattaatagtcttcatatcatgttatatgaacagtggttaaaagatctagaactgttagcctcaaagggcacaggaaaatagtggtaggaacaggatggttttgttttgtttgaataacatcatgataaatctttgaaggggtggcattgggaaagaagagtccatatgtcctttgttgttatggagtatcggattaggtctaatggactgaagctataagaagatagattttttttttgtctcattgtcagaactgtctttaatagtcaaggtatattgagaggtaatgagctttctgtccctaaaa

SEQ ID NO: 630325 - DNA, 560 bp, Homo sapiens
cacaggaaaatagtggtaggaacaggatggttttgttttgtttgaataacatcatgataaatctttgaaggggtggcattgggaaagaagagtcmatatgtcctttgttgttatggagtatcggattaggtctaatggactgaagctataagaagatagattttttttttgtctcattgtcagaactgtctttaatagtcaaggtatattgagaggtaatgagctttctgtccctaaaacattgggattttattcatttataagcaaatattagtacctgcccaggtgtggtagctcccacctgtaatcccagcactttgggaggccaaggtaggaggatcccttgagcccagcagttcgaggctgcagttcatctagcctggatgacagagcgagactctctccaaaaaaataatatatgtatatgtacctacaatgtgccagacactgctggttctaaaatagattaccttaaaaggcatgtgttctcagccagtggaagtattcaagcaaagattgcaaaaatgatttttgcattgggtgggaacttgaactggatg

SEQ ID NO: 630326 - DNA, 470 bp, Homo sapiens
tcatgcttcttttgtgtgatcttaggaaagttgcagatctccaagcctaattttcctcacttacaaaaaggcagtaataatactactttcctcataagaacctgagttcatactttataaactataacacattaacaaagactagctcctgtaaagagctaaagtataaggggcttaaaaaaatattcaatgcttttgttctttactcactgtactctaaatgctctccagtattggcatcacctcactgrttctcccttagcgtgtctcttaaatgtgtaggaatctagtttaggtgcaaacctgaaacaatacattccaggaatggccagcctgcctccctccttagctacagattaattacatcttctggagtgacattttggctgtattttccagtgaggcttctcttctactctactccccaagcctccccttggccatcctgctaagaagactgtcctaaccca

SEQ ID NO: 630327 - DNA, 470 bp, Homo sapiens
tcatgcttcttttgtgtgatcttaggaaagttgcagatctccaagcctaattttcctcacttacaaaaaggcagtaataatactactttcctcataagaacctgagttcatactttataaactataacacattaacaaagactagctcctgtaaagagctaaagtataaggggcttaaaaaaatattcaatgcttttgttctttactcactgtactctaaatgctctccagtattggcatcacctcactgattctcccwtagcgtgtctcttaaatgtgtaggaatctagtttaggtgcaaacctgaaacaatacattccaggaatggccagcctgcctccctccttagctacagattaattacatcttctggagtgacattttggctgtattttccagtgaggcttctcttctactctactccccaagcctccccttggccatcctgctaagaagactgtcctaaccca

SEQ ID NO: 630328 - DNA, 470 bp, Homo sapiens
tcatgcttcttttgtgtgatcttaggaaagttgcagatctccaagcctaattttcctcacttacaaaaaggcagtaataatactactttcctcataagaacctgagttcatactttataaactataacacattaacaaagactagctcctgtaaagagctaaagtataaggggcttaaaaaaatattcaatgcttttgttctttactcactgtactctaaatgctctccagtattggcatcacctcactgattctcccttagcgtgtctcttaaatgtgtaggaatctagtttaggtgcaaacctgaaacaatacattccaggratggccagcctgcctccctccttagctacagattaattacatcttctggagtgacattttggctgtattttccagtgaggcttctcttctactctactccccaagcctccccttggccatcctgctaagaagactgtcctaaccca

SEQ ID NO: 630329 - DNA, 566 bp, Homo sapiens
aattctaactgtgaagaggaatcctgtagtggaaggatcatgaaacctggagtcagaagttccgtgattatgtcctgggtctgcttcatgcttcttttgtgtgatcttaggaaagttgcagatctccaagcctaattttcctcacttacaaaaaggcagtaataatactactttcctcataagaacctgagttcatactttataaactataacacattaacaaagactagctcctgtaaagagctaaagtataaggggcttaaaaaaatattcaatgcttttgttctttactcactgtactctaaatgctctccagtattggcatcacctcactgattctcccttagcgtgtctcttaaatgtgtaggaatctagtttaggtgcaaacctgaaacaatacattccaggaatggccagcctgcctccctccttagctacagattaattacatcttctggagtgacattttggctgtattttccagtgaggcttcycttctactctactccccaagcctccccttggccatcctgctaagaagactgtcctaacccacatgccttcaa

SEQ ID NO: 630330 - DNA, 608 bp, Homo sapiens
gctgctctcattcttttcattgtttgcacaaagacaatgacaaatcacaatgaattataagtcatttccataaattcaagaaaggtttttgtgttattaaagtgtttattattttaagtgggcttctctacttgttaacctcggtgtttgtgttttctcttctctactacttaattgcctctctacaacaaagattactgctattactacaccttctattcctatgtggtaggtgctaggctgcatttccttaagtttttatagaacttcatcttcatagcaactctgtttttgttttgttttgttttgttttgagttttgtttttttgagacggagtttcgctcttgttgcccaggcgctggagtgcagtggtgtgatctccgctcactgcaacctccgcctcccaggttcaagcgatttttctgcctcagcsttctgagtagctgggattacaggcacccgccacgcccggctatcttcgtagtaactctgtaaagaagatattatttaaccaactttcaggtgttgaaactaagtctcaaagaggataggtggtttatctaaggtcattcagtaatgatatagtttggatatgtgtcctagccca

SEQ ID NO: 630331 - DNA, 634 bp, Homo sapiens
catccgtttggtgctgttctcacaatagtgagtgagttctcgcaagatctgatgatttaaaagtgtgtggcacctgctacccttcacgctggctcctgctctggcgatataatgtgcgtgctctctgccttctaccataattgtaagtttcagcctccccagaagccaggcagatgtcagcactgtgcttcctgtacggcctacagaactgtgagtaaataaaaccattttttttttaattaccyagtctgagatttctttaaagcaatgtgagaacggcctaccacaagcagataagtggcagggtcagaattttggccaattatctgccaaacttccaagctttgctcttaattattctgttacattctttcagttgatataaagccattagttgcaataaaatttaaaatagacaatagatgttctgttgcagttatgatagttcctttatttcctttaattcttgtcatatccattggaataaaaagctgcaacccagctttttcacagagtactctcttggggtagaaaaggccctatcatgctggttcttactctctggatgaaaacttcatcagcttcctatcacaggactccagggcacatagtcaactggatcagagaaggcaag

SEQ ID NO: 630332 - DNA, 578 bp, Homo sapiens
tgtacactaacaatgaactatctcaaaaagaaactaagaaaacaaccccatgtacgacagcatcaaaaaataaaatacttaggagtaagtttatccaagaaaatgaaagatgtgtacactgaaactatacaatattgataaargtaactgtagaacacaaaaataaataaaaagatatcctgtattcatagattagaaaaattaatgtcgttaaaattactatactacccaaagaaatctacatattcaatgtaatcctatcaaaataccaagacattcttcacaaaaatagaaaaacagtcttcaaattcatacggaactacaaaagaacctgaatagccaaaacaattttgagcaaaaagaacaaagcatcatatttcctgatttcaaaatatactacaaaactatagtaattataatggcatggtaatggcataaaagaagatttattgttcattgaaacagaattgagagcccataagtcaatccaataatttacattcaattaacttttgacaaagatgccaaaaacaatggggaaaggacagtgtctgcaattagtcgtttggggacaattg

SEQ ID NO: 630333 - DNA, 461 bp, Homo sapiens
acctaatatcttcttctgctccaggatcccacccaggatactatattacatttaatcattctgtctccttaggttcctcttgcctgtgatagtttttcagactttctttgtttttttgatgaccttcacaacttygaggagtactgctcaggtattttgtaaaatgtcccacagttgatatttgtctgatttttttctcatgattaaactgggatatgtgttttgggatggacaaccctagaggtaaagcaccattctcttcacatcatatcaaaggtgtagagggactcaaaaatgtaccccaaagtatggtgccttgtgatgctgagtattttgaagtaaaggagattggaaggcctcagaagcaaagtctctggcccctctttctcctgtgaaataaaccatagaaactagactccctcttccccaagatcataaaaactagaacctttcttttccaa

SEQ ID NO: 630334 - DNA, 612 bp, Homo sapiens
tttctttgttaatctgtcttttgttataggagtgttggccatgacccttatgatgggtagagagcaattatcacacctctatcacccaaaaagggctatgctattaacataacttaccattgtgaatgttaaccttgatcacctggcagaggtagtgttggtcaagtttctcaaactgttaaatgatttcaccatgtttttatactgcactctttgaaaagaagtcactgtgtgcatctcatacttagtgagtggggagttatatatagtaccttcaagacagagtatctacataattatttgaattcttttacatgatagattyatatatttctctccatttattaatttgtatatttatagattatatctgtacagactcctctatatttattttatacaactttattttgtggctcaaactcttccagctttagcctttaggagtgatttcagttgactactctgttcctttgaaatatctctaacattgtgggtggttgtcgtttctttgaacatatccttagtttatggcactaaaagatgctcaacattcatcttgtatatttcttaccccagccctagaacctgccgtttcttcgaggaacccca

SEQ ID NO: 630335 - DNA, 616 bp, Homo sapiens
acggctgccaaaaccatgctatagaacacagggcacttgctgggcaatggattyctttgctggtacatctggctttgctgcccctgaaaactaaatattgttatatcaactgccactgcccatttctaggatggtttctgattgtccctgcttatttgtgtcactatctcctgtttcgaagtcatgaatgagtatgtcagattggcagaatatttatcatatggtcatactctaactttagaaaaagccgagaaacaaagtttaggtatctaaaccattgtcattggaggtaagctctgtctcccatcaagactcattaagcccacacttcacctatcacaacatgaatgtttaaatcattgaaagcctcccaccagaaccaaaaaaatgaccaaattctagcactgtttccaatttagttttatacgttctttctctggtctttctttgggaatatatttaatttacaactatgactcaattgtcactcaaccaatagttacctttattttgcagcattctggaggttcaaaactcaatgtgtaagttttattcacctgctaagaaattattttttcaaagctagcctcaatatttattttaaatgagtgaactt

SEQ ID NO: 630336 - DNA, 519 bp, Homo sapiens
atcattatttcttttgctttttcatagatgaggaaacagagtcataaagagtataaattgattttcccaggccacttacctagtatatggtayaatatatacacaatttggggctaacaggagaggctataggtcatcaaccttgttctgccctttgagggatgattaattgaaaagatatgggtttaattgaacttttctgctttatctgaagactgtagccaatgcacaaaatgctaacacagctgacaaaggagatcagtttttggaaaatcttaagatcactaagaacagagaaatttgcaaagggtggaggtgtggtaagaggaggggtttcctgtaagtctcaagtgacatgtcttctctttcttctatgaaaaccacagtacataaaaaagggagcttattggtaactatttttcaaagattttccatttaggattttatgatttagtgtctgtttccatttccaaaacacgctagactttcatgggttcatgcttttaaatatgctattgt

SEQ ID NO: 630337 - DNA, 519 bp, Homo sapiens
acttcattctaacgtgccctcactgtcacatcacagcaatctctctatttcagttctagactaagtcataatcttctgttgttgaaactactgcaatagccacttaacttaattctaactcccccacttgccttcttctaatccacagagcaattaaagtgaccatttaaaaagatgcttataacacttcagaagcttaatatttctctccagttaaattccaaatcctcaacaaagacctcctgttttagcccctgcctgcctttccagttttatttcatgctattctgcaacttacttycagtactttggcaagtaaattcaatgaatccgtttccactagataataaatttcatgaagataaattctgcattaattttgagaaattatattcccaatgtctggtccatagtaagaataggataaatattaaacggaagaatgacagtgaaactcatcaaaaattaaatctaagcaaatagagaaaagtaaaaacagaataaacatattttatgctt

SEQ ID NO: 630338 - DNA, 519 bp, Homo sapiens
acttcattctaacgtgccctcactgtcacatcacagcaatctctctatttcagttctagactaagtcataatcttctgttgttgaaactactgcaatagccacttaacttaattctaactcccccacttgccttcttctaatccacagagcaattaaagtgaccatttaaaaagatgcttataacacttcagaagcttaatatttctctccagttaaattccaaatcctcaacaaagacctcctgttttagcccctgcctgcctttccagttttatttcatgctattctgcaacttacttccagtactttggcaagtaaattcaatgaatccgtttccactagataataaatttcatgaagataaattctgcattaattttgagaaattakattcccaatgtctggtccatagtaagaataggataaatattaaacggaagaatgacagtgaaactcatcaaaaattaaatctaagcaaatagagaaaagtaaaaacagaataaacatattttatgctt

SEQ ID NO: 630339 - DNA, 417 bp, Homo sapiens
agtagaaaaatgagcagagaaaaaagcaaggaatattagsgctttggtgatattataatgttttaactctgccctgccaatcacctctgttttgtgttagggaactgacagaggaatatacagtaaacaatatgcaaaggggagagaaggttctattaacagcgatgtcagtgactaactttagtttggggttctctgctaaagctaggttggtgcacaagacttaagcaatagtctcaagtgaaactttcaatggttagaaaaaaatgactccaaatctggggcacttaccacccttagtctatcaaattgtgaaaggaaggcaaagagagaaaagaagtacaacaaagatgaaagcaacctcattgacagtctagcatatgtatggcatagaagaaatggaagagagaatgagaa

SEQ ID NO: 630340 - DNA, 417 bp, Homo sapiens
agtagaaaaatgagcagagaaaaaagcaaggaatattagggctttggtgatattataatgttttaactctgccctgccaatcacctctgttttgtgttagggaactgacagaggaatatacagtaaacaatatgcaaaggggagagaaggttctattaacagcgatgtcagtgactaactttagtttggggttctctgctaaagctaggttggtgcacaagacttaagcaatagtctcaagtgaaactttcaatggttagaaaaaaatgactccaaatctggggcacttaccacccttagtctatcaaattgtgaaaggaaggcaaagagagaaaagaagyacaacaaagatgaaagcaacctcattgacagtctagcatatgtatggcatagaagaaatggaagagagaatgagaa

SEQ ID NO: 630341 - DNA, 479 bp, Homo sapiens
tagggctttggtgatattataatgttttaactctgccctgccaatcacctctgttttgtgttagggaactgacagaggaatatacagtaaacaatatgcaaaggggagagaaggttctattaacagcgatgtcagtgactaactttagtttggggttctctgctaaagctaggttggtgcacaagacttaagcaatagtctcaagtgaaactttcaatggttagaaaaaaatgactccaaatctggggcacttaccacccttagtctatcaaattgtgaaaggaaggcaaagagagaaaagaagtacaacaaagatgamagcaacctcattgacagtctagcatatgtatggcatagaagaaatggaagagagaatgagaatatgggataaggtcctgcatccacttttctcccagggacaaaagacaatgagagatgaaggtactaagaggcacgcaaactgtgtcggggtgcccagt

SEQ ID NO: 630342 - DNA, 479 bp, Homo sapiens
tagggctttggtgatattataatgttttaactctgccctgccaatcacctctgttttgtgttagggaactgacagaggaatatacagtaaacaatatgcaaaggggagagaaggttctattaacagcgatgtcagtgactaactttagtttggggttctctgctaaagctaggttggtgcacaagacttaagcaatagtctcaagtgaaactttcaatggttagaaaaaaatgactccaaatctggggcacttaccacccttagtctatcaaattgtgaaaggaaggcaaagagagaaaagaagtacaacaaagatgaaagcaacctcawtgacagtctagcatatgtatggcatagaagaaatggaagagagaatgagaatatgggataaggtcctgcatccacttttctcccagggacaaaagacaatgagagatgaaggtactaagaggcacgcaaactgtgtcggggtgcccagt

SEQ ID NO: 630343 - DNA, 713 bp, Homo sapiens
cacaattggaagcacttggtgtcctggaaagtgccaagtacaaaagactcaggtttgattcctactgctccatttactaactaaatagaggaaagttgcctaaaccctcactttttgtttstttgcctatttttatatgtattttaatgggagtacttttgtacaaatacctcattaaggctaagaacacttatcatatttagactgcaggtttcaaatgttgattctgccacttcacacttactggctgtgtaaccttaggcaagttttatatcccttttgtcctccagttttctcatctgtaaaatacaagtataacatagctcatagggttgttctgaggttcaaacgagttcctgtatgtgaagtactttgaataatacctggcatacagtggtatatgagctaactctcactactgctaccatactacatttcttgcagttttgttggagaaataaatatgatatatatatatatcaaaattctcagcatagcactggatgcatgactgtcatccaataaattgaaattattactgaagcaatcagtcattttttattattctaagagcctcagaagcatcactctagtgaagaatagtagaacaataatgtatgttaaatgaagagaaattttggaagaaagagaggcagcatagccatcttaagaaaagtaatagctatttgtcatatgtagaagttgtcttagtc

SEQ ID NO: 630344 - DNA, 655 bp, Homo sapiens
gatctcctgacttcgtgatccccccgccttggcctcccaaagtgctgggattacaggcgtgagccaccgcccctggccttaaaaactttttattttgagttaattatagaattatatgcagctgtaagaaataatagagagaaatctgatgtgctccttattcaatttccctcaatggtaaccttgaaaaaatattatgtaatatagtagaatatcacagctaggatattggtattgaaagggtcaagatacagaatatttacatattgaagcagtttggtatttttggaataaatttcatttgtttcaatgcataaaattctttttatatgcagctgaattatattcgtcaatattttaagaatttttacatatatgtacatgagggatattgatctgtctcattttcttggcatccttttatctggtttcaatattaaggtratactggatttataaaatgactcagaaatgttcccttctacattctggaacagattgtatagaatttatgttaatttgttaaattcctggttgattctcaaggaaaacattctattccttaggatttctattttggtagttttaaaattaccaattcaatttcctttacatttatagggctattcaagttgtctatttcttattgggtgag

SEQ ID NO: 630345 - DNA, 602 bp, Homo sapiens
aatttgtctttgataccttgaagttaggccaggtgtggtggctcaagcctgtaatcccagcattttgggaggctaaggtggtggatctcttgaggtcaggagtttgagaccagcccagccaatatggagaaatcccatctctactaaaaatacaaaaaaattagcgaggcatggtggcacacacctatagtcccagatactcgggagactgtggcttgagaatcctttgaacccgggaggcagaggtttcagtgagccaagattgcaccgttgcattccagcctgggctacagaccaaaactcctgaagtcttttaactcrtatttgtttaataaatgcataaaatagagttataaattttatttgcaatatgtattgctaatgtgtagtgatatttttcccaagacttatcccaaggaagtgaaatgtctatatgtcttaatgcctgactctatacttagaaaaggtgtattattattttgctccataaagatcttctaggaccctcaattgaattcttggaaaatgacattatcccttttaaatagccattttccacagcagtgagttcaaatcatgaaaaattaaacaaaagctcttta

SEQ ID NO: 630346 - DNA, 602 bp, Homo sapiens
tatgtaataggagctagatgtacataaattctcatgataacctgagcatgtaattattgaagaaattttataaatgaggaagtagatgcccagaattttagaactgatactgaaatccagttctatatgtcttcaatatcagtgttttcattgaccctaaaggactctgcactaatctgggaagtttctctctttctctctttccagtgaatcttcctaagacagtacttgccataagataatacctgcaccttttaattcagagtgaagatgacacaaggcttacataaattcactttactttgtcaatattcatatttggcatgaacaataaattgcatatgccagtacaactagattcctcagggatctagaactagaaataccatttgactcagccatcccattactgggtatatacccaaaggattataaatcrtgctgctataaagacgcacacatatgtttattgcggcactattcacaatagcaaagacttggaaccaacccaaatgtacaacaatgatagactggattaagaaaatgtggcacatatacaccatggaataccatgcagccataaaaaaggatgagttcatgtc

SEQ ID NO: 630347 - DNA, 616 bp, Homo sapiens
gactgtgtgccagacaatatgctatgttgcatctgtttgcttctcacacactttgcctactaaagtgtgtaagaatgagaataaattatgggaaaaaataatttacaaacataaattatttgtagtagcaaattatttgtagtaaatctgctgttccctcctcacctgtgtgtattagactctcacttgaaaaccactggctgagttgacacatcttgagccactttttttctttgacttgagaccctagaygagtgatgttcccctgccttatttctgcaactaacccatgcttcttaataataaaatatatgctttgtcacttatggctgaaaaaacagcaaaatgctccagtttccttaaagatgtagcttcgctttgcaatgtcattaatatcagcattctgagtactgttgttaatccctgaagagtccagtgggtcacccaatcctcccagatggtgactttgaaattgtgtaccttagatttgttatataggctctgagattacctggcattatgtcttgccttcttatgtcaaaagaccaaactggtattgtccactttaaagaaactctcaacccactgttgattatcagagtgcaatggaaagaac

SEQ ID NO: 630348 - DNA, 556 bp, Homo sapiens
ggtagtggtagccaagacccatcccaggaaaacaaagaacaaaaggtctgcaggatgcatatgaaccaagcatatgctccattgtccctataacttcacttataaagcacaaacccaaagataagattaataagaatttcaacaccaagaccacagatcattaaacctcaaatgtagggtctgcttctgagcatggagcattgtgygatggcactgcttttatattggcaattctacctccaaaaaatatctcgagtcaggcaaccattctccatgtgctcacatcctgtgtgatcctgctgctaaagtcagatggcctactttctctggacactgcttgtgcttctccattccatgactctgattgtggctaagcatgcccactctttgccatgcatctaatatcctacccattctttaaggccaaagcaaataattagtaaaaacaggcattgttgactctgactttaaaagtaactcaaaaggggctgactctgaatgtaaaaacatttcaggaatccttcaccaaattatttttcttgtagtttcatttata

SEQ ID NO: 630349 - DNA, 491 bp, Homo sapiens
ccctatggggatgacatagtctgagctgatggtatgctttgctaaagtgaggtaggcaaaaaatttgtccttctctggggcactcaaatcgaagatgtttcttctcaccaagagtcgtctctctgtgcagtttggtccccaaaagccaaacttgcagtttccacagttgaatcccatgaagttgccagagcactggcaggtcctattataaaagacggaaggccacgactcccggtcatccacccctgtgaagggaaattgaggcccaagtggtgcattggacaraaggatattctgacaggaacctctgcctgaaagctggccacagggactcctgtccccgctccacggtggacagcattccttctccatcaggttcttagaggagacacaggctctagggaaatggccagcggaggtctggaaactccacagcaggcagtacaaaacagccaggagcattcttcctctagtcctcacaaggtctgcag

SEQ ID NO: 630350 - DNA, 491 bp, Homo sapiens
ccctatggggatgacatagtctgagctgatggtatgctttgctaaagtgaggtaggcaaaaaatttgtccttctctggggcactcaaatcgaagatgtttcttctcaccaagagtcgtctctctgtgcagtttggtccccaaaagccaaacttgcagtttccacagttgaatcccatgaagttgccagagcactggcaggtcctattataaaagacggaaggccacgactcccggtcatccacccctgtgaagggaaattgaggcccaagtggtgcattggacagaaggatattctgacaggaacctctgcctgaaagctggccacagggactcctgtccccgctccayggtggacagcattccttctccatcaggttcttagaggagacacaggctctagggaaatggccagcggaggtctggaaactccacagcaggcagtacaaaacagccaggagcattcttcctctagtcctcacaaggtctgcag

SEQ ID NO: 630351 - DNA, 513 bp, Homo sapiens
gacagaaactgcatggtctcacttatttgtggagtcaaaagaaaatttaaactcctagaattagagagtagaggatggttactgggggctggagctggggtgggttggagggaagttggacaaatgatacaaaatttcagttaagtataagaagtaggctgagcgcagtggatcatgcctgtactcatagcactttgggaggctgggatgggtggattgcctgagctcaggagttcgaggccatgctaggcaacacagtaaaaccccatttytactaaaaatacaaaaatttcgccaggcatggtggtgtgcgcttgtgatcacagctgctcaggaggctgaggtaacagaatctcttgaacctgggagaccaaggttgcagtgagctgagattgtgcccctgcactccagcctgggcaacagagtgagattccatctcaaaaaaaaaaaaaaaaagtaaattaagagatctgttgtacagcgtgatgactaaagttaatgacaatatattgt

SEQ ID NO: 630352 - DNA, 564 bp, Homo sapiens
tctgtactcattattggtctattaagattttctattttttcatgattcagttttggacattgtgtgtttcttggaatttatctattttcttctagtttacccaattcgttgttcttagtagtctcttatgatttttatatttctrtggtatctgttgtaatgtctcctctttcatttctaattttatttatttgcatcttcttttttttcttattctggataaaggtatgtcaattttgtttaccttgttaaaaaccaactcttagcttcatttatcttttgtgctattttcatttacttcttctctgatgtttattatttccttccttctgttaactttaggcatagtttgacctttattttcagttttttgaagtacagcattggattatgtatttgaaatattttttgttaatgtaggcatttattgttataaatatccttcttaaaaatgcttttgctgcatcccataagttttagtagtttgtgtttccattttctcttctctaaaggttttaaatttcctttttaatgttttaattgacccatttgttgttcagaaac

SEQ ID NO: 630353 - DNA, 564 bp, Homo sapiens
tctgtactcattattggtctattaagattttctattttttcatgattcagttttggacattgtgtgtttcttggaatttatctattttcttctagtttacccaattcgttgttcttagtagtctcttatgatttttatatttctgtggtatctgttgtaatgtctcctctttcatttctaattttatttatttgcatcttcttttttttcttattctggataaaggtatgtcaattttgtttaccttgttaaaaaccaactcttagcttcatttatcttttgtgctattttcatttacttcttctctgatgtttattatttccttccttctgttaactttaggcatagtttgacctttattttcagttttttgaagtacagcattggattatgtatttgaaatattttttgttaatgtaggcatttattgttataaatatccttcttaaaaatgcttttgctgcatcccataagttttagtagtttgtgtttccattttctcttctctaaaggttttaaatttcctttttaatgttttmattgacccatttgttgttcagaaac

SEQ ID NO: 630354 - DNA, 278 bp, Homo sapiens
ctgccacacttactcatcggcttggggctaagacttcttcatgtggaagggatcagcacggagagaattttcacagctgggttatcacctcctaaaaatagggctgagtgacggatgggagctgtcgctaggcccttgagctgtggggagtagatgggagggagggagatagggcagggtrggggggtccacagaccccagaccccacaggcctcagcccagtgccctccacctcagtccagcctcgggtaggcctgaaccccttctccctgatgatg

SEQ ID NO: 630355 - DNA, 202 bp, Homo sapiens
gacttgggagatacgaaccaggagccyccgtgcaagtctttgagttggaaatcagttatctgaggctgggttctgacgatgtcaacaaaggcgaagtggttctgcggtcagagaagcagcagcacctgtggagacgtggcaacataaccatggtgtcagagggacagcggctcctttggagcacctgtcccgacagatgtgc

SEQ ID NO: 630356 - DNA, 634 bp, Homo sapiens
gaaaactgcatttactcataacagcccattctttgcacagaataggcttgacatggaataaacatatgggcatttcttgtgctgcaaatgccatagtgaacaaaacagccaatacctctactttcacggatttcaattctaactggaaaaaatggacaaaaaaaaaaaaaaaaaacaattacatctgacaatcacgtggtgaaaatgttgacaacaaaatgtagcaaagtaatgtgatagaaaataactcaaagagatggagaatggctttacatggatggctcaagaagacctctaaggaggagaaattgaactgcagactgagtaatgacaaggaccaagccatgtgaagatctaaaagatgatgagcatttggggaataaagaagagctagtacagtggcccaagggcaagaatgaggtcactgcagctggagcacagtgaacaagcgagagagtcgtgctggatgagatcaaacagatacatgtttgagtggggaacaattgtatagactctgacaggaggtgaaaacatcaattamaattggttaaatagttttccttttacaaatcaacctagctcaacttcgctaagtgaattttttacatggggataaaagatagaaattaatttt

SEQ ID NO: 630357 - DNA, 567 bp, Homo sapiens
tactgttttacttatgactttcagctcattgttcctcaccctggataggttaaacactaaattcgtgcacttaaatctttttaaacacccaatctgaagtaatcccaccctgccttctgagttgctctctatcatgtcacagatttcacctttttaagcccttttcactctgaatttatcctttctttaaaaggtttatttattgcacatttccctgactagaatttttctttattcaaatgtgtgtcatttttctggtgtataccatagtgcctaaaagtgtaagttccaaagaaaaactacatgagctcaaatcctacctcaagtattcgctacctctgtgactaaagtaatttatttaaattttccaggcttcatccaattgtgttagaaatcaagaaaaacagtatctatttcataaggctcttgtgcagattagcaagacaatgactttctagcatgaaccacgttgwagtaaatactaataaactttagtaaaattattattataccataactttcttattagtcataaggattctattaaatttgatgtcttctttagac

SEQ ID NO: 630358 - DNA, 423 bp, Homo sapiens
aattctcaacaaggcattgatcaaaaattggctaatcaaattaatgatttaagacagtctgttatttggcttgtagatcgggtagtgagtcttgaacatagcatgaaaatgcagtgcgattggaaaacaytggatttctgtatcaccccatattcctataatgagactgatcattcatggaaaatggtcaaaggacaacttctgggtagggaagataatttatcactggacataactaaattaaagaaacaaatttttggaggctctcaagctcactattccattgtgcctggagctgaggcattagatcaggtggcagataatctttatggaataaaccccacgacttggattaagtctatttggggctccactgtagtaacttttggaattatgtttctctgtttaatcagcttgttttag

SEQ ID NO: 630359 - DNA, 587 bp, Homo sapiens
aagctttcttttgtttcagtagtttggaaacactgtttttgtacattctgtgaatggacatttgggagcgtgttgaggcctacaatgagaaggaagataacttctgataaaactagaaagaagctttctgagaaagtgttttctgatgtgtgcattcaactcacaggttttaaactttctcttgattcagcaataaggaaamgctgattttgtagaatctccaaagggatatttgggagcgcattgtggcccatggtgaaaaagaaaatatcttcagataaaaactacagagaagttttctgagaaactgctttgtcatgcgtgtattcatctctcagttttaaaccttttttgattcagcattttggaaacacttcttttgtccattctgcgaatggacatttgaaagagcattgaggacattggccaaaaagtgaatatcccaggataaaaacaaaagtaatctatcagagaaaatgctttgttatgtgtgcattcctcttgcggagttaaaccttttttttcattcagcagggtggaaacactgtttttctagattctgtgaaaggataattttgagtgcattg

SEQ ID NO: 630360 - DNA, 587 bp, Homo sapiens
aagctttcttttgtttcagtagtttggaaacactgtttttgtacattctgtgaatggacatttgggagcgtgttgaggcctacaatgagaaggaagataacttctgataaaactagaaagaagctttctgagaaagtgttttctgatgtgtgcattcaactcacaggttttaaactttctcttgattcagcaataaggaaaagctgattttgtagaatctccaaagggatatttgggagcgcattgtggcccatggtgaaaaagaaaatatcttcagataaaaactacagagaagttttctgagaaactgctttgtcatgcgtrtattcatctctcagttttaaaccttttttgattcagcattttggaaacacttcttttgtccattctgcgaatggacatttgaaagagcattgaggacattggccaaaaagtgaatatcccaggataaaaacaaaagtaatctatcagagaaaatgctttgttatgtgtgcattcctcttgcggagttaaaccttttttttcattcagcagggtggaaacactgtttttctagattctgtgaaaggataattttgagtgcattg

SEQ ID NO: 630361 - DNA, 487 bp, Homo sapiens
gtttggaaacacctttttgtccattctgcaaaaggacmtttggaagctcatggaggacaatgacaaaaaagcaaaatcccagtgtaaaaactagaaggaagctatctgaaaaactgctttgtgatgtattcattcatttctcagagttaaacctttctttttattcaggagtttagaaacactatttttgtacaatgtgggaagggatatttgagagcacattcaggtctatggtgaaaaagaaaatagcttcagataaaaactagaaagaaacttttgagaaactgctttgtaatgctgcattcatctcacacaattaaaatttattttgattaagcagtttggaaacactgtttttgtagaaactgtgatggcatatttgtgagaacactgaggtcaatggtgaaaaagcaaatatgacgtgataaaaactagaaggaagctgtctgagaaaccactttgtgacgtgtgcattcaactcagagag

SEQ ID NO: 630362 - DNA, 645 bp, Homo sapiens
cagtgtttccaaacagctaaatgaaaagaaaagtttatatcagcaagatgaatgcacccatcatgatgaagtttctcagatagcttccttccggtttttaattcagcaatatttactttttcgcatttcacctcagttagctcccaaatatcccttcgcagattctccaaaaacactgtttccaaacgagtgaatccaaagaaagttttatctctctgagatgtatgcatacttcacaaagcagtttctcagaaagctttttttctagttttcatctgaagatatttactttttcaccataggactcagtgccctcccaaatatcccttcacagattctaccaaaacagtgtttccaaactgctgaatgaaaaagaaaggtttagctctgtgagatgaatgcacacaacacaaagaagtttctcagatagctttctttttgtttttatcttaggatattcacttttttgtctctggcctcaatgagctccaaaatgtccatttgcagaatggacaaaaaaagcaatccaaactgctcaatccaaagaaagttttaactctgtgagatgaatactcaaatcactaagcagtttctcagaatgcttttttatrgtttttatctgaagatatttcctttttcaccata

SEQ ID NO: 630363 - DNA, 587 bp, Homo sapiens
gcagtttctcagaaatcttctttctagttttcatctgaagatatttcctttttcaccataggcctcaatgctttctcaaatatcccttggcagattgtaccaaaacagtgtttccaaattgctgaatgaaaagaaagatttaactctgtgaaatgaatgcacacatcacaaagcactttttcatatagctttctcctagtgtttatcctgggatattcacttttttgcctttggtctcaatgagctcccaaatgtatattcacagaatggataaagacagggtttccaaactactaaatgaaacggaagtttttcatctgtgagatgaatgycacatcacaaatcagtttctcagatatcttccctcgagtttttatccagggatgtttgctttttcaaattgacctcaatgagttccaaaatatccctttgcagattctacaaaatcagtgattcaaaacgactggatgcaaagaaatatttaactctgtgacataaatgcacacatcacaaagcagtttctcacaaagcttttttctagttttcatctgaagatatttcttttttcaacatacgcctcagtgtac

SEQ ID NO: 630364 - DNA, 492 bp, Homo sapiens
aaactgctgaatgaaaaggaaggtttaactctgtgagatgaatgcacacatcacaaacggtttctcagataacttccttctagtttttatcatgggatattcactttttcaccatttgcctcaatgagttcccaaatatccattcgcagaatggacaaaaatagtgtttccaaactgctgaatccaaggaaaggtttaactcagtgaggtgaatgcacacatccccaagcagtttctcagaaagctcctttctagtttatatctgaagatattcytttttcaccagagtactcaaagcactcccaaatatcccttgaatattctaccaaaacagagtttccaaaatgcttaattaaaggaaagttttacttctgtgagatgaatgcacacatcacaatgcagtttctcaaatagcattcttctagtttttatcctggcatattcacattttcgccattggcctcaatgagctctcaaatgtccattcacaga

SEQ ID NO: 630365 - DNA, 379 bp, Homo sapiens
caaactactgatatccaaagaaaggtttatctctgtgagaagaaggcacacatcacaaagcagtttcycaaaaaacttctttatggttttcatctgaagatattttctttttcacggtaggtctcaatgtgctcccaaatatacctttgcagattctcctaaaacagtgtttccaaactgctgaatccaaagaaagttttaaatcattgagatgaatgcacacatcacaaagcagtttctcagaaatattctttcttgtttttatctgaaggtatttccttttccaccataggctcttgtgcactctgaaatatgccttcacagattctactgaaacagtgtttccaaattgatgaatgaaaagaaaggtttatcactg

SEQ ID NO: 630366 - DNA, 379 bp, Homo sapiens
caaactactgatatccaaagaaaggtttatctctgtgagaagaaggcacacatcacaaagcagtttctcaaaaaacttctttatggttttcatctgaagatattttctttttcacggtaggtctcaatgtgctcccaaatatacctttgcagattctcctaaaacagtgtttccaaactgctgaatccaaagaaagttttaaatcattgagatgaatgcacacatcacaaagcagtttctcaraaatattctttcttgtttttatctgaaggtatttccttttccaccataggctcttgtgcactctgaaatatgccttcacagattctactgaaacagtgtttccaaattgatgaatgaaaagaaaggtttatcactg

SEQ ID NO: 630367 - DNA, 424 bp, Homo sapiens
aactcgttgtgtgtgcattcatctcacagagttcaacctttcttttcattcaacaatttggaaattctttttttgtagaatctgagaagggatatttgggagtgcattgaggcctatggtgaaaaaggaaatatcttcagagaaaaactagaaggaacctttctgagaaacagctttgtgttgtgtgcattcacatagcaaagttaaaacttttctttgggttcagaattttggtaactctgcttttgtaggatttgcaaagggatatatgatatctcattgaggccatggccaaaagagtgaayagcccaggataaataccagaaggaagctatcatacaagccatggtgtgatgtgttcattcatctcacagtgattaaacctttcttttcattcatcagtttggaaacactgtttcagtaa

SEQ ID NO: 630368 - DNA, 555 bp, Homo sapiens
ttcttttcactcagcagtttggaagcactcttttggtagaatcagcaaagggatatttgggagcactttgagatctacagtgaaaaagaaaatatcttcagattacaactagaaagaagctttctgagaaactgctttgtgatgtgtgcattcatctcacaaagataaaacttttttggattcagcagtttggaaacactgtttttgtcaattctgcgaatgggtatttggcagctcattgagaccagtggtgaaaaagcaaatattccacgataaaaactagaaaaacctatctaggaaacgtttttgtgatttgtgcaataatttcacagtcataaaccyttcttttcattaagcagtttggaaacactgtttgggtagaatctgtgaggggatatttgggagtgcattgaggcctatgctgaaaaagggaataccttcagataaaaaatagaaaggaactttctgaacaactgctttgtcatgtgttcattcgtctctcagagttaaaactttgtattcagcaggttggaaacactgtttttgtaaaatctg

SEQ ID NO: 630369 - DNA, 555 bp, Homo sapiens
ttcttttcactcagcagtttggaagcactcttttggtagaatcagcaaagggatatttgggagcactttgagatctacagtgaaaaagaaaatatcttcagattacaactagaaagaagctttctgagaaactgctttgtgatgtgtgcattcatctcacaaagataaaacttttttggattcagcagtttggaaacactgtttttgtcaattctgcgaatgggtatttggcagctcattgagaccagtggtgaaaaagcaaatattccacgataaaaactagaaaaacctatctaggaaacgtttttgtgatttgtgcaataatttcacagtcataaacctttcttttcattaagcagtttggaaacactgtttgggtagaatctgtgaggggatatttgggagtgcattgwggcctatgctgaaaaagggaataccttcagataaaaaatagaaaggaactttctgaacaactgctttgtcatgtgttcattcgtctctcagagttaaaactttgtattcagcaggttggaaacactgtttttgtaaaatctg

SEQ ID NO: 630370 - DNA, 572 bp, Homo sapiens
ttcctaggatctgtgaagggatatctgggaatgcattgagacctatggtgaaaaggaaatatcttcagattaaaactagaaagaagctttctgagaaactgstttgtgatatgtgtattcaactcacagtgttaaaccattctatggattgaccagttggcaaacactgtttttgtccattcagtgaatagacatttcggtgctcattgagaacaatggtgaaaaagtgaatatcccaggataaaaactggaaggaagctatctgagaatccacgttgtgatgtgtgcattcacctcatggagataaagctttcttttcattcagaagtctggaaacactgtctcacagaatccgtgaagggatactcaggagtgcattgaggcctatgttgaaaaaggaaatatcttcagagaaaaactagaaagaagctttctgagaaactgctttgtgatgtgtgcattcatctcacagagttaaacctttctgtggattcagcaatttgcaaacactgtttttgtccattctgtgaatggacattttggagctcattgaggccaatggtgaataagtg

SEQ ID NO: 630371 - DNA, 325 bp, Homo sapiens
acaggcatttgttcctttaccctcctacaaacttgacatgatctgaagttttaaactttcccgtcaaatatatctgaaattagtagtacacctttactaatatatcgtataaaatataacatcccacaaactaagattataattataaatatattggtttattatacatgtaatatggaacatgttttttcttatttggaaaatagaaaaagaaaaaattaggctatatattaaaaycaaagatacattccatatgtggaacaattttcatgtttgctagcttaactgtctaaattagaattctttaaaaactcatatggattta

SEQ ID NO: 630372 - DNA, 279 bp, Homo sapiens
aaatatcccaggataaaaactagaaggaaactatctgagaaacagcwttgtgatgtgctcattcatctcacagtgttaaaactttcttttcattcagtagtttggaaacactgttttgatagaatctgtgaagggatatttgaaagctcattgaggccataggtgaaaaagcctatatcccaggataaaaattagaaggaagttatcttacaaaccgctttgagatgtgtccattcatctcacagagttaaaccttttattcagcagtttggagaccat

SEQ ID NO: 630373 - DNA, 626 bp, Homo sapiens
ttcacttttttgccattggcctcaatgagctcccaaatgtccattagcaggaaggaaaaaaatagtgtttactaactgctgaatcaaaagaaaggtgtacaactgtgagataaatgctaaaatcacaaagcagtttcacagaaagcttctttccagtttttatctgaagatattttctttctcaaaaaaggcctcaatgggctaaaaaaaaaaggcccattggtatattctaaaaaacagtgtttccaaactgcttaatcaaaagaaagtctatctctgcaagatgaatgcacatatcacaaagcaatttctgagatagcttccttctgtttttatcctgggatattctctttttcaactttggcttcaatgagctaaytaatgccaattcacagattctacaaacacagtgtttccaatgtgctgaatcaaaaggaagatttagcactgtgtgatgaatgtacacatcaaaaagcaatttctcagaaagcttctttatagttttatctgaaggtattttctttttcatcataggcctcaatgagctcccaaatgtccatttgcagaacgtacaaaaacagtttttccaaactactgaatcaaaacaaaggttgaacactgtgaca

SEQ ID NO: 630374 - DNA, 480 bp, Homo sapiens
acatgaaagagccagaatttgccggtttcagaaacagaactagtttcyctttccagtctctgcaaagagctaagtactctaaaggtaagaaaggtcatcaaaataaatgtcatttcaaagttgtggatgttaagaccctctcgtatatactttaaactagacaaacataattctaacattcttaagagtattagctcactgcacatagactttcagcccaagtctgagaagggccagtttcaaagatatttgtgagtatgctgcttgtgagtgtactaaagcaagcaccataggcttcacttgtgaacaggaggatctattttaattgcctggtcctctctttctccattatgtgctgggcatgtggaagaaatacactgtctcaatggatttgtaaatagagaaaaaccataatttaaaaagtgcacaatagacactgcacccaaggatcccatccacattcggtctggatatagaggt

SEQ ID NO: 630375 - DNA, 480 bp, Homo sapiens
acatgaaagagccagaatttgccggtttcagaaacagaactagtttccctttccagtctctgcaaagagctaagtactctaaaggtaagaaaggtcatcaaaataaatgtcatttcaaagttgtggatgttaagaccctctcgtatatactttaaactagacaaacataattctmacattcttaagagtattagctcactgcacatagactttcagcccaagtctgagaagggccagtttcaaagatatttgtgagtatgctgcttgtgagtgtactaaagcaagcaccataggcttcacttgtgaacaggaggatctattttaattgcctggtcctctctttctccattatgtgctgggcatgtggaagaaatacactgtctcaatggatttgtaaatagagaaaaaccataatttaaaaagtgcacaatagacactgcacccaaggatcccatccacattcggtctggatatagaggt

SEQ ID NO: 630376 - DNA, 480 bp, Homo sapiens
acatgaaagagccagaatttgccggtttcagaaacagaactagtttccctttccagtctctgcaaagagctaagtactctaaaggtaagaaaggtcatcaaaataaatgtcatttcaaagttgtggatgttaagaccctctcgtatatactttaaactagacaaacataattctaacattcttaagagtattagctcactgcacatagacwttcagcccaagtctgagaagggccagtttcaaagatatttgtgagtatgctgcttgtgagtgtactaaagcaagcaccataggcttcacttgtgaacaggaggatctattttaattgcctggtcctctctttctccattatgtgctgggcatgtggaagaaatacactgtctcaatggatttgtaaatagagaaaaaccataatttaaaaagtgcacaatagacactgcacccaaggatcccatccacattcggtctggatatagaggt

SEQ ID NO: 630377 - DNA, 480 bp, Homo sapiens
acatgaaagagccagaatttgccggtttcagaaacagaactagtttccctttccagtctctgcaaagagctaagtactctaaaggtaagaaaggtcatcaaaataaatgtcatttcaaagttgtggatgttaagaccctctcgtatatactttaaactagacaaacataattctaacattcttaagagtattagctcactgcacatagactttcagcccaagtctgagaagggccagtttcaaagatatttgtgagtatgctgcttgtgagtgtaytaaagcaagcaccataggcttcacttgtgaacaggaggatctattttaattgcctggtcctctctttctccattatgtgctgggcatgtggaagaaatacactgtctcaatggatttgtaaatagagaaaaaccataatttaaaaagtgcacaatagacactgcacccaaggatcccatccacattcggtctggatatagaggt

SEQ ID NO: 630378 - DNA, 543 bp, Homo sapiens
aaatatgtaactcataaatgtatctagaatatacttcaaatactgggaaacatgccaataaatatttagtgaacttatgaatcaaagaaaaagatayaatgaagctaagcaaataaaactaagcaataacagaaacatatcaaaatgtgtgaggtttgatcaaaacagtacttaaagaaaaatgtatagctataaatgcttacatttaaaataaatgtttaaaagcagccattcaatccttcaccttaagaagctagaagaagagtaaataaaagccaaggtaagtaaaaaaaggacataaacataagatcaaaaaccaataaaatggaaaacataaaatagagaaaataaaaatagccaaaattcgtacttttataatcaaattgataaactgtcagcaagggagatcaagagaaaacaaagagaaatccaaattaccaatatcagaaataataaaacaaataatcatcccatagttcctttaggcgttaaaaggttagaaaatgatagttatgaaacgcattatttctttttttttttaag

SEQ ID NO: 630379 - DNA, 543 bp, Homo sapiens
aaatatgtaactcataaatgtatctagaatatacttcaaatactgggaaacatgccaataaatatttagtgaacttatgaatcaaagaaaaagatataatgaagctaagcaaataaaactaagcaataacagaaacatatcaaaatgtgtgaggtttgatcamaacagtacttaaagaaaaatgtatagctataaatgcttacatttaaaataaatgtttaaaagcagccattcaatccttcaccttaagaagctagaagaagagtaaataaaagccaaggtaagtaaaaaaaggacataaacataagatcaaaaaccaataaaatggaaaacataaaatagagaaaataaaaatagccaaaattcgtacttttataatcaaattgataaactgtcagcaagggagatcaagagaaaacaaagagaaatccaaattaccaatatcagaaataataaaacaaataatcatcccatagttcctttaggcgttaaaaggttagaaaatgatagttatgaaacgcattatttctttttttttttaag

SEQ ID NO: 630380 - DNA, 604 bp, Homo sapiens
gttgttggacatttgggttggtttcaagtctttgctattgtgaatagtgccacaataaacatacgtgtgcatgtgtctttatagcagcatgatttataatcctttgggtatatacccagtaatgcattatttcaattaattggacagcttagatgaattgggtagaatgtagggaaaggacaaccttytgaaaatgacacaaacagaaactgacacactcctatctctttccaagtaatgaactaaccttacctgtagaaaatatgatagtgtttcagaaaaccctaaagaatctacagacataattgaacatagttaaatttcccttataaatactagcaacaaggacattggaatttttttttaatgaaaaacctttgatgaaatctgaaaacataaacacttaggaatagataaggaagatccataataaaaactacaaaactctccaaaaataatcatttaaaatacgtaacagatatattgtattcaggaattagaaaacccactattgttaagatattattagtacaagatgatttatggatccaacttgaataaaactccaacatgctccttttgagatgtagacaattgttctgca

SEQ ID NO: 630381 - DNA, 616 bp, Homo sapiens
ctgtaagtgaatgctcaaaagacagaagtaactattccagaagctgtgaaaatttgacttgtgatgcaatgctgaaaaaatttagtacctctgtcacccataggaaggtagaaaatgaaaaatatacataagtaaattggtggatatggctaaaatttccaagtagaatactgaaaatttcagctgtttcttacagcagtgtatcatataataaggcatagatatttaaaaaacactaatgaggggtggagcaaagatggccgaataggaacagctccagtccacagctcccagcatgagcgatgcagaagactggtgatttctgaatgcccaactgaggtaccggattcatctctctggggagtgttggaaagtgggtgcagtgyagtgggtgcagtgcaccgagcatgagccgaagcagggcgaggtaacacctcacctgggaagtgcaaggggtcagggaattccctctcctagtcaaagaaaggggtgacagatgacacctggaaaatgagatcactcccaccctaatactgcacttttccaacagtcatagcaaatggcacaccaggagattttatcctgcacatggcttggggggtcctaagcccatgga

SEQ ID NO: 630382 - DNA, 575 bp, Homo sapiens
agaactagtttctaatggctacagtttccacaattccacacaggattctcattatctcagttgttacagaggtatggaaatatccaaagcagatgaccaaaatataaagaggyttaaacataatacacaaaggtagttaaataatctcacctgctggaaaatttcttcataaaaaaccaaaaatattatcattgcatgactatgtaaaaattgacctaattaatgaaaattaacctggacaagacccttattttgtgacacaagtgaacaaaaatataccaacactaaaatttgttacatgaaagtttcctcaattatggtgaagtaaccataagtactttactgtgattgaggatttatgataacattcatgtgcccagctattaagctttgtacctaacaaggacaatgctgaaatttaactttatggaaaaaacaatgacagaactttctcacaggcagaagccaaactcttcagtttttcggtcattcagatataattccaatagcgtacccctaaatctacttctttcctaattaaaatcatgtctttatatctccccacctcagcccag

SEQ ID NO: 630383 - DNA, 594 bp, Homo sapiens
taaaaattgacctaattaatgaaaattaacctggacaagacccttattttgtgacacaagtgaacaaaaatataccaacactaaaatttgttacatgaaagtttcctcaattatggtgaagtaaccataagtactttactgtgattgaggatttatgataacattcatgtgcccagctattaagctttgtacctaacaaggacaatgctgaaatttaactttatggaaaaaacaatgacagaactttctcacaggcagaagccaaactcttcagtttttcggtcattcagatataattccaatagcgtacccctaartctacttctttcctaattaaaatcatgtctttatatctccccacctcagcccagtacattgagaactttaacaaatttttacacaacatggaggatatgacaagaaaacaccacacctaaaggactagataccaaatgaagacatgctctaccttgggtagaaatttaactcttcagatatctcttgggttattctatcaggaaaataatatttccatttatgtgtgtagacacaatctatgacttttgcatcatcgtattttaaataaaagagagt

SEQ ID NO: 630384 - DNA, 414 bp, Homo sapiens
tagaatctgcaaaggaatgtgtggaagctcattgaggagtatggtgaaaaagtgaatatacccagataaaaactggaaaggagatatctgtgaaactgcattgtgatgtgtcaattcatgctacagtggtaatcctttcttctgattcagcaggttggaaactatttttgtaggatctktgaggaaatgtttgggatctcagaactgaaggaaatagagacacaaaaaaccttcaaaaattaatgaatccaggggctggcttttcgaaaacatcaacaaaattggtagactgagtagcaagactaataaagaggaaaagatagaagaatcaaacagatggaataaaaaatgataaaggggatagtaccaccgttcccgcagaaatacaaactaccatcagataatactataaac

SEQ ID NO: 630385 - DNA, 414 bp, Homo sapiens
tagaatctgcaaaggaatgtgtggaagctcattgaggagtatggtgaaaaagtgaatatacccagataaaaactggaaaggagatatctgtgaaactgcattgtgatgtgtcaattcatgctacagtggtaatcctttcttctgattcagcaggttggaaactatttttgtaggatctttgaggaaatgtttgggatctcagaactgaaggaaatagagacacaaaaaaccttcaaaaattaatgaatccaggggctggcttttcgaaaacatcaacaaaattggtagactgagtagcaagactaataaagaggaaaagatagaagaatcaaacagayggaataaaaaatgataaaggggatagtaccaccgttcccgcagaaatacaaactaccatcagataatactataaac

SEQ ID NO: 630386 - DNA, 645 bp, Homo sapiens
aggcagtgcagcttgcagcaacaaaagtgactccttccttctgcttgaggagaggagagtgaattgtgaagagtaaagagggctttgtcttgcatcctggatgcaactaactgaccacagtaggataggggactgggaagagttatgaagcccacatcctaggccctagctcccttctatgtgaagtagcaagcttctgtacatagataaaatcacacacatatatttacatttgaagattattacctgaaacatcttaagaaacagataatagtgacttcctctgatgaagagaactaggagactgcactcagayatggacaagagatttatttctcattttatattattttgtacagtttccatttttgctatttatgattatccatttggctttcaatttttcttttaaaaggtagaaatattacattaaaaatctgtatacagtacaagttcaattggatgaaaaggactgcattgatataaattataccattaactattttaaatagtataagaagaagaatgaacttaaaggacaagaatctaactaaaaatgaaattaagtctcagaaagaaaggcaaaaacatacaggaataacttgattaaaaatcattgtaactctaaaatttcttaactaattc

SEQ ID NO: 630387 - DNA, 548 bp, Homo sapiens
tgccacacttactcatcggcttggggctaagacttcttcatgtggaagggatcagcacggagagaattttcacagctgggttatcacctcctaaaaatagggctgagtgacggatgggagctgtcgctaggcccttgagctgtggggagtagatgggagggagggagatagggcagggtaggggggtccacagaccccagaccccacaggcctcagcccagtgccctccacctcagtccagcctcgggtaggcctgaaccccttctccctgatgatggagaaactgttctgcagctgaggtcttcagaactgggtctgagcctccaggaggagmtacctggaaaggcaccagccacagggacccagtgattcatttgcccaacaggtaccccaggcggccagctggaaatgtttgcatccagggggtcagggaggccagcaccatctctcaggggctgtgcttccagaagcaatgtctgggaattgggggcccctgtcacggggctgccctgccctctgtccctccccagctgtgccccgtcctcgga

SEQ ID NO: 630388 - DNA, 564 bp, Homo sapiens
ttccaaataaaaaagtttctctaaaaatcttgcaacttacgtcatgtttaatggtgaaaggccgaatgtttttgctcttagatagtgaatgaataaataaattgtactatgtacatacgataagatatacaataaaatattatctagctataaacggaaatgagctgttgtacaaaaaggcayggattaatcctgaatgcatattgctaagtgaaaaaaaaatccagtttgaaaaatatacatactgtgtaagtccaattatattatattttggcataactatagtaatgataagcagatcattggttgccagtggtttgtagtcacgggatggttgaataggtaaagcgcatagaatttacttaagaaattaaaagtattctatgtattttttgaatacaacattaagcatttgtcaaaaatcatagagctttacagcacaaagagtagtctcaatgtatgaaaatctaagaaatcaattgggaggtaggtgggtccaagaagagaatgctgactgtgacaaaaaaactaaatgtattacaaacacatgaaaaaaaaaattca

SEQ ID NO: 630389 - DNA, 617 bp, Homo sapiens
taaatcttgtattaaatttctacctgcttaaaaacacaacaatacaggttctgttattgtactaaaccctgatgcgtactgaattgctactatgaacaaattaccacaaatttagcagattcaaacaaaacccatttattatcttacagttctggaggacagaagtctgaaatgggcctcacagggctaaaattaagtcatccactggctgcattcccttttgaagcccctagaggaaaatttactttcttagtttttccagtgtctagaggctgccacagaccttggctacgtccccattccttcctcaaggccagcaatggtcattccaggctttctcactttgtgycactctgatgctaactctccacctctatcacttataaggatccctgtgattatattgagactacccagataatccaggataatctttccatttcacagtcagctgataagcaaatttaatttcatcttccccttaattccccctttcaatgtaacataacacattcataggctccaggggttagaatgtggtcatctttggagaatcatattttggatactacagacaccttttctttacccccaacatcatgttatcatgaaaaaga

SEQ ID NO: 630390 - DNA, 340 bp, Homo sapiens
agtttcaatcttgttgtccaggctggagtgcaatggcgtgatctcaactcactgccacctccacctcccaagttcaagccattctcctgtctcaacctcctgagtagctgggattacaggcatgtgccaccacacctggctaattttgtatttttagtagagacaggctttcaccatgttggtcaggctggtcttcaactctgacctcaggtgatctgcctgcctcagcctttcaaaatgctgggattacaggcgtaagccaccacacccagccaggctaatrattcttaaaccactatttatccatactggagtatagtataaactatttatctatact

SEQ ID NO: 630391 - DNA, 422 bp, Homo sapiens
ttttttaatgctatgaaagctttctgatgatatagaagtttaggaaacatcaccatcttgagttacatcraactaactatgtttgggggatcccagggtacatgtctttcagaagcaaaattgtggtttgatttgaaaatacagtgtttatgagacaaagcccaaatgttgggagaattgaacttaaaacaaaaattttattctacacatttgattccataatgattcttgtgaaaagaaagctgaactttggcatgattagatccaaatgaccttattagaaaaaatgttgtatggatgtttaataacataacttcctggataataaaggggtgttagagttttaaagtgctcagtaattagtctataatgcaatcagttagaaattgcatctcaatgttgccaatttccatataaacaaa

SEQ ID NO: 630392 - DNA, 422 bp, Homo sapiens
ttttttaatgctatgaaagctttctgatgatatagaagtttaggaaacatcaccatcttgagttacatcgaactaactatgtttgggggatcccagggtacatgtctttcagaagcaaaattgtggtttgatttgaaaatacagtgtttatgagacaaagcccaaatgttgggagaattgaacttaaaacaaaaattttattctacacatttgmttccataatgattcttgtgaaaagaaagctgaactttggcatgattagatccaaatgaccttattagaaaaaatgttgtatggatgtttaataacataacttcctggataataaaggggtgttagagttttaaagtgctcagtaattagtctataatgcaatcagttagaaattgcatctcaatgttgccaatttccatataaacaaa

SEQ ID NO: 630393 - DNA, 592 bp, Homo sapiens
aagtgctcagtaattagtctataatgcaatcagttagaaattgcatctcaatgttgccaatttccatataaacaaaattccactatgtatatttttaaaaagaacaacaaaaacctttgcttgggaataggcagaggataaccattttcttcttcaaggatgtgaaaacttttaaacactttttatttaaatgcagagataaaaattgtttggttaaggagaaggtccatctgtcagatgaacaaggtgacctcctgccattaaaaagtactaaggctaaagctgttatataccagataattttgtacaagccatgaaagatacaaggctttcattttaccctacgtcatcaaaacaaggatttaattgtctacagtgtagttcaattgattccaataaaaagtatcattgattataatctctacggaactggaagggcaaccattttttattttattggcargcaaaattgcgttttcttcatctcaggtcacttaccacccaaattagcaattgttaatagaaccagatcattagtttttgctgtactgatttccgtgtcactgcctgagtgcacatttcaatggataga

SEQ ID NO: 630394 - DNA, 479 bp, Homo sapiens
aacttagtttattctattagtgttgcaatataatagaaataaaatggtctttgttgatcagtaatcttagataagaattcagactttgcttctttctggttttatagccttgaccaaattacctaaactctccaagctgcagtttcatcatgtataaaatgggaattataatatttaacagctgtgttaggaggaaaaaatgagataaaatatgtgagaagcctctgtaataatgccaggtacttaatggatattaaacagatgatagtttgtttcccctttgctatataatagacctcatcctccaacacacacacacacacacacacacacrcacacacacacaatatttgagttaacttccatttaattaatttgctggttaaataagttaaaatgttcaaatgggttctgtgtgggaacaagctttataatttccccttgtgtgaacattgattaattgtactaataccaaagac

SEQ ID NO: 630395 - DNA, 607 bp, Homo sapiens
gttctctcttagatgcaataactcttactcattctgaaagaccrtgccacaatctgtacctccagagaaatctgccttatcctctaatattaagatgaccacataatttatcatgcaaacttgaactcttttgagaataaaaaggaacacaatgcataattacactgggaaaacaggtgtaaactaggaaaatcctggcaaatacaaatacatgtcatcttgcctaaaatagatcaggtatttttagagagaaaaaagtattccttcccactctaacatccaagagaactgtagtaagttattttggcctctttcatctctccacttattccactccaggaaggtgacatatttttgcctgataatttttctaagaatgagctgggcatgtgaggtccacttttctctttcttctctgaggtccagcatgccagctgagagtttgcaatcatcactgctctgggccatttcacaagtagagtattaagacccccttcccttgggatggctcacagttcttaggactggttacttctgtttcatcataggagttggtgaatccattttgccctcctgttgaactatgtaccacaaccccacaatttat

SEQ ID NO: 630396 - DNA, 564 bp, Homo sapiens
cacttccactgcattatcatagttaaagctagtcataaggaaaagcccaatttarctatggaagggaccacacaagaggatggatgttagtggttcactaagggacagttgtgaagcttggataaaacaaaatagcaccattctatagcatatttcaaaattttttggaccagaataacagggactaatttttctccagtggagttagcccctggtcttccactgcttgctctaagtcctgcctcccaggagaatatctgttttcattcatcctccgttacctcactttagtggggctagatatgtatttcttattttaggaattctatcacattaaaagcccacttcatattagtaaaaattatggggatctagggattgacatgttttgtgaacaactaaagattcaacattttgctgggatttaccataattactagttggttaattcaatttctggtcatagtttggtctagaaccaagccagatatcttatagaggaggggtcactaaaactgcatctgctcttacagcttctatcttttaatggcaggcctcagagct

SEQ ID NO: 630397 - DNA, 556 bp, Homo sapiens
atcagccaatctctaggcacagcttagctccctcccacctaacagacacaggattgtagttctaaagggcatcttgactttccctcatcttcttttgtctcatctagaaatgtcatttccaaaacctttactcatactttgccttttgtttatctcccttctcgaatcacagtttaccagcttcattttctaatattctaacactgtgactcaaaattatcctatgctgaatcaaattatcaacattatagaaaaagcataaagatataaaaccatttatagtctattaaaattcttcctacaagttaatcacaaacagagaagatgtaagtttaactactatatagaaattaaaatctttgtagattttttttaaagaaacttcgaaaattcagtttatcttcccatatcctgactgactcatttgtgccttctcttaacaggtgtgttctcagggaacaaamactaattgcaatttggccagacataattaaaatagcaattactccccgccctcccatacaatatataatgtatttttaattgattttggatt

SEQ ID NO: 630398 - DNA, 546 bp, Homo sapiens
gtggttagcaaggaagggactgtaagagggcatgtctgacctcctaacctctttcagggctgaccaagcttattccatggtccccatggccaagagatgacccattcagccagttggagggcttagaattttcacttttatttctcatagataagtatggtaaaaagaagtaaagcgtgttatggmcttatggaataagattcaaagtttgtgggattttaagaaggtttatttgaaactgacaatgaagatcacgggacacatctgtctcccatgtagagcagaggagtatagactttccccacttgaaaagactgacaaggaaaaaaagtgctctaagaaaaactggtttccataaaagcaagaaaacataggaaatattcagagtagaggttaaagatatacaggattttttttctgatgaatgataatgggtttcactggatatagtgaggggatttttggaagtagagagtggtgggatataggctttaaaaaaaaggtactataataacctatgataggattagaatgtggtcataaggc

SEQ ID NO: 630399 - DNA, 605 bp, Homo sapiens
gactgtaagagggcatgtctgacctcctaacctctttcagggctgaccaagcttattccatggtccccatggccaagagatgacccattcagccagttggagggcttagaattttcacttttatttctcatagataagtatggtaaaaagaagtaaagcgtgttatggccttatggaataagattcaaagtttgtgggattttaagaaggtttatttgaaactgacaatgaagatcacgggacacatctgtctcccatgtagagcagaggagtatagactttccccacttgaaaagactgacaaggaaaaaaagtgctctaagaaaaactggtttccataaaagcaagaaaacataggaaatattcagagtagaggttaaagatatacaggattttttttctgatgaatgataatgggtttcactggatatagtgaggggatttttggaagtagagagtggtgggakataggctttaaaaaaaaggtactataataacctatgataggattagaatgtggtcataaggcctgctttgggagataaagggtttttgttgtcttttggttttaaaatgactcatgagaataaggacaaaggcgtggt

SEQ ID NO: 630400 - DNA, 587 bp, Homo sapiens
agagcaagttatcaaaaagaggatgtctcagaaccaaggaatgaattacaggaaaagatgtgctggtccagaagtaattgacaaaactgaggcattggcagcagatgctgcaggatattaaggtgtagtacaaaagccagccgacatccctcaggctccttggcctaccttgagcaggtgtctgccaatatccctgaacctctgaagctgacttgagcagaagggcaaaggctggcagcctgaatgtgggttagtgtgtgatgcagccctatgcaggcratttgccacacatcccttgtgatcttaacattttggaagaactctttgccagagaatgaggtgattttagtttaatgcctccacctaaaaatgtttccattatttttataaactgttaatttcatgagcacattataaaatgcctatagcttgggtaaatcaagtaaaaaaaatatttttttgtctttaacaaagtttagactgttaatgtgatgacacagattctactttatgggttttattgttgcttgtttttttaagtttttggataacttttcatctttttatgtgtgtctctcattgcttgt

SEQ ID NO: 630401 - DNA, 633 bp, Homo sapiens
tttattcattttttttttcattagaatgtagctccatgaagacagggtagtttatgttatccatttctatatctaagattatcagataaaatacagggcactcagataagctttaattttttatgaaaacaagtaattttaatacaaaaatgtcccaaatattgcacacttctaccaataacttatgtttatctgaaattcacatttggttgggcatctgtacttgtattkgctaaatctgatatccccacttatatttccagtgctgaaaacaagaactggcatggcttaaccattcagtaaatattttctgaatgaattaaaaaatgaattatatggccagcaatggtagaacaccattaacgtgttattaaatgaacatgtatccctcagggcttaggggagtatataaatcaagagactgaagcctgtttctatcctagaaaagtctaaagaccaaagattggttgaggtaacaggaatctacatgataaagaaagaaggattagtggtcagatcaggtacacttcctgaatggcagggtaagcaataaattctcagggaaagcgggatgggttcaaatcatcttcaagttactttggccaagtgggttgtctgctgtggtaagaggac

SEQ ID NO: 630402 - DNA, 581 bp, Homo sapiens
ctgtttctatcctagaaaagtctaaagaccaaagattggttgaggtaacaggaatctacatgataaagaaagaaggattagtggtcagatcaggtacacttcctgaatggcagggtaagcaataaattctcagggaaagcgggatgggttcaaatcatcttcaagttactttggccaagtgggttgtctgctgtggtaagaggaccatagcaataaaaatycatgggtcttctatcccactaagaaagggataggataaagaagacatagcaaagcatttatcagagaatgtatcactcaagacaggaaccttaaaagtctcaggttttccatgagagaaccaatatttgaaggtcagctctgacagtggatggttataagagataacaaacaatataactcatttagacattttttttctaactttttttaactctacataaaacctagaggacaggaagaaaaacagagaggaagtcagggaagacttaaacaagaactcacaccctcatttctatattgtaagtccctgagctacaagtcaaagtaaagctaaaaaaaagagaaaacacttcaaattg

SEQ ID NO: 630403 - DNA, 547 bp, Homo sapiens
acagacataaggagttttgaagaggaagatataaatttggcattggtagacgaggaatattacaaggatgtgagatttaaaatgtataattagtaataaaaatgatttttaataggtagcatagagaagaataccacctcaagtacacaaaacaatgagtaaaatgataagggaggtgttactaaaggaatataagatcttttctgcatccagcataccaacaaattagtctgaaaagttatcccattaaaaaaaaagcaaccaaacaaccaaacaaaactaaatgctgaaaaaattacaaaaaaamttaacacaccatatcattcaactctcaagaaaatagaaataatcatcaagagccaaaatttttctcaaaatgaacctagaatgttaaaccaactggatattaaaagtagctctggaaggaaaaaaaattgtactaccaggaaataagggtttgagagattaacagtagtctcagatactagttttgggacgtgagcctgcacataattgtgcagctgaatctgatcaccacacaaagatc

SEQ ID NO: 630404 - DNA, 605 bp, Homo sapiens
cttattttccccaagattatgttttttccttctagaaaagcatttctgcttactttttctcctaacaacggcagcaaactcttttataaaaagcaatctatgaaatgtcatttaggattatgtttaaactaccaatattaaactatatcaatgatgatggcttatagtgctgaatcatgacagtcaatggtttccctggaattgggtgtgtttttctagcttccttcgtaacactacattcaaggagtttttaagaccaaaacatgctaccaaatttcctatttatcttttatatttcagrattgcaaaatatgccaaatacagaatattctgtgaattcttcaaatactctcttatcttaaatatattcagtatagaaaaaagacttaagatgttcagtaaaataggactggagctttatagacctaaacctgttcaaaataaaaaactgttgaattctatgtataactagtaaagacagaagtttttcttttttaaaaaacaaaatacatacactgagtgatgaaacatataggtctaatattcaatgaatattgtatcctgactagagaaaaaactgactgtaagtcattcagacacactga

SEQ ID NO: 630405 - DNA, 566 bp, Homo sapiens
ctttttcatctgccttaaggattccttgcatgtgcgagcaggaaagtcttcgagattctttaacacagtcaactaacaaatgggaaaactaaggatctggtcaaataagtgacttattgtcactagaaacagttgtggcaaacatttttaacaaatccaaattttcttagtcttattccagttttctttttagcgtgccaggctgcttccagttatttcatttctcctccttctgagaactctgtgtgtgtgcacatgtgcatttgtatatgttggtctcttatgtatatgttaataaggatggttatctaagggacaraattactcagtaagatatgaaaaggcttctaagatatattttgaaggttaatataactgccaaatgtgttcaaatggattttaatttactctttaacaatttatttgcctctgtctgtccccttggagcaatgccatcaaatagaaatataatgagagtcacaaatacaagttgcgtatgtaattttaaattttcaagtagttacatttaaaaagcaagatgagcaaaattaattttaataatgttt

SEQ ID NO: 630406 - DNA, 581 bp, Homo sapiens
atgtagacagtaatagtatttatatttttgtttattctacttagtgtgaatatacacacatttcactgcagaagtggcagtgatttagatatggggttgtgctctgaatcctactgagggtataatgtagtagatgacatacgcatggtggtatcctcctaaaaataaacacaaaatctctatttgataacacatttattccaaaggttcagataagggattttgaacctgtttagtaatacagcagtggataatcctttcacatacatactagtaaaactttggaatgactagagataaaatttctgtgtcaaagggtatatataactgtgattttaaaagataatgccaacttccctatctatctatctatctatctatctatctatctatctatctatctatctatctatcyatcatctatgtatcatcagttgtttttgctgggtgtatacccagaagtagaattgctgaatcataatgaagctcatacaccttcagctttagtaaatactggttaaaacgtttttgaaagtcactgtgccagttctaccttggagcagcagagcataaggattctg

SEQ ID NO: 630407 - DNA, 593 bp, Homo sapiens
tacatcccacctattaataatgcaaggagtgtaaaaagatttgggctgkcccacttttaatttattacagccattaaaaccttgacctctgaatgaagggtttccaggaaggaagtaaaattgatgtaaacgtataaatttccctgctttgaaaattatcctatcatctctaaaactaggaatgaggaagaagacaaactcattctttgcaatttctcctccttttgcccatgtgctttttcctttctacacaaaacacctctccctgccgtaggactgaaattttaggatggtactataagtattatactagaactacattatgaataaaattgcctttttatagaataaccaaataaattaccataatttatcaccttttttcttgcaagaatacttacaaacttttgttttaaaaactgtcgtaaaaggagctagattgccatcaacaaaaaaatacattgattgtctgcagacaaatacttaccattaatgccaagatcgcttagcattatgggggcagagacacacagtgacttttttgagaagggcagagctagaagaatggcaggcaagaattatacctgaatcac

SEQ ID NO: 630408 - DNA, 585 bp, Homo sapiens
tcaccatttaaaatgtataaaactgggctatcattttcattawtttcctaccttttatttgtatatgtcgctgataaaatttgtgaagattttgttcctaactttgcatttgctagcaactatttgtctttatttcatgattttacatagtgcaataaattttaagaatgtctgtgtttatgatggcagaactgggtgtaatagaaaaccattcaagttagatgtacaaaaatgaaattatttaagtgactctgcatacaaccaaagacaagaagggtaattgcaactcatgaggcatctgaattggtttctaaaaatttctgataaaccaagagagccttctgtgtcatcttttcagggtcaaataatctcttttctctttcttctgaaagtctgtttattgtttagttttttataatgacctattcatgagttttttttaacaagtacctggaaaagatgaccatttctccacctctcagagtaggcaagctgctatggtttgaatgtgatccccaaagttcatgtgttagatactcaatgttgcagtattgggaggtgtggctttcaagaggtaaccaagct

SEQ ID NO: 630409 - DNA, 556 bp, Homo sapiens
aaatgcagtataaagtttagattattgcactagtatcagaattagagtgtaatgggttaaagatgaatattatagtctctagtgtaacaattaaagagtagttaaaatatggatttctaacaagttacttgtagaacttgataagaatgaatgataaaattatccaatctattcaaaagaaagcagcagtcaaagaagatagaacagcatacagatggaccaaatacaaaaagttatatagtggtagattaaaaccacccatatcagtaattatattaactataaatggactaaactctccaagaaaaagattaaattattgcattagatttaatgaaaaagtgctgctacttgaaagagacaaacattaaataaaaggatgtacaaggtttgaaagaaggatggaaattgatataccatgtaattacwaactaaaagctgggggggccatattaacctcaggaacactagattttaaaaaagaaatattgctgaagataattaaacataagacataccataatggtaatgggaatgatccaatagtaatgtatca

SEQ ID NO: 630410 - DNA, 591 bp, Homo sapiens
ttcataaagatgcatgtttcttccataattatatagttaacaaaaaattgctaactttgaaattacattttgagtgttttgtcactgttttgctttaatttttagcttcagttaatttgtaaaattttgagaaccttaatatataaaatgtttagtaatttagtgtctagtaatttgtttttcacatcattaagatgaagaatatttggggacacaactgctctaacckatggtttccaaaaaatatgagaaatgtaaccatagctattgctagttgaaaaacggaaggcttggtacattctaataaaaatgacattaaggtcagacattctattcatctgtgcgtattctgaacattcttcttttattctagtaagtatgcaaaatgaggtgtgactttgcaaagctttcctttttgccatctcccatcaaaagaacaaaagactatgtggggaagaaattccagctcactttcatgcagccagcttattagtagaccatgttgagcaaagtttaaaattatcttttttaacttaaagcttctgttggactagaataatatgtaagtttgagtgacagtggaaaaatatt

SEQ ID NO: 630411 - DNA, 617 bp, Homo sapiens
gtgtgtgtatgtgtgtgtatggggggtattctgtctcaccagactcagacagcttggtaaccaatgtacagtgaacctgcttcacagctcggattaacaaaatattataaagaagaacatgattttctgagcttcctytgggcaccatacattttgaaaaatctcagcaccaaatgttaaaatactttccctcttgtttccctcttgtcccaaaaccatcactatatactggaataggagtgagctgttcacttaaagcctgttatcaataggtttgtcaatggcctattaggtggcctggtataaaagtacagcccaagaagatgtctgtatcaaatggggactgcctcacccaatgatattcacttcaggttttgtggagattttgtgtctgtgcgtgcttcagtggggaaagacaggaagagagcgagagagaatcagcagagcagaggagagagaatacataacaaacagtgtcttcattcttagaggatataaaggctactttctacagttactgctgcatcactggagtctctgacagacactagaactggagtgagtcctattgtgtactcagttctttctgagacctgatatgcaattcttgagacatc

SEQ ID NO: 630412 - DNA, 497 bp, Homo sapiens
gcttcccaaagtgctaggattataggcgtgagccaccacacaaccagccttgcaaacagtattgatttaaactttctacattatcaagacaattttaaggggttaacaaatgataagaagggatataaattttgtttataataatattggtattattgggactagtgctacactcttaaacataaaacagagagatttgttttgatcagatgaaatagttaatgagactttcttgttaatatcaatttatatttcaataagtgaaaaaatcatctgaaatatattcttcatggatatctgtatattttgaacacttaaggtgtatgtttagtaatactattttatgtacattatgttttttaatgtccaatgctggaatttttwaaaaaaattttagtaatcatcacattcttttccaagtaacagggttcttgaaagtacttggcttggccaggcgtggtagctcaagcctgtaatcccagcactttgggaggcca

SEQ ID NO: 630413 - DNA, 627 bp, Homo sapiens
ttttaccgtttttgacttaaagtagcttttttctggtatatccaccccaacttacttttggtttctgttagtgtagaacagcttttttttgttttttccatttctttacttttagtgtaattctggtaggcaacatgcatttggctcagttttttttttttaattcaatctaccagtctatatctttaatgtaatatgtttacattcaagggtgttgctatatgaagacttatttctgttattttgttcattgttttctgattgctttatatatcctttattttctcttgcttattactgcagtttggtgaacaggggttagtggtaaaatttgagtttttttctctttctcatttgtatgtttacttaacaaatgagttttatacttttatgtgttttcatgatagtaggtatcatactttttcttccagatgtagaactcccttaagtatttcttgtaggactggtgtagttgtaatacattttcttagtttaygcttgtctgggagagaccatttatctttcattcctcacaaataacttcgcttggtatagtattcttgagtggcagggtttttttctctttcaccatctgaacatatcatcccactgtctcttggcctgtaa

SEQ ID NO: 630414 - DNA, 628 bp, Homo sapiens
agactaatagactctcacatatggtgagtttgcaataagaagttataaaataaacagataagtcaaagtttaaaagttaaacagcagggctaatagaatgtataacgcaccagtagccttctttcttttcaacaaggatccattaatcaattatttcctagaaatatttaaatagttatagatctacctaaatrtagtgctatagagctcacatatttcaatcacattcagcaggccaccactggagacactgtcaaatcctttgaaaatgctagctaaactctgtcaatgaactttctttgacctaccagtctaacaactaacaacagaatagtttaaatgattcatcctaattgcaactcagctcctgacactactaggacattgggagaatgtctgtgtctgccatgtacttttgggaataagagcctaaagcctatgcaccttagaagtggaagtgctcaaacttacaaaatctcagttacatgaaagccatattccatcctagattctcctttctcccacttccccactgataaaacaaaggtattctgttagtcttctgctgtaaatggcaatgatgatgttctaataaagcactggaattaacctatgccagaaggcaatg

SEQ ID NO: 630415 - DNA, 392 bp, Homo sapiens
aatttgactaaaaaaatctaatctgcacagagtcacaatttttatatgtgtgcttccaacagtcacaggtgccctttctgtttgctgatatactattgcatttttaataatattttactgcatttggcattcttttacacttcatattttgaccttggttttaattaaactatgaaaatatttttatrtctaaagctactactctggtgacagtgaaaatcagaagcagaaagtcagaacatcagaaaatgctactctgtgatagtaatatattggtcagcatgtttgtattcactttgcagctgtgatgagcaagaactaaagaaacagaaaaacacaacatatggcatgaaaaataaaggtcatgaccatgtgttgattatagtaataaa

SEQ ID NO: 630416 - DNA, 575 bp, Homo sapiens
ggtgccctttctgtttgctgatatactattgcatttttaataatattttactgcatttggcattcttttacacttcatattttgaccttggttttaattaaactatgaaaatatttttatgtctaaagctactactctggtgacagtgaaaatcagaagcagaaagtcagaacatcagaaaatgctactctgtgatagtaatatattggtcagcatgtttgtattcactttgcagctgtgatgagcaagaactaaagaaacagaaaaacacaacatatggcatgaaaaataaaggtcatgaccatgtgttgattatagtaataaaacaatcagaagtaaaactaatgtaccaacaaattttctggccattaaatgagccagaagagaccacgaagagacaatgaaaggtgaatgtggatctttaggaggttgactccaaggtgttaagaagcaccatggtgaaacacrtctaaaaaaactatggcaaataaggtattttgacaaacttcttaaagtaataatgaaaaatgcagttttgtgcaaatttacaatgttgataaaaagtttggcactgt

SEQ ID NO: 630417 - DNA, 557 bp, Homo sapiens
tgggaggggcccacagacagatgctgtgtgacaaggagggacacacagccacagccaggccaggaggcgatagaaagaatatcccagggtctgtcttctcccagatgcttgagctccccaaggctggacccaaacagaagccagagggyaacaaaggctggtgatgtggagaacaggatagagagggaggagcccagttctggagggacagatgcagacaggcagcacagcgacacaacacaacctgtgaggcaggaagacagggggcgtaggaggcaagcagcaacctctgtgtcagggggatcactcagaaatgcaaatgcaatcatgtaactgtcccactttccgtatttcagactcccccgcacccttaccataaaatcttcagcatgcacttcaggatctcacgatccagctctgcttcccttcccagccccatttctcccttctttccttcaggtgccctgaactccaggcatattaaaccccttcaaatttcttcttctggtttagtacgtttgccgcctttgcacaaattgttttcatctgtcttccca

SEQ ID NO: 630418 - DNA, 501 bp, Homo sapiens
ccgcctcggcctcccaaagtgctgggattacgggcgtgagccaccacaccaggcctggaaaatttttttcaaatttacattcccccaacagcgtgtgagatagtccccccagacaccctaagtgagtgaacatgagggactctaatctggtaatagattctggctgtgctctctggaactctacatgacattcggaaaactctctgccatgtgttaaatgataaaactttcagcaaggtatagtgagagccctaagaatgtgtgtgcccccaatacagcagttacacatctggacatccatccaaagcacactatcccaaatgaagacaaagttttacctacagaacatccactgcattatttatcaygacatttagtcaatcatggcacatgtacaaaaaagaatctcatacagccattaaaataatgtttatgatgtgtgttcaacagtatatcaaaatgcttcagctacaagggaggtgaaaagagaaggacctggca

SEQ ID NO: 630419 - DNA, 500 bp, Homo sapiens
cagcttctgttgtatcatcagattccatttcaacttctgccgacaacttttctcctgatttgagggtatgtatactattttaaagttctgatgaagtactttctgttaaatatttgtggccaacactatcaatataactaatttagcaggagatactgatggagtattctcatagatcccggtctacaaaatatcccagaataggccagcaaatttggartgcttacttatttgtaaaagaaaaatgtgtaattcatctctgaggttgatcacctctaagttctttgccaaaagatgattaatgaattttttgtggtataaaagatttttatgattattctcataataaccagtaatagctaacatttattgaatatgtactgtgtgccaagcgttgttctaagtgctatacatgaattatctcttgtaaaactctgaccaattctgtcaccattctacagatgataataacttgtagagattaagtaatatgtccaaga

SEQ ID NO: 630420 - DNA, 550 bp, Homo sapiens
ctatttttcctgcctacagaatcttcctaaaaggactgtgtcactgtggtcttacataarcagccagctggaagacttcactaatcctctctatgggagctattccaatcatgtcctttatccagtagccagcatgcgccacctagagctctgggtgggatattacataaggtggaatccacggatgaaaccacaggtatgtgccttacaatatacaatgggagttttcattcatgcagtgcaactttgtctccttaaaagcagctggaaagattatctgtgcatatttaaaactttactccttacccattgatagttaacaattgtatagtagaaaaatactacactggggcagggtaatcagtatacctggttcttaggactgcttgtatgacattggacaaatcactgctctcttttcttgcatcttccctcctctgtctggataacctctagggggtcttgttttaataagctgaagaaagtagctttaggaaagttaaaagctgaacaaaattctggtctactgtgaatatgtttatggaatatt

SEQ ID NO: 630421 - DNA, 585 bp, Homo sapiens
gctgtaagatggagataatgatacctcatggggttgtcatgaaattcaaatcaggaaatggatatgaaatggttctgaaagatgtaaagagcaatataaacaccagatacggaatgagaaaaaagcggcaccggaagtggcattttgcaaactccaatcccccaggaccacatgtgaaggagctcttttcaaggtcacacggacactctgacccgactctctcctggcagcattcaatgtgacacgccagggcaatgagaaacgggaggggctgcgtgagacatggcaaggctgaggccaagccccaaagttcacggacattccataaaaagtgcacggtggaacctgagaaggtggagaagggcagggatgcccctggcacttttttygtctctggtgctatcaaacagaaaatgtcacctttgttcctctatagccatttttagttgcaccaaaggggggagttgaaaaatagaccttgtagctgcctccatgcgattcaggggaaggtgataccacttctgcctagagggtgacccccacgcccagcacatatctcaccctcagtcacagcgaggccacagc

SEQ ID NO: 630422 - DNA, 380 bp, Homo sapiens
cctaggaaggtggatgggtgagtaaggaagtgatggccccaggcccaccccaggaggtctggaggtactcacttgagaggtccctgcccacacccagagccaagccgtccttgatccacagaacgaagccatcgtattcggggatggcgcaaagtagcgtcactggctgtcccgacaccaccacctggtcctggggctgctggctgaaggaatagacttggcctgggaaggagacaaacacaatggtcagttatctgccggctacaggggcgagaaggctcccctccagctatggaagcagagcagggctggcrcaggagactgagcctcctgaagcacctggctttcctgctgagggtctggtagagcttcctaactgg

SEQ ID NO: 630423 - DNA, 467 bp, Homo sapiens
tggaagccagtgctaaggatgggctgcccatctactcctggtcttcattttatgtgagagaaaagcaaacccctaatttgcttatgccacttactttggatctctgctacacccagttgaatgccaaactgatacacattgattgcccactctgtcattcactcctgagggactttgggcaagtcacttaatttttctgggcttcggtttccttacctctgcagtgggaataataattctggctttgtcttgcaagcgttacttctgacctgtagggctcactcttaggcttcctagaatgttctcaaccccagtctgaagatcacrtggtttttgtgcctgagcagtggctgcctccctcccattgtttggccagataattgttcccaaactaagaaatgtgcctgccttccgacttcaatggctgttataaagtccccttgtgggctcccattttctagagacac

SEQ ID NO: 630424 - DNA, 573 bp, Homo sapiens
gaggcagcgcgggaaggaccgagtcctgccctcggcagccctgcagcgggccctcaggaccctctgtgcaatgctcaaggattccaaaggccctgtgcagttttgatgctcttcaggtgtcctgtgaaggrccacgtggctatatcccactgacggtgtgaaagcaggcccacccggcgtgcactgagtgactcaggcaggctggtctgaagcacgaggtgccttggtcttgctctctgagcctgcatggagaatcacagctcagacctggtgcttatagaggagtcttctcatggttcctggagttgttcccaactggacacagaccatcttggggcaacgtcctgggtttctcccctcttggagaccaaatacaatcaactcttaattatctttgttagtggagaagagcagggtgtgtataatctagaatgatggacaatccaaaacagtgaataatcctaagtaacattcattttcgactttggaatgcattttgatattcacatttgaatatggatatgtttgatgttctaggaatttttcatacttaaaaaaaacactcaacccaag

SEQ ID NO: 630425 - DNA, 573 bp, Homo sapiens
gaggcagcgcgggaaggaccgagtcctgccctcggcagccctgcagcgggccctcaggaccctctgtgcaatgctcaaggattccaaaggccctgtgcagttttgatgctcttcaggtgtcctgtgaaggaccacgtggctayatcccactgacggtgtgaaagcaggcccacccggcgtgcactgagtgactcaggcaggctggtctgaagcacgaggtgccttggtcttgctctctgagcctgcatggagaatcacagctcagacctggtgcttatagaggagtcttctcatggttcctggagttgttcccaactggacacagaccatcttggggcaacgtcctgggtttctcccctcttggagaccaaatacaatcaactcttaattatctttgttagtggagaagagcagggtgtgtataatctagaatgatggacaatccaaaacagtgaataatcctaagtaacattcattttcgactttggaatgcattttgatattcacatttgaatatggatatgtttgatgttctaggaatttttcatacttaaaaaaaacactcaacccaag

SEQ ID NO: 630426 - DNA, 573 bp, Homo sapiens
gaggcagcgcgggaaggaccgagtcctgccctcggcagccctgcagcgggccctcaggaccctctgtgcaatgctcaaggattccaaaggccctgtgcagttttgatgctcttcaggtgtcctgtgaaggaccacgtggctatatcccactgacggtgtgaaagcaggcccaccyggcgtgcactgagtgactcaggcaggctggtctgaagcacgaggtgccttggtcttgctctctgagcctgcatggagaatcacagctcagacctggtgcttatagaggagtcttctcatggttcctggagttgttcccaactggacacagaccatcttggggcaacgtcctgggtttctcccctcttggagaccaaatacaatcaactcttaattatctttgttagtggagaagagcagggtgtgtataatctagaatgatggacaatccaaaacagtgaataatcctaagtaacattcattttcgactttggaatgcattttgatattcacatttgaatatggatatgtttgatgttctaggaatttttcatacttaaaaaaaacactcaacccaag

SEQ ID NO: 630427 - DNA, 573 bp, Homo sapiens
gaggcagcgcgggaaggaccgagtcctgccctcggcagccctgcagcgggccctcaggaccctctgtgcaatgctcaaggattccaaaggccctgtgcagttttgatgctcttcaggtgtcctgtgaaggaccacgtggctatatcccactgacggtgtgaaagcaggcccacccggcgtgcacygagtgactcaggcaggctggtctgaagcacgaggtgccttggtcttgctctctgagcctgcatggagaatcacagctcagacctggtgcttatagaggagtcttctcatggttcctggagttgttcccaactggacacagaccatcttggggcaacgtcctgggtttctcccctcttggagaccaaatacaatcaactcttaattatctttgttagtggagaagagcagggtgtgtataatctagaatgatggacaatccaaaacagtgaataatcctaagtaacattcattttcgactttggaatgcattttgatattcacatttgaatatggatatgtttgatgttctaggaatttttcatacttaaaaaaaacactcaacccaag

SEQ ID NO: 630428 - DNA, 428 bp, Homo sapiens
aaatgagcattccagtttctctacatccttgccaacactgttacaggtttcaagtggtatccattatggttttaatttgcattcccctaatgaataaggatgttgagcatgttttgatgtgataattatccatttgtgtatcttctttggtaaaatgtctattcaaatattttgcctatttttaaatagaatcatttgtcttactatgttataggagttctttatagccaggatacaagtcctttaccagatatacgacttgcaaatattttctctcagtttgtagtttgccttttcgtttayttaatggtgtcttatgaagcacaaaaacttttaattttaatcaagttcagtttgataattttttcttatagattgtgtttttgatattgtctctaagaactctgcctaatcaaaggtcacaaaga

SEQ ID NO: 630429 - DNA, 243 bp, Homo sapiens
atgggtggtgcaaatccctttactcttactccaaacatacatgatcagaaaaaatggaagaaagacatagctgaaatagagctccaaygagatgattcctggtttctactaggaatataagtaaaatttgaatttttgccagaatccaaagtattcaaggaagggctccttatacacctttgatcattcacttccatgtctcatctttcaaagcttggcttaaactttcctcctctgggaaaa

SEQ ID NO: 630430 - DNA, 572 bp, Homo sapiens
ttttccacccactctgcaatcatttgattgatgtgcaattacctccccctgcttggacacgtgctttcccctgctcatgtgtgtcatccaatgcctgataaccttcattttttcccatttattttgtgtgtgttggccactgtttgatataattatttttgtaatcatcttctattaggtgaaagaatattgcagtagagaaagaaggaaaaagaaaataaatgccttcctgacaagttctaatattttatgttcacaaatctcccaatatcagagcaataatattattttctcgatgtgcatttattaaaatgtaaagtagctccatcacattgggaacgaaaacccttgcattaccttggccagaaaatatcacttatttatttcagattgcatttctggaatgttaatactgttgcttttttttttttttttttttkatttttttccccatagcctttatctagcaggggagtgaacctgaaggtctgatttctaaacaggccttgctgaatgcacaggaccttaatttggttttaagaattgcttttggctcttgatttatgatgagg

SEQ ID NO: 630431 - DNA, 589 bp, Homo sapiens
attttctcaggaaaagaaatatatgccctctaaatagttttcttccttgaatattgccagcaaatcagccatctcattgaatattgatggttgtagagcaaatcacgaatgctgacctagagctgccatttattgagttcctactagggatttgactctgttttaggtacattgcacatattagctttataaacattccccacaacccagcaagataggcatttttatccccatttttcagatgaggaaactgaggttcacagaggttaactgacttgctcaaagtcccactgtatataagtagcaaaactaagatttgaactcagatctgtctgacttcaaaatcaggtgctctttctactctgtgacatgaggctatgaacatgtgaatctcagaggtaaaaagcagagttggatatggtttggatctgtgtccccacccaagtcttatgttcagttgtgatcctcaatgttggaggtggggcctggtgggaggtgattggataatgtggttggtgttctcatgaatggsttagcaccatcccttcagtgttgttctcatgatagtgagtatgtgagatatcacgag

SEQ ID NO: 630432 - DNA, 505 bp, Homo sapiens
gcccacatacaccacacaccattgtctatggggtgcctgtgcatgtgtgttgtgtatgcatttctaggaggagagtccatagctctcattaaagtctcaagcagagcctcctccttgagaaccactgccctaggaagttaaatcaaaggatttctctactaagcagatgttacaattagttccttcctggtcccacattcattcccttgctgccttcttcaatgcttttataggtctcttgatctcttcttcctgcctcataccccactttaaattccttctttagcttctaataaatcatccaaacccagagaagataacttctgctttcttcttggagcagcaactagtgaggaaggccgtaccccacttgctggaygagaacatactgacaaataggcctaagaccagaggctttttgttttttcttctcttctctggactcataggtctttggaactgacctgtgtgcctgacttgcagacttcttaagagcagggcacag

SEQ ID NO: 630433 - DNA, 618 bp, Homo sapiens
gtcatctattatagttttactagaacattgttttcttggaattccaaggctttattgcctcagatataacactttactcctaataatccctattgattttattatattaccttatatttttagatttgttttaatgccttgcattacattttagccttaatgtgctatataaaatgagatacatcatcatgtttctcaaaccttctgaaggtaattatcttaactaacatggataaaaaaatgctcattgttggctgctgacagtggtgggagtctgggggtggggaaggtacattgtagtctctgggactgttggttgtatttctggacagttgaggtgctgcccatgggctgggtgaatggtggtgggtgtggtaatggggcattgccacagattaggtatctcatttgtgtcattattttgctatccttgcctctcttgggatttgtggctcacactgcatttacaaggtgttttrcatacagtaattgttcacttgctaaatcagccagtagagaacttggtattcttagagaaagttgttgcacctttgggtgctgttttaattactttttcaaggtgccttctaaatgttaaaaatggtgacacattttatc

SEQ ID NO: 630434 - DNA, 557 bp, Homo sapiens
cataccctgtttcagggaacagggtgggttttctcccctctccagttggaaacactacatatccctgatgataatgcagcaaaactactatctaatcttaacagcgtctaccctgtgccctacttgatctgagcatgtgaccacttcagtgcacgattccagtgactgctttcagagaggttacatgccttcctcaaggtcactcagcttcctcaaggtcatggactaggctacaatccaggtctcaggactgcttcccctggtctattctcagttacctttaggtagggtctctggaaatcatttgagtatatggcctgaaacaagcgacattttcttccaaaaaggctctgtaaaaatctcagggttggtcgttgtaaggaatmaattattcccaaacaaatctcatttcagtcaaattctgcagactgcccaatctttcctacactccaattcattctccatactgctgcttacattatcttgaaacaagacaaatccaatcttgtcactccctagcatgaagacttccatcagcccctctctgctgacaggat

SEQ ID NO: 630435 - DNA, 557 bp, Homo sapiens
cataccctgtttcagggaacagggtgggttttctcccctctccagttggaaacactacatatccctgatgataatgcagcaaaactactatctaatcttaacagcgtctaccctgtgccctacttgatctgagcatgtgaccacttcagtgcacgattccagtgactgctttcagagaggttacatgccttcctcaaggtcactcagcttcctcaaggtcatggactaggctacaatccaggtctcaggactgcttcccctggtctattctcagttacctttaggtagggtctctggaaatcatttgagtatatggcctgaaacaagcgacattttcttccaaaaaggctctgtaaaaatctcagggttggtcgttgtaaggaataaattattcccaaacaaatctcatttcagtcaaattctgcagactgcccaatctttcctacactccaattcattctccatactgctgcttacattatcttgaaacaagacaaatccaatcttgtcactccctagcatgaagacytccatcagcccctctctgctgacaggat

SEQ ID NO: 630436 - DNA, 602 bp, Homo sapiens
taatatacctttgctactccactcttcagtcctctttatgatagaggttgatcagaaaattatgatctttgcatgatgtatgggcattattattgcctgggatatgagtaattatgctgaaaataggagtaggcagaaccgatgcagaaagcagtttagcagaatcaaagtgaaaactttccaaacagaagaccccatcattctgcaatcagaatggcatcgcygggcagaatggctactgatggctattgatagacaaaaaccaatgagagggccattggtagacatccaaaactaagacaaaactagggacaatctccagctttcaaggccttttgcaaggacctccctcaccatcccacagcctgaagctgtcttttcctcctggggactcctgcagtaagaattgccattcatgcagaaataacttgcgtgctgcctcaagactttctttaccgaactattacctgtctctgacttttagttaccttttcttaagtatatgtcttgtatagccaactggattatagtatctttgggctaggaagtttgcctactatttttttctcttgcacatagtgcccagcacttagtggcctctt

SEQ ID NO: 630437 - DNA, 463 bp, Homo sapiens
cctgtctcatcttttttcttctgctacagccacaccaaactgcctgccattaatttctgtttcttgtttgataggcttccagagacgtgctcgagtctactagcttcaggtgggaaggggttagtcttcagcaagcacacctgaactgttgtgactgggcaacttggggacaggacaggaaggccttctacawgcagccatccagatgcacttgatggcctcagaaatggtgaggtagcagaggctggtgcctatccgttgtcaccggctccatctgcagttacttgagggcacattaatgtctgaacagggcaaccaggcaaccagcaagtgctgtcctggccaatacggtcctcaccctggaagcaggaatgctaatggcatcccagcttgccgctgggtgccaggcatgcagacacgtaaccagccttctctccccaccttccctctttcctgtcacttg

SEQ ID NO: 630438 - DNA, 463 bp, Homo sapiens
cctgtctcatcttttttcttctgctacagccacaccaaactgcctgccattaatttctgtttcttgtttgataggcttccagagacgtgctcgagtctactagcttcaggtgggaaggggttagtcttcagcaagcacacctgaactgttgtgactgggcaacttggggacaggacaggaaggccttctacaagcagccatccagatgcacttgatggcctcagaaatggtgaggtagcagaggctggtgcctatccgttgtcaccggctccatctgcagttacttgagggcacattaatgtctgaacagggcaaccaggcaaccagcaagtgctgtcctggccaatacggtcctcaccctggaagcaggaatgctaatggcatcccagcttgccrctgggtgccaggcatgcagacacgtaaccagccttctctccccaccttccctctttcctgtcacttg

SEQ ID NO: 630439 - DNA, 547 bp, Homo sapiens
atagttaaaaggactgagtagaatttggtgattagcaatgaaatagaagaaaattgacaggaaaagagcttttgcagtaatcctcttttatgccatttttatctcagaatgctgaagggttttccatatgtatcatgttttcagttcttagttttcaaatgtgtactttatacagcttcaaaagaataattggcaacatatgaatatgcatgtgcatatttatgatattgcatccatcagcacaatattacctttcctcctgygtttaaaatgtataccttttgcactttagaataatgagtctacatggattggtgtcaaacaaatggttctaccattctttattagttttcctttcatagtactttatgccaagaacaaacaccatattctttgaaggttgtttttatagaatcctttctcaggtgatacagaaaaagaagagcttgcctctgaataggactgcatacattggattaaatcccctgagcactactgtcaacagtaaacaatacctttatttcattcaagatctcaattctgtcag

SEQ ID NO: 630440 - DNA, 622 bp, Homo sapiens
aggataagataggtacccttaacactcccattttacacatgacgaagcatgcacaggaaggctaaataattcccaaagtcatgcagttgcagtgtatggtgtatccctagaatctgtgcccttaaccaccatactataatttcatccacttttagtcattttatttctctggtcaagttcagactccaaagggcctatccagttggtattcacagggtgacacatattcccattatctcaggaagggttgattaccaattcactgaggaagcaatgattcctccgaaggaattcaggatattataagataaataaaatgggaggtcaaagaatgacaaacatcttctcacaataacctccaggttgaaaccattatcttctccattttacacatgaggaaagtgaagcaaaagtctatgttataattctctacttctatggtgacaaagctragagtattgggttgaatagtgccttcccaaaactcacatccatccagaatctatgaatgagaccttatttggaaacaggacttttgtcagtgtaatcaagttgaggtcacactgaattagggaaagccctaatctcataattaaggtccctacaagaggaaattttggac

SEQ ID NO: 630441 - DNA, 576 bp, Homo sapiens
ctcgctatccaaatggaaaataactgaaattgattgatgtggaaactcctgagagggcagatctttctaaaggaaattgaaagatatgtcaatagcatttgacttttaaacacctcaatttgctcatcaagatttcagaatcactcagagcccaaagaccattgtttgtaacattttttaactgcagaagggtctagccacaaaaagtttccttaaaaaaattgtttttcagatgtagacataaaaaatagtatctaatatttattaagcatttattctatatttggcttggtgctatacacttgacatgaattattttatgtaatatttcacttataaaataattcatgtcaagtatatagcactaagccaaatatggaataaattttatatacattttcaaattttttatgaataaggaaaatgaaacagaaagtttccrtcatttgcccaaagccacagaatgaaagagctggaaaggagactaagtcagatatcaagcccatgctcttaactattatgctatatgtagctgagagtcacagaaagcttgtaaccaaatatttatattgccct

SEQ ID NO: 630442 - DNA, 551 bp, Homo sapiens
ttgtttattggattaaagtccacttgattttaattatttaacaaatatttcttggctacctacttttccttttttcaaggagcacatataccaagtctctctttctgtctactacactatgcttggaaattaataaaagctcagtggtgaataataattgcccctccctagccccaaagttgacctgctacaaattggtattaacaccattgatagagacactttgaggatatctaccagaacacaatcctaataacccttcaaatatgatgactacaatgcaaagcatgctccctggcattttgccaaatacaacctgcagaaccataaaaggaaagccttggctcaggaaaggtttcacaactctgaggaaagaatcttgaaaggaggctaacatggtttggatctatgtccccaccaagtctcctgttgaattgtaatcccagtgttataggtggggcctggtgagaggtgattggatcatgtggrcggagttcttgtgaatgggttagcacgatcccctgggtgctgttgttgtgagagtaagatat

SEQ ID NO: 630443 - DNA, 646 bp, Homo sapiens
cccactattacaacaaaggtatttaaatatctgggtctactaatctgaatttggacctattaatattagtatctttccttaggatttgttcccagaaagatctattctttccacccatccttcctaggactcttctgattctaccttttttctcaatattgatatgatatctacttctcataaaagctgagtagatcaagttttttttaaagtcataagaaaatcagtgaagaaaaattgggtccatctttaacttctggacccaaaatgtcttaatctgctagtgctgccataaccaaatactttagactgggtaatttatttttcacatgagtttcaagtcagggtattaaaattttttttttcctcacagattttggagrctagaaagttcaagatcaaggtgctgacattcagtagctggtgagggctttcttattctatccacacatggtagaaagggggaatctaggccatatcctctggtggcaaaaggcagaaggacataaaaagagagctaaaaagtttcctccatcccttttataaggttgctgtattaatctgttctcatactgctatgaagaaatacctgagaatgggtaatttataaagaaaaagaggtttaatggacttacagtttcacatg

SEQ ID NO: 630444 - DNA, 637 bp, Homo sapiens
cactggagcctctttgaagcttcatgctagagcaaagataggaggtggaaaaagaagtgggaaaaggggaaagataaggttgaagaaaaggtgattgattttattttttccaggcacggttccccagttatacatgaggaaaagaaaaaaaaatactttaatttccttgagcagaatcccccaatgatatggaaggattcttaatgagcttaagttaattaaagccacaccagaaattgactatgctttctaaatattctttgatatgatrttgtggattttcttttactttatagtgtatgtttcactgaaaagttccaaccttgtttccgccaaggtaaaaggaaaagatgattttctattcattcaagtgtcatgattttaagctgttcatgacaaacctgccaacagatccaaggtgctcagttaagaattccaggttaggtaaaaaacttggagacagttaaatacaagaacagattttgaggcaagaagcaagatagaaatggaatgaaaagaccattttttcctgagaataggattgggatgcccagaactcctttatatcaggtgctagtgtccaactgtctgtgttccattgtaaacaaagttacttttggagtaaatttatagcctt

SEQ ID NO: 630445 - DNA, 555 bp, Homo sapiens
actattcaaattatgagttatcactaagagcataattcgtgcagagacacmgtaatgcccaccatttatttccgctagtgttttacactgttccctctcttccccttttttgtcttgatcagacaatctcagggcagggtggagaatgaaagtgtcaaccttttaaaaggctcacaccttatgagatacataggtttgtatttcttggcgctgaaatgttcagactagtcttttagttttattagccacttcttggtgatatataaatcaataagagagcactttaaaagcacttaaaataggtatgatcataaagagcagctagctaatttgagaattttatttattttatgataagaattttcatagattcctgttgattccagtcattctaaaacatgccatttacccttcagtctttcctagttggatgtgtttggcagattggttgtggaatgtagaaatatgatttatgccttttaattttagagaaatgtaactcagaacaaattacatccatgctttgcattgaaatgggagttcaggaaaacaaac

SEQ ID NO: 630446 - DNA, 555 bp, Homo sapiens
actattcaaattatgagttatcactaagagcataattcgtgcagagacacagtaatgcccaccatttatttccgctagtgttttacactgttccctctcttccccttttttgtcttgatcagacaatctcagggcagggtggagaatraaagtgtcaaccttttaaaaggctcacaccttatgagatacataggtttgtatttcttggcgctgaaatgttcagactagtcttttagttttattagccacttcttggtgatatataaatcaataagagagcactttaaaagcacttaaaataggtatgatcataaagagcagctagctaatttgagaattttatttattttatgataagaattttcatagattcctgttgattccagtcattctaaaacatgccatttacccttcagtctttcctagttggatgtgtttggcagattggttgtggaatgtagaaatatgatttatgccttttaattttagagaaatgtaactcagaacaaattacatccatgctttgcattgaaatgggagttcaggaaaacaaac

SEQ ID NO: 630447 - DNA, 598 bp, Homo sapiens
attgcagccccatgcacttaagacagggtacaatgtttcaggtatgcttgataagttctagatatctaatctacacatggtgactacagttaataatgtatacagtcatgcatctcttaatgatggaaacatgttctgagaaatgcgtcattagacaatttcatcattgtgcaaacatcatagagtatacttacatagacctagatggcataatatacacacacctaggctatataaatatatcctacctctcctaggctacaaatctattacagcatattactgtactgaatactgtaggcaattgcagcacaatggtatttgcatatctaaacacagaaaagatacaataaaaatacagtattatgggaccatcgttgtgtatatagcctgcaattgaccaaaactttgttatatagcayatcaatgtactcaaaacttgctaagagagtagatctttagtgttctcaccaccaaaaagagggagagggtacagtagctatgtgaggtgatgaatataatcttagcttgattgtgttatttcacatgtatatgcatatcaaaacatcatgttgcataccttaaatatacataaatt

SEQ ID NO: 630448 - DNA, 556 bp, Homo sapiens
tttatcttagtggtaaaaagagctgatcaagcctttcctctgagttccktgcagatggggactgccagggagatttagaaggatttgctatggtaaaggccctcgcatagcatgctcaaaagatacaataccttcattatgaaatcactgaagagtaatagctgactagtaccaacctgtgacggcttgccccagggtgcctaggaaatgagaaaaacgaatagaaagttttgtctaaaattaactttatttgtacagctgtcctttattctgagatgatggcctttctaccctttggcatttaacatgccctttcttctattaaataataataataataaataaaaacactttttaactgtcctttcttgactatataaaaaataacaatcctacaatgattcccatactttttctaactcacagttccgtgaaatctaaattccagaaacagttgttcattatggaacataataaaggtcatacatatgtcttattcattgaataaacaaataaattaataaaattaaagtaaaactgacataaaagttgagaa

SEQ ID NO: 630449 - DNA, 556 bp, Homo sapiens
tttatcttagtggtaaaaagagctgatcaagcctttcctctgagttccttgcagatggggactgccagggagatttagaaggatttgctatggtaaaggccctcgcatagcatgctcaaaagrtacaataccttcattatgaaatcactgaagagtaatagctgactagtaccaacctgtgacggcttgccccagggtgcctaggaaatgagaaaaacgaatagaaagttttgtctaaaattaactttatttgtacagctgtcctttattctgagatgatggcctttctaccctttggcatttaacatgccctttcttctattaaataataataataataaataaaaacactttttaactgtcctttcttgactatataaaaaataacaatcctacaatgattcccatactttttctaactcacagttccgtgaaatctaaattccagaaacagttgttcattatggaacataataaaggtcatacatatgtcttattcattgaataaacaaataaattaataaaattaaagtaaaactgacataaaagttgagaa

SEQ ID NO: 630450 - DNA, 584 bp, Homo sapiens
gtcacactatgagagggcaataatgacactaaagaacgtgtaataggatccccaaagcccttcttgtggtgtatataactgtgaccctacaacttcagcaatcctaggagccctcatcactgctgaatagagaaaatgccgcctgcttccctgtgtcttcctgatggaacatgaccaccccagagcagagagcatcactcagaagaaagacctatggaaaatgcaaatattatttttatcatgaattattcacttrtaaaggttcctgtcagagactgataccaaaaccaaaaaaaagtaccattatttccaaagtctctgaagaggctaaaatacaaaacattttacataggtctggtggattatttagagaaacataaaaacatttgtcagatgagaaaaactttcttgtaatactcttggtcttttctaaagaatcttcctaatatccttattttcttctcatttttcttaatttctgcctaattttggctttagtcttttctccatttattcttacacttcttgcaactctcttttccccaaaacccaaaaggaagcatatggggaatataattttttta

SEQ ID NO: 630451 - DNA, 584 bp, Homo sapiens
gtcacactatgagagggcaataatgacactaaagaacgtgtaataggatccccaaagcccttcttgtggtgtatataactgtgaccctacaacttcagcaatcctaggagccctcatcactgctgaatagagaaaatgccgcctgcttccctgtgtcttcctgatggaacatgaccaccccagagcagagagcatcactcagaagaaagacctatggaaaatgcaaatattatttttatcatgaattattcacttgtaaaggttccwgtcagagactgataccaaaaccaaaaaaaagtaccattatttccaaagtctctgaagaggctaaaatacaaaacattttacataggtctggtggattatttagagaaacataaaaacatttgtcagatgagaaaaactttcttgtaatactcttggtcttttctaaagaatcttcctaatatccttattttcttctcatttttcttaatttctgcctaattttggctttagtcttttctccatttattcttacacttcttgcaactctcttttccccaaaacccaaaaggaagcatatggggaatataattttttta

SEQ ID NO: 630452 - DNA, 584 bp, Homo sapiens
gtcacactatgagagggcaataatgacactaaagaacgtgtaataggatccccaaagcccttcttgtggtgtatataactgtgaccctacaacttcagcaatcctaggagccctcatcactgctgaatagagaaaatgccgcctgcttccctgtgtcttcctgatggaacatgaccaccccagagcagagagcatcactcagaagaaagacctatggaaaatgcaaatattatttttatcatgaattattcacttgtaaaggttcctgtcagagactgatacmaaaaccaaaaaaaagtaccattatttccaaagtctctgaagaggctaaaatacaaaacattttacataggtctggtggattatttagagaaacataaaaacatttgtcagatgagaaaaactttcttgtaatactcttggtcttttctaaagaatcttcctaatatccttattttcttctcatttttcttaatttctgcctaattttggctttagtcttttctccatttattcttacacttcttgcaactctcttttccccaaaacccaaaaggaagcatatggggaatataattttttta

SEQ ID NO: 630453 - DNA, 598 bp, Homo sapiens
gcctggctgtcttctaggcctcccctataatgagttccaccaaagccacaagcttacagacattctggaagtaggcagatgccttcaccaatgtctttaggagtatcacagacaaaataaaactttcagaaattattttgttgataaagaacttacatttgaaggaaaagtagagaaagagatgacagaagcaaaacaaaagaatttaccccatattttgaagagtttgtgcaaaattggtattatcatttacagaaagtcacactatgagagggcaataatgacactaaagaacgtgtaataggatccccaaagcccttcttgtggtgtatataactgtgaccctacaacttcagcaatcctaggagccctcatcactgctgaatagagaaaatgccgcctgcttccctgtgtcttcctgatggaacatgaccaccccagagcagagagcatcactcagaagaaagacctatggaaaatgcaaatattatttttatcatgaattattcacttgtaaaggttcctgtcagagactgataccaaaacmaaaaaaaagtaccattatttccaaagtctctgaagaggctaaaatacaaaa

SEQ ID NO: 630454 - DNA, 524 bp, Homo sapiens
aaacctgcttgacaggaaacaagggaaaggaaaatccatacagggataaaaacatatcacatattgacccaatctgacttaatataggtacatgtaactgagttctgttgattcttatcgtctccgttctcttcactcctcttcattccaytgccactgtattagttcaggactatcatttcttactacaaaaaccactgagcccagcctccttccccactactatcagagtgggtttcctaacaacaacaaaaaatcaaatgataccatgtcactggactggctgaaatggtttggaacatcttggctgctttcaggaattaattcaaactccctagcatggcacatgagactctgggaattggaccttgccttctccagcctcatctcttactattcctcagcatatactctaccccaaagccataaccagacaagaatatgatgcagtattccaagtcttcctgccttaatttatgccgttccctctatctggaactcctttccttccaatcttcttatat

SEQ ID NO: 630455 - DNA, 618 bp, Homo sapiens
tgcgagggactgctttcattatctttgcatccctgcaatgcttaatgcccagcctgggatggagaaggcattcaatcatatttgatgagctacactgcctgaaagatgtgtggctttaattaagggtgtgtagggaagaaggtaggagtcttaggcagtgggttggtgggagaatggtggttgaggtgagaactgtttaagtaaaggccggatgattatacacagaagtttagaagttgttttctcgaagatctcagtcaactggaaagactaaaaaagaagcttttttgttgttgttgttgttgaagaaagaaattctaaatttctgaagctcaaccctgcttgtgatgtctcattttatgtgaaaatttgactgggctaagggatgtccagatagctggtaaaatattatttctcagtgtgtctgtgagggtgttygtggaagagattagcatttgagtcagtagactaagtaaagaagatccacccaccctcatcaatgtggttgtgtaccttccaatcccttgaaggtcaaaattgagcaaaaaggtggaggaagcatgaattttcactttctcctctagagttgagacatcaatccccctgccctcaaacatc

SEQ ID NO: 630456 - DNA, 583 bp, Homo sapiens
tgtcaagcaaattcaaatcaaggtaataagttttgctgatcaattctaaactcactgactaggttaacattttgatttttttcccctgagaacaccactctcgtatcagcctaaatatctggaggctgtgatttatctttgatgtcagtaacaaggttctatattttggcattcatagaaaaacaaaacagtaaatgaagcacatattggcataactcatatgttacactataccttactacartcttatacccttgggtaagctgattgaaaattaaatgggaatagacatttaaattacaccaaagggatgtcaatggattgcagacttacttttgtatcaatctattcttgattgcacagtattttattagtggtcactatataacacttttcaacaggccattgcatactgtgtattttactagatgcaatactctgtgtttacgcaattacagaataaccaatatttggctacttatttcaggtagcatattaagcttaaacaaagaaatttaaattaagatcttgacattatctaaatgaatacagtgtttaattttgtaaaaattaatttgaccta

SEQ ID NO: 630457 - DNA, 587 bp, Homo sapiens
caaaccaggaaaagaatgtgtgctctaccccgacattagtgttatggaaacaaaaacacacacaacactggatgctgtgttcaactacaacgtgcatttcctagatgttgctgattcaacttgatctcaacatccatattataacaagctagtctggtgcctccagagtgcagtgtgaacgttcagtgccttaaattaagataaagtactttttttcttttaaataagagctaaagcttaacatagcatgaacggaacaaaaaagaaaaacaaataaaacatttagttttaaataatagaatatggagtttggagtaaatagaacacatcttctggaattttttatgagactggctacttgaaactttttaaaaataagtttcttatttcttctcaggaagctcatttttttttaaagttttgaagtaaactcataatggaaccagggattcagtgatcaataagattttcaacatcctccatatcacacttgwctaaaggcattgttttttggttttattttccagcaaacatgagttgggcacttatactgtgctaagtgctaaagggatacagaatgaacacca

SEQ ID NO: 630458 - DNA, 616 bp, Homo sapiens
aaatcatacattctcaagaaaacaccgtgccctgaaggttaggctcttggaggaagtagttgaccagagcaggacaaaattatgtgctagctagaagaaaaagtgggcaaaaattctggatttgaatcctygtcctaaactctttggacttcagttttttcctctgtaaaatagtgataataataacgtccactatacttttctcacagggttactataaagagcaaatgaaataatatatgtgaaagtatagtagcagatgtgaatctcagtcccaaatgtcagaggggcaaagaaatacaacttcatttattcattgcaagctccattctctccaatagcaaaaacttaatcttagtcactttagagttcttcttcctccattcctttggttgtacctgagttctttggaacttatgtaatgaaatgctttcggtatctggcttgtttggttcacttcacaaatatctgaagacctattatgtgcaaggcacttaaacaaaagatttgctctttttcacaaggaagtatagaatccagagctttgctcctcttttttgactataccttaaatcctttaaggctcatcaagacatccaatttcctcttgtagaaa

SEQ ID NO: 630459 - DNA, 606 bp, Homo sapiens
acagagttgggaagagatgtgcataaatgtctcagacttcatgtaaaccccagtttttcacaaaacttttacctggctgtcaaattaagaagggatgagggaggaagaaaaagcccaaaagactcagatacatactagttaatgttactctttctgtccctactcctcccaatgtagttagtttaatggaagcttacaaaaaagttatattggaaaaacaagtctacattractttgcatatctctatgtaaaattttttaacccactccattatttaagtacagaactgttttcccctctgggttatcaatttatgaattatgactttaataactctttatccttcattgatttctcttctgcttacaaatttgggaactcttcaaggctctgattttctttcttttttttctgttttccttgggtctctgttattggtcttcaactatatgttttattttttctaaatttgtgagcctatatctccagtctgacatcaccttaaacgctcaaattctctcttgtatatttctgtacaattctctgtcttatacatttcttatacaattctctgtcatccaattaaaccaatatgttcagaatca

SEQ ID NO: 630460 - DNA, 613 bp, Homo sapiens
gtggggcctggtaggatcatgagggtggatccctcatagctgggtgctgtctttgtgatagtgactgcgtccttgtgagatcttgttgtttagagtgtgtggcatctccccctacactctctctctcttgctcccactcccatcatctgagacacctgctctccctttgccttccaccatggttgtaggcttcctgatgcctccctagaagctgagaagatgccggtgctctgtttcctatacaagctgcagaactgtgagccaattaaacatctttttttatataaattacccagtctcaggtattcctttatagcaatgcaagaatgacctaatacagaaaattggtaccaggagtggggtattgctataaagatacctgaaaatgtgaaagcaactttggaactgggtaactggtagaagttggaagagtttggagggctcagaagaagatgggaagatgagasaaaggctggaacttcttagagagtaattgaatggttgtgaccaaaatgctaatagtaatatggacagtgaagttcagggtgatgagatgttagatgcaaatgtggaaattattgggaactggagcaaaggtcacacaagttatcat

SEQ ID NO: 630461 - DNA, 593 bp, Homo sapiens
agttcctcctatcaaagactcagaggcccaggaggactgaatggtttccagtgcaaagcccagggtgccactgccctgcaccaccccaagaggctgctcctcacatgcaggttgttctggctccacctttagctcaaaaaagcccaggtacagctttggcagccacttcaaaaggtgcacaccataagccaccatgtggtggcttctacatggtattaagcctgcaccgcaggcacacggaatgcaagaatgagggaagcttggcagcctccacrttgatttcagaggatgtagagaaaagcctgggtgcccaggcagaagcttgctgcagggaaagagctcctacagagaacctcaactacaatgtgcagaagtgaaattgtgggttggaggcctcacacaaagttcccaactggggtacagtctagtggagctgtaggaaggcaaccactgccccccagaacccagaatattagatcctctggaggcttgcaacctgtgcctggaaatgctgcagacactcaactccaaccacttgagagcaaccacaggggctgtacccttcagagacacaggaatagagctgcccaagg

SEQ ID NO: 630462 - DNA, 574 bp, Homo sapiens
ataagttgataaaatgcgatctaaatagttgttagtaatcagaatttggttttcctttggcttagtttttcctatctggttttggttttatggtcacctttccagctatgagcmaatgcttaaaaaaaaagattaagaaaataaaaacactattgtgaaatattgttcagtcttctaaatatacagattgttcaggaaattgagactgaagtttgatattatgctagagacatatgcattaaatacccaagcagcacacagacataaaatgaacacatttcattcctgaatgcctgttaaagaaaaaaaaaatgatgattccctcccacactgatactctgcaacagtatgagagagaaagatagagagagagagacagaaacagagagaagtgagaaagagaaacagagagagacagagagagagagagagagagagagagacagaatgagaaagaatacacaaatttactggttagaatggcgaagagattggagccaagttcttgtgggtaaccatcaatccctttatttccaaaggatcatcatattctccttcatcagatctcatctac

SEQ ID NO: 630463 - DNA, 564 bp, Homo sapiens
tgcgcacatgaatcactgtagacagatttttctttgcatatgctaaattaagcaatgcagggagcaaactgcttctctttggatagctkattaaaattcagattcatgactggaatttcatagtaaataagataccctaagtcctggtatgaagtaccaggacttcattaggttctttgtattatactataaatcagtgtcagacattatgtacattccatgaaatttacttgtttaatttcttaatccagttaagcagggatcagaaactgtccagtgatttatgatcaatgattttaccaaatggggttaaaaaaagtctgtactcagttatagatcaattatggcactataagaagggtcaagatttgactaggtctaccctatcttatggcagataaggatttttattccctttttgtagataaaataactgaggccagaaaaagttagcaatttgttgacttaatgcaacatctttgatttgaatcagtactggaagtatcttatttactatatgtataccctatgggtctgagctaactaagatgagaaggttggtga

SEQ ID NO: 630464 - DNA, 612 bp, Homo sapiens
ctatcttatggcagataaggatttttattccctttttgtagataaaataactgaggccagaaaaagttagcaatttgttgacttaatgcaacatctttgatttgaatcagtactggaagtatcttatttactatatgtataccctatgggtctgagctaactaagatgagaaggttggtgattaggaaggagctggtgaaagtaaggagggagaagtgattttcacagaactattyagaaaaattcaaatttcagcaaggaaaattcagcaggatctacacatggataaggtcaagtcccacttgtccaacagaaactatttgccctatgctctctgttatgttgtagtcctagtgctacaggtaagaagactaaagaaaacttggctctgattaaggcacagataaaaaatctgggcttaaatttcaaccgggctcaaatataaagaattaaagcatttttttccatcttttttctttttcctgctctttagttctgatccctgacttttgggatgcaacttctattagtgctgaatcaagtttaatttaatcatgtgaaagaagtttcctaaatgcagggcaacaatttaactcttaagataaagttaag

SEQ ID NO: 630465 - DNA, 500 bp, Homo sapiens
ctgtgcttcagcatatttatttatatatatttcaatakctttggggctacaaggggtttttagttatgtggatgaattgcatagcggtaaagtctgggcttttagtgtatccattgcacaaatagtgtaaattgtacccaataggtaattttccatccctcactcttctttataccttcccccatctgagttgataatgtacattataccactctgcatgcatctgtgtacccacagctcacctctcacctataagcaataacatgcggtatttgattttccattccttagttacttcacttgggataatggcttcaagttccatctcagttgctgcaaaatacaatatattgttcctttttatggctgagtagtattccatgaaatatatatatatacacacacacaccatacgacatatatatcacatatatatctatgtaaatatatcatgtatatattatctataaataaatgtgatatatatatgacgtcatatc

SEQ ID NO: 630466 - DNA, 597 bp, Homo sapiens
tttaacctccttggttaggtatattcctacgtattttattttcttttttgcagctatggtaaaaggggttgagttcttgatttgattttcagattggtcactgttggtgtatagcagagctaatgatttgtgtacattaattttatatcctgaaactttgctgaattcatccgttctatgagctttctggaggagtctttaggattttttaggtaaacagttatatcatcagcaagcagtgactatttgacttcctctttaccgatttggrtgccctttatttctttctcttgtctgatttttccagctactacttccatttctatgttaaatagaagcggtgagagcgaggatccttgtcttgttacagttctcagagggaatcctttcatcttttccccattcagtattatgttggctgtgggtttctcatagatggcttttattacctcaagttatgtcctttctatgctaattttgttgtgggtttaaatcataaagggatgctggattttgtcaaatgatttttctgcatctattgagatgattatgtgatttttaaaatgttatgcatatgtggtgtatcacatttattga

SEQ ID NO: 630467 - DNA, 592 bp, Homo sapiens
atggattactactaataatttaagaaatttggaaataattaatatttttaaatagttgattattgttatacttaaagatgactcaaagttaattcaaaataatctcttcttgttgtttgcttacttgccttcagaaaagctcttttggctataatagagagaaaaaggtagagttgtagttggtggtcatactccaggaaatctggatttgatggacatgcttgtaaccgctgtgctatgctgagtggcccctttcacaagagctggatgacagtaactaaatccgtactattacatgtaatcatagctgtctacaacctggaaaaggtcttgcaactcttttaaatcctttcactttgttttatctagactacatrtggtttggaaaagcaatgacatgtacatgtagtaggaaggtatatgaagcatttctatttatgggtgtgtgtgtgtgtgtgtgtgtgtgtgtgtgtgaagggtaagaatcacaatatgtcttctgaaaatagaaaaaaacaatttgtctatttcaattgtactcacttttaacccctgcacaattctagtgaataaaactgactgatgtttgaaa

SEQ ID NO: 630468 - DNA, 385 bp, Homo sapiens
ttcccagaataggaaagcttccaatagatgacacagtaaaagtcctattgaactttaaggaatggcygatgcccagtcattatttcagtttcctcaccacagataacaggttacaaggaaaagaatgaccatatctgcaggtgcaatcaaccctgatcctcaggaagaggcaaggatgctattacacaatggccacaggaaggaatacatctggcacccaggtgatctatcagggtctctgttggtatttgccttcccaattctgttggtaaatgaataagtgcaacaacaacagtctaagaaaaacatacttacagagactcacacccctttgggatgagggtttggtttattcaaacaagcaatcctcctagaccagcaaagc

SEQ ID NO: 630469 - DNA, 385 bp, Homo sapiens
ttcccagaataggaaagcttccaatagatgacacagtaaaagtcctattgaactttaaggaatggccgatgcccagtcattatttcagtttcctcaccacagataacaggttacaaggaaaagaatgaccatatctgcaggtgcaatcaaccctgatcctcaggaagaggcaaggatgctattacacaatggccacaggaaggaatacatctggcacccaggtgatctatcagggtcyctgttggtatttgccttcccaattctgttggtaaatgaataagtgcaacaacaacagtctaagaaaaacatacttacagagactcacacccctttgggatgagggtttggtttattcaaacaagcaatcctcctagaccagcaaagc

SEQ ID NO: 630470 - DNA, 571 bp, Homo sapiens
tcaaaacaaatctcaaaatcatcaagctggttatcaacaaatttaactrtctataaaaacaaagtttgaaactatttaaacaaagtccccaaattcaaacactcatatgctcagaactcacaatgtccaacatttgataaaaaattaccagacataaaaagaagcagaaaattgtgagtcataactaaaagaatacccaatcaacaggaaaagatttagaaatgaaagagatgatgaaattatcacataagaactttaaacatggagagttcatctctacaaatatttctttaaaattagccaggtatggattttgtaggaaaaatggcagataggaggcaggactaaattgcagcccctcctcagacagacagagcagcatgtggagactcgcatccggacctttttgatccaagaactactgcaggaatgtaccagaaaagctgagagaatccacagaccctctgaaggaaatggattgctcctgcagtacccaagagacaactcaaatgcagcaagggcccaaactgcccaaaagaggaaaggggaatcatttacccctgaacgcaca

SEQ ID NO: 630471 - DNA, 583 bp, Homo sapiens
aactccattgacctaggaaccacacccccatcccccacagcagtcacagcaagccccacccaaggagagtctgagatcagatatgcctaaccctgctcccacctgatggttcttccctacccactctgatagctgaatacaaaggtcatatttttttgaagttccagggtcccatccgtcgcttgatcctacctatactaccacaactaatgctgtcttgaaagtgccacctcctagcaggaggccaaccagcaaaaactagttaatcaaacaactacaactacggatacctacagagtccatttcacccccctgccacytccactggagcagatgctggcatccacacctgcaagacccaaagactgcacatcacaggctctgggcagacacccctcagtaccagcctggagcccggtagccctggtgggtggctagacccaggaaagaaataacaatcactgcagttcagctatcaagaagacacatccctagaaaaaggcagagaatactacctcaagggaacaccatgtgagacaaaagaattctgaacagcagccttgagcccccaaatcttccatct

SEQ ID NO: 630472 - DNA, 572 bp, Homo sapiens
caattatcagccaagaattttgtatccagtgaaagtaagctttataaatgaagaaaggatacagtttttttttcacactaacaaatgctgagagaatttgtcacgacaaagacagcactataagaactgctaaaaaggagctctaaatcttgaaacaaatcctggaaactcatcaaaagaaaacctctttaatgcataaatctcacaggaccaataaaacaaaaatacaattaaaaaaaaacaaggtatacaggcaacaaayagcacagtgaatggaatagtacttcacatctcaatactaacaatgaatgtaaataacttaaatgtgccacttaaaagaaacagaatttcagaatggataagaattgaacaaccaaatatctgctgccttcaagagactcacctagcacataaggattcacataacttaaggtaaaggagtggaaaaagatattccatgcaaacggacaccaaaagtaagtagtaaaagctattcttacataagacaaaacaaactttgaagcaacagcagtttaaaaagacaaaaggggacactatgtaataataaaagg

SEQ ID NO: 630473 - DNA, 572 bp, Homo sapiens
caattatcagccaagaattttgtatccagtgaaagtaagctttataaatgaagaaaggatacagtttttttttcacactaacaaatgctgagagaatttgtcacgacaaagacagcactataagaactgctaaaaaggagctctaaatcttgaaacaaatcctggaaactcatcaaaagaaaacctctttaatgcataaatctcacaggaccaataaaacaaaaatacaattaaaaaaaaacaaggtatacaggcaacaaatagcacagtgaatggaatagtacttcacatctcaatactaacaatgaatgtaaataacttaaatgtgccacttaaaagaaacagaatttcagaatggataagaattgamcaaccaaatatctgctgccttcaagagactcacctagcacataaggattcacataacttaaggtaaaggagtggaaaaagatattccatgcaaacggacaccaaaagtaagtagtaaaagctattcttacataagacaaaacaaactttgaagcaacagcagtttaaaaagacaaaaggggacactatgtaataataaaagg

SEQ ID NO: 630474 - DNA, 631 bp, Homo sapiens
ttaaactataccctagaccaaatgaacttaacagatatttacaaaacattctacccaacaagcacagaatatacattctattcatcagcacatggaacttcctctaagatagaccatataataggacacaaaactattctcaataatttaataatgttgaaattatatcaagttctctctcagaccacagtggaataaaattggaaatcaactcgaaaargaacctttgaaattatgcaactatatggaaattaaataacctgcttctgaattatcactgggtcaacaatgaaatcaagaaggaaatttaaaaattcttcaaactgaataacaatgacacaatctatcaaaacctctggaacacaccaaaggcagtgctaagaggaaagttcaaagccttaaatgcctacatcaaaaagacagaaagagcacaaactgacattctaaggtcacatcttgaggaactagagaaacaagaacaaaccaaacccaaacccaagagaagaaaagaaataaccaagatcagagcaggactaaatgaaactgaaacaaaaacaaaaaaatacaaaagataaataaaatgaatagaccattagccagattaatcaagaaaagaagagagaagatacaa

SEQ ID NO: 630475 - DNA, 569 bp, Homo sapiens
ctcccatcttcagatggcctccactttcataaacctcccctcttctgaccttgataagcctcctctctcctgtcatgtcagaacacttcaacattcagcccaagtgcattctcattgtcattgcagcccctcctcaaagtctcagcaggagaactggaggaagctattctcctgctctttcaatcaggaattattactgtgaatccagagttctccaaggctttatcacatatcacaccccagtgttacagcccactcattccttaacgatatcagtttgctagagatgtgtgaacccagctcatggacccattgaagagataagctaggcaaattgtccctgccaacttccttcatgttttctctctgctgaggtctttaaggaccacaataaacagcatctctctttcctatgcaaattctcaacgaattaagagataaggtatagaagcaaggcagatagggrgcaaaatattacctgcatcgctgacaaaactttttattgcaaaacatgattcatacctgtaggtgagtggtcttaaaactgaaccccagaattagacaaattt

SEQ ID NO: 630476 - DNA, 599 bp, Homo sapiens
ctctctagggttccagaccccaaagatccaaatattgtaggaagattggaagaaaaattaaatatcctccaacgatgaaacagatcaaagcaaaccctacttttttgttagttactttgcaatgggaagcagcattggcttcttaaaaaaaacaaacaggctgggtgtggtggttcaagcctcactttgggaggccacagtgggcggatcacctgaggccaggaattcaagaccagcctggccaacatggcgaaaccccgtctctactaaaaatacaaaaattagccaggtttgttggcacgcacttgtaatcccagctacttgggaggccaaggcaggagaattgtttgaacccaggaggaggttgcagtgagttgagatcgcgccactgcactccagcctgggcaacagagtgagactctctctcaaaaaataaaaaaaagaaagaaaaaaaagaaaatttaaaaacaaacaaaaatattctcctaaatcagactasttccctagtctttcagggtctcctttcccttcttaaatatttatgtaccaacagggttcagatctaaactctccactcttctcatacttacactccctgg

SEQ ID NO: 630477 - DNA, 624 bp, Homo sapiens
taataacataagaatataaatgccaggggcagggcacagtggctcctgcctgtaatcccagcactttgggaggctgaggcaggtggatcacctgaggtcaggagatggagaccatcttggctaacacggtgaaaccccatctccactaaaagtacaaaaaattagctgggcatggtggcacgcacctgtagtcccagctactcaggaggctgagccaggagaatcacttgaacccgggaggtggaggttgcagagactgcgccactgcactccagcctgggtgacagagcgagactctgcctcaaacaaacaaaaaagaatataaatgccaaaatgggttaaatcaaatttttaccaaatcctgtattctatcccaaatagcgacacaagaaaagtttgacatgaatctattaycaatttatggatcaacattaagacagataatagagcaatagctcttcacacattacacgtaaataaggggaaatttcctttcttagtaaccaaaagaggaaaacaactctccactcactcaaattcttttgactgtaattttaggtggtaagctcaccctgatttgttgatcaacaccagcttctcaataccctgtgtctctcgaagctt

SEQ ID NO: 630478 - DNA, 525 bp, Homo sapiens
tggatcaggacccctttcctatgacatatttctggtgaccacagcagggactacagtgcagcaaccctgacctaaaggctaactttgggtaagtggtgaggcctggtaatatctttcttgtgaaccacaaaagggacaatactgaggaggtccctgagccaaaggaaatagactgcagcactgattggacaactttggtaagtggtggggtacccgggtaaagaatgagattgggttagaggcccagcttaggggatttagagtctctcctaagacagagtgggttagaggccactcttaatgaaagtcaaggggggaggctggcaagatggttgaataggaacagctccgatctgcagctcccagcgaratcaatgcagaaggtagatgatttctgcatttccaacaggggtacccagctcatctcactgggactggttagacagtgggtgcagcccacacagggtgagctgaagcagggtggggtgtcacctcacccaggaagtgcaaggagttggggaattc

SEQ ID NO: 630479 - DNA, 550 bp, Homo sapiens
tgaattcttccttgtgcgagatccaagaaccctctattggggtctggatcaggacccctttcctatgacatatttctggtgaccacagcagggactacagtgcagcaaccctgacctaaaggctaactttgggtaagtggtgaggcctggtaatatctttcttgtgaaccacaaaagggacaatactgaggaggtccctgagccaaaggaaatagactgcagcactgattggacaactttggtaagtggtggggtacccgggtaaagaatgagattgggttagaggcccagcttaggggatttagagtctctcctaagacagagtgggttagaggccactcttaatgaaagtcaaggggggaggctggcaagatggttgaataggaacagctccgatctgcagctcccagcgaaatcaatgcagaaggtagatgatttctgcattwccaacaggggtacccagctcatctcactgggactggttagacagtgggtgcagcccacacagggtgagctgaagcagggtggggtgtcacctcacccaggaagt

SEQ ID NO: 630480 - DNA, 548 bp, Homo sapiens
ctccctcacagcctttagaaggaacaaagcctgccaacaccttggtcttggatttctaacctcaggaaaggcgacaataaatttctgttgtttaagccacccagtctacggtgccttgytacagcagccctagcaaactaatacaatgaccgagtctcagaagtcacacatcatcactacttccatgttctatttgttacaagtgagctgctaagttcagtccatactcaaggggaggggaattacactctatctctttcaaaaaatttgtgggcgtattttaaaaccacgaacaagtccataagatacatttgaaaccttatgataaactcttctcttgtttaagctaactccaattggatgcagtagttcttcatttaaaagccttgttttgttttgttttgttttttgaaaagtctttattaagaatttatcggggccaagcactgtgactcatgcctgtaatcccagcactttgggaggctgaggtggggagatcacatgaggtcaggagtttgagaccaacctggtcaacatggcgaagcccc

SEQ ID NO: 630481 - DNA, 548 bp, Homo sapiens
ctccctcacagcctttagaaggaacaaagcctgccaacaccttggtcttggatttctaacctcaggaaaggcgacaataaatttctgttgtttaagccacccagtctacggtgccttgctacagcagccctagcaaactaatacaatgaccgagtctcagaagtcacacatcatcactacttccatgttctatttgttacaagtgagctgctaagttcagtccatactcaaggggaggggaattacactctatctctttcaaaaaatttgtgggcgtattttaaaaccacgaacaagtccataagatacatttgaaaccttatgataaactcttctsttgtttaagctaactccaattggatgcagtagttcttcatttaaaagccttgttttgttttgttttgttttttgaaaagtctttattaagaatttatcggggccaagcactgtgactcatgcctgtaatcccagcactttgggaggctgaggtggggagatcacatgaggtcaggagtttgagaccaacctggtcaacatggcgaagcccc

SEQ ID NO: 630482 - DNA, 585 bp, Homo sapiens
ttgatctcataggagtaaaaagtagaacagagggtactagaggctgggatgggtagggaaaagggaggaatagggagagattaaaggctacaaaattacagctagttaggaggaataaattctagtgtcctataccactataggatgactatagttaacaataatatatagtttcaaatagctagagggaggatattgaacattctcaacacaaacaattgataaatgtttgaggtgatggataagctaattaccctgatctgatcactgtacattatgtgtatcgaaacatcagtatgtgcccccattaatrtgtacaattgttattcgtcaattaaaaaattaaacaaaaacaaaccacattgcttaccaaaagccaagaaagtgtatcttgagatttttaattgctacttcaaaaaatgagattttcatgtttattagctaaccaggtccttcatatctttactagctgtgagaactcatatgaactgcttaacttttttgccattatcaaaattacttagtttacttttagatatcactttggccagttttgctggggagaggtcactattcccatagtga

SEQ ID NO: 630483 - DNA, 597 bp, Homo sapiens
aggtgttagaagcagccattccacatcttgaatgctttgctacttagaaattttttctacctgatactctaagtcatcatcattttttttttttttttgagacagggtctcactctgttactcaggctggagtgcagtggcaccgatcatggctcactgcagcctcgacccccwaggctcaagagatcctcccacctcagcctcctaagttgttgggactacaggcatgtgccaccatgcctagctaatttttaaattttttctagagacaggtctcactagggtgcccaggctattctcaaactcttgcactcaagcaaacctcctgcgttggcctcccaaagtgctgggattacagatgtgagccactgcacccagctccctaggtcatcattcttaagttcaaccttccacaaatctctagggcatgaacacaaggcagccaagctctttgcaaaggcataacaagggtgacctttactccagtttccaataaatttctcatttccctctgagaccttgtcagtctggcctttactgtccatatttctattagcattttgatcacaaccattaaccagtctctaagaagttcaa

SEQ ID NO: 630484 - DNA, 439 bp, Homo sapiens
accaccacacccagctaatttttaatttttttttgtagagatgggggtctcactatgttgtgcaggctggccttgaactcctaggctcaaagscattctctcacctcaacttctaaaagggctgggattataggtgtgagccaccatacccagccagggtctatattcataaagatattggtctgcagttttatttttatgtccttgtctggttttggtatcaggataatactgacctcatagaataaactgaaaagtattcatccttcttttttttttagataagtttgtaaatatttctattaattcttctttaaatgtttgctacaatttgccagagaagaaatctaggcctgaatttttgttgttgtttttgttgttgttgttgttgttggcaattttatattacttgtccaatatttttacttgataaagatct

SEQ ID NO: 630485 - DNA, 462 bp, Homo sapiens
ttagagaggcccagaaaggagagtttgggacctgatttctccaaagtacagagaagacatgatgagaatcaggttgagccagggtcattcctgggaattccatcagaaacaagttagaagcaggctgtagccttcaaacggctggctaggactcaaagccaactgcattccacctccttcctctgcactcatttcacagtgtcaggactgtaggctttgggatggcaggcagagcaatccctaccttcagataagatgyaggtttaaaaagccaaaaatcctctgtgttatgttccgaaggaaggggtggacaggatacttagcatctctgcccaggggcacagagcagtaagaagcatatttccaaatcctctggggaagtgagttggaggctgataaggctgaattgtccagagagggggcaaagcggccatactgtctgctcatcctaaccacaggatc

SEQ ID NO: 630486 - DNA, 588 bp, Homo sapiens
tgtaaatatttctattaattcttctttaaatgtttgctacaatttgccagagaagaaatctaggcctgaatttttgttgttgtttttgttgttgttgttgttgttggcaattttatattacttgtccaatatttttacttgataaagatctattcaaactttctatatcttcttgagtcacctttagtaatttgtctctttccagggatttattcactttatctaaattatctaatttattggcatactattgttcatagtattattttataatactttttatttctattaggtcagtagtgatgtccctttttcatttctgattttagcaacttgagtcttctctttttctcttgttcagtctagctaaaatgtttgttgattttgttgaycttttcaaggaattggcttttggttttgatttttttttctctattttttaaattatctatttcattaattttcactctagcctttattacttcctttattctacttgcctgaggttgggtttgctcttctttttccttaagtgtcagggtggaagtttagtttattgatttgagattattcttcttttataatata

SEQ ID NO: 630487 - DNA, 462 bp, Homo sapiens
ttagagaggcccagaaaggagagtttgggacctgatttctccaaagtacagagaagacatgatgagaatcaggttgagccagggtcattcctgggaattccatcagaaacaagttagaagcaggctgtagccttcaaacggctggctaggactcaaagccaactgcattccacctccttcctctgcactcatttcacagtgtcaggactgtaggctttgggatggcaggcagagcaatccctaccttcagataagatgtaggtttaaaaagccaaaaatcctctgtgttatgttccgaaggaaggggtggacaggatacttagcatctctgcccaggggcacagagcagtargaagcatatttccaaatcctctggggaagtgagttggaggctgataaggctgaattgtccagagagggggcaaagcggccatactgtctgctcatcctaaccacaggatc

SEQ ID NO: 630488 - DNA, 465 bp, Homo sapiens
gctgtgggatgagagccccctgaggacatgcagcagatgtggcaccaacatcctagcccaaacgaaaacttgccacagcagggcagagctgggcttgggcgcctaaagcttacagagcttggaaggtttttttttgtttgtttggtttgttttaaaaaaaaaagagtacaaaaataatttcctttkgcaaatttcacaaaacccctgagcacatggacacattgctaggccttggaaagggccctggagcgtgaagggctggaagctgaagctgcatcagcctcatggtgaatccgcctcggggctggaggaagggcccagaggcgatctgagcaccacccgccttcacaaaggccctgcctccagcccaacagacagatgaggctccggaagacattccttcttcttgatgggagtcccgctgctacttaaccctccctgcagtaggtccaagtctgtctgtct

SEQ ID NO: 630489 - DNA, 594 bp, Homo sapiens
gttttcaatgtttatccctgtggtagcatgaatcagcacttcattcttttttaatgactgaataatattttattatgtgtacctagtgcattttgcttatttatccttcagttgctgggcattttgattgtccctactttttggctattatgaataatattgctatgaatattcatgtacaagttcttggtagacgtgtttttatttctcttgattaaataccaggagtagaattgcttggtcatttggtaattctctgttttaacattttgagaaactgccagtcttttccacagtggctgtgccattttacattccttctaataatgaatgaggggtgtgatttctccgtatctttcccagctagtctgtttgctttccarattattaatgtgcttgaatttaagtttaccattttaatatttgtttttatttgccttgttttattatttcttctcttattctttatttcctgccttctcttagattaatatgtatgttttatttttcaaaaatcttttcctctatcagctttttagttatacatttatttctcgttcttctagtgttcactatagagactgcaacatatat

SEQ ID NO: 630490 - DNA, 625 bp, Homo sapiens
cacctcatttcaacagactgaaagaagaagagataagccctttcctggaggtaagtttactgactttagtctcagctgtttcttatatatttcacattaaagaattacaaaacacacagataagcaagcaaatgtgacacatggtcatgagaggcaagggtaaaataaagcagacacagaattgggccagatataaaaataataagaaagagaaygtaaattaaatataattgagattctaaaatacagttcaacaggcaaacaacacgcaaaagcacacgagaaagagaagattctggaaaaacggcagactcaccaggaatcgatctttccacctagacaataactgcactggcagaatctgtccggtggataactattttgacaactctggtatctactgaaggcctgctacttccaagggaaggcttggatgggaaactgtagttcattttggtcaacatcagcacttaagaaagtaacagctccctatacccccccggccccgccccgcccctgccacccctatagcaggcagctgtgcacatactcctggagcagcataaacataccttacaagagtcaagacagacaaaaagaacactgcctccaaatttcagagatc

SEQ ID NO: 630491 - DNA, 546 bp, Homo sapiens
cctgcagggtaaaataaattaaaacacatacacacaaacactactaactcaaaccctaatgaagaagtaagaactcaataaaggtaaatatatgggcaattataaaagcctgtattactgtacmatgatatgtaactccactttttgttatctaaatgatttaagagactaatacttaaaagaaaattattagtctaaaggctagcattatttatttttctttttcttttttctttttttttttgagacggagtcttgctccatctcccaggctggagtgcagtggcgcgatctcggctcactacaagctctgcctcccgggttcacaccaattctcctgcctcaacctcctgaatagctgggactacaggtgcctgccaccatgcccagctaattttttgtatttttagtagagacggggtttcactgtgttagccaggatggtcttgatctcctgaccccgtgatccacccgcctcggcctcccaaagtgtggctagcattattttaactttggttttaattccacattctttcctacatcatt

SEQ ID NO: 630492 - DNA, 671 bp, Homo sapiens
acaaatgcttaccattgtgttacaactgcctatagtattcagcagattaacattctgaaccagtttgtagcctagaagcaataggctacaccagatagcttgggtgtatggtaggctatacctattctaagtatgttttagagatattcacaactacaaaatcacctaataatatatccctctgaaaataaccctgttaagtgatgcattactatatatggtggttacaggagatacactttagacccaaatacacaaatagattgaaagtggaaggatggaaaaagatattccatgcaaattgaaaccaaaagagagtggaggtgactatactaaaaataaataaaacagacactaaaccaaaaagtttagaaacaaaaaagaatagtatatgataatagaaggttcaatacacaaagaagatacaattataagcagtgggggagaacaaggtggctgactagatgcagccaggtgaaacagctcccactgagagaccaagatgactggcgtgcttctaacagatcttcagagggaaggcacccagagtgtacacaaggaagacacagaagctrggctgaagggggagaaagctgggaaccctgcatggggctactgtgcactgcaccaggactcgttcctggatcccaacagctcccggggaagaggtg

SEQ ID NO: 630493 - DNA, 453 bp, Homo sapiens
ataggaatgaagatcactgggctacaggagtacactaaaacccaatccaaggaagctaaaaagcatgataaaacaatacaggagctgacagacaaaatagccagtatagaaaataatgtaaccaacctgatagagctgaaaaacacactacaagaagtttataatgcaatcacaagtattaacagcagaacagaccaagcataggaaagaatctcaaagcttgaagacaggcattctgaaataagacagacagacaagaatagagaaaaaagaatgaaaatgaacaaataaaacctccaagaaatatgggattgtgtaaagagaccaaatctacaaccccctggtggcccttaaagaggtggagagaatggaaccaaattkgaaaacgtatttcaggatatcatccatgagaacttccccaacctaactagagaagccaacattcaaattcag

SEQ ID NO: 630494 - DNA, 519 bp, Homo sapiens
gtttgttggtgaagttaacctgtgtgctatacttgtcccactagcctaagtctggggaatttctgctcccctatcccattctccaccccttttaaataaatgcactggaatagtttgtgtaaatgggaattacctgttctttgaagggttagtagaattttcctgttaaaaccttttgaaactggttcccaactggggacttaatctttrccatctttacttaccatttcaacttatgatttgattattgctcattaggttcttttgtatctccttagatcaatttttatcatttatattttcttaaaaattgttcatttaatttagctttttaaattcatgggttataagttgtacacaagatattattaaatcttggtcttatcaaggaaccagcttatggttttactgatcaaccaaatttttttttctgtatttttcataccattaatttctaagcataaactttccttttgtttcttgaattgaaagtttagtttttcttatatttttttttcc

SEQ ID NO: 630495 - DNA, 529 bp, Homo sapiens
atttatgtatattaattttgttttctgaaactttactgaatctatttatcagatctgggagcttttttagatgagtcattagggttttctaggtatatgatcatatcatcagcaaacagcgacagtttgacttcctctttactgattcggacacctttatttcattatcttgtytgattgttccggccaggacttgtagcactatgttaaatagaagtggtgaaagtgggcatccttgtcttgtgccagttctcaggggcaatgctttcagcttgtccctattcagtataatgttggttgtggatttatcatagttggcttttattaccttgaggtatgccccttttattccagttttgctgagggttttaatcataaagggatactggattttgtcaaatgctagttctgtgtctgttgagatgatcatatgattttttcttataaattttgtgtatgtggtgtatcacatttattgatttagatgtgttcaaccatctgtgcattcctgctgtgaaacccacttggt

SEQ ID NO: 630496 - DNA, 441 bp, Homo sapiens
ctgaatttaaattcaaaattcaattatataagtatggggatggggagcaaactgtttgacaagaattcatgtaacaagatctgagatctatagtttaccacaagcttaatataagccacaagtatacccttactggttaaaaaaaaaaaaaaaaaaraacaatgccgtcttaaaaagtagagcatctctaacaagggaaatatttgtatccctataatctgaaccagttaaaccacatagagaacagttcatccatttcaggaaaatacaatttgatatggaaaacttgcaaaactaggaattagcaatgttttattctgtctacttcactgtttcctaatccaaaaaaatattctaccattcctccactgtacagaccctttaaagaatctttcaaatagcttgttatcttggtcccatattcaaagtgctaatattgac

SEQ ID NO: 630497 - DNA, 615 bp, Homo sapiens
gactgagatgataaacatcactaggtcctctgaattaaaattcactcataaatcaaaataaacagttaaacatcacacaggaataaaagagctaaggatactgatttaaaaaacatttgcaaatactttttcttttattcaaattgaaaatgtttttacaagttgatgggttaaaaagaaccagtctaaatttcaccttatctatgatttcagttatccacagtcaactgcagtccaaaaatgtaaaatgaaaaattccagaaataattcataagctttaaactgtgtgccatttcgaatagtgcaatgaaatcttgcagtattatgctctgtcttggccaggacatgaatcatcaccagcatatccacattgtatatgctacacatacattagtatatacagggttcagtactctccrtggtttctttctcttcataattttaatatcttattttctgaaagagcctaatatttaattgataaacaatctcactgtaaactgtaaatattttacttttagtaattcagaaaaactatagcattttattagatttcttgaaatactgaatctagttacagatttatgaagagtacataaccataaattacaaaag

SEQ ID NO: 630498 - DNA, 581 bp, Homo sapiens
tgtaaaataataactactagacctaaaaaatgacagatggcaacacagtaatagtgggggacttcaatactctcctgacagcactaaataggtcatcaagacagaaagtcaacaaagcwataatggacttaaactataccctagaacaaatggacttaacagatatttacagaacattctacccaacaactgcagaatatacattcttttcatcagtatatggatcattctccaagacagaccatatgataggccacaaaacaaatctcaacaaattaaagaaaatcgaaattataacatgtactctctcagaccacagtggaataaaattggaaatcaactccaaaaggagccctcaaaactatgcaaatacatggaaattaaataatctgttcctgaatgattgttgggtcaacaatgaaattaagatggaaatttaaaaattctttgaactgaacgataacagagacacaacctatcaaaaccttttggatacagcactagtggtgctaagaggaaagctcatggcattaaatgcctacatcaaaaaagtctgaaagagcacaaatagataactaagg

SEQ ID NO: 630499 - DNA, 469 bp, Homo sapiens
gaattctcctttgaaccacttttaacaactgacttgttctttcattaataatgagttaaatatctttggcttgtgctcattctatatttctatgagagtcatgattatatcctcttttaaactttatccttcaataaaatgaaaacaagatgacccctacccttcctcaaagagctcacaacctagtagggagacaaagacattactattcaactagattaatacaataaggaaagcatcatgatacagataggaacagcatactataagaagtgaaataaaactatttcccatctgaaacttttaggaaagccttacatcttaagttacttacatgaatagacttagggacaagatagatggtggatagcaracaatgctaacgtgtagctcccacttggacagacagaacagtgtgtggagaacaccatgatctttaccatgatcttttgctccaagaaccaccaaa

SEQ ID NO: 630500 - DNA, 580 bp, Homo sapiens
ggggcactgcaggagccaggccagcctcaccaactatgagggagttgggtaaggcctcttgctacagctatcacccatttccctgagaaactatatagaacaacagaggcaaccaaaagcccctctggaacataaccccattggcctgagaaccaccccctcaatcccctacagtggccacagcaagcctcacccaaggaaagtctaagcttggacccacctaaaccarccccaacctgatggtatttctctattttccatggttgccaaacacaaaagatagaaactcttgggggctttatggccccatccatcacctgacaaactaaaatccttatcctggccaatgcagggcaagcacagatccccctactactactatagctgatgctcttttgaaaatgccacccacaggctggaggccaatctacttgggccataacagcaacttatgacagaataatcttgctgccaggaagaagaagacaatagctaattccactgcccacaacatcctggctaaccaatggtccttagtctctccatttgacaactttactgctagcataaccagcattcg

SEQ ID NO: 630501 - DNA, 617 bp, Homo sapiens
aattaacccaaattaacttttggctttcaaattaacccaatctgacaaagacaaaaaaaaaaaaaagaataaaaaaatgaacagagcctccaagaaattagggattatgttaaatggccaaacctaagaaaaataggtgttcctgaggaagaaaagaaatctaaagtttagaaaacttatttgtagggttaattgaggaaaacttccttggccttcctagagatctagacawctaaatacaaaaagctcaaagaacacctgaaatattcaccgcaaaaaaatcacctgcacacacagtcatcaggttatctaaatccctcatagttggtgaggctggcctggctcctgcagtgccccactcagaacttaagacgaaagaaagaatcttaagagctgtgagataaaagcatcaaataagctacaaaagaaaacctatcagattaccagcagatttgtcagaagaaaccctgtaaatcagaagagactgggttcccatctttagcccccttaaacaaaatatttgtcagccatgaattttatctccagcaaaactaagcctcataaaagaaggagagataaagtctttttcagacaaaaaaatcctgaagcaatttgcc

SEQ ID NO: 630502 - DNA, 612 bp, Homo sapiens
attacttgttttctctgaggaaagattatctgcttcatcagtggtactcacataggtggctagcacatacaagatattcaataaaactatcctaagagaactgtgggttttaatacaccctatacaygtctgaatattaatgtattttatgcagtacctgaactacatgtacaaagactatacactatgaaggactgaactatatttgcctgtagaaatttatgacagcaactcagtgatttaaataattttcacttctcaatttaataatatttcagtccttcatctattagaaatggcaaacaggatttccaaatcccacatttctaaatttcttccaaatctatctttggagttatttttcctgtattgagttcacttttctatcaccatggaaaccaattacaattagtgttgttaggatctttaaaaatacaactctattcagcaagtcttcaaatgttcagaaaagttctttctccatatggagaatggaaatcagtagcatagagcagggtaaaaatataccacccacccacagaagaaaccattcaccaaagcctaatcaacggattgcaaatggaacacggaaagagttcttttcttttattc

SEQ ID NO: 630503 - DNA, 589 bp, Homo sapiens
ctctggtggatccgcgggaaggacccgtcacccagcaggatggagtgtgagctctgtggccaggagtcacagtgcacaaggcaccctctcccctaggcaccctctcccctgcccaytcttaacccctcgggttggagcctccgaaatggaactggcgtgatggagcctgagtgctccaggagttttcccgggttggatgagccaagcttgtctgagggaaccagggctggaggacagaagagcagtccagggagcagggcagcagggaactctggaaggcaatggggctgtggattaaagggtgggaggaatgtcccgggaggccaagaacaaaaggtggtcctagtggcaaactcgcagaaggatctagaagagaagtgtcaggcaggggcagggaaaaagaggaggagccagggctcctgggcagcatgggcgatgggcacacctgaggggtgtggcctattcagaaacccctgacctgtccaggcctgctcatctggggagggtgggaaatcaggaccattcttccctcagtaggggcagggagaagtgaacccaatcaaagggtgagccaggccatccctgtgct

SEQ ID NO: 630504 - DNA, 589 bp, Homo sapiens
ctctggtggatccgcgggaaggacccgtcacccagcaggatggagtgtgagctctgtggccaggagtcacagtgcacaaggcaccctctcccctaggcaccctctcccctgcccactcttarcccctcgggttggagcctccgaaatggaactggcgtgatggagcctgagtgctccaggagttttcccgggttggatgagccaagcttgtctgagggaaccagggctggaggacagaagagcagtccagggagcagggcagcagggaactctggaaggcaatggggctgtggattaaagggtgggaggaatgtcccgggaggccaagaacaaaaggtggtcctagtggcaaactcgcagaaggatctagaagagaagtgtcaggcaggggcagggaaaaagaggaggagccagggctcctgggcagcatgggcgatgggcacacctgaggggtgtggcctattcagaaacccctgacctgtccaggcctgctcatctggggagggtgggaaatcaggaccattcttccctcagtaggggcagggagaagtgaacccaatcaaagggtgagccaggccatccctgtgct

SEQ ID NO: 630505 - DNA, 589 bp, Homo sapiens
ctctggtggatccgcgggaaggacccgtcacccagcaggatggagtgtgagctctgtggccaggagtcacagtgcacaaggcaccctctcccctaggcaccctctcccctgcccactcttaacccctcgggttggagcctccgaaatggaactggcgtgatggagcctgagtgcwccaggagttttcccgggttggatgagccaagcttgtctgagggaaccagggctggaggacagaagagcagtccagggagcagggcagcagggaactctggaaggcaatggggctgtggattaaagggtgggaggaatgtcccgggaggccaagaacaaaaggtggtcctagtggcaaactcgcagaaggatctagaagagaagtgtcaggcaggggcagggaaaaagaggaggagccagggctcctgggcagcatgggcgatgggcacacctgaggggtgtggcctattcagaaacccctgacctgtccaggcctgctcatctggggagggtgggaaatcaggaccattcttccctcagtaggggcagggagaagtgaacccaatcaaagggtgagccaggccatccctgtgct

SEQ ID NO: 630506 - DNA, 563 bp, Homo sapiens
ctggcagaatcaaaggacatgggtttaggaaagkatccaaattacattgagggcggtcccactgctgttccaaacagtcaaatacccccttttgattgaataggcttgttattaaaaatgcatttaagaaaatgaaatcaaaagcaaatcccttcaaataaaatttcagccttgtctaaaatccaggggtttatttgaaagttccatcttctcacactttgcacagagctgtgctggagagatcatagccctctgtcccctgagcatgatgaaccaggaaggtagatatcaatcaggtttcctgaaatctgtgcagaatgctccttccttagttattttctgggtactgacatgggggaggtgattgcctaaattgtgttgcacgtcactccacagaaattctcatatcctgtaaggactgaagcttgaactgatatggaacccatgactcagtagcagttgactgctagcccctcctgggcttctactcctttgtccgttgcatcccctaaactcagcccacctgattacttcatatctgttggcggattgactccctccct

SEQ ID NO: 630507 - DNA, 575 bp, Homo sapiens
ctggcagaatcaaaggacatgggtttaggaaagtatccaaattacattgagggcggtcccactgctgttccaaacagtcaaatacccccttttgattgaataggcttgttattaaaaatgcatttaagaaaatgaaatcraaagcaaatcccttcaaataaaatttcagccttgtctaaaatccaggggtttatttgaaagttccatcttctcacactttgcacagagctgtgctggagagatcatagccctctgtcccctgagcatgatgaaccaggaaggtagatatcaatcaggtttcctgaaatctgtgcagaatgctccttccttagttattttctgggtactgacatgggggaggtgattgcctaaattgtgttgcacgtcactccacagaaattctcatatcctgtaaggactgaagcttgaactgatatggaacccatgactcagtagcagttgactgctagcccctcctgggcttctactcctttgtccgttgcatcccctaaactcagcccacctgattacttcatatctgttggcggattgactccctccctccagaccacttt

SEQ ID NO: 630508 - DNA, 542 bp, Homo sapiens
tttaggaaagtatccaaattacattgagggcggtcccactgctgttccaaacagtcaaatacccccttttgattgaataggcttgttattaaaaatgcatttaagaaaatgaaatcaaaagcaaatcccttcaaataaaatttcagccttgtctaaaatccaggggtttatttgaaagttccatcttctcacactttgcacagagctgtgctggagagatcatagccctctgtcccctgagcatgatgaaccaggaaggtagatatcaatcaggtttcctgaaatctgtgcagaatgctccttccttagttattttctgggtactgacatgggggaggtgattgcctaaattgtgttgcacgtcactccacagaaattctcatatcctgtaaggactgaagcttgaactgatatggaacccatgactcagtagcagttgmctgctagcccctcctgggcttctactcctttgtccgttgcatcccctaaactcagcccacctgattacttcatatctgttggcggattgactccctccctcc

SEQ ID NO: 630509 - DNA, 540 bp, Homo sapiens
tggcagaagtaatgggatgtcasttctgagattaggttactaaaacactgtggcttttgtctcacatgttctctttcatactctcttggatctctagacctgggagaagcagcagccccgggagaggcttaactagcagagcactgaggcccaccgacagccatgtgcatgagcttggaagcacatctccccaacccaccccagtcaagcctgcagatgagacctcagctgcagctgacaactcggctacaactttgtgagagacctggagccaaaagcacctagctaagctgtgcctgtatttctgacccacagaaactctgaggtaataaatatttgttgttttaagccactaagttttggggcattttgctatgcatagctatgaaatgaattgtgctcctaccctaaattcatatatgaagccctaatccccaagtgactgtatttggagatagggtctttaggaggtaaacaaggctaaatgaggtcataagggtagaggccctgctatggtttggatgtttgtcccttccaaac

SEQ ID NO: 630510 - DNA, 540 bp, Homo sapiens
tggcagaagtaatgggatgtcagttctgagattaggttactaaaacactgtggcttttgtctcacatgttctctttcatactctcttggatctctagacctgggagaagcagcagccccgggagaggcytaactagcagagcactgaggcccaccgacagccatgtgcatgagcttggaagcacatctccccaacccaccccagtcaagcctgcagatgagacctcagctgcagctgacaactcggctacaactttgtgagagacctggagccaaaagcacctagctaagctgtgcctgtatttctgacccacagaaactctgaggtaataaatatttgttgttttaagccactaagttttggggcattttgctatgcatagctatgaaatgaattgtgctcctaccctaaattcatatatgaagccctaatccccaagtgactgtatttggagatagggtctttaggaggtaaacaaggctaaatgaggtcataagggtagaggccctgctatggtttggatgtttgtcccttccaaac

SEQ ID NO: 630511 - DNA, 540 bp, Homo sapiens
tggcagaagtaatgggatgtcagttctgagattaggttactaaaacactgtggcttttgtctcacatgttctctttcatactctcttggatctctagacctgggagaagcagcagccccgggagaggctyaactagcagagcactgaggcccaccgacagccatgtgcatgagcttggaagcacatctccccaacccaccccagtcaagcctgcagatgagacctcagctgcagctgacaactcggctacaactttgtgagagacctggagccaaaagcacctagctaagctgtgcctgtatttctgacccacagaaactctgaggtaataaatatttgttgttttaagccactaagttttggggcattttgctatgcatagctatgaaatgaattgtgctcctaccctaaattcatatatgaagccctaatccccaagtgactgtatttggagatagggtctttaggaggtaaacaaggctaaatgaggtcataagggtagaggccctgctatggtttggatgtttgtcccttccaaac

SEQ ID NO: 630512 - DNA, 540 bp, Homo sapiens
tggcagaagtaatgggatgtcagttctgagattaggttactaaaacactgtggcttttgtctcacatgttctctttcatactctcttggatctctagacctgggagaagcagcagccccgggagaggcttaactagcagagcactgargcccaccgacagccatgtgcatgagcttggaagcacatctccccaacccaccccagtcaagcctgcagatgagacctcagctgcagctgacaactcggctacaactttgtgagagacctggagccaaaagcacctagctaagctgtgcctgtatttctgacccacagaaactctgaggtaataaatatttgttgttttaagccactaagttttggggcattttgctatgcatagctatgaaatgaattgtgctcctaccctaaattcatatatgaagccctaatccccaagtgactgtatttggagatagggtctttaggaggtaaacaaggctaaatgaggtcataagggtagaggccctgctatggtttggatgtttgtcccttccaaac

SEQ ID NO: 630513 - DNA, 612 bp, Homo sapiens
gcctccgcttgggccacctttttgctgatgaagtggcagcagaccaagctaccttcactccatggaaatacaacgcacacctgttggctctcaggtcctttccagagagatcagctctttggggagctgcatcccagcacgagagcattccaattccttccctccacctctgtgcccgatttccaatttgttggttttttccatttcatttccctcctgctcacctttcctccctgcgggatcatttggggctttgatttccttttgtcagagtgagcatttccttcctattacaccgtccctctctgcccctattccatgactttgtttaattcagctgctttctgcacctggctctgcctcacagccayggggagggaaggattacagccagaaagcgcgcttcacctccccgcacatgacactcgtctctgctaataacaggaagaaatgagctttaatgactgacaccgctgtgcctggactggggacttggagaaggcagtccctggtggtctgcccagtatcttggcagcaggatgctgggagagccccagaagccctggctgctggaggtcccagcctctctccctttgcctccaggaaggatag

SEQ ID NO: 630514 - DNA, 612 bp, Homo sapiens
gcctccgcttgggccacctttttgctgatgaagtggcagcagaccaagctaccttcactccatggaaatacaacgcacacctgttggctctcaggtcctttccagagagatcagctctttggggagctgcatcccagcacgagagcattccaattccttccctccacctctgtgcccgatttccaatttgttggttttttccatttcatttccctcctgctcacctttcctccctgcgggatcatttggggctttgatttccttttgtcagagtgagcatttccttcctattacaccgtccctctctgcccctattccatgactttgtttaattcagctgctttctgcacctggctctgcctcacagccatggggarggaaggattacagccagaaagcgcgcttcacctccccgcacatgacactcgtctctgctaataacaggaagaaatgagctttaatgactgacaccgctgtgcctggactggggacttggagaaggcagtccctggtggtctgcccagtatcttggcagcaggatgctgggagagccccagaagccctggctgctggaggtcccagcctctctccctttgcctccaggaaggatag

SEQ ID NO: 630515 - DNA, 614 bp, Homo sapiens
agtggaaagctcctctcccattcctccaaaactggtgactgcggcaagactagcagaggagccagctggagctgcccaagtcatactcccattgcgttgtgatgtcacagaggcccgaggaaaygctggcctccagtcagaactaatctgctacttagagcctataaccttgcacaagttacagaatctctctaaccctcagtttccttacctggaaaatgggcatgctatatctactactcagattcattgtgagaacaaacaatagcccacatatagagcatgcagcaaggtgtgtggctctttataggcacccaccactgtactcttttcctctttactcctctcctttccctttctggacttcagtccagaaatgctctctattgtgtctatgaccactatgtccaatcaccaagtcactttcaatatgtctagtgacacgatggagcaacacgcacactctgcacaacacttcttcaccatgtatactcgcaaagatgcaccaggcatgctgactctgcatcacaaaacagaattccagccctgggtgacacgtgccctatgaatatagtattcataggttttcagaaacagttctgatctatgcctat

SEQ ID NO: 630516 - DNA, 592 bp, Homo sapiens
ttcataggttttcagaaacagttctgatctatgcctatttgacatccaaacgtgtgacatttttagaatgaaaatgttgccaggacaacaagtataaactaggaatgtcctggaaatcctatgaatactcattaggacctcgatctcttagggtaaagaaggcttctgtctctacactcctacctgggatrtttacagtccttgggcctctgctctgggaagactcctgagccaccaggccaggttccctgctccaacttggatcaacccaacgcctaatgcttccttccctctttacaagggactgctgcctccacttcacctatttgcttctctgtctctcacactcaccacgagcaacctgaggatgggggtccccatacctaacactgcctggcttatagtagatgctcaaaaatgtgcatatgagccgagatcatgccactgccctgcagcctgggtgacagagcaagactttgtctcaaaaaagaaaaaaactgtgcatggggagaaaaaacagataaatgccccacttaggagaggaaaactaggcagagagtagggggttaatgcagctcctggtggaagctgg

SEQ ID NO: 630517 - DNA, 588 bp, Homo sapiens
gacaaataaaatgtgatatatccatataatggaatattattcagtaatgaaaagaaatgaagtactgatacatgctacgacatggataaaccttgaaaacattatgctaagtgaaagaaaccagtcacaatggatcacataatgtatgattccttttaaatggaatgtccagaataggcaaatmcatagagacaaaaagtagattagtggttgcctgaggctggagtagggggtgaggaggtatgtggggtaatggctaaaggtgtggagtttattttggggatgaagaaaatgtctaaaactgattgtagtgatctttgcatgactctatgaatgcactaaaattctttaaattatacattttaagggtgtgaattgtttggcatatgaagtatgcctcaattaagctgttaaaaatataatggggagacttttgcttttgggaagatagagtagatatacttctccctattcctctcgctaagtaccactgaaaaccctgtgcattatatataaaaccagcattaaaagacctgtaagatggaaagaagaagacagctgtattagcttgttcttgcattgtcatga

SEQ ID NO: 630518 - DNA, 623 bp, Homo sapiens
gacactgaaacttgcgtgaatcctaaattgcatcaattatctatttgataaaagcttattctaatttaaaaccttatagagtaagagactgatatatatagcagtcttaaagatcacgtcatctgccttacattagtccagtcacgtgcttcgtaaaaaaaaaaaaaaaattcccgtaacaaaccccaggactacaaaggcaaaacatcacagcttcggattacwttgaataaaaagtaccaagaaacgcaaatgataattctgtattaatactgatgaattaaagagctataacagacatttcacagcatgctacatatatcgctcacaacttaaggataaatgtctaacattgaaagtcaagaagttggcaatctgatttcatgtgcaattcagctacagtcttaatatatacattcattatgtagctgtcctgcaaaaccaggattttttaaaaagagttttcaagttcaacttctatttcataagttaaaagatgcgtccagttcttccatgaccaggaaagttattttcaggcttaaaggagctaatccaagtagcaaggccatgttgcaagtggacctgacagggttctttataaccttgctgagactgtgtatgtg

SEQ ID NO: 630519 - DNA, 354 bp, Homo sapiens
atttctatttaaacttccttggagttctaattaaacttccatttcatatatatatatatatatatatatatacacacacacacacacacacacacacacgcrcacacacacacactatatgtatgtgtacctatatgtatatgtatatgtttatgtatagatattcatttgtccttagatccccagggcctggcacactgtttagcattccataggtacttaaaggttgaatgaatgaatggatggacaaagggatggctgactaaacttgggggttttttgtttgtttgttttagtttcttctttggttttattgttgttgctacattttaaaacctaatttgatttgtgtgt

SEQ ID NO: 630520 - DNA, 571 bp, Homo sapiens
cttatgagtgagaacgtctggtatttagttttctgctcctgtgttaatttgcttaggctaataaccactgtctgcatttatattgctgcaaaggacgtggttttttcttttttatagctgtgtagtattccatggtatgtgtgtaccatattttctttatctagctcacttttgatgggcacctaggttgattccatgtctttgctattgtgaatagtgctgtgatgaacaagtgagtgcatgcgtctttttggtagaacaatttgttttcttttgtatatatatccagtaatgggatcgctgggtcaaatggtagttctgtttttaaagttcttttgagatatctccawactgctttcgacaatggctgaagtaatttacattcccaacaacagtatataagcaattccttttctctgcagcctcaccaacatctgttgtcttttgtctagtcagattttaactttagttattgtaccttttggccccagactttgtttttttaatactttataacttcttgctaatattctcatatgttcatacatcagtttcttgatttcccttattt

SEQ ID NO: 630521 - DNA, 580 bp, Homo sapiens
tttggggccattatcttttcaaataatctctttgtcccttctctctctttttttattctggtactcctacatgtgtatgttggtttgcttgagggtgtcccatgggtcccttaggctcttgttacttatcttcaattattttttcttcctattactcaatcatttcttttgtcttatctttaagttaaytaattgtttcttctgcctgctcaaatctgcctttgaatccctctagtgaatttttcatttcagttgttatacttctcagctacaaaatttgattttggtttctaggctttttatctctttattgatatttctattttgtttatataatgtttccttgactttttccacaacttcctttaggtcttcgaacatctttaagatagttgtttgtctagtaaacctactatcagatctttttcagaaacagttttttatttctatttttattaaaaaaatttgtagatttgtagagatggtgttctatgttgctcaagctggacttgaactcctggcctcaagctatcctcctgtctcagcctcccaaagcactggattacaggtgtgagccacc

SEQ ID NO: 630522 - DNA, 408 bp, Homo sapiens
agcatctgagtgaccgactgaaaagaaaaagatcagtgtaactctgagtaaagatactatgctctctggcagggaaaactggatggtttctggaagaaaaaaatctatagatctttaggcattttaatagttacagaggactcttcacagaaacttaccagtagcactatgggcacttacatagcaagtcagcccctgtctcatgcagagcttcaayttctagccccttatcatcagcgatcatactattccatggtttctaattttgacactttctatttttgtactgaatatgcaaaaagataactatagcagatacatatttggcttttctgcctaaatttccccctactactcagaaacccttttccccaagacccactgtaatcttccatgcacatggcctgt

SEQ ID NO: 630523 - DNA, 653 bp, Homo sapiens
acaccaatttttaattatttccttgcatccactctctcctcctgtaactcccatcagtagaaacctctctggacctattctccatgactcccaactgttctctcacaactttttaactttccgtcccttccaggggttgtattcttataaatgacttggcttgatcattcaactccctgactttctcttcagctgggtacattctgtatggagtccagttactcaggtttgctcttactaaattaatttaaatgatcctatattcgtttacaacatctctgattttagtttatttaaatccatttcatgaatgtgacagcttcactttctctcagaggatagtaatcatccttcgaaaagccttgtttgtacctctcagttattttatttattcagtttctatgtgtaaactttctagtttccttgtgttttgcrgtcttgttgcacttacatgtttaggctatatttacttttccccataaaccttatcccatctactttttaagattccttacaatttttgattcccaatggtacttttggtttaatgatgctataaagaatctctgtttagaaatcttttacgtttttactatttatttttttgtaggggtgaaggtaggtgcatacacacagcatgctgtcataaacta

SEQ ID NO: 630524 - DNA, 534 bp, Homo sapiens
gcacaatctctgctcactgtaacctccgcctcctgggttcaagcgattctcctgcctcagcctcctgagtagctgggygtgtgccaccacgcccagctaacttttgtatctttagtagagacggggtttcaccgtgttggccaggatggtctcgatctcttgacctcgtgatccacccacctcagcttcccaaagtgctgggattacaggcgtgagccactgcacccggccacatccattgagttttaaaagtataatcagtttttcagttctgaaatattctttttttacatatatagttccagttctctgccaaaattctcaatactgtcttttgtcatcttaaacatgtatacgtggatgtttatttttatttttgtttttttgagacagagttttgttcttgttgcccacactggagtgcaatggcatggtctcggctctctgtaacctctgcctctcaggttcaagcgattctcctgtctcagcttcccgagtagctgggattacaggtgcctgccaccacggccagct

SEQ ID NO: 630525 - DNA, 547 bp, Homo sapiens
ttaaggctgaactgcagttgccttgaaaggagtcttcttctgttcagtttgctcctagggtgcagcttttccatgatctcaacccaaaaggaagagggttcatcaggccaccagccacacacaggctcaccctacaccaggggsctctgcactccaaggcaggtgcactcagccccgcaggcaaccacccgcctttcatccagctcctctagaatccacacaggcctcgggtggaaaagtggtcctggctgctggctcttctccctgggcctctggtctcactcctagatctttccctactaattcatcattatcttgttaccacactaatgagctaataatgccttcaagagcaatttttagaagaccttatctacctctttaatttcttctcagatggaaggttgttctaaattgctgaattctgcacgatcaggagcagaagttctcttgggactttcagcaaaagggctctgaccactagcatttattctttaacacttaataccaggtcgttgtccaggaggcaggcgttgcagctgagaat

SEQ ID NO: 630526 - DNA, 547 bp, Homo sapiens
ttaaggctgaactgcagttgccttgaaaggagtcttcttctgttcagtttgctcctagggtgcagcttttccatgatctcaacccaaaaggaagagggttcatcaggccaccagccacacacaggctcaccctacaccaggggcctctgcactccaaggcaggtgcactcagccccgcaggcaaccacccgcctttcatccagctcctctagaatccacacaggcctcrggtggaaaagtggtcctggctgctggctcttctccctgggcctctggtctcactcctagatctttccctactaattcatcattatcttgttaccacactaatgagctaataatgccttcaagagcaatttttagaagaccttatctacctctttaatttcttctcagatggaaggttgttctaaattgctgaattctgcacgatcaggagcagaagttctcttgggactttcagcaaaagggctctgaccactagcatttattctttaacacttaataccaggtcgttgtccaggaggcaggcgttgcagctgagaat

SEQ ID NO: 630527 - DNA, 563 bp, Homo sapiens
gagtcatccaacttatttttcctagctatattacatttcttctgtcctttcccacctcccaataaaaggagaagaaaaaatttctgggcctcagaattaatttgaactgtttaccttatgatagtattttctagttttaggacctgtatgtaagagttaagaaaaaaaaaacagttattctttactcttttggtattttcccacttctgctcccaaagcttacatccaacaatctttgctaatagtatttaagtaaaggttaataatacctttcaaagcttatttcttcacaggagactagggaatcattgttcccatttctctcattggaattkgtttattttagactaactttattgttcagtagagaaaatgcttcaaaacagtgttttctgcagttctacttgagtcaggattctcagttctttttgaagcaattttatccttcttgggtaaacttttttaaaaagctcctaagtgggtacttgtttggtaaatcttcattcgtaactgtagatttcattctttttaaaaatacggcgttattttaaacttaacttttt

SEQ ID NO: 630528 - DNA, 563 bp, Homo sapiens
gagtcatccaacttatttttcctagctatattacatttcttctgtcctttcccacctcccaataaaaggagaagaaaaaatttctgggcctcagaattaatttgaactgtttaccttatgatagtattttctagttttaggacctgtatgtaagagttaagaaaaaaaaaacagttattctttactcttttggtattttcccacttctgctcccaaagcttacatccaacaatctttgctaatagtatttaagtaaaggttaataatacctttcaaagcttatttcttcacaggagactagggaatcattgttcccatttctctcattggaattggtttattttagactaactttattgttcagtaragaaaatgcttcaaaacagtgttttctgcagttctacttgagtcaggattctcagttctttttgaagcaattttatccttcttgggtaaacttttttaaaaagctcctaagtgggtacttgtttggtaaatcttcattcgtaactgtagatttcattctttttaaaaatacggcgttattttaaacttaacttttt

SEQ ID NO: 630529 - DNA, 498 bp, Homo sapiens
atctgtatgtgaaagacgaaacaataaaacttttagaagataatactatagaatatctttatgaccttggctttagacatagtattaattataactgaaaagcttaataattaaacaattaaaaggaagaactttatcataatatgcccttaagacagtgaaagggcagatyacagtgtgggaagatatttgcagaatgcgtatctgacaaaggagttgtaaagagtctttaggaaaatgcagatcgaagccttattgactctttagtacatacttaaccagaataattaaaatttaaggataatgatatctaaggttggcaagaatatacattaataggaattctcatatgctgatgatgggagtattaatttgggacaatcattggcattatctattgaagttgatacacaactgtaacccagcagttccacttttagatgtatatagagattcatgtacacagactaagacacatgcatagaaatgttgataaca

SEQ ID NO: 630530 - DNA, 618 bp, Homo sapiens
attgttttgcgattctaaacttcgtaagtataacatgagtctcactgggctaaaatcaggttgtctgctggctgtgttcctttctgtactgtctaggggagaatttattttcttgcctttcccactttctagaggcwgcccacattcctgggctcatggcagtctttccacatcttcaaagccagcaacagcaagtggagtccttcaacactttgacctggatcccagttcacatctccttctctgtctttttctgcctccctcttccacttttaggaacccttgtgattacattgggcccatgaataatcttcctattttaaaatgaactgatttgcagccttgattcctctctctgccacataacctattcataggttctgagcattagaacatagacatctttgggggccattattctccctaccacggcgcttcactagctaaccaggcttgcctgctcaacacaccttccagtcagctgtgtgtgtgtgtgcgtgtgtgtgtgtgcttgtgtgtgcatgagcatgtgtgcgtgcttgtgtgtgaggtgtgtgtgcatctgtgcatgcatgtgcgtgtgtggtgcatgcatgggtgcgacagtgtgtgtgggtg

SEQ ID NO: 630531 - DNA, 517 bp, Homo sapiens
ttacattgggcccatgaataatcttcctattttaaaatgaactgatttgcagccttgattcctctctctgccacataacctattcataggttctgagcattagaacatagacatctttgggggccattattctccctaccacggcgcttcactagctaaccaggcttgcctgctcaacacaccttccagtcagctgtgtgtgtgtgtgcgtgtgtgtgtgtgcttgtgtgtgcatgagcatgtgtgcgtgcttgtgtgtgaggtgtgtgtgcatytgtgcatgcatgtgcgtgtgtggtgcatgcatgggtgcgacagtgtgtgtgggtgcgcgtgcaggtgtacgtgtgcatctgtgcatgcatgtgcgtgtgtggtgcatgcgtgggtgcgagtgtatgtgtgtgcatgtgcgtgtgtgcatgcgtgtgcatgtgtgtgcatgtgtgtgcgtgtgtgtgtgtgcgcgtgtgcatgcacatgggcatataattcaaatttgaattggtagccactg

SEQ ID NO: 630532 - DNA, 517 bp, Homo sapiens
ttacattgggcccatgaataatcttcctattttaaaatgaactgatttgcagccttgattcctctctctgccacataacctattcataggttctgagcattagaacatagacatctttgggggccattattctccctaccacggcgcttcactagctaaccaggcttgcctgctcaacacaccttccagtcagctgtgtgtgtgtgtgcgtgtgtgtgtgtgcttgtgtgtgcatgagcatgtgtgcgtgcttgtgtgtgaggtgtgtgtgcatctgtgcatgcatgtgcgtgtgtggtgcatgcatgggtgcgacagtgtgtgtgggtgcgcgygcaggtgtacgtgtgcatctgtgcatgcatgtgcgtgtgtggtgcatgcgtgggtgcgagtgtatgtgtgtgcatgtgcgtgtgtgcatgcgtgtgcatgtgtgtgcatgtgtgtgcgtgtgtgtgtgtgcgcgtgtgcatgcacatgggcatataattcaaatttgaattggtagccactg

SEQ ID NO: 630533 - DNA, 517 bp, Homo sapiens
ttacattgggcccatgaataatcttcctattttaaaatgaactgatttgcagccttgattcctctctctgccacataacctattcataggttctgagcattagaacatagacatctttgggggccattattctccctaccacggcgcttcactagctaaccaggcttgcctgctcaacacaccttccagtcagctgtgtgtgtgtgtgcgtgtgtgtgtgtgcttgtgtgtgcatgagcatgtgtgcgtgcttgtgtgtgaggtgtgtgtgcatctgtgcatgcatgtgcgtgtgtggtgcatgcatgggtgcgacagtgtgtgtgggtgcgcgtrcaggtgtacgtgtgcatctgtgcatgcatgtgcgtgtgtggtgcatgcgtgggtgcgagtgtatgtgtgtgcatgtgcgtgtgtgcatgcgtgtgcatgtgtgtgcatgtgtgtgcgtgtgtgtgtgtgcgcgtgtgcatgcacatgggcatataattcaaatttgaattggtagccactg

SEQ ID NO: 630534 - DNA, 621 bp, Homo sapiens
gaaattaaggggaaaaaatgcagggtacaaaataatagtaataattccctctcatatctcagagaggaaggtgctgcctggatccatcaaacaaaacaagaatatagaaaagagcatcccaagatcaagaacgaattcttggaaattaaaaatatagaagatgtaaacaaattccacatcagggttgtttcataaatgagtaaatatcccagaaagtaaaacaaaatgtcagacatggacaaaaggaaagaaaggataagagaaattgaggatcaatataggttcagtggcccacraggttccagcatccaattaagctgatgttcagaaggctgagaagaaaataccaaggaaagaattctgtaaatccccaaactggagaccgattgaaggggccactgcccagcactattagtgcaaaaagacccacgcaaagaaacatcatcattaaaacacagaaacaccaggaaaaaagagatttaagagtttccaaagggaaaatagttcacatgtgaggatcaagaaacagaatggcatcagacttctccacagctagatttgctgcagaagacaaaaaggagtatcatcaaaattatgcgggaaaatgattttcagactagg

SEQ ID NO: 630535 - DNA, 366 bp, Homo sapiens
atcagacttctccacagctagatttgctgcagaagacaaaaaggagtatcatcaaaattatgcgggaaaatgattttcagactaggattctgtattaagccaaaccatcaaagaatataagaccagcggggtaaaaaggtatgttcagacatgaaaggttacaaaaattacttyccttgcaccttttcccactataaagagagaatggcataagacagaggaaaatgggatccaggaaaccagggattcctctccagagaggaaaagggaaccccacagttataccagctgtgactcaggcccagagaagagctactctagatttggcaggagggtgaagcatcagcaagcactccaggagagagc

SEQ ID NO: 630536 - DNA, 623 bp, Homo sapiens
cagctgcaatatagtagaacaacaggtagatttctgaagcttttgactgcagtccctggctcctggacaacatctctggacccacctagggcctgggggaactcactgccttgaaaggaacaacacagcttggctggctttaccacctgctgattatacagtcctaggtccttgaacaaacacaggcagtagccaggtagcagttwcagtgggctttgggcaagacccagtgctgtgctggctttgggtttgacccagtgccgtcccagtggtggtggccacaggggtgcttgtttcaccccagctccaggtagcttatcacagagacagagagagactttgtttatttgggagaaagtaagagaagaaaacaaaagtctctgaccggtaatccagagaatgcttctggatcttatcgaagaccaccaaggcagtacctctacaaatctgcaggaactacagcattattgaattggggtgtccactaatgcagatacagcttgcattgtgatgcagatcacaacacccaacttcttttgaatacctggaaaactttcctaagaaggacaggtacaaacaagcccagactgaagactacaataaatacctgactcttcaatgct

SEQ ID NO: 630537 - DNA, 477 bp, Homo sapiens
aaatctgcaggaactacagcattattgaattggggtgtccactaatgcagatacagcttgcattgtgatgcagatcacaacacccaacttcttttgaatacctggaaaactttcctaagaaggacaggtacaaacaagcccagactgaagactacaataaatacctgactcttcaatgctcagacactgacaaacatccacaagcatcaagaccatccaggaaaacgtgaccccaccaaatgaagtaaataaggcaccagggaccaaccctagaggtgtgtgacctttcagacagagacttcgaaatagccattttgaggaaactcaaagaaattcaaggtaacacagaaaaggaagtcagaattctatcagatatgtttaagagattgaaataattaagaagactctagcaaaagttctggagttcakaaatgcaatcgaaatactgaagaatatatcagaatatattaatagcag

SEQ ID NO: 630538 - DNA, 563 bp, Homo sapiens
taccaatttttactgcttgggtctatttcaaatgcatcctcacaaatactaaaaataatgacttaaaaattttccagtaggtgaaaaactgtatcttctttcatttgccttttattgacttaatgaagctaaacacaatttcatatttctcagtcacttttatttcttcttttataaaaaattcatatttttgccaacctttctactgagtatattgtatattactataacatatcatcaaactacagtataattgtatgtttaatcaaattatttgatggaactattagccttttgagagctgtaacctacttaggcctttgagagctgtaamactcagtgagttacaatcaagaaaattccttgaatgtatactgatgttatttattaaatggtttattacacaatattgaactttctgcttaaaagatctcaaagagaaattagttagtcttgaatgggattatatcaaactaaaaagcttctgcacagcaaagaaaatgattatcagggcaaagaaaacctccacagattgggaaaaaatacatcttataaggggttaa

SEQ ID NO: 630539 - DNA, 504 bp, Homo sapiens
tggaaaactatatggaggttcctcaaaaaactaaaaatagaattaccatatgactcaataatcccacatctagatatatatcctaagaacttgaaatcagtatatcaagaagatatctgctctccttggttcactatagccttatttacaatagccaagttatggaatcaacttaagtgtccatcactggatcagtagataaaaacaaatgtggtatacgtacacaatggaatactattcagccttaaaggaaatcctgtcatttgcaacaacactgataaatctggaggacattatgcgcaataaaataagcctggcaaaaaaagacaaacatcacatggtctcacatgtagaatctgaatcaactgaattcatagaagcagagttgaatggtgattaacatgagctgaggatagggaaagtgaagagaygttggtcaatgggtacaaagttgtagttaggaggaataagtaataagtagttaaggtagaaaaaataaataac

SEQ ID NO: 630540 - DNA, 561 bp, Homo sapiens
gagaaaaatccatagcattgaacgcatgcatcagaaaagaagagaggagaaaaatggtggctaggaggcaagactaacttgcagatcccactcggacagacagaacagcatgtggaggctcacatcatgaactcttcctcccaaaaccatcccaggaacataccaggaaaaccaaaagaagtcacaaaccgttggaaaaaagcagttggctgctgcaaactccatgrgacagctgaaaaactgtgagtgccccaagtgtgaaagggggaaagtctgcctctgaacactcatcctcactggggaacctgaaaatccagatcatggaagaaagatttaaccttacctagagcagaaatgaatttagagagctgagtgaaatataaaagtagaagcagcagctggaagagccctgtagacactttcctgggcacttcctggtccctagagaggcccagggaagccatttctgactttatctcacaggggttctttgggagggatgccagtggaactggggatagaccacaggaaaaaggaaagttccagctcaattctgtaata

SEQ ID NO: 630541 - DNA, 415 bp, Homo sapiens
gttggtcctgcatccacaagcttctaaccatatattggagaagaagaagcttctggaaataaagagagggtgtgtcttgttccagctgcagagatatggaagatatgcaaaggggcrgggggctccatgaatgctgctggaagtcaagtacagccaccctccctctgccttgtactgccgcctcatcagcctccttgtcctcccgtaaacatgccaagtccacttccacctcagccttcgtgctgactgacactcctccccctggggtgcataggccccaggtatctatgtggttcgctcccgcacttcaagtctttgctcaaacaccacccccttagagaagactttccttgaccatcctatctcatgtagcatgtcactactcttaccccattacttgctttatgttatttat

SEQ ID NO: 630542 - DNA, 536 bp, Homo sapiens
catcttgggcatctttctttctgtcagtcctcacatccagtccatcagcagattttttggctccatctttaaaataaatccaggatctaaccatgcccacctgcttctctgctatcaccttacactaaagcattgtcttttggggaggattatttcaatagccttctatatttggcacagcagcaagaatgattcttttcaaatgtaagtccaatcatgtcactttttaaaaactctccagttagttttcatcttattcagagtaaaagccagatttctgaaacttctctacaaggatttacagagtgtacscttacctttccgacctcatctttcttctcttcccctcagacagggtgatccagccacagtagcctctttgttttctgccagtatgctcacccccttctcagggccttggtactttttgtttcctttacttaaaatgctcctctaggacagccacacaccttgctacctcctcttttaaaagtactggctccagtgctatcttcccagactgcaccttccttaca

SEQ ID NO: 630543 - DNA, 524 bp, Homo sapiens
tttgttggtgaagttaacctgtgtgctatacttgtcccactagcctaagtctggggaatttctgctcccctatcccattctccaccccttttaaataaatgcactggaatagtttgtgtaaatgggaattacctgttctttgaagggttagtagaattttcctgttaaaaccttttgaaactggttcccaactggggacttaatctttaccatctttacttaccatttcaacttatgatttgattattgctcattaggttcttttgtatctccttagatcaatttttatcatttatattttcttaaaaattgttcatttaatttagctttttaaattcatgggttataagttgtacacaagatattattaaatcttggtcttatcaaggaaccagcttatggttttactgatcaaccmaatttttttttctgtatttttcataccattaatttctaagcataaactttccttttgtttcttgaattgaaagtttagtttttcttatatttttttttccagaaaa

SEQ ID NO: 630544 - DNA, 617 bp, Homo sapiens
aatttaggtaaaaagagtttaagaacttactcaagttcttaaaccgttttgtggactgtatttgaatcaaggcggcctgacactagagccattctgcatgttcttttgtattgctagaaaagaatagactgactcaactaatactttaacaaaaaggagtaaatgatggttctagagtatctcgcatctttaatgtagttgaaggttaaaaagtatgatacataatactgcagtgtaaccttaagtaatttccattgtgatcttaagtaawttcttaatgtctctggtcgtcagtttcctcatttgtaaaatagaaacaaatatatctattctaactatatcataaagtattatgggaattaaatgacataataattgtgcagtacattttaaagggctttagagaaaggcagaagttctagggaagcacttaggtaaagtcaaataatcatctttaaaatgtgggaagtcatacttgtcctgatgacccaaggacagtgttgtcaggattgaggcagtggatactgacttcacctgagtacttcctatcagttaagccttcatcattaataaaaataaattaatgaaaaggttatctctccccattttgttaagac

SEQ ID NO: 630545 - DNA, 552 bp, Homo sapiens
agaattcagtatcaaaggtgtgcaaggcaatatgcagaaacaggatgacacacttgcagaattacctggatctccacctgagaaatgtgactctttgggttctggagtggccacagtgaaagtggytttacctgatgaccacctgaaagatgaaatggactggcagagctctgcattgggagaaatcacagaagctgatagttctggtgagtctgatgacacagtaatagaggacatcacagcagatacatcatttgaaaataacaaaattcaggctgaaaaacctgtttccattccaagtgctgttgtaaaaacaggtgaaagagaaatcaaagagattcccagttgtgagagagaagaaaaaacatctaaaaactttgaagaattggtcagtgactctgagctgcatcaagatcagcctgatattcttggaaggagtccagctagtgaggcagcatgttcaaaagtacccgatacgaatgtctccttagaagatgtgagtgaagttgctcctgaaaagcctattactactgagaaccccaaacttccttc

SEQ ID NO: 630546 - DNA, 427 bp, Homo sapiens
acaggcatgggccaccgaggctggcctcgctcagtaaacttttaatagtgaaatagataaaacaaaaagatctggtatgatgaacttaattgtaaagtcctggaagactgttgtgttggctgctaggcttggctgtatttgatggagcctccaaataagtgatttaagcaaggtagacatttatttttctttcacacagaagtgaaccaatatggcagttctgctataygaaatctgacctctcttgtttctccagcattcctggggtgttgccctcatatgcctggcccaagatgattcactcccacttttacatctagccagcaagcagggggaaaatgcctgatctggaagttgtgtctgttatttccagtcacttcccattgttcagaatttagtcacctggtcatatcctagctataaattt

SEQ ID NO: 630547 - DNA, 553 bp, Homo sapiens
aaaaaactattcaacctaatataaatatttaaatagtcatagtaatgaaaaccacgtggtattggcagaaaaaaggtgcagacagagaactgaacggaacatggagcccagaaaattatgtagatkggatagatttaagaagcaatattgttgtgaaattacaaacttgtagagaaaggatgaaccctttaataaatgatgttgagagcataggaaagccatatgaacaaagacgaatcagaacctactataaagcacacaaaatctttccagattgaaagaaaatgtaaatattaagggtaaaatattaacattttagaagaaaatatgaaaatagctttacaacattaggttagagaaggttttcttaaacacaacattaaaaaccacaaacagtaaagaaaaacatgaatagattgtgtttgaaaaaaaaaaacttccgcaatggagtagacaaatgagcaacaaaccccataaaaaaaaaagtttaatgggccaagaaccttagaaaattcaacctctctatcatcaaagaaattgtttcgcatgcaca

SEQ ID NO: 630548 - DNA, 438 bp, Homo sapiens
gtttttttgttgttgttgttttgccaaagtgatagtaaaacaggagaatggcctgaacctacagctgtaagaatttaggttagatatatagtttgcttgtaaaagtattgttaaagagagtgaaatggtttagttaggggggttctggggtgagggagggagggagggggagacagggattgtggagataagtacattaagtaatagaagtatgaatgcagagaggagatataagctccataaagagacaatraacatgagggaaaacacattgggaataagaaaggagaaaaaatatggacttgagtatagtttcggttcataaagattagtaggctgctttaagcaacccaactcctacatgaatgtgggagagtcccagaaaaaaaataagaatgccgcaaatgtttctgggaggttatttagtccataatactt

SEQ ID NO: 630549 - DNA, 587 bp, Homo sapiens
ggctattgtcataactctaattttagggacttgatacggatgagaaaggaaagtgtcagagaggagcttcagaaaactagagggatgttgctgaacatcctacagtgcacaagacaatctccacgacaaatattaataattatctatactataatagcagtagtgctgctgttatactgagccaaagaaagcggtacaaaagtactttcttcattatcacacttcaagttctagaagtgttgcaacacattttcttaaaatgtttcttttttcttaaaaaagaaaaaatcaaagcaggatttacctctttaaaggatggggcagggatttactgggaaggaaatgaggagtcttcctggggtaaagaaaatgttctatgttctcaaataaaaacaratgtagacctaggttgcagggactttggttgaaaggattattgcaatgaaggaaggggactattgcaacaggaagatcactggaaccatgagatctgtaaatgtctcaaagtttattagaaacaaagcttttatttaaagagagaagtaacaaaggctagggctagagagaagcaggctggcgaaagtggt

SEQ ID NO: 630550 - DNA, 523 bp, Homo sapiens
tatgtttctcaccattatccatcaccttgtcttgacagagccacaagttaggaaaataygttgaaagaatagggagctttattttgtatagcttttttattctcagctgtgggctcaatttagtctcctaagcaaagggtaggtcctgacatgtgtttcttaattaaaatttacatccattattaattttccctgtggcaagtagcttacattgtattttgtgatatgactctccagtaggcagaagactttgcttttaatgtttataatatcacattattgtctacgtgataatacacaagccacttaacatatctacatgtaatatggacatttggtgagcagataaaataatatatgtgaacatcttttaaaaatgtaaagcagaaacttttgtgtggctgcattagatgtaatatctaatactatattgtttttggtctgacagttaccaaaaaatctcatctcagaattttgactatcaggtaaatgtgtaccctttagatcctgccttcccattctc

SEQ ID NO: 630551 - DNA, 523 bp, Homo sapiens
tatgtttctcaccattatccatcaccttgtcttgacagagccacaagttaggaaaatacgttgaaagaatagggagctttattttgtatagcttttttattctcagctgtgggctcaatttagtctcctaagcaaagggtaggtcctgacatgtgtttcttaattaaaatttacatccattattaattttccctgtggcaagtagcttacattgtattttgtgatatgactctccagtaggcagaagactttgcttttaatgtttataatatcacmttattgtctacgtgataatacacaagccacttaacatatctacatgtaatatggacatttggtgagcagataaaataatatatgtgaacatcttttaaaaatgtaaagcagaaacttttgtgtggctgcattagatgtaatatctaatactatattgtttttggtctgacagttaccaaaaaatctcatctcagaattttgactatcaggtaaatgtgtaccctttagatcctgccttcccattctc

SEQ ID NO: 630552 - DNA, 555 bp, Homo sapiens
tttctcactatctctatcacctttgtaagaaatacaaccttctttaaactcagattcctcaactgtcatgtgacaataatacatttttagaattaaaaaattttgtagaattaaatatgttatatataaagttgtgagtctagttactgacatttgtttgtgttcaataaggaacaattatgataatgtcaatattcctttgtgaatttgtaattatgatgatagccttatatttacmaatctttgtatatatatgtgtgtaaatatagaaaaatatatactttctgaaacttactacctcaaggaaacttcaattaaagttttaataaccatccttaaccatcattccatatatctctttgtgcatatacatcatatattacacacctataactgagattacataatacataatttcttttttaacaaggacactgttaaaaacaattatctttctttcactggttttttttttgtgctctctcttctttcttcctgctactccccacaagagggtaaccaatattaacagaccagtgtttataatttcaaatt

SEQ ID NO: 630553 - DNA, 472 bp, Homo sapiens
ctatattctcttcattttaaaaaatattttgacaggtgagctatttctttgggttcagaatttaaaaattgtatcttttctctcattagcttatagattgctcctctagtttcaagtatctaatgcctgattcttttcctttgtatatacctttccgtttttcacsctctttcagattttgtaaggttcttctctttatcttggagtacagaaattttatcaggatatgcctaaggatcatttctcatcaagcctaaataggcttaaatgaatatattcaatattcagactgaagtcttttttttaaccttaggggactattctgttattatttgtttaggggaatattctgttattatttggttaatcttcccctcttctctaatatccctgctctctcattctggaactctttacatttgtatcttggatcttcagatccaatacgtagcgctgctatttttttctcctg

SEQ ID NO: 630554 - DNA, 503 bp, Homo sapiens
tgtaaatccatgcttagttgtgtggttataaatttggagccttctaatgagcatccctattaagcctttacggttctcttatttggcaatgtaagctcttttaatattagtatattagttacacatatctctcagggctgcaaattactcatctttaagaaaactttctataaagttttccctttaggagacggaactgtttaatgttttcascattaatgcagcatgcaaacttactcaggtagtcaacaaaatattgggaaaaatatcaattgtatatgatatgtatttgttttttaaaactgcatttagaaatataaatattatattacattagatcaatgaaattatgcaataaagaacatatttttgtggggaagcatatttgtttttctcttctattaattgaacatcatcagttcgtcctttttttaaaaaaaataaaaccacatattgtcattgaattgggttactgatatcactttgggatgaattgacatctt

SEQ ID NO: 630555 - DNA, 503 bp, Homo sapiens
tgtaaatccatgcttagttgtgtggttataaatttggagccttctaatgagcatccctattaagcctttacggttctcttatttggcaatgtaagctcttttaatattagtatattagttacacatatctctcagggctgcaaattactcatctttaagaaaactttctataaagttttccctttaggagacggaactgtttaatgttttcaccattaatgcagcatgcaaacttactcargtagtcaacaaaatattgggaaaaatatcaattgtatatgatatgtatttgttttttaaaactgcatttagaaatataaatattatattacattagatcaatgaaattatgcaataaagaacatatttttgtggggaagcatatttgtttttctcttctattaattgaacatcatcagttcgtcctttttttaaaaaaaataaaaccacatattgtcattgaattgggttactgatatcactttgggatgaattgacatctt

SEQ ID NO: 630556 - DNA, 509 bp, Homo sapiens
atgatgaagttcatttttggagcatgtcctatataataatttcaatgttaaccctttatctgtcttatttcatttaatattcaaaacaacccratgagctaggaactatcattatgctattttcaaagatgaggaaatttgaacttaggggaataaaacaattggtcaagaatatagggaatataaataaaaagaccatagtttgaaaataggctattgtacaacattcaagcaaatgtactggttccagtctgtttgtcttagattcattcattgttctttcttgtctctattttgtgtcacatgatagcagacccatacatgcagcttactttttaccagattcagccaaatagagacactgatgggatatgacgggttagaaagaagctaagagatttctctccattgtctctctactttggttacctcttccagcagccactgtgtaacctccctggctctactatgtgtgagacaaaacacgtatggtccagtattgaccaggt

SEQ ID NO: 630557 - DNA, 579 bp, Homo sapiens
ttttattggagccccctgagtgggacactggagagggaaaacaacataatgtgatacgwtttttggcattttcttcacttttagtacctgcagttgaatcatatgtgttacaaacacaaagagaaatatgctatcttactaatcacagtgttctgaatggacaattatttagatggatcatgagtgaaaggcggattggagtagagaagcaatattttgatgttgcacttatgtgtcagaaactataaagacactgtctcattcaggtcatgtaaaatctgagaaagaaagcatcactatcccgtttcacggtaagaagtagtaaggagcttctcagattcagaagttcttgtacctgccattgcacagttagcttattaagggcttacaacctctccagtgtttcagattgtggctggaatgtaaaccaaaggtgttggaagtatgagcactttcagggttgaaccttaaaccttgaagtctaagaataatgctcttaaaacaagataaaagtgaaaaaagggagtactttgtgaaaattacatgtgaggatgactaaaataaatatgctaaaatgta

SEQ ID NO: 630558 - DNA, 566 bp, Homo sapiens
gaagcaatattttgatgttgcacttatgtgtcagaaactataaagacactgtctcattcaggtcatgtaaaatctgagaaagaaagcatcactatcccgtttcacggtaagaagtagtaaggagcttctcagattcagaagttcttgtacctgccattgcacagttagcttattaagggcttacaacctctccagtgtttcagattgtggctggaatgtaaaccaaaggtgttggaagtatgagcactttcagggttgaaccttaaaccttgaagtctaagaataatgctcttaaaacaagataaaagtgaaaaaagggagtactttgtgaaaattacatgtgaggatgactaaaataaatatgctaaaatgtaattaggagaaagaagtggctcagtttcagttatttgttaccatttttttccctcatgttttatctgtatgtaagacagcattccttttyggcataaagtattttaatgcaaagttaacaatttggtcacaaactagttttacaaactagtaatttgtacttctctatttcctatctcagaattctgatttcc

SEQ ID NO: 630559 - DNA, 548 bp, Homo sapiens
agtaatgaaagatttgactgtccaaaagcctcttctcccaagcaaaactttatactttcaaaataagtatattatcataatgaattctgtccatatatgtccatataaattttgttattacttcacatgtaaaaaaaacccacaaaataattttgttgaattgaatctatactgttaccaagtatacagaaataataattgtattaattttaaaataaagttgccttcaaaatggtaccacagattcacattttaaatagatttgtctatgtggaaatttctctacatatcagtcacatcaacagtcttctcaaaaaatatgaaaatgaattaatttgcatgtttttgccraaaaaataatctcacaaacttcaatttgacttgtgaggtgttgatttcaagatgtgccaggatttgaagtggattctagtcataatacaactaggttgcagttacacttctctgtgattctatgctctctcctccttcttgatttgtctttattttcagactgtttataagatggattgagcattttccagcatcac

SEQ ID NO: 630560 - DNA, 331 bp, Homo sapiens
tcataataatattatcaatataatgaactaccataatattttcgtgacatccaggtgattaatctccccagggactatagtgctatagagatgaggagagttggcacagcccrtgagaaagccaaacaaagtttaagtgtacttctatctttgtcaggttaacataaactacctctcatcatgattactaattgatatggagacaaagagcattttccaggtcaatagctgtatagcagcagctagcactgtcttaagttgccccccaaaataaaaaatgcctccaaaaaacataaaacccaatagtttatttttttagaaaagccacctc

SEQ ID NO: 630561 - DNA, 693 bp, Homo sapiens
aaacatctgaatggaataggtggcggccccaaaacagttttgaatatataaacaattttgtcacacttaaaatatcaatataagtaggactggatcctaggaaaattacctgttgaaagggaaacaaaaccctcaagttatattctcacctcacaaaaggcaccwcaattaatttcaggtagattacatgcaaaaattgtatacataaataacttgaagacaatataagtgaatatttgattttgagtaaaaaatacttcaagatataaaagcatgtgatgatgtcctcaaagaaaatatcaatacacctgcatatatagaatataaaagttctgtaaactgagaaaaagtagaaaacgcatttgcaataattgaaaaagagttcaaatacgtgcatacatagaggtatgtttgtgcatgtgtgtatatataaacaaacacacatatacacatacatatatgtgtgtgtcttacaaatcaatcagaaaaaaatagcagcaccactgagaaaatgacaaagaacacaaacagataattaacaaaatttaaaaaaaagagacatgatcaatgaactcttgaaatatcaatccaatctcactagaattcaattttaaaaaaccaaattaaaaagcactgctaagtaaaactgaaacctagtgagatttcaactcccttcaaattggcaaaactttc

SEQ ID NO: 630562 - DNA, 576 bp, Homo sapiens
cttcaaaaatgttcctgatacaatgttaaactaagagaataggaagaataaatatttatattatgatccaaacattgtaaaaattatataaatatgaataaacattcacatatataaaagactagaaataaatttattaaaataccaaagaaaatatcaggaaaatcaggaaatatcaggaaatatgaggaaaaatgctaacattattaaaatgtgtgtacctgtactcttgagttattatggaactttctttttaaatttctgtaaagcatcaggggagagaggtaaaaacgcaggtgtctttcttccctttgtartacctgggctggagtaagttgtttcagaagcagagaacgtgcatctccagggaactcaaaagggcatcctggttgagttgcacatgccacacagtgccaaaaaagcatcccctccccagacactttccaaagccccagattagaaggaatgattgtggttagcatgaaaccaaatgaaaatactactgataactgttcctgtctgggacatctggatccagccagttttcatctcctgaacctgctctcttaacagtta

SEQ ID NO: 630563 - DNA, 573 bp, Homo sapiens
gattgtggttagcatgaaaccaaatgaaaatactactgataactgttcctgtctgggacatctggatccagccagttttcatctcctgaacctgctctcttaacagttatctcatatggaaaaatactactctgagttttcagctctagtttttctaatacagcacttgttccctgtcttgtgattgcttgtgggtttttgtttgttagtttttctaacagcccacttactccctatattgtgattacttgtgggtttttgttcgtttgtttttgagacagggtctttctctgtcacccagcctggagtgcagtggcaggatcatagctcattgcagcctcaaaatcctgggcttaagtcctcctcccacctcagcctcctgaatagctaggaccacaggtgcaccctaccatgcccagctaagttttgtagagacagggtctcgctatgtgcccaggctggtctggaactcccaggctcaagcaatcctcctgcctcgtctycagaatgctggtattataggcgtgagtcaccgcacctggcccattgcttcttttagtggcagtctcatat

SEQ ID NO: 630564 - DNA, 547 bp, Homo sapiens
tctgacacaaacaaattctgactcaaaaatatggaaggtgggctgtttgttcttcattttaagtgattgtgttttgcaatatagtggttgtgaaaaattaatttcattcatttccattcagtccatttctattccagaagtgcatgaaactagaaattggtgtgtggttaaagattgtttttatggttatttttcttttctgatggtttgacctactagtccttggatttctctcataagtttaaattaacttgagaattttgtctatgtatagataagtccacatacatatttgattactactttaatatgaaaaatttaaaggagtctttaaaaattttttaatcctccacacgaagggaaaattccccagatcagataagaatataccagattacagttaatttgtttgcaaaggctgaattgttcctttctagttratcacattttaaagagctgagctatttttgtgtgtgtttattattttaaatgtttgaagcttgaagtgaatgcgaagaatatccaattttaaagcacatttaaatct

SEQ ID NO: 630565 - DNA, 547 bp, Homo sapiens
tctgacacaaacaaattctgactcaaaaatatggaaggtgggctgtttgttcttcattttaagtgattgtgttttgcaatatagtggttgtgaaaaattaatttcattcatttccattcagtccatttctattccagaagtgcatgaaactagaaattggtgtgtggttaaagattgtttttatggttatttttcttttctgatggtttgacctactagtccttggatttctctcataagtttaaattaacttgagaattttgtctatgtatagataagtccacatacatatttgattactactttaatatgaaaaatttaaaggagtctttaaaaattttttaatcctccacacgaagggaaaattccccagatcagataagaatataccagattacagttaatttgtttgcaaaggctgaattgttcctttctagttaatcacattttaaagagctgagctatttttgtgtgtgtttattattttaaatgtttgaagcttgaagtgaatgcgargaatatccaattttaaagcacatttaaatct

SEQ ID NO: 630566 - DNA, 385 bp, Homo sapiens
acagttaatttgtttgcaaaggctgaattgttcctttctagttaatcacattttaaagagctgagctatttttgtgtgtgtttattattttaaatgtttgaagcttgaagtgaatgcgaagaatatccaattttaaagcacatttaaatctgacataaatcattatccgtctcttgcttttaacagacatgttaaaaagtttagtacatgttattaataatagatgtcctgtcaaatatttttatccttcgtctacagtgtttgaattgtctttgtcaaggtgtgatttctttttctggttatgcttttggatgatagaataagtcatttgtggaaaaataggaagtgagcraattgccacgcggcatgacctcatactggaaca

SEQ ID NO: 630567 - DNA, 613 bp, Homo sapiens
ctagtctccttcactgttgcattctgtgcacctgcaggcctaacaccacgtggaagctgccaaggcttgcagaggtttggcacctgctggagctgccaaggcttacagaggcttgcacstgctggagctttgacctgaactatacctgtggccctctgagctgaggctggagccagagtgattaggatgcaaggagcaaattcccagggtggcgtagagcagtagcaccctgggcctggcccatgaaaccattctttccttataggcctctgggcctgtgatggaaggggctgccttgaagatctctgaaacgccttcaaggccttttccccattgtcttggatattagcacctggctccattttagtcatgcaagtctctcttgcaagtgattgttccacagaccatttgtatttctctcctgaaaatgcttttttccttctttatcacatagctaagctgcaaattttccaaatttttgtatttaaagttccaaatttaagtcgtttatgtgcttctgtatatgatcataggctgttaaaagcagccaggtcacatcttgaatgctttgctgctcaccagatattctaggtcatcactcttaagttcaagc

SEQ ID NO: 630568 - DNA, 568 bp, Homo sapiens
tttgtatttaaagttccaaatttaagtcgtttatgtgcttctgtatatgatcataggctgttaaaagcagccaggtcacatcttgaatgctttgctgctcaccagatattctaggtcatcactcttaagttcaagcttcctcagatctctcgggcataaacacaatgcagccaagttctttgctagagcatagcacaggtgacctttactctaattcccaataacttccccatttccatctgagaccttgtaagcctagccttcactatttatatttctattagcactttggtcacaatcatttaactagtgtctaatatgttycaaactttccctcatcttcctgttttcttctgagctctccaaactcttccaacctctctctgctcattacccagatccaaagtcacttccacatctgcaggtatctttatagcaatagtaataccccactcccagtaccaattttctatgttagtccattcgtgttgtcattaagaaatatctgagtctgggtaatttataaagaaaagaggtttaattggctcagcattctgcaggctataca

SEQ ID NO: 630569 - DNA, 518 bp, Homo sapiens
aatttctcactccagctcttactctcctcccataatactgtggaatagtttactggcccctgtaattatattataaccaagataactgtactcagattcataatatattctaggtttttgacttggccgaagggwcagtggcttacctaagcatgagtgctgaaattaaatgaatggcagaagttcgtggttctctttacttcctaaaacatgatgaaaacagggacaaacggggaataggtaagtgtgagaatcagtatgttggggaggctggtgggaggaaaagtttaaagggagggtatcagagaacccctatgatctcacatttctaaaggataccttgtctcgtttgtaaacaaacacagtcctacaagaacaatttgctaacccactctccttcctgtggagatgattcgacattcattcacttgatatttcctgagctcttgttatgggcaaggcatcatgcttcaaactattcaggacacaaaggaaaagtattggtgtgcaaaatgcag

SEQ ID NO: 630570 - DNA, 518 bp, Homo sapiens
aatttctcactccagctcttactctcctcccataatactgtggaatagtttactggcccctgtaattatattataaccaagataactgtactcagattcataatatattctaggtttttgacttggccgaagggacagtggcttacctaagcatgagtgctgaaattaaatgaatggcagaagttcgtggttctctttacttcctaaaacatgatgaaaacagggacaaacggggaataggtaagtgtgagaatcagtatgttggggaggctggtgggaggaaaagtttaaagggagggtatcagagaacccctatgatctcacatttctaaaggataccttgtctcgtttgtaaacaaacacagtcctacaagaacaatttgctaacccactctccttcctgtggagatgattcgacattcattcacttgatatttcytgagctcttgttatgggcaaggcatcatgcttcaaactattcaggacacaaaggaaaagtattggtgtgcaaaatgcag

SEQ ID NO: 630571 - DNA, 603 bp, Homo sapiens
ttgtttttacttggaagaaatatctctgcatgcacctagccactggacccataaaatttcactgcagttgccactcctaaatttctgtaagagttatcctcctctttctggggtgcatgtgttttaccaagacctccagcatactttccaccttctttctcatccatcccaatctatgatgttgccaatgaaatgaacagatttaatattctgtagaatgtccrgcatctcttaagactatgttacagatgacagaagagttatgatagctctcaggaaaagtgtacatcaatgtggtatgaatgtgaataactccatatccacttgctagctggaaaggaatgcactcaggaaatcctcggctgcacaccattggtctgcaggctcattaagttctgcgagcagagatatccagccagcatggcaggtgcaatcaagagcagtacttggtcgagtctgaagtaatcctggtcattctttaggtcctattgggcttctgcaaggacagagtacacggagataagaggtaactccagcactatcccaactcctacagctctctaatggtggtgctaccccccacaatacctgcaataacctcca

SEQ ID NO: 630572 - DNA, 593 bp, Homo sapiens
caggcctggtgtgaatgattctcagttcaggatttcacgaagctgtgtcctcatcttgaggctggggtcctccttcaagcttatacagagcttggtggcagaattcagtttcaggcagttgtgagattgtagtccttgttcctgggcagctgtcaggtggaggtggggtggagctgctctcaattcctggagcccgccatatcctttgccacatggccccttcattttcaaagctcacagcggaggaagcccctcacgttgaatctcgctcacactgtgaatctctttgctgaagaagaaataagttgttttaagagctcacctgattaggacagtccaaggcaggataatcatggccttaaagtcaactgatttgggaccttgcttatatctgcagaatcccttcacagcrgcacctacagtagtgttgattgagtaactggggaaggtgaatcaccaggggtggttatgtggaggccatcactgaatcatcctcccatagccaggatcttccttttgtgtttaattgggtcgtagtaggaaactgaagttcaaataaataggttgttgtgaatgttaataaaatacatcct

SEQ ID NO: 630573 - DNA, 593 bp, Homo sapiens
caggcctggtgtgaatgattctcagttcaggatttcacgaagctgtgtcctcatcttgaggctggggtcctccttcaagcttatacagagcttggtggcagaattcagtttcaggcagttgtgagattgtagtccttgttcctgggcagctgtcaggtggaggtggggtggagctgctctcaattcctggagcccgccatatcctttgccacatggccccttcattttcaaagctcacagcggaggaagcccctcacgttgaatctcgctcacactgtgaatctctttgctgaagaagaaataagttgttttaagagctcacctgattaggacagtccaaggcaggataatcatggccttaaagtcaactgatttgggaccttgcttatatctgcagaatcccttcacagcggcacctacagtagtgttgattgagtaactggggaaggtgaatcaccaggggtggttatgtggaggccatcactgaatcatcctcscatagccaggatcttccttttgtgtttaattgggtcgtagtaggaaactgaagttcaaataaataggttgttgtgaatgttaataaaatacatcct

SEQ ID NO: 630574 - DNA, 593 bp, Homo sapiens
caggcctggtgtgaatgattctcagttcaggatttcacgaagctgtgtcctcatcttgaggctggggtcctccttcaagcttatacagagcttggtggcagaattcagtttcaggcagttgtgagattgtagtccttgttcctgggcagctgtcaggtggaggtggggtggagctgctctcaattcctggagcccgccatatcctttgccacatggccccttcattttcaaagctcacagcggaggaagcccctcacgttgaatctcgctcacactgtgaatctctttgctgaagaagaaataagttgttttaagagctcacctgattaggacagtccaaggcaggataatcatggccttaaagtcaactgatttgggaccttgcttatatctgcagaatcccttcacagcggcacctacagtagtgttgattgagtaactggggaaggtgaatcaccaggggtggttatgtggaggccatcactgaatcatcctcccatagccaggatcttccttttstgtttaattgggtcgtagtaggaaactgaagttcaaataaataggttgttgtgaatgttaataaaatacatcct

SEQ ID NO: 630575 - DNA, 615 bp, Homo sapiens
atggattccatagtcccaaaatggagaacaatatactttctatggtaccaagataaggccttaagcctgctcacacaaatagtttaacgtatttcataaatgacctggattatcacattctgtcttggttagccaaaacttgttttataggatttaggcactaattttttccagtgggtggtaaaccagtggtctcaattctccattctatgcaaaaattttagtttaccacttggaaaagaattcaaagagatgagataagacccaggcagcatagaactggattgtggtattaagtaatcaaatctragctaccaaatttattttagaaaaatgctttattagatggtggatgtagattgcaggttatgtcatacaacattcacatttaattgctttatgccaaataaccttgcttttgccatttcttaaggtatttgcatataataaacatgattagagaatattgtgttattctgcattttcctagattctgtatttgtctatttggcatccattcagcacagggccaattatatttgctacgtttttaaattttctatattcttgatgttacggcatttgagggtcttacatacccaaaaagagactgtc

SEQ ID NO: 630576 - DNA, 627 bp, Homo sapiens
aggtatttctttatggcagtacaaatggactaatataggcatggaagaaattgaagaaaacaagggcaagagagtggcctggggcagaatgtgaaagccaacctgaagaaaggcaatgagaagcctttattgattaactggaagttttgaaaagttactcaggcaggacaggcaggaaggattggaaggagaaagattaagacagtgattctcaacaggaatgggaaatctgtgagaataatctgtaaagcttttgcaaaatacgcaagcctggtttttcctccacygttctgtcttctccttcaaccacacttctgatgcgatatggggttacaggaaggtaagcattttgaaaaatgcttgctagatgatactgataaatccttccctctaccattgctttaatttagccaagaggtacttaagtaaggctgtgacaatggagatgataaagaatggatttgagaggcacatgagttggaattacataggatggattggatgagggtgtaatggagaggaaacatgacaaacaggtgtttagtttgagtgactgagatactataaactgaaatgagcccaagaagaggagtagggtttctggaaataattgtggattctacttga

SEQ ID NO: 630577 - DNA, 627 bp, Homo sapiens
aggtatttctttatggcagtacaaatggactaatataggcatggaagaaattgaagaaaacaagggcaagagagtggcctggggcagaatgtgaaagccaacctgaagaaaggcaatgagaagcctttattgattaactggaagttttgaaaagttactcaggcaggacaggcaggaaggattggaaggagaaagattaagacagtgattctcaacaggaatgggaaatctgtgagaataatctgtaaagcttttgcaaaatacgcaagcctggtttttcctccaccgttctgtcttctccttcaaccacayttctgatgcgatatggggttacaggaaggtaagcattttgaaaaatgcttgctagatgatactgataaatccttccctctaccattgctttaatttagccaagaggtacttaagtaaggctgtgacaatggagatgataaagaatggatttgagaggcacatgagttggaattacataggatggattggatgagggtgtaatggagaggaaacatgacaaacaggtgtttagtttgagtgactgagatactataaactgaaatgagcccaagaagaggagtagggtttctggaaataattgtggattctacttga

SEQ ID NO: 630578 - DNA, 503 bp, Homo sapiens
atgagttggaattacataggatggattggatgagggtgtaatggagaggaaacatgacaaacaggtgtttagtttgagtgactgagatactataaactgaaatgagcccaagaagaggagtagggtttctggaaataattgtggattctacttgatacaggtagaatttgaagtcactataggcagttgataatataaagaactggagttcaagagagcttaaaaccataaatacccaagtaattgtgaggcaatagaatagaagcaatagacagtaccatagaagtgttaaacattggcaacagaaaaccagaggcaagggagatctgtattgtctggagcagacagataagtcttctcggataagtgaaacttgagttgcatctgaaagtattaatagcttrttcagctttgagagattaaaaatggagatcatttgccaaaaggtatgggcgagaaagaaaaatgctgtttcaagagggcaggatagtgatatgaatgac

SEQ ID NO: 630579 - DNA, 537 bp, Homo sapiens
agataagtcttctcggataagtgaaacttgagttgcatctgaaagtattaatagcttgttcagctttgagagattaaaaatggagatcatttgccaaaaggtatgggcgagaaagaaaaatgctgtttcaagagggcaggatagtgatatgaatgacttcataataaaaactaatatactttcatttattcttcactcccagggggagctattattattcacaatttatagatgaagaaataggttcagagaggttaaataaatggtctgagtcatttcaagtagagcagtgtccttgaatctgtaacctttaactccagactcttgttctaatccatagattgtatgtgcttaaaggcagggtttatttcttaattattttaatatccctcatggctagtatatagcctgaaaatagactctaagtacatatttttgaattaaactgaaaattatcagttcttttgtgcatcagtttaagtatttatcatttacacttaagactaaayatagaagtgaaacattgtaggactagaa

SEQ ID NO: 630580 - DNA, 602 bp, Homo sapiens
cttacctaaaatctcacatgcagttatcagcaaatatggagcaaaacctgtgcctcaacttctcaaccaggacttttttcgcataccattcaatctaagagtgagattgcaaagtgtgagactgtcctcctccttctgagctctccaaagttagacagaaacaaaaaacrtagatagacataggaggcaatctgatagataagaactcttggactgtttttttcaatcagcagtctaatcattggatagaataagagaaggctgatataagaatcaggcacaggaattctcgagcaattcatctgagaaaagaacaacaacaaaggtttgaagggaggtagtatatttttcaatggattctaatggcatgctatggagtcaccattgtttgtcttgctatcttttaaatataaaacacaatctcacctacctaaggcagatgagaagaaataccattcctggtccctggtccagggccaacttacagaaccctgaagggcactcataagctgtgcaatttggagaactcacactgctttgctctcccaggctcctcatctgtaaatgagagggttagattacatttatctagttttgtttat

SEQ ID NO: 630581 - DNA, 602 bp, Homo sapiens
cttacctaaaatctcacatgcagttatcagcaaatatggagcaaaacctgtgcctcaacttctcaaccaggacttttttcgcataccattcaatctaagagtgagattgcaaagtgtgagactgtcctcctccttctgagctctccaaagttagacagaaacaaaaaacgtagatagacataggaggcaatctgatagataagaactcttggactgtttttttcaatcagcagtctaatcattggatagaataagagaaggctgatataagaatcaggcacaggaattctcgagcaattcatctgagaaaagaacaacaacaaaggtttgaagggaggtagtatatttttcaatggattctaatggcatgctatggagtcaccattgtttgtcttgctatcttttaaatataaaacacaatctcacctwcctaaggcagatgagaagaaataccattcctggtccctggtccagggccaacttacagaaccctgaagggcactcataagctgtgcaatttggagaactcacactgctttgctctcccaggctcctcatctgtaaatgagagggttagattacatttatctagttttgtttat

SEQ ID NO: 630582 - DNA, 521 bp, Homo sapiens
atacccctaacctctcacagtatccagcaaagagaagacataaaaggagagcttgttaaatgctctgagtaaagttgtggctttttaaaggcactgatagattggatgacatctatgaatgttggggtcatgggaaattattttacctgcatcttmgataattgatttttcttgtattcactctcagtgaagatcccggtgttacacatccaatcgttcacctccttccaagactatgacattccaggaaaccttcactgctaagaggaactaagatctagagtatctcctcgaggaagtacaactggtaagtccttaccagcgagtttaacgtttgtttctaaaatgtaccaaataacaacaaagatcccccaagcctggcaaacagtacccatgcccctgccacataccatgaagcacagcctctcaatggtcaatggcaaaaactaatgtttgtctgtcctaatgtgtatattctatagagatggaaatggcatttaaaatgatttttattaatggaa

SEQ ID NO: 630583 - DNA, 628 bp, Homo sapiens
tgtatggctacaaaaggaaactgcattgatggggcctcgaatgagtggagtagtctttagaacttcattattaaattaggcatcattggaacaaawtgccatttttccttgttgattccaggaatgtttcatagaatcgaggagtcagtggcattaggtcatattttaaaggcttcataatggatgaagatagactagcattagatgatggaatttgagaaatgtggaaggacatctgaacaaggtaccttcttgagaaattcctcatacaaagcacccgatagtattttataccaactatcaaattaggagaactgacggataacaaaaacagagctctttcaataaaattaggtttatatttcttttattttaatgctttctttccccacttaacaatgcgtctaaagtaagtattgacaacagcttgcatttattaagctcttgcaatgtgtcaggcctggtgctaactcctttacatccattaatttaactctcatcgtatgtttataaagtaggtgctattattctgcccattctaccggtaagaaaattccacaactaaagagaagtaacttgcccaagaccagacagctagtatatactggagtgaaatttgaacccatgt

SEQ ID NO: 630584 - DNA, 628 bp, Homo sapiens
tgtatggctacaaaaggaaactgcattgatggggcctcgaatgagtggagtagtctttagaacttcattattaaattaggcatcattggaacaaaatgccatttttccttgttgattccaggaatgtttcatagaatcgaggagtcagtggcattaggtcatattttaaaggcttcataatggatgaagatagactagcattagatgatggaatttgagaaatgtggaaggacatctgaacaaggtaccttcttgagaaattcctcatacaaagcacccgatagtattttataccaactatcaaattaggagaactracggataacaaaaacagagctctttcaataaaattaggtttatatttcttttattttaatgctttctttccccacttaacaatgcgtctaaagtaagtattgacaacagcttgcatttattaagctcttgcaatgtgtcaggcctggtgctaactcctttacatccattaatttaactctcatcgtatgtttataaagtaggtgctattattctgcccattctaccggtaagaaaattccacaactaaagagaagtaacttgcccaagaccagacagctagtatatactggagtgaaatttgaacccatgt

SEQ ID NO: 630585 - DNA, 536 bp, Homo sapiens
ctggacacatgtcgtttctgtttttttatatgttggggctgttggatgtggtactagttggatgcctggtaaggacagatgtgttcattcacaacgtctgggaggagagacrtcaggaacatgtattgagctcaatgttggctctgaaacactcaggcgctctctgacttggacactcagctctatcagtcccactctctgaacctcatattctatttctactggggcaaatagtgtggtttttgactaaggagtcctgggtttctacagattagctgtgcggcttctgggtgtagctttttctccattgcaaaacgagaagggtttggacacattgagttcctacgcctatgattttacaatatatccctgatttgggggcttatttcagctgagtcatctgaattcagttgtgtaagatgatggatcttaatatctttataacatctttgtatctttttttttcagacagggtcttgctctgtctcaaatctttatttatttttagccaaggtctaaaaacaagtatatatata

SEQ ID NO: 630586 - DNA, 559 bp, Homo sapiens
ttaaaacaggaaggaagtaaagcagcactgcactctgggctgaatcttccttgtttcatttttagacaaatagttttatgcaacaatcctctttcttccccactctttcatagaagcccagcattaatgaggctaaaccaatggctgcactctggtggcccctggaatatgcttttatttggtgggggctggggtgcatctcccattccagagctcacaaaggggtctggagtttctagagatctttgcaggagatggttcagggactgttgtaaggactggctaacattcacaccatgtactctctggactgagatggtaacacatcckaatctacagaatcagaattagaaatggaaagggctttgaaaggtcttcctagaccatcgcttattgccaggcagaggtgcccttcaattaccctagacagatgaaaatctccagatataggaccctaagccctctgtttaaataagaaccaatatacagtattaaacactctcctaaagataactgtccagccccagccagggatggctcaattttgttatactcagag

SEQ ID NO: 630587 - DNA, 375 bp, Homo sapiens
gcaccaccatgtctggctattttttaatttttttgtagatatgaggtctcaatatgtccaggctggcctcaaacttctgacctaaagtgattctcccaccttggccttccaaagtgttgagattacaggtgtgagccmctgtgcttagccagtttggattatttttaaatgctcgtaaaatgagaactaaattacaaaattacaaacacaatcaagaaaaaaaaaaaaaaagaccggagtaggaatggccagctaggtgaatactgtgatgaattaccgataggtgtgtgtcctctaacccaacctcagcctctgttcccagcgtttcagacaattcttggtactaataagtgcctgtgacaatttgttgaattc

SEQ ID NO: 630588 - DNA, 404 bp, Homo sapiens
gaattccaggactcaagagatcttcctgcctcaccctcccaagtagctgggaggcaccaccatgtctggctattttttaatttttttgtagatatgaggtctcaatatgtccaggctggcctcaaacttctgacctaaagtgattctcccaccttggccttccaaagtgttgagattacaggtgtgagccamtgtgcttagccagtttggattatttttaaatgctcgtaaaatgagaactaaattacaaaattacaaacacaatcaagaaaaaaaaaaaaaaagaccggagtaggaatggccagctaggtgaatactgtgatgaattaccgataggtgtgtgtcctctaacccaacctcagcctctgttcccagcgtttcagacaattcttggtactaataag

SEQ ID NO: 630589 - DNA, 616 bp, Homo sapiens
tgctaggggaagaagatttgagggttgaagataggggagcagcctcagtctgacccaggaacagtgaggtccctcagtgtgagggcatggagaacagaggtttggaaactatgccctttacctgtacagtactcggaggggtacccacaagggctgcagatggagtacccaacctggagaacaatgggcaataagttcttctggggaggaaggtgacaagggatgtttttcagctaggctgcagcagttcaaagtcagattcatctgattttaaaaagaaaggtgagattttttatgctttagtgacatggagcaaattcctgctgrctccacaggtgtatgttggaaaccctggaaatagatgagatggcccagggtgagcatttaccatttaccaagagaaaagaagagagctggggacgtctcctgggaacacaatttcagaatctgtggaagactgagaaagagcagccagagggcaggaaggggacctgggaaagtccatgtcccagaggtcatggcaatgtcataaagtaggaggcactcgatggttagaagctgcaagaattccaggaagatgaagactaagaagtgtctcccagacactggtatggtg

SEQ ID NO: 630590 - DNA, 396 bp, Homo sapiens
gcttactatctgaatctcagtctctttatccacaaaacagggagaatgacatctatctcaggttgtaaagattaaatgagataacatcaatgaaaatgatagtgtatggcattatacgactttattatacaatttttctcttaatcgtaattttttcaatagccttgggtgttggacttttttaacatattaagaaagtctaaaacaaatgttgcaaactcgctgctgtcaagctggattaacagatgtatttcattccatttggacagtattattatctgaattaattgccaaaatttaaaaatccaaagaagtctggtctgcctgctaacattgaccagtactttgcctmtaccatgcactcaataaatacttactaattgattgatagaattc

SEQ ID NO: 630591 - DNA, 610 bp, Homo sapiens
cctgcattgagtcacaaagatctaccaagcctaggaaattattgggtgaattactcttaatcagacaactccgaccatgacagtcttcgtctgaggccgcaattccctttctgaccaccagagggagcacgtggcttgcgccgaatcccctccagctgtgtgttttcaactcaatctttccaagggcctttgccgggaggaggggctcctggctcctgaatggtccgcccggtgccgtgatttcctaggaaagccctcagctcttctcattccgcttgttcaccccccaggtacagcacttgccccactctggggtaattcttggctgtggggtcttaagtgctcattccttcccagaggcagagaccccacgtgatctacacatcttccccaactcctggggaacggcgacgcctctaaccctgtagtctgagtaaatcaacaacagcaggacatggggaggggcagagaagtcaagcagggacgtttgtagggtgggaggggaaagaggctttgcctsagtagctcttctcaaccccagctgccgtgagtctgattcaactgatggggcatcggtggttgttcagcctccccaggtgaactcgaagtg

SEQ ID NO: 630592 - DNA, 516 bp, Homo sapiens
tcaaggtctgtgaagcatgcccaagtttgagaaccactggcctggagggcgtgtttgtctgatcgcacctgtgtgcacgaggcttggggatatttgacttgcaggtggagatttgcatctaggcatccttgcggcagacagcccactctatctcacttgattttgtcctctcagagcactcctgaggttagggcaggcactctggggcacttagcacatattaaatgttgatggtaatgacagcagccagacgtgtctccagctsagcctccgtttcttaccagtccctgggtagagcagacacaagttgccctccttttatcaccatagaaatctaatctcaactgtgcggaaagcaggaggttcacactgggagagcaggagaaatggccgattaggagtgggaaaacatcccgtacttctcttaagcagattgcagggacaaaggaaaccatttctgcccacccctggctgatgtccctgggtgtgcaaagagagacagagagggcaggggta

SEQ ID NO: 630593 - DNA, 516 bp, Homo sapiens
tcaaggtctgtgaagcatgcccaagtttgagaaccactggcctggagggcgtgtttgtctgatcgcacctgtgtgcacgaggcttggggatatttgacttgcaggtggagatttgcatctaggcatccttgcggcagacagcccactctatctcacttgattttgtcctctcagagcactcctgaggttagggcaggcactctggggcacttagcacatattaaatgttgatggtaatgacagcagccagacgtgtctccagctgagcctccgtttcttaccagtccctgggtagagcagmcacaagttgccctccttttatcaccatagaaatctaatctcaactgtgcggaaagcaggaggttcacactgggagagcaggagaaatggccgattaggagtgggaaaacatcccgtacttctcttaagcagattgcagggacaaaggaaaccatttctgcccacccctggctgatgtccctgggtgtgcaaagagagacagagagggcaggggta

SEQ ID NO: 630594 - DNA, 541 bp, Homo sapiens
ttaagtggcaagtcctggaattcaattaatgattatttgcgctcattctgctaccgccctactgccttccaaaagaccctcattctttggcatggaaactgcagacagcattgttgatctctctgttgagcaagaattatttgccaaagaaataaatgtaccaacctggctcattttgcccactctgaccacagggtgaattcttccygctacctgaccttgacccttcctacaacaagcaaaatcccttttctcttgttcagtcctcagcaggacagctgggaagatttaaacagcttgctccatgaccagtggttcttccgagaatggaaaactaaaaataaactctgttgggtggcgtctccgaggcctcttccaatgacaaagagaggctggacttggaggggaggggaaggcagagagcagaatctggacagcgggttcggaagccctccgcctcgctgatttagtgcctggatctggtcctcttcaaggccctggtgagatttcttatcagcacagtggggcccaggacggctgt

SEQ ID NO: 630595 - DNA, 443 bp, Homo sapiens
agtgtctgccaccctatcccgacagctctgtgagtagtcagggaatacctgcttttcatcccccaggtcagtgcgatggttacctgctcytcctctggaggcagtctggcctgggaggtccccaggactcaccattcaggagaaggccttcatttgaaatgatcacagccctgtgaggctcactatccatctctcctctggctgtggcctcgagcaccaactacttcctctcttcatcttggcaagagaaagcaaagctaatgaatttcacaagtgtggtctaggcacagggtatcagcactcagggaaccaattctgaagactctctgaagacttacggctaagacctttggttaaggcaggaggttgctggctggagatcaaaatgaatgtggagaagttggttggagcaagaccaggcagagtccttcaagtcaacaact

SEQ ID NO: 630596 - DNA, 443 bp, Homo sapiens
agtgtctgccaccctatcccgacagctctgtgagtagtcagggaatacctgcttttcatcccccaggtcagtgcgatggttacctgctcctcctctggaggcagtctggcctgggaggtccccaggactcaccattcaggagaaggccttcatttgaaatgatcacagccctgtgaggctcactatccatctctcctctggctgtggcctcgagcaccaactacttcctctcttcatcttggcaagagaaagmaaagctaatgaatttcacaagtgtggtctaggcacagggtatcagcactcagggaaccaattctgaagactctctgaagacttacggctaagacctttggttaaggcaggaggttgctggctggagatcaaaatgaatgtggagaagttggttggagcaagaccaggcagagtccttcaagtcaacaact

SEQ ID NO: 630597 - DNA, 502 bp, Homo sapiens
atccccttggtgaatataacattgcagggcttagtgctgccctcaaggcttttacaatctaatatgacttgctaataccgaaatgggaaaggtaggaatttggatggatggtcttgcagagggaggccagatatttttgagggagaaaaggctgcccagtaggatggggaggaggttgatggagaargagttgcccagacaagaacaagatcatggcaggggcttctaggctggctaagcaggatgggggaaggaagaagtgggaaggtgaggctgaaggagcagagggagttgagctgactccctgttcctttctggggaccctcaccacatccttgtgacactcttctcttccccactgccaatctctctgcagttttcagggaaccctacaccgtccgggtggaggatcaaaggtcaatgcgtggcaacgtggccgtcttcaagtgcctcatcccctcttcagtgcaggaatatgttagcgttgtatcttgggagaaag

SEQ ID NO: 630598 - DNA, 433 bp, Homo sapiens
tgctggcagtattcatctccttgtggtagaagaactgaggttcccatcttcttgctggcttctggccaggggcagctgtcagctgctagaggcttcccacaattccttatcctgtgcttctctccgtagcctgtctcatgacatagcagcttrctttttcaagccagcaagggagaaaattctcgagctccagcctgcaagattgagtcttatatgatataacaccatcatctgagagctgtccttttgccacttttgccacattctgttggttaaaagtgtgttgcagctcctgccagtattcaaaggaaagagattactcaaagcattgaacactagaaggctggaatgactggggatcgccgtagggtctcttgccataaaggtgaaatgaaaacatttccaaataaacagaaacagagtttctaacgaa

SEQ ID NO: 630599 - DNA, 570 bp, Homo sapiens
ataaatccctccaccttagtggtagattttaaagtgctgatcttgatttttggtaggataaaccgtcmaaaaaaaaaaaagaaatttaaacacagttgataatgttaatttataggcatatagaactttcttcccaaccatgaaggaattcacaattttccaagcacatatgaaatataattcttttaataactgaccatgtactaggtcataaagcaagtctcaacacgtttcaaggcatctgtacatcatacagaccatgttttgtgaccttggtgcacttaagttagaagtcaataacaaaagcaaataaaaatcactatatatttggatatttaaaacacacacttcttaatgcataggtaaagcagaaattgtaaggaggtttaaagtatactgagaactaaacaacttccaactatgatggagtactttcacccccttacagaagctttgaagtgtggttattgattattgtttagttcttagtattatactttaaaagcacttagagggaacattgcagtcttaaatgcttatattggaaaataagaaaagctaaatattaat

SEQ ID NO: 630600 - DNA, 640 bp, Homo sapiens
aatagaagaaacccagagattgtttaagggcagaattaagaaaattgtaaaacatactataaaaaggattaatgaaaccaagagttggtgtcttcaatataactataagcatcgttaaacctctggtgaaactgacctagaagaaagggagttgtcacaagtaacattaggaatgattaatacaggcataactttatggcaatacatttgaaagcagaaaagggaaaatcctttaaaaattataactcactaaatttattaaagaagaaatagatatctggagagtgccataaccattaattaattgaatgggccatttaagatcttcccacaacgaaagtcccaagcccggatgattttacaggttagttccaccaaacactcaaagaacagataattcraatcttctgcaaactcttccagggagctagcaggagagtggacacttgtgctgtgaggccagtactgccatccccaaaccaggcaaggttaatacaataaaataaaaactgcagaccaatctcactcatgcacatagatgcaaaaatcctaaacaaaatgtcagtaagccaaatccatctgtttattaaaaaaaaaaaaaaaattggtttcatttcagaaatgcagggatgatttaaca

SEQ ID NO: 630601 - DNA, 416 bp, Homo sapiens
cctactctgtgcccggtacacatgctaggcccagaagatacaaagggcatgacagcatcctcaaggaactgggtcatgacccaatgtgatagaagctgtgattgagtgtggacaccacgcatggaacatgcacagagcaaccaccagccacacctagagatgtcaaggaagcttcacagaggaggtcagktttggaatgaaccttcacaaagcaggtgggggcaggggaagggcactccagggcatgttcttaccctcttcctcttcctctacttctgcctttgctggctcaacaacagacatgttgacaaggaaaccccaaagcttactcagctatttccaagggaatcggatgggtggtcccactggcctcttctgaacgatctacctcttcttgctttgcacttttcctgtgt

SEQ ID NO: 630602 - DNA, 451 bp, Homo sapiens
ggtattcagtttgctttgcccagaccaatcagaggaatcaccttatgaaatatatttcttaaataataagacttgaaagtgaaaattactccttggtccatgagctgcagaatggatattgtgttagcaggcctgcaaacaacattgatctccttgtacatctccatcagaagtctttaagtgaccatrtgcattgtcaatgggcagtaatattttaaaagtaactttttttttttctgagcagtaggtcttaacagacatgctgtcatctaggctttgttgtttcatttatagagcacagacagagtagatttagcattattcttaagggtcccaggaatttcagaatggtaaacaatcattggcttcaacttaaagtcattggcccctaacaagagagctggcctttcttttgacatgctgaagtcagacattgatttctcctctctag

SEQ ID NO: 630603 - DNA, 581 bp, Homo sapiens
aagttcagcaatgtcctaggtacatcatagagaaatgggtaagatattttaaatgaattcgcctcttccaactttctgaaaaacaaagcgcttcctcaataaaggctgtcattggatcacctttaaatacacaaaacagaaaattttaatgtattcctgtaggcagagagggagcaattacatacggtttctaattctgtgctgctataatgaaataacttagtctgagtaatttacaaagatcagattttttttttttcttacagttctgaaggcttggaagtccaaaatcaaggtaccagtggattkggggtctggtgagggatagttctctctgcttacaagatggcactttgaagactacatcctaaggagaggatgaatgttgtgtcctcacatggcagcagggacagcagggcaaaaagccaaatgctatgtgaagcctcttttataatcccattcataagggaggagtcttcctgacctaatcagcttgtaaagaccccacatttgaatgctgtttccttggggattatgtttcaacatgaagtttgaaggcaacgtgaacattcaaactatag

SEQ ID NO: 630604 - DNA, 581 bp, Homo sapiens
aagttcagcaatgtcctaggtacatcatagagaaatgggtaagatattttaaatgaattcgcctcttccaactttctgaaaaacaaagcgcttcctcaataaaggctgtcattggatcacctttaaatacacaaaacagaaaattttaatgtattcctgtaggcagagagggagcaattacatacggtttctaattctgtgctgctataatgaaataacttagtctgagtaatttacaaagatcagattttttttttttcttacagttctgaaggcttggaagtccaaaatcaaggtaccagtggattgggkgtctggtgagggatagttctctctgcttacaagatggcactttgaagactacatcctaaggagaggatgaatgttgtgtcctcacatggcagcagggacagcagggcaaaaagccaaatgctatgtgaagcctcttttataatcccattcataagggaggagtcttcctgacctaatcagcttgtaaagaccccacatttgaatgctgtttccttggggattatgtttcaacatgaagtttgaaggcaacgtgaacattcaaactatag

SEQ ID NO: 630605 - DNA, 633 bp, Homo sapiens
ccttcagaagcatttaattaattatatatttcaattatgtgtttgttaaaacttcttcaaccctatccctatagatgaatttatctgtcatatataaccaaacaggaatacccctgtacataaatctttgtgactattactgtaatttcctaggaatatcagagaagcagaatttctgaagtgaaaatagctactgctaaaactgttttctagaatttttgacttaatatttagactcctgttagcatcataaaagagcaatattttctttatgttattttgcataccattttattagatgatggctaagatctattatcttttttttactttctacaaatattatagtggaaatcatatttcattagatttgcactttattagacacatatttttccatgtatacatatttcatcattaaattatatatcaaatattttcttttatcctattgagttctgatttgttttccttgattcttaamagcactttatacactgatgattaaggatttcatttaccatagtgttttgcttccaatttgataatagcatactctgaagaaaaggtttacattgttatcttgcagaactaattgatcattttatgattgatttatttatgtatttatgt

SEQ ID NO: 630606 - DNA, 633 bp, Homo sapiens
ccttcagaagcatttaattaattatatatttcaattatgtgtttgttaaaacttcttcaaccctatccctatagatgaatttatctgtcatatataaccaaacaggaatacccctgtacataaatctttgtgactattactgtaatttcctaggaatatcagagaagcagaatttctgaagtgaaaatagctactgctaaaactgttttctagaatttttgacttaatatttagactcctgttagcatcataaaagagcaatattttctttatgttattttgcataccattttattagatgatggctaagatctattatcttttttttactttctacaaatattatagtggaaatcatatttcattagatttgcactttattagacacatatttttccatgtatacatatttcatcattaaattatatatcaaatattttcttttatcctattgagttctgatttgttttccttgattcttaacagcactttatacactgatgattaaggatttcatttaccrtagtgttttgcttccaatttgataatagcatactctgaagaaaaggtttacattgttatcttgcagaactaattgatcattttatgattgatttatttatgtatttatgt

SEQ ID NO: 630607 - DNA, 594 bp, Homo sapiens
aattcatttgtaaaacttttgacttgagaagtagtagaatttgtgatgcatacataacttagccaagaaacagcagttccacagctggaagttgctttctgacattaaggttttgttgaatattgtgcaaatactatggatgaggcaaatgtgtggacactgatgatgagagtgacatattaaatcaggctgcaatattttagcccacttgatgtctttgtttcaatttaagtaactggacttaaatgtgctgtcagttgaggctacaaaaaatcacaaccacagcagatgagtgaatttaaatggacttttacaggtatttaatctgttaaatgaaaactcacctaacttagctaaaaatgtcattgggaaattttcttttgatatcttttctttgaagaaattgctgttagttgcacagtttcccatttactcctgcatgtgcctcagtaacctgtaattcctagggtcaaagctgtaggtctgcttttgaagaaaaattgccatagaaaaaaatcactcgsggacttcaataactaactcaccttgcagggattcctaggcaactttttcacgtgctgggtagcaaaataa

SEQ ID NO: 630608 - DNA, 605 bp, Homo sapiens
tcatatttagggacggaaatagaattctgaagttttattggtgtcagaaaattcaggaatattttgatgatagcaagtgattaaatactttaaaatatatttttatcatattgacattttattttatcttcttcataaatattgccataaagaattttagttctgcatattctaatccattattttgttaatattttatttataatatttatattttaatattataactattatatttataatattaatattttgttaatattatttacattggatggcaatgttatgatctctaaaatgaccttttatttaatggaaaagaatgctattagttccaaggactgaaagtggtggcaatgtcattctgacttaatggagtacagttttattaaataatgcaagttcagttgtcccagggtcattatattaggaaatatttaatgaaggtattaatatttactcctacccaacctccagctggaatttcatggtgtgagagcaccaggttaattgagttttatcacaaaatctctgggccackttagaaataactttaacacatgctccctaaggtctaacctacaaaaagtgagaaaatagaaaaa

SEQ ID NO: 630609 - DNA, 583 bp, Homo sapiens
ggaaaataaaaaatgtaatcatttcctttctgctcttcactttttcakttcctcagggtaaaatgaatatgacaattcggtattcatattctcattttgtgacccagtcaaagctggaaagggtaaactcagtattcagttatacccacaagagtggtacaggataataactaaactctagataataataacaaaaaataatatagaaaatgtattgagttcttactatcaggcaagcatagtttcaactgttttctgtatattactttatttgatctttacaacaatctatgagggaattcctgttgttatcctcaatctaaagtcaaggaagctaaatcacagagctattcctctcttgctcaaaggcacagagatattacgatgtggaatctagatttgaattcatgccatctgactttggaacctctattgcaaacagatttactgacagagctaatctcacccaaaaatttcattcagtaaaatgcgtggccaagatggaggaggaggatatatgcatcgtagccaagcgtggagcttttattcccaggaactgagcgatgatggcggtactgtaaga

SEQ ID NO: 630610 - DNA, 543 bp, Homo sapiens
ttgagatgacagtgaaatatccaaacagcacatccattaatctctagatattgcacacgaacagaatatgtagtagtgagatgaaacatgcatgtgagattgtgtctccttttttctccaatccttttttgatagttggaaatcctaacagacagaatctgtgctaaataagcaggtggtgtgaagtgtcagaggagtctgatttatttttcttaacagttagttaaaaatagaaagtgtatttgaaaaacatagatttttgttcagtgacctgtgtcacagaactgtcacaattacgctaattctgtagtcctttttggaggagcgtctgagaggatctgggggccatgggctacaagctaggttactttacctctctatatggtgacttcagagaatgatttcaaaataggatatatgttctaaaactggactgtgctgattgcacaactctgtacatttactaaaaataatggaatcatamactttgggtgaattttttgttacgttatacattcatgaagctgttaaagaataaaataa

SEQ ID NO: 630611 - DNA, 654 bp, Homo sapiens
tctaaaactggactgtgctgattgcacaactctgtacatttactaaaaataatggaatcataaactttgggtgaattttttgttacgttatacattcatgaagctgttaaagaataaaataaaataatgctatgtttttatttcttgctaaaaatggttatggattagttctgagtgaataccattgtaaatgacttgatttttaaaactgctgcctaataaaattccaatttatatgcaaaatatagtattaaatacacatgaatactgactctcttaaagtaatataattaataacagctttgtttactttatgttatactgtttttcttgtcatattcctaactatgtctggttcatataaaaatccaaattataagttaagaataaatagtgaaatattactatttattacacacacacacaraggtttgttttgtatcatgttgactacaacttggcaacagacacctgagaacatcactgtatataattttttctgtgttgcaaattttcaaaagaaaaaaacgttttctaatgatgtgggttatttgttttattgtaaattgtttaatcattgtctcatagttcttgaattcattaatagggaactgtactgggggctgtgatgaaagataagttaaaaatggttca

SEQ ID NO: 630612 - DNA, 518 bp, Homo sapiens
actctctttgtcgaaatttatatattccatttcctgttttctctcagactttaattcctcaataaacagttacctatggtttctcaaatagatgaggccatgttttgttttcagcctttgaacttgctatttttctaatcctgttatatgttccatcatgaagcactgaatattttataaaaatgtaatgttggtggtttttctcatatatatgtataatatatatgtgtatatattttatatgtatatacatataaaatagttatttaaaaagtaaaattcataaatcattttaccatattctgtaagatgtacttctatctataaacatagactcaaacacatttagtatatacmtttatttttatatatatctttaaaatattctattccttccatattaagagtttctgccatattagctaacgattaaggggcttatgtaaagaattttactttgcaaagatgtaagaattatatttgaaggtatttataagattataaaaataaaattaaat

SEQ ID NO: 630613 - DNA, 643 bp, Homo sapiens
tgtatatgtatgtatgtacatatatgtatttatttcacgtttactttattcattcatcagttgatgggcatttaggttatttcggtgtctttgctatggtgaatgatgctgcaatgaacacagtagtatagctatgtcttcagcatactgactttttctcttttgggtatatacacagaagattgctggattcttctgtatgtgaaagtccagtttgtttcagctacttgagatgtgaccccaagaatttaacaagaaaatggttatattaattcaggtatgaaatgatatgatattctgtatgtgaaagtccaggttcctctacaccatttactaaagagtttatcctttctccattctatattcttcatgcccttctcaaagattagtttgaccataaatgtatgagtttacctctgggatctctgttgtstgttcagtttttatgccagtaccatactcttttgattattatagctttgtgatacaccttcaaatcataaagctgtgatgcctccagctttgctcttttttctcaaaattgctttggctatttagaatattttatgtttccatacaaattttatgattttttctaataactgtaaaaaatccattgaaatttttatagggtttgcattaa

SEQ ID NO: 630614 - DNA, 524 bp, Homo sapiens
ggcactttgtttctcctatgccctggggctaacttagagagctaatttacggagaggatctaggagcaacatagtgttctcccttgtccaaaacagtagacactgtcaggaaaagacaccagcaaaaactgtgggcattttcccaaactcaggaccaagagcaggatgccatttttaatctgggcacatacaaagtcagtaattctttagtgacccagcagtgtggctgcacaggcattttagtcctgggccagagcttgggtcacctgctctaaagtagggtaaggacctccagtcagaattatgaaaaggcactggaattatgctgtccctcatcacaggcctagggtgggagaagagctactacagctgtggtttctycagggtaacaagacctgcagccagggccagctcggtgaactggaactcatctgggtatcattgctgggtgttccaactgactcccttgagatcgtggtgcagcagggccctctctactccatgctcaggaagatctccatgca

SEQ ID NO: 630615 - DNA, 516 bp, Homo sapiens
tggtaccaattctacccaattttttccaaaaaattcaagaggargggcttctccctaactcattctacaaaggcagcatcaccccaagttaccaaagcctgacaaaaacacaacaaaaaaagaaaattacatgccaatatccctgataaacatatatgcaaaaatcctcaacaaaacactagcaaaccaaatcctacagcttatcaaaaagttaattcttcatgatcaagtagacttcattcctaggatgcaaggtgggttcagcttacacaaatcagtaaatgttcaccacatgaacagaattaaaaacaaaaacgacatgatgatctcaaaagacaaggaagagcatttgataaaatccggccttgcttcatgataaaaactctcagaaacaaggcattgaatgaacatacatcaagataataaaagccatttatgacaaacctacagctaacaccatactgaacagccaaaaactagaagcattccccttgagaactgagataaaataaggat

SEQ ID NO: 630616 - DNA, 435 bp, Homo sapiens
tgtaatcagggtccccatgattgcttttaaatcatatgactggctgtttagtttgttttataagctttttaacaataggtttagatttcagaaaaatttaaaagatagtacatacaattcccatacaccccacacttggtttctagtattatcgataccttatattaaggtatatttgtaaaacttagtgaatctatattgatagattaatattcattaaagttcatactttattcaratttccctaattttctctaatgttacttttttttcaagatcccattttacattattcaacacatctccttaggatcctcttgtctgtgacagtttctcagccactcattgtttttgatgattttgaaagcttcttggagcactaatcacattttctgtagagtatcttgaaattttctgatgttttaataattaatt

SEQ ID NO: 630617 - DNA, 619 bp, Homo sapiens
tttctttctgtcatagtcacatatatctactgtatcaacaattttctctgaatttttcatcctttttacttaagtttacctatattaatttggaaagtgtagcagttttttacttgttagatatggaagataatggtgtgaataaatagaatataaaatattattacatgtcaaatactttttgacccaagaaactgagcctgagtccagtttctctattagaaagattaagaaacagttgtttaagtgggatataaagtatattcaattttttctaaaaataattgggattaaagaaaaatagtaaatatcactatgttacttactctaaagtccacctgaaaccatatatatatatacatatatacaccatcagcatcatgtgtttcactcactggggactaaatctcagtatgaaacacatactgagtatgagatttagtcactggggaacatttgcaggtctttagtagggatcataagacacaactrtatttcataagttaatcaggctaatctatagtactagaatttgatttgatatagaagattaaaaactcagaacattattttaatttctgtacccttcttacattttatatatttctttgtagtaagg

SEQ ID NO: 630618 - DNA, 598 bp, Homo sapiens
ccaaatcagacgaaggtctcccagatggtctaaggtaatgtgtggactcctgactgggaagattcatttgggtaaagggtttttgagatggtcttgtgtagctggtctttctttttggctctgatggcactgcactagctttttaaaggtacaggactgtctgatctatctttgtatttctggtatccaacacagcacctgatactcagcaggcatgctaaatgttggggaataaatagaatagaatacatggggtcaaactcattaaaaaatgcmaacattttccagccctttcctacgtggactgtatgttcatttaaccatatgtttatatgttatatatgagaaatgttatatcagtatgtgtacatggatatctaaatatgtatacatacagatacacaattacccaaacttatatctcatagtagctaatatgatacattgttatgtacagtgttgaactaaattagctatatagtcatcccacagtatatgctggagattgggtccaggacccctactgaggataccaaaatctataaatgctcaagtcccttacataaaatggtgtagtattttatctgggataggcata

SEQ ID NO: 630619 - DNA, 625 bp, Homo sapiens
tcaaatttaacctgtccagaagataatttargactctgcttctgcctgaaatggagtaccagggacagatttatcctgtggccctaaagaactaaacaactggacaaaacatatgaaacaatgttttcaaacactggacaataggcagcacaggactatgatcattgagaaaggaatacacatgaaagcagccctacaattgctccagctcactgcctggaggcagtttccagtctgcagcacagggacggcaaatgcaaacagagctggcattgttgctaaataagagacaaaaacgggttcacagaggccaaggtggctagaattttgagggcataatacaaagagtaggagctgtcttcttggccttgttagggtacagaaaacgataccccaaaatacgatgctttgaattaaagaaaactggctgggcgaagtgactcacacctgtaatcccagcactttgggaggctgaggcaggcggatcacttgaacacaggagtttgagaccagactgggcaacatggcaaaaacctgtctctactaaaaatacaaaaattagccaagcgtggtggcacatacctgtaatcccatctacttgggtggctgagacaggagaatcact

SEQ ID NO: 630620 - DNA, 429 bp, Homo sapiens
ttgaccatctgcaggatgtgctggtagaacctctggtcctcagagtagtcttcactttctgactgctcctcgtcagggctctgcatgtgggacatgtgaggatctaagaaggggctgaagtgttgatctctgagacccragtctgactgagccataccctcctcagatccccgtgagctctgcaggttccaagggaagttgttcacctcatccaggacaggagagcccaggtgtgaggccaggttgctgtgctgctgctgctgctgctgctgctgctgctctccaagtcaggcccagacaagctaggcttctgatctttataagggagctctgcagaccctagggcctgtctcttctcactggcaggaggctcctcgggggccctccctaaaaggggattctgagctggttctgatgccagggtttcag

SEQ ID NO: 630621 - DNA, 424 bp, Homo sapiens
tgtgctggtagaacctctggtcctcagagtagtcttcactttctgactgctcctcgtcagggctctgcatgtgggacatgtgaggatctaagaaggggctgaagtgttgatctctgagacccaagtctgactgagccataccctcctcagatccccgtgagctctgcaggttccaagggaagttgttcacctcatccaggacaggagagcccaggtgtgaggccaggttgctgtgctgctgctgctgctgctgctgctgctgctctccaagtcaggcccagacaagctaggcttctgatctttataagggagctctgcagaccctagggcctgtctcttctcactggcaggaggctcctcgggrgccctccctaaaaggggattctgagctggttctgatgccagggtttcaggtggtattagc

SEQ ID NO: 630622 - DNA, 433 bp, Homo sapiens
aatttacatttttagctgactccaatgagggtttgccgacctcgctttgagtatatctgcatggatgaccttgtactcgtcacttcygccctttcacttccactgtaactctatgtgggcagaaaacatgtcttcttgtctctttgtggatcagcccccaggcaccaccaattaattgcctagcacagagaaagtgctccccaaattttactttttcttgttcagaatacaatgccatccaagttctcatttggcacttacaacagccgcgccaggtaggaagaaagggcgtccttcttacagacagatggggagagagtccaagccaccagagagcagagactggctgatgcaggcttagttagaaatcatagtgcaagccacacagttgctttagttgtgggctccctggcactagcttcctggactggtg

SEQ ID NO: 630623 - DNA, 451 bp, Homo sapiens
ccagggaatttacatttttagctgactccaatgagggtttgccgacctcgctttgagtatatctgcatggatgaccttgtactcgtcacttccgccctttcacttccactgtaactctatgtgggcagaaaacatgtcttcttgtctctttgtggatcagcccccaggcaccaccaattaattgcctagcacagagaaagtgctccccaaattttactttttcttgttcagaatacaatgccatccaagttctcatttggcacttacaacagccgcgccaggtaggaagaaagggcgtccttcttacagacagatggggagagagtccaagccaccagagagcagagactggctgaygcaggcttagttagaaatcatagtgcaagccacacagttgctttagttgtgggctccctggcactagcttcctggactggtgttgaactttaag

SEQ ID NO: 630624 - DNA, 237 bp, Homo sapiens
agaacccaagcttagtggctccagagcccatgctcttaacactggtaggtggcaggaagtgaagaactgagaaagggtttatttgtttttgtttttcatttgtagtaggaaaggtgctagcaaaaaggtctagccmagaagatggataatcaggctgagccattgtttgacttttgccaagtattgctgtgaaaggacaagaaagtgaagggagcttgagaatgtaaacacacatgt

SEQ ID NO: 630625 - DNA, 605 bp, Homo sapiens
catagtgaaagcctgtctctactaaaaataccaaaaattagctgggtgtggtggtgtgcacctgtaatcccagctactcaggaggctgaggcaggagaatcgcatgaacccgggaggccgaggttcccgtgagccgagattgcgcccttgcactcccgcccgggtgaccgtgcgagactccattttaaaaaaaaaaaaaaaagattatttacttatttcatttaccattgattgtctgtccactcttcccttgagaatctaaacccaaagagggcaggaatatttgcttcattcatagatgcacwcaaagcacctccaagaatacctggtacacagtagatgctcagtggatattttttgaatgaatgaatgatggaatgtttttttgtattcttattctatagtttatattctattcttttcaaaacctaataaaccccctttgttttatctatccagttccaatatcttctatcagatcagtttgagtgcgcatatgacattgtacgcacacacaaccatgaatttttaactttctccctctgttccatattttccattgatcacttccatattgaccctggatactggcactttacctacac

SEQ ID NO: 630626 - DNA, 605 bp, Homo sapiens
catagtgaaagcctgtctctactaaaaataccaaaaattagctgggtgtggtggtgtgcacctgtaatcccagctactcaggaggctgaggcaggagaatcgcatgaacccgggaggccgaggttcccgtgagccgagattgcgcccttgcactcccgcccgggtgaccgtgcgagactccattttaaaaaaaaaaaaaaaagattatttacttatttcatttaccattgattgtctgtccactcttcccttgagaatctaaacccaaagagggcaggaatatttgcttcattcatagatgcactcaaagcacctccaagaatacctggtacacagtagatgctcagtggatattttttgaatgaatgaatgatggaatgtttttttgtattcttattctatagtttatattctattcttttcaaaacctaataaaccccctttgttttatctatccagttccaatatcttctatcagatcagtttgagtgcgcatatgacattgtacgyacacacaaccatgaatttttaactttctccctctgttccatattttccattgatcacttccatattgaccctggatactggcactttacctacac

SEQ ID NO: 630627 - DNA, 519 bp, Homo sapiens
aggaaattttcttgttcaagaaatgcttgttctctggatgccctctttgtccctagtccttggctgcaaggagggcctcccagggacagagacattctgaatggggaacattttagatataaatgggattttttttttcaaggaaaaggtgtaaggtagctctgtagagacttgaagataaataaacaggaagtgggtcctggcagacagagaccaggccagaatctggtctccagaaggtagtcttcaaggcttatcaaagtcaggactgtccagagggtggctgcattcagcagaggctgaatcacgggacaggcctgawttaggaggagcttctttttgaaatcgcgttatcatgtactggctgacttatctttcttggtcttccctttcatggttcttttttctcattctgccggtccccctctctctttcagcactaatgtttgtttgcattttcacatgtgttctcaacccagtggtattgtttgggtgtggatggagatgggaacatggtgg

SEQ ID NO: 630628 - DNA, 445 bp, Homo sapiens
aattttcttgttcaagaaatgcttgttctctggatgccctctttgtccctagtccttggctgcaaggagggcctcccagggacagagacattctgaatggggaacattttagatataaatgggattttttttttcaaggaaaaggtgtaaggtagctctgtagagacttgaagataaataaacaggaagtgggtcctggcagacagagaccaggccagaatctggtctccagaaggtagtcttcaaggcttatcaaagtcaggactgtccagagggtggctgcattcagcagaggctgaatcacgggacaggcctgatttaggaggagcttctttttgaaatcgcgttatcatgtactggctgacttatctttcttkgtcttccctttcatggttcttttttctcattctgccggtccccctctctctttcagcactaatgtttg

SEQ ID NO: 630629 - DNA, 573 bp, Homo sapiens
gactttactatcaggaataaacaattacatctgcggggagcagaagatctttgtttgtatttttgaaaggaaaggaggaaaattaacctactttagcactagtccattcttggaagattctattgtgtctccattttccaacgggcaattgtggaaacaggaaattgaaaaacttcaccacgttaagataaatatgatgatatactaaagctgtgagatatgtttgctgactttcagtctgctgaatttgggcttcktctccacaagtcaaggggtcacctctaataattcatccattcatttcaaccatcccttatgctcctccctctcaacccctcttcttaaacacatcctcactacaacaagtggaaacaaatgctagtcatgggcgaaaggagaggggctcattctgagctttgcagtcatttccctagaggcctgagaatggcagggatgattcatgataaatagctaatcctggctcttgcatctaattttcaaggtaggtacaaaggagcattagtttttgcatctagggatatggataatgacaactacaggctttcccgaggg

SEQ ID NO: 630630 - DNA, 573 bp, Homo sapiens
gactttactatcaggaataaacaattacatctgcggggagcagaagatctttgtttgtatttttgaaaggaaaggaggaaaattaacctactttagcactagtccattcttggaagattctattgtgtctccattttccaacgggcaattgtggaaacaggaaattgaaaaacttcaccacgttaagataaatatgatgatatactaaagctgtgagatatgtttgctgactttcagtctgctgaatttgggcttcgtctccacaagtcaaggggtcacctctaataattcatccattcatttcaaccaycccttatgctcctccctctcaacccctcttcttaaacacatcctcactacaacaagtggaaacaaatgctagtcatgggcgaaaggagaggggctcattctgagctttgcagtcatttccctagaggcctgagaatggcagggatgattcatgataaatagctaatcctggctcttgcatctaattttcaaggtaggtacaaaggagcattagtttttgcatctagggatatggataatgacaactacaggctttcccgaggg

SEQ ID NO: 630631 - DNA, 567 bp, Homo sapiens
cagttgtatataaaaggctaagtgccgtgaaataattcctgagtcatgctgctttagaaggggcagcaagagtgtaattgggtagaactgatmtttgctatccctgaaatcaatcaatattctttattagaaatgtggacctggatgaactgctgtgatgttattttgctgggattgtaacccatttacatttccacaccaaacatatacagacacaccataccagtttcatcagatcagttgactactgagacatggatttcaaacaaacacctaattagaggggttagtgttcaaactgagttaactttaaaccaatgcatcaaggctgcacagaatctgaactttccttggggaagcaggaactggatgagactaaaatcgttcactctaaggttctaaatgtttagttcaccaagtttgatttgtaaatgttcactgtttgctttgcaggccccgggacaggaatggtagtagggaggggacaaagcaccagtgaggagcaggtgaagtggtgggaaggcacccacacattttaagaagataaacatactctcaactgtttgt

SEQ ID NO: 630632 - DNA, 640 bp, Homo sapiens
ctgactcccaaacaagactctcttattgtggaaytgctgttctcaactatgcaatgcaagagatgcatggttatggcagggacaagaaagaaggtaaaaaacaaacaaaacaaaacaaacaaaaaacaacaaaaaaacacctcttttaagtcctatttcaaggctatctatcaaagattagataactcatctcttcaataaaagctcctcagtagttagaatggcattgcatctgctccatggtacatactacagtgcttaatgtatagtaaacattaatcgaactgaatgagtcgttgagcccatttattgtgcagtactggttttccttgtacctgaagtcagtgttcttgttcaggttagacagtatgtatatcacacatacagaaagtaatttatcaggtaactcggttcagagcccgctcactataaaaacagactaagagtcaaaatgagatactatttttaatagaacatatatgtggaaaatagtttatagagctcagtccctgactcacaggagatgaaaatgtgatcctttgctagctcagacaaaatcctccatgctacattaggcttgatagcaattttggcacttgcagcttttataaaaactgtgtatctgaaatcttaataatgc

SEQ ID NO: 630633 - DNA, 565 bp, Homo sapiens
ccaagagagccacattatgcgggggttccatcagcacagaygaacagaaaagcaatgtggaggccaaagcagaaacacagaaaaagaagcatgtaaatacaggaacccaacatatgaaaacagtagtccctcaaagcaatgggaatgacagacagtttagtagatgatactggaaaactggctcacaacgtgggaggaaacaaagctatagccctaccttttgttacattaagattattttttattatgtaagatagacttcatcttaattacctaaatggaaaaggcaaaattataaagctaaaaaagaaattattatttgttttctttgaaaatacatatataatttatatatatacatgtatgtgtatgtatgtgtttggccagacactattgtaagttatttacacaatttaactcattcagttttagtaaatccctatgaagaaggtaactttatttttatgtatgtatgtatgtatttatgtatttatttgagtcagagtcttactctgttgcccaggctgaagtgcagtggtgcaatcacagctcattgcaacctcaa

SEQ ID NO: 630634 - DNA, 565 bp, Homo sapiens
ccaagagagccacattatgcgggggttccatcagcacagatgaacagaaaagyaatgtggaggccaaagcagaaacacagaaaaagaagcatgtaaatacaggaacccaacatatgaaaacagtagtccctcaaagcaatgggaatgacagacagtttagtagatgatactggaaaactggctcacaacgtgggaggaaacaaagctatagccctaccttttgttacattaagattattttttattatgtaagatagacttcatcttaattacctaaatggaaaaggcaaaattataaagctaaaaaagaaattattatttgttttctttgaaaatacatatataatttatatatatacatgtatgtgtatgtatgtgtttggccagacactattgtaagttatttacacaatttaactcattcagttttagtaaatccctatgaagaaggtaactttatttttatgtatgtatgtatgtatttatgtatttatttgagtcagagtcttactctgttgcccaggctgaagtgcagtggtgcaatcacagctcattgcaacctcaa

SEQ ID NO: 630635 - DNA, 655 bp, Homo sapiens
tggtggtttggtggacacataacattgtctctgcacagggaacagctatttctatatgaaaagtctgtggatccaggaagatgatgcagaaggggggccatttgtctcagctcttcaagaatgcatagagtttaggctgggtgtggtggcttatgcttgtaatcccaaaattttgggaggccgaggtggrtggatcgtttgaggtcaggagtttgagaccagcctggcccacatggtgaaaccccatctctactaaaaacgcaaaaattagctgggcatggtgacacgtgtctgtaaccccagctactcgggaggctgaggcaggagaatcacttgagcctggaaggtggaggttgtggtgggccgagatctggccaccgcactccagtcgggtcaagagagtgagaccctgtctcaaaaaaaaaaaaaatgcgtagagtttagccatgtggggctaccgcagggcattcctggcagagagactaaaagctaggcatgcaactctgggtttttggaatccagtcaaggtgttggagtcgtcaagtggaagaggcatctgcagcagcctagcatgttcactgtggccttctggcctcttctcacctcccctttccaccatctacttggtgttgagttgcttatcagtttggtttct

SEQ ID NO: 630636 - DNA, 655 bp, Homo sapiens
tggtggtttggtggacacataacattgtctctgcacagggaacagctatttctatatgaaaagtctgtggatccaggaagatgatgcagaaggggggccatttgtctcagctcttcaagaatgcatagagtttaggctgggtgtggtggcttatgcttgtaatcccaaaattttgggaggccgaggtggatggatcgtttgaggtcaggagtttgagaccagcctggcccacatggtgaaaccccatctctactaaaaacgcaaaaattagctgggcatggtgacacgtgtctgtaaccccagctactcgggaggctgaggcaggagaatcacttgagcctggaaggtggaggttgtggtgggccgagatctggccaccgcactccagtcgggtcaagagagtgagaccctgtctcaaaaaaaaaaaaaatgcgtagagtttagccatgtggggctacygcagggcattcctggcagagagactaaaagctaggcatgcaactctgggtttttggaatccagtcaaggtgttggagtcgtcaagtggaagaggcatctgcagcagcctagcatgttcactgtggccttctggcctcttctcacctcccctttccaccatctacttggtgttgagttgcttatcagtttggtttct

SEQ ID NO: 630637 - DNA, 655 bp, Homo sapiens
tggtggtttggtggacacataacattgtctctgcacagggaacagctatttctatatgaaaagtctgtggatccaggaagatgatgcagaaggggggccatttgtctcagctcttcaagaatgcatagagtttaggctgggtgtggtggcttatgcttgtaatcccaaaattttgggaggccgaggtggatggatcgtttgaggtcaggagtttgagaccagcctggcccacatggtgaaaccccatctctactaaaaacgcaaaaattagctgggcatggtgacacgtgtctgtaaccccagctactcgggaggctgaggcaggagaatcacttgagcctggaaggtggaggttgtggtgggccgagatctggccaccgcactccagtcgggtcaagagagtgagaccctgtctcaaaaaaaaaaaaaatgcgtagagtttagccatgtggggctaccgcagggcattcctggcagagagactaaaagctaggcatgcaactctgggtttttggaatccagtcaaggtgttggagtcgtcaagtggaagaggcatctgcagcagcctagcatgktcactgtggccttctggcctcttctcacctcccctttccaccatctacttggtgttgagttgcttatcagtttggtttct

SEQ ID NO: 630638 - DNA, 610 bp, Homo sapiens
tattaatattaatagagaggcttcctttgtggcctcatgcagaatgcttaaagatcctagaaatgttgctgtaggaatggaagcagaagaagccgcaggcttcatggttgattgcttttctgatkggtgccataaaaaaaatgcattagcgagagaatgtttgatttaaagagcgcctagatgccgacaccacctctgtttgttttccttcctttagcagaaaccttgtaaaatttttatgaagtattaatggatctgagattttctccagcaaattttatgaggtgagcttaatcccacacatccgacccaatttagcagtctttagagacatagaacgtaaaaggcactcagaaagtatcctgggtgcctcagtaccaggggagtgatggggcaggggtagggtatttcctccctctcagtgctttggtagactctcaggggttgtgggagaacagagtgaagaggtaccccacccacagagaagaccgcacaggtaagccaaaacttcagatagtaaatcttaattcataacttagcactgacttcaagaacttccctatataactgtagtctttgatgagaaaatcgtgtttagggaaaacaagaa

SEQ ID NO: 630639 - DNA, 613 bp, Homo sapiens
taggcacttgacattcatggtctcttgatcctcacacaagtcctgccaggagggacaaagaccttaagcatatggatggaaaaccaagactcagaaagattaaagtcaggacaatagaattttacaaatgcaaaccttgtccaaagagatgcatcccataagtggcgaggggtaaagtgagcgtttgttctctcatctgtcttagacaacagtccaccacgtcatgatccccatacagtggagtcaagagctaaccccaattccctgcttagtcacactgtgccccctcttgccttgcttcatttggggcctgaacagaggactaggtgtatttccccaaattccttgttacagtataaggcttattctaaaatcgaagcracgcccacctaacattttcctttctactcctcatagcccttcccttctttgacctcccttatatcaactctaactccatccagggttattctcaccatctaccttttacctccattctcaagttgcagagatttctaggcaaaaaattcatcctcagttggcccctcactttgtcccccaggacaaaggcaagctttgtgttttagctgacctgagatgaaaatccagctct

SEQ ID NO: 630640 - DNA, 574 bp, Homo sapiens
tctttgtcacctcagagaagcttggtttctcttttggaatgtttggttttagtaaattacttccttttcactttaggttttaggctctttgacaagccatctgcttctcaaacccaatttcctgttaccagcaagggcagttcagatggagaacaaaagatttctttagttcctagaggttttgtgagagtgggaaggctacagggagagattgcatctgcttattgtaattcatttgtgatgtgtgcctgactggcagtaatttaccagggactctgctgggctgggtgaggagataaaattctggaatggagatctatcaacatgcattttggctatttcaatccttgccagtattagtcagggctctgaagagcttgttggggttgatgttgctacttcactctctctctctcttttttttttttgttttttkttttggaacctgcatccattgtccaagtttttaatttgtcctttatttttctgttcagttgcttttcctggttgctaatttgttcagtgagtggcttagtataatgcaattcagcagactgtgttgagtgaatattta

SEQ ID NO: 630641 - DNA, 544 bp, Homo sapiens
gtgaaacagcatgatatcatagaaagaacactggacttggtgtctgtagacccaggtttgagtttctggcatcccactatctatgggaccttgaacaaatcacttaacttctgtttttgttgttgttgttgtttgtttgtttgtttgtttgttttgtaaaatggtcattgttaactcttgcactctcttyataagctataaaagtgctatactgtgaaagctcttcttgacccttctaccaagaaaaatgacatcctctctctgtttcaagcactttgttctaatgcagcaccttgtattacagtcaatcttaaatacaactatttccccactaaaagatgagttcttttaagggcagagaattggcacatagtaaggtccgagtacttgtgtggtttaatgaatagttgggttctttaggcaggtgttctctgaaatttgttcttaaaaaaaaaaagagagagagagaaattttctattatttgtaagcatttgctgtagagataattttgttgtggttttgattagctaaaaagccattttc

SEQ ID NO: 630642 - DNA, 574 bp, Homo sapiens
tttatatcaggacattgaagtccagacaggggaagtgacatggccaatgccacatagtactctagtgccagagctgtctgtgggatagtgggactaacactgagctgagagccaaaatgcctaggttgacattaggcaagttatattacttccttgctccttactatcttcatctgtmaaatggggaaagtatttaacatagggccaactacaagcaaattggcttttttgtttagtcttctttccactacaccctgatgctttcctttcagggaaaactgaagattatggaggagaagctgatgtcaggaagaatgaacaatcaatatcagtgctgttttctttgttttctctgtaggatcctcagtcttccacaatgaaccctgtttacagccccgtgcagcctggggctccttatggcaaccctaagaacatggcctacacgggtgagtagtgtgagaatggctctcattttgagaaatggtggttaaggatattaccaaataacttgctcctcctcctaacgtatacctccaaaagtcttgggaaagtttgggaacatgcagaagatatg

SEQ ID NO: 630643 - DNA, 574 bp, Homo sapiens
tttatatcaggacattgaagtccagacaggggaagtgacatggccaatgccacatagtactctagtgccagagctgtctgtgggatagtgggactaacactgagctgagagccaaaatgcctaggttgacattaggcaagttatattacttccttgctccttactatcttcatctgtcaaatggggaaagtatttaacatagggccaactacaagcaaattggcttttttgtttagtcttctttccactacaccctgatgctttcctttcagggaaaactgaagattatggaggagaagctgatgtcaggaagaatgaacaatcaatatcagtgctgttttctttgttttctctgtaggatcctcagtcttccacaatgaaccctgtttacagccccgtgcagcctggggctccttatggcaaccctaagaacatggcctacacgggtgagtagtgtgagaatggctctyattttgagaaatggtggttaaggatattaccaaataacttgctcctcctcctaacgtatacctccaaaagtcttgggaaagtttgggaacatgcagaagatatg

SEQ ID NO: 630644 - DNA, 570 bp, Homo sapiens
ttatatcaggacattgaagtccagacaggggaagtgacatggccaatgccacatagtactctagtgccagagctgtctgtgggatagtgggactaacactgagctgagagccaaaatgcctaggttgacattaggcaagttatattacttccttgctccttactatcttcatctgtcaaatggggaaagtatttaacatagggccaactacaagcaaattggcttttttgtttagtcttctttccactacaccctgatgctttcctttcagggaaaactgaagattatggaggagaagctgatgtcaggaagaatgaacaatcaatatcagtgctgttttctttgttttctctgtaggatcctcagtcttccacaatgaaccctgtttacagccccgtgcagcctggggctccttatggcaaccctaagaacatggcctacacgggtgagtagtgtgagaatggctctcattttgagaaatggtggttaaggatattaccaaataacttgctcctcctcytaacgtatacctccaaaagtcttgggaaagtttgggaacatgcagaagat

SEQ ID NO: 630645 - DNA, 557 bp, Homo sapiens
tgctacaaatacagtaacaaaagatacaactctcacggttagaaggctaggaaatttatctgttcaaagactaccatctttttttttttttttaaaccagtgtttgttttccccccacccccagattgctgtttttgcttaaaactttgtaaggatcacctgttggaggtttttgattaactgacaattgtactttgtttattctttgcaaagaacttttgtgggawttttcccttcgtaagggttttttttttttttaataacaattctggaagatagtttttattttccagatgaaattaagcttctctaaggtcacactgtatagcagaggccaaactaaccccagttacaaagtaggtgcttttagggctctagcatacatggctatgtcttggacggtacagtgattaggatctcagatgagcctggaaaatggattttaatttctgaaactgttctcacaactccccctttgatgttcaaactgatctcctctcctcaggagagaactccaaggtcacttaattactttttcacctatggttgaagaagag

SEQ ID NO: 630646 - DNA, 621 bp, Homo sapiens
tggacatggtctctggttttgattttgttttccatgtagcttcagtccagggagataatttgtggatttcccaagcacaaacttcctaatctcaagtaagttccatttctcaagcttctcttcatctccgctgctatcacmctcgtccacaccacttgtctgccatcacctaggtggctgcagcagcctgctgacgggtgaccctgcttagtaggatttggacctgggacttcttgtttatctttttctttttctttcttttctttttttttttttttttggtaagggctttttgttttaccactgcagctgtgtaggaaaaaaaaagctgattttattcatttatttacccctttattcagtgaacagaatgtcccttttttggttgaaaagatattctaagaaaaaaaatacacagtgatataatctctctacatgctagaaactattcttcatctttcccctttcaaactgcccccctccctgatctctcagctatggtccatctttaatatctcactggaaaataatctttttcttcatattcaatatttctttctgccgttgggagctctaactagaggccacagtctgtgtaaatgattctatatcaaataaagc

SEQ ID NO: 630647 - DNA, 502 bp, Homo sapiens
ctggagatagggttgtataaacccctgaccaaagatgtttggagagcattcaggttggtgaacacatagagtactgggagggtggtgcacccagggakggcatggaaattgtgcagcccctcacacccatagctcaccccatgcatccctttcatttggctactgctgagttgtatcctttatcataaaccagtacttgtaagtaaagtgttacactaagttatgtgagccctctagcaaatatggaaactgaagaggggtttgtggaaacttctgatttatatctggctggtcagcaatacaggtggcctgggacttgtgactagtgtccaaagtggggacaggcttgtggaatggagctgtttaatttgtggaattggttacttcagggagacagtctcagaattgaattgaatattgaacacctagttggtgtttgagaattggagagttgagtggtatcagcgaaaacagcccagaaacactgatacaaggtaaagag

SEQ ID NO: 630648 - DNA, 529 bp, Homo sapiens
tatgtaacttgatccacagtcactcaagtaaagtaataaactttatggctgctacagaaagcaaaatttccttcttttcatcctaaatttaygatttttaattttcaaagatgtccccccaccctactttgggaatactatgcttgagtagtaagtcagacttcccatataaataccagccttgtatgtaaaaatccttaacttataaaaaataatttttcaccatcatgaacagaaactgtttcatgaaggagccatccattcatgaatgaatgattgaatgaacataatttcagttacataaatgaagaatagaatcatcaatatacctaccttctgatttctgtatggctgcaaaatgtttattccaagcacaggcagcacagcaaattggggcaaaatttgattctttagaattccaatttcagccagacacagtggctcatgcctgtaatcccacactttgggaggccaaggcaggaggatcacttaaggccagaagttcaagaccagcctggacaacatacta

SEQ ID NO: 630649 - DNA, 608 bp, Homo sapiens
tgcagcctgactatgtgatagaaaagaaaacctcatttactgagtagaaattcaagctggctacagaaatttacataagtaatgaggacccaaatgttaaccaccaaggcattggggaaaatgtctccaggccatttttccctaagagggaaaaatcctttcatggaccaggcccagggtccccctgcagcctcaggacttggtgccctgtgtaccatctgcttcagctccagccatggctaaaaggggccaacattcagctcagcccattgcttcagagaatacaagccccaagccttggcagcttacacattgtgttgagcctgcgggtacacataagtcaaaaactgaggtttgggaacctccacctagatttcagaggatgtatggaaacatttggttgcccagacagaagtttgatgcasggatggagccctcatggagaacctctgctagggcagtgaagaaaggaaattgtggggtcaaagcccccacacagagtccctcctggggcactgtctagtgaagctgtgagaagagggccaccatcctccagactccagaatagtagatacaccaacagcatgcaacatgtgcctggaaaggat

SEQ ID NO: 630650 - DNA, 569 bp, Homo sapiens
ctgtaatcccagcactttgggaggccaaggtgggcagatcacctgaggtcgggagttcgagaacaacctggccaacacggcaaaaccccatctctactaaaaatacmaaagttacccgggcatggtggcctgtgcctctaatcccagctacttgggaggctgagataggagaattgcttgaatctgggaggtggaggttgcagtgagccaagattgtgccactgcactccagcctgggcaacagagattctgtctcaaagaaaaaaaaaagaaaaaaaagaaaaaaaagaaaaaattctgcacaccgtatgataacatggataaaccttgaagtgattaagtgaaattaaccagtcacagaaggacaaatactgtgtgattcaatttatatgatgaatctacaatagtccaacttatagaagtagataccagcatgagggttgccagggccttgagggtgggagaaataaggagttgctgttcatggctatagagtttcaggcatgttaaatgaaaaaaattctagaaatctgctgaacaacaacatacatgtagttaacaatattgta

SEQ ID NO: 630651 - DNA, 625 bp, Homo sapiens
ctattactgttattttcaagacagattagttaaaatacctgttatccacatccaagactaagttatcagccttggcagcttccagaagggctgtctgacctcctggattgtgatctgggtggttgccacatactctgacatgaaggctccctgcctgactcttggattcatgggtcagtaccttataaggtcagaggccatggtgtcccattattagaagtaaaaagaaatgtgtggacaaagaatgataaggcttatttggcatctggaaatagaataatattttgtggtactggatctgcttttgtgccatatctgcctgtctcttctgctgttccttcttcttccccgtagtcattcctgtcttaacttagatgggatgataataatgacaatgacagtgtcaacaacaacagcaacaacaacacaatcagtaacaagtagcatatctgtcagccatcaggtactaaatatattacatagaatagtaaatgtaattmtcagaataatttttcaaggtgggtatcatgtccactttgtagaataagaagcaaacttggagagctgaagtaacttagtcaaatttacatagtcaggtacagagttgggttcaacacccccaccc

SEQ ID NO: 630652 - DNA, 545 bp, Homo sapiens
tttgtaggaaatccctacaaaaaagattctcagggtgtgctctctggaccagcagcaccagtaccacctgcaaacttgtcagaaatgcatagtctcagtctgggactaagacttagtgaatccagatctttgagagtagggtccagccatttttatgcttaataagccttccagatgattttgatgtactctagagtctgagaaccatgaattagacccaacttcttctaagttcctattaggagccagaggtgatatcaggtcctgaggttcagagagatcaaaagagaacactgggactaatataaaaatagatcttgctcccaggaatcttgcaggaaggagccagaggtacmagaaaggataagggaaacataaagtaaatgagtgctgaacagaaggtaatgcgcctgcttcagaagaaaaaagctgctctggccggaggaccattcagagaagttcttctcaaggacatggtggttgattttaagttagatccaccctaagcagagttgccaaaggtgaaggtccatgtggcagagact

SEQ ID NO: 630653 - DNA, 577 bp, Homo sapiens
ccatttgatacagtgctgagttcaggtcctggatatctttgttaagtttttgccttgataatctgcctaatactgtcagtggggtgtcaaagtctccaactaatactgtgtgggagtcagcatctcttattaggtctctaagaacttgctttattagtctaggtgcttctstgttgggtgcacatatatttaggatagttacatcttcttgttgaattgagcaggttgctccttgccagcataacatactcatttttctgagtcactgggggctaagaatgagtcctactgtgaggtagccccatgaaggactcccagcttccttccccttcagcccggcttctgtgtcttcccttcgtctactcccagtgccttctcttggaatatctgttaggaacacaccagttgtccttgtccctccatagcagctgttctacctggctgtgtctggtcagctatcttgctgagctacatccctgttctattctctaagtctataaaatcaactttgttagataacacaaatgtgtgagatcattaagtatttgttcttccatgcttggcttacttcacttaa

SEQ ID NO: 630654 - DNA, 553 bp, Homo sapiens
atagacacttaggttcattccatactttggctcttgtgaatagtgctacaaaacatgggattgtagatatctttcacatactgattttatttcctttgaattgattgtttgactatatggtagttctatttttgttttttttgagaaagatccatactgttgtccatgatggctgtacttatttacattctcaacaatagtgtacaaattccctgttctccacatccacacaagcatttcttgttttttattcttttgataaaatccaatctaattggcgtgagctaatatcatcctrgttttgatttacacttctctgatgattagtaatgttgaacatttttccatatacctgttggtcatttgtataccttcatttgaaaaatgtgtgttcagatattttgcccatttttaatcagattttttaactatgttgaattgtttgagttctttgtgtattctacatataagcctcttgtaagtttgtagctattttcttccattctataggttgtatcttcactctgttgattgtttcctttcttttgcataa

SEQ ID NO: 630655 - DNA, 595 bp, Homo sapiens
cgttttacttgcccttacttatgtgatgttagctttggatgtggtatatggtattaattgtgttgaggtacattcctaccatacctaatttgttgagagtttttagcataaagggatgttgaatttctgtgtataataaaataatcataagttttttmttcttgattgtattaatataatgtatgatgcacattgatttgcatatgttcaatcactctttcatcactagaataaaccccacttgatcatggtggatgatctttttaatgtgctactacaaaatttggtttgtgaatattttgttgagaatttttgcatctgtcttcatcaggaatattgacctgtggttttctgttcttgtttgtttccttttcattgtgttcttctttgcttttggtatccgggtgtattattacgttctcatagtgctatgaagaaataccggagactaggtaatttataaagaaaaagaggtttaatggactcacagtttcacatggctggggagacctcacaatcatggcggagggtgaaggaggaacaaaatcagttcttacatggtggcaggccagagagcatgtgcaggaaaactgcc

SEQ ID NO: 630656 - DNA, 481 bp, Homo sapiens
ggacatatgcacatcttgtgcaacagttgcttcttccaattttatggggtagcttttataaggaaagacttttttctgtagatgaatctatagtgtcagttgatcagagaactttggctwtgtttctgggtgggtatcagagtcttcatatgatttcttaagctgtaattaatctcaatggtatgtatgagttcctcagtgactctggctgccattacttgtgaaggctgtattgatgcttttctgggaagtaggttgccaggaaggccaggtcttaggcccctgagtgccatgtatgggcaccagctgcagcagacccttgtgagaatgttctttgaatcccatggaagtgtgtgagattactggtggtgacagccttggcaggctggtcctcaggcctccagatgacatacacaggcattagcaatggcagcagcagtctcgggctggctggtctccttgcatccctgggcagtgtgta

SEQ ID NO: 630657 - DNA, 536 bp, Homo sapiens
tttgccacatagtcagcctccaaatttttcaaacttttacactctgcttcccttttaaatgtaagttccagccttaagtcattttttttgctcccacatctattgtaggaagcagccaggccacatcttgaacactttgctgctcagaaatttcttkggccacataccctaaattattactcttaatttcacacttccatagatccctagggcatgcacagaaagcaaccaagttcttggctaaggcatagcgtgcgtgatctttgcttcagttcttaataagttcctcatttccttctgaaacatcaacagcctagacttcactgtccatattactatcagaattttgatcaaaaccatttaaccagtctctaagaaatttcaaactttcctgcatcatcctgtcttcttctgagccctccaaacttttctaacctctgcccgttacccagttccaaagtcacttccacattttcaggtatctttatagccatgcaagaatggcctaatacacttgattaagtgtctaagcttgt

SEQ ID NO: 630658 - DNA, 623 bp, Homo sapiens
ttctgaaataccatagctggggtttagccaaacatcttaaaatgtgctatttcctagtaggtcacagctgaatttcaggagtacatggtctttgatctttcctgttaggttaggatatgatcatattactcagagcatcttttcatcttgtctcattccctgggaccctgtcaggttttgttgttccatttctctctacatgtacctacttyagagaactgcgttccaaatttggcttctcctaagaatacctgcccatttatttaatgatagcaaacaaatccctgatatgtcttctctggacttaatgcctctcactgcttgactctctccttcccattgaattctatttacggactctggcccttataagaatctttcatgaactttctgaaaatgagtttgccgtcaattcatctataagcacttatattcaaatagaaaaactgtctttggacctcttcatttacatggaagaaaatgcattctcaagaaaataatttacataatattttatttgaaatgatcatttgctgaacttttccaaaggcaaagaaaaagctggcttgcagccctcttatgactcaaaacctttgaaaacagaaactaaggactagttacca

SEQ ID NO: 630659 - DNA, 573 bp, Homo sapiens
ttttttgttgcaggtatacggagggagaaaatgtgatggaacaaaccttcactgaatttgcatacaaagctacaaatgactgctttaaatttttttttccaacagcaactcttacatgaaccaactgacattcaaggtaacttacttggtaaccatctcttgttcatcaagactcaggatggagggagggcaagatggccaactagatgtagccaggtggaacagttctcactgagggagtgagataactggcatgctcctaaaagatcttgagaggaaaggcaccgagagtggatgaaggagaggcacagaagctgggctgaagaggaaatcagggaaccctgcrtggggctactgcacactcggactcatacccagcaccccatggctttgggggaatgggtgagttgaactggcaagtagcagtcagctctagctacagacctctggaactctggcagaaggagacaccttaaccatcatgagcaatggagttgagaaggagagctactcagagaagtggtagggggcagcgagcccgctgatgtggagcccacagggtttggttcagga

SEQ ID NO: 630660 - DNA, 467 bp, Homo sapiens
gttaccactagacctgcctaacaagacctcctgaaggaagcactaaatatggaaggaaaagactgttaccagccaccacaaaaacacactgaagcacacagaccagtgacactataaagcaaccacataaacaagttggcaaaataaccagctaacatcatgaagacaggatgaaatccatgcaaccttgcatgtaaatgggctaaatgccccaattaaaagaaacagagtggcaagcaggagaaaaaactagcacccattggtatgctgtcttccagagacctgtttcacatgtaatgacacctataggctcaaaataaagaggyggagaaaaatctacccagaaaatgggagacagaaaaaatgaggggttgaaatcctagtttctgaagcaaaacagactttaaacaacaaagatcaaaatagacaaagaagggctttacgtagtggtaaagggttcaactcaa

SEQ ID NO: 630661 - DNA, 521 bp, Homo sapiens
caagctcactctactgttgtgcagagaacagattgtaaaggaacaagtgtggaagtaaggggaagagtaaggaggccactgtagtttttccaatgagagagggtgctggcttagagtagaggtggagaatagtgaacagatgtgaaatgcattttcamgatagagtcaaaggacaagtatgtgagttccatgagggtaagaatttttatttgttttattaatatctgtatcattaatgcctaggacaatagcacatagtaggtgctcaatatttactaggtgatggaatggattaattggaagtggagtaaagaaaaactgtatgatcaagaacaacttgggttttggttttatcagcaagagggatgattatggcatttactaagaatttgggaaacactgggggcatgggcaagagttgttagtgataatgtaatgtctgagatgcatcttagacattccaggggagatatcaagtaggtctccagtgtgagagtctttgcctctttattctcattcaa

SEQ ID NO: 630662 - DNA, 604 bp, Homo sapiens
ccccaaaacaaaaaacaaaacccacattgatggaagcatgtcaacagatacaggagctaactaaaggagctcctcacagccaaaactggaacaaaattagcaaaattaagtagtattgaattataacccacagatatatatccacgaatctatactgatataaaaaatgattgaataaataaatgggagaagagacaaatctgctgtgtagtagaattccaaataatttatgtagctacttcaccttcaagaaggtggagcataactccactccttaagtgtaggctgcacatagtgacttccttccaaagagtacagtatgaaaactggagttggtrgggagagtaactatacaatgtgtgatggttaatattcggtgtcagcttgattgaggggaggctagatggctggtaaagtattatctcgggtatgcttgggagagtgtttccaggggagactgacattttagtcagtggactgggaaaggaagacccatcctcaatgagggtgggcaccatccaatcagctgcaagcacagctagaataaagcaggtggaaaaaggtgggataagtttgcttcctgaggcttctggctctctttctt

SEQ ID NO: 630663 - DNA, 635 bp, Homo sapiens
tgctgcctggctccaccaccgttccctggaatccactctggccatattcagcagcaacttctaaattatccartccagtgggtaaggtccatctgtatcctacctgacccttcagctgcctttgaccaaagtactcaatccccctggccttcttgaaagtcatgtcttcttgattctcaggactttcctcctgcgtctcaactagttccttgttggtccctttgataggttccatttccgccttctgccctttaagtgctttctggggctctgttcttggttggacctcttctcttcttacggtacacactctctctctgggcaatctcacccccaacatggctttagtgatcatctatatgtgggtactcttaaatctctatacagtcccgacctgtagaattacatatctacatacttccaatggtattgcacttgaatttctcacaggcaccttacacttacctgttttagctcctcattcaatctgcttttctatgctggctaatggcaccccttccctccagtcaccctgcctggagctatcctggacccctcttcctctgccacctcatgcaaatactttaacatggtcattcgaggctcttcatcatctgacatgggttacaacagaa

SEQ ID NO: 630664 - DNA, 596 bp, Homo sapiens
tgaggctgaggcaggagaatcgcttgaacctgggaggcagaggttgtggtgagccgagatcgcaccattgcactccagcctgggcaacaagagtgaaactccatctcaaaaaaaaaaaaaaaagaaagaaacatctggaggaggaaagaggatttcccagtgaggaggagctgatgatgggctctgagatgctggcaggatgtcagcgaggagttgtccatcagccaattgacccacagtgcaggaaagagatgtgggctgcagataagaatcctggactcactttcctagaagtgtggaagtagatgagttctctaaggaaaataaagagagaaaaaggaaaagcttgtggagagtctctctgactcacctacagtcaaggaagtgacagggaatggagctagtaaagacacagggatgcagaagcygggtagaaagaggatggaagggagctgcacctctgaggggcaatgtcaaattcgaagttgcccgcttcatattaattaactcataattactgcgttcttactctatgctggaaaatgctggtcctgggaattgaaagattgaatatacaaatgagcaatgaccaggca

SEQ ID NO: 630665 - DNA, 591 bp, Homo sapiens
tgttccccctttgttttctgccttgactggaagtttcctgaagcctccccagaagtagatgctgcaatgcttcctgtacagcctgcagaactgtgacccagttaaacctattatatatatattttatatataagccagtctcaggtatttctttatagcaatgcaagaacggactaatacaactgcctacagcttgcccctgctcacagcctttgatctgagcagatctgaagcctcctcttttatttactctaaaactttcccactcccctgcttgccttgagtctctggcaaaatgtaagtgatggtggctgactctcttgcaagctctgcttgttctcatatgggtggtctccatttatttccacaagatagaatagcaaagaagacaaacatcattcctgcccacaaggagcttatactatgataagaaatacattaaaaaatataagcagatggttaaaattaaaggaactacaaataagatgattcttaggaaagaagcatrcaaggacccagagagagttgaagaagtggataatttagataaggtggatatattaaaggaataggaaaccatcagtgaacaag

SEQ ID NO: 630666 - DNA, 511 bp, Homo sapiens
taatagataatttgctaatagtttgtctttgcagttaacatgaactagtatacaaatttttaactgtaacatataaccgcatatatatccagatgttttggaataaacaataattgctcacttccctcctggaagcaacatgttagtatttaataggtagaatgagctcttgctgccatttttcttggcagcctgagttgagtcctctcaagctgttttaaaccacagcttaaatacagggaacatggcagcagcagccaaagctaaaaatgaaagrtgtaagtcacaggctacaacgtagataaaccttcaggtacttacgctatgtgaaataagccagtcacaaaaaggcaaatactatatgattctacttctatgaagtacctagagtagttgaattcatagaaagagaaagtggaatggtagttaccaggggatgaagaaggggaaacagagacttgttatttcagggatatagattttcagttttgcaaaatgaaaaagtgctgaa

SEQ ID NO: 630667 - DNA, 612 bp, Homo sapiens
caatagccaagaggtgcaaggaacccaaatgtccactactgaatgcatagatgaagaaaatgtggtatatatayacaatggaatattatccagcctaaaaaatgaaggaaattctatcacatactacacatgagtgaatatctagggcatgctaggagaaagaagccagtcacaaaataacaaacactatatgatttcacttatatgaagtatagtagacaaaatcagacgagagagtgacaccagcaagatggcagagtagaagttccttcagcatcattctcctaccaaagtacaactaaaaactactcaaagagaagaatactaccctaaattcaccatatattggggaggggagtggaaaagccacctggacccacagaatcaagaaatgcttcaactagtaaggggaacagtcattttagactggactaacccctacctcaagctggcacaacgccactcacgaaaaattttcctaaacccaaggtttctgaggtggtaggagaaaactggaggtggacgttaatatccccaccagtctgggaatcttcttgggaagccaactccagttccatctcacagaaaacactgagagtaccaagaaggctg

SEQ ID NO: 630668 - DNA, 617 bp, Homo sapiens
gtgtctgatatagaaaaaagcagtcctagcactgtcctgggaagaaacaaagacagtgctgtgagaaacacatattcacccatccaaacccaaagaatggactccgagacatgaagagtagccgaagtgagacttttgatgggggtcttgcaagatcgggtgtctggtagacaggtacaccctgggcagttacagcaggtaatttacctcctagcatgcaaatccctcccccagttcctcattggtcaagtactatggggttacaatcttcctggacgtcgcctaagtttaatcatcccccttataaggttataccctggtccccttcctgcttaagctttgatttcccaataacgaaactttcttcccttttatgggctgacccctcctctacattctgtttacatatcgtgaccttctagatgcatgcatgctgtttgttacatctgcaggctggctgccagtacttagatttatcatgccttgaaaatkgaccatttaaaatgttttctcacagggccttgtggctctgcttttcagaaagactggaggacactcatagtcacaggaagactaggatattcatgggtagcaggcctgaatttctggcagaaccc

SEQ ID NO: 630669 - DNA, 398 bp, Homo sapiens
gtttttatttgttcacatgaatgtttcttcctgacctttggccttctgccactgtrgtccctataattggctatggcagctattagagtctgccgtgagaactgctgtggtgagcttctcagcccctgtgggacaaatggtgagaagggccttcctgaaatatattgttctgcaattatactgagagaaaaattttcctagatgttccattttgaatttggaactcattttctttttcttatacaaaggttcactattatgttcctataaaactataaaatagtagttgagttagattgtgggttcttttggagacttgcctaatcatacctcatagtttaatctttatttgtagatcagcttttatgtacaagttacacttaagttgagcacgtctg

SEQ ID NO: 630670 - DNA, 507 bp, Homo sapiens
gaatatgttgtttttgccagctcaagagcctcaaggtagtgctaaaaactaattactagagttggaaaatggaaaagaaaattagttttataaaggatcatgrcacctacataattaagccattactgtgtatggataccccatcaccaggtctcaagttagctgtctaacactagtaacagctctgagagaccaaagttttccctaagagctatagcaagtatgccaaaagcagctgaaaacaacatcaaagaaatgtacactaaaattaaaattgccttaaacattcaatgttaacaactatttgaaaaaatagttggattagtttccattctgtaaaaggcaaagagatataactaagaataaaagtagtaacaacatcatttcctaccttccaatattggcattcaaaagccacatttcagaaaatattttataatctgatacaaagaaagccccaaggggaagaaggaattctgaattaataaacaaagacatatgttaaac

SEQ ID NO: 630671 - DNA, 507 bp, Homo sapiens
gaatatgttgtttttgccagctcaagagcctcaaggtagtgctaaaaactaattactagagttggaaaatggaaaagaaaattagttttataaaggatcatggcacctacataattaagccattactgtgtatggataccccatcaccaggtctcargttagctgtctaacactagtaacagctctgagagaccaaagttttccctaagagctatagcaagtatgccaaaagcagctgaaaacaacatcaaagaaatgtacactaaaattaaaattgccttaaacattcaatgttaacaactatttgaaaaaatagttggattagtttccattctgtaaaaggcaaagagatataactaagaataaaagtagtaacaacatcatttcctaccttccaatattggcattcaaaagccacatttcagaaaatattttataatctgatacaaagaaagccccaaggggaagaaggaattctgaattaataaacaaagacatatgttaaac

SEQ ID NO: 630672 - DNA, 353 bp, Homo sapiens
attagttattaagctaatcagggagggaccagagaaaggcaaagcccaatgcaagaaaatctgaaamatgatacaagacgtgaaggaaaaaatattcaaggaaatagatagcttaaagaaaacacaattaaaaattcaggaaactttggacacacttttagaaatgcaaaatgctgtggaaagtctcaacaacaaaattgaacaagtagaaaaaagaaatccagagcttgaagacaaggtcttcaaattaacccaatccaactaagacaaagacaaaaaactaagaaaatatgaacaaaggctccaagaagtctgggattatgttaatcaaccaaacctaagaataatcggta

SEQ ID NO: 630673 - DNA, 523 bp, Homo sapiens
atagataaaattaaggacaactagtatctttataatatagagtcatcccatcccaaaacactatttatttatgctcttcagtatttttctctgtgcagttattatgcatatgccattgaggttatttttatttttttatattataaattgaattttaaaaatgttttctgacttggtgttggtgctggtcggccmattctttaaacttttattatcctaattttaaaaattttgggttatgtggaaaggtagttatatgcaaataattattttgtttttttcctctctgttaatacttaaactttcttttcttcttgaaatagttataattttagaactttgataacaggattggaagctggtattgcctttttgtctaaagaccaaataatgacttttgcatttaagattaagagtatcatgtttaagtatccttatattcaaagttgagtaaaaggtacttttttgtttttttttaattttatttttttattttttatgttgtatatgtttaaggtatgta

SEQ ID NO: 630674 - DNA, 523 bp, Homo sapiens
atagataaaattaaggacaactagtatctttataatatagagtcatcccatcccaaaacactatttatttatgctcttcagtatttttctctgtgcagttattatgcatatgccattgaggttatttttatttttttatattataaattgaattttaaaaatgttttctgacttggtgttggtgctggtcggcccattctttaaacttttattatcctaattttaaaaattttgggttatgtggaaaggtagttatatgcaaataattattttgtttttttcctctctgttaatacttaaactttcttttcttcttgaaatagttataattttagaactttgataacaggattggaagctggtattgcctttttgtctaaagacmaaataatgacttttgcatttaagattaagagtatcatgtttaagtatccttatattcaaagttgagtaaaaggtacttttttgtttttttttaattttatttttttattttttatgttgtatatgtttaaggtatgta

SEQ ID NO: 630675 - DNA, 499 bp, Homo sapiens
ggttactttaaacaatcaaatactactgcaaatgttatatatgcattataagattttctraaatgctcaaaaaaatgcaatgctcatcacaaaatcagaagtaagttcagggacaacatataatcttcagatcaaacaggactttcctcaactaagaaaattggagtgtaatattaaacgctaaatgattttgatgttttaaatattatttcttaaaaactaacatttcttattccgattaatgtaaaaagaagtttaaactatcaaagcacaagtacccagatgtctatttaatgcacataaagactttttgtacataaaaagaacgcatgggatgatttatactggcttttaaactttatatataataataattgagaaaaactgtttatttggcatcatgatgtcagagacagtgaaaacaaacaaacaaaaaaaatcagatctctgaacaatttaacttgtggaaatttcttcttccttaaatatagttataacg

SEQ ID NO: 630676 - DNA, 499 bp, Homo sapiens
ggttactttaaacaatcaaatactactgcaaatgttatatatgcattataagattttctaaaatgctcaaaaaaatgcaatgctcatcacaaaatcagaagtaagttcagggacaacatataatcttcagatcaaacaggactttcctcaactaagaaaattggagtgtaataytaaacgctaaatgattttgatgttttaaatattatttcttaaaaactaacatttcttattccgattaatgtaaaaagaagtttaaactatcaaagcacaagtacccagatgtctatttaatgcacataaagactttttgtacataaaaagaacgcatgggatgatttatactggcttttaaactttatatataataataattgagaaaaactgtttatttggcatcatgatgtcagagacagtgaaaacaaacaaacaaaaaaaatcagatctctgaacaatttaacttgtggaaatttcttcttccttaaatatagttataacg

SEQ ID NO: 630677 - DNA, 499 bp, Homo sapiens
ggttactttaaacaatcaaatactactgcaaatgttatatatgcattataagattttctaaaatgctcaaaaaaatgcaatgctcatcacaaaatcagaagtaagttcagggacaacatataatcttcagatcaaacaggactttcctcaactaagaaaattggagtgtaatattaaacgctaaatgattttgatgttttaaatattatttcttaaaaactaacatttcttwttccgattaatgtaaaaagaagtttaaactatcaaagcacaagtacccagatgtctatttaatgcacataaagactttttgtacataaaaagaacgcatgggatgatttatactggcttttaaactttatatataataataattgagaaaaactgtttatttggcatcatgatgtcagagacagtgaaaacaaacaaacaaaaaaaatcagatctctgaacaatttaacttgtggaaatttcttcttccttaaatatagttataacg

SEQ ID NO: 630678 - DNA, 580 bp, Homo sapiens
caacatataatcttcagatcaaacaggactttcctcaactaagaaaattggagtgtaatattaaacgctaaatgattttgatgttttaaatattatttcttaaaaactaacatttcttattmcgattaatgtaaaaagaagtttaaactatcaaagcacaagtacccagatgtctatttaatgcacataaagactttttgtacataaaaagaacgcatgggatgatttatactggcttttaaactttatatataataataattgagaaaaactgtttatttggcatcatgatgtcagagacagtgaaaacaaacaaacaaaaaaaatcagatctctgaacaatttaacttgtggaaatttcttcttccttaaatatagttataacgagtcttttcagagtcattcagtaatgatcattcaatatgatcattattactgtattttaatgttgtgttagttttcgtcatgatcaaacagactgatggtcagttaatacccaggatgatagtaacgttgagaaccttcttatttcaccgtgaactcacccaaaatgcaaataaaatgggtcacagagaaatac

SEQ ID NO: 630679 - DNA, 499 bp, Homo sapiens
ggttactttaaacaatcaaatactactgcaaatgttatatatgcattataagattttctaaaatgctcaaaaaaatgcaatgctcatcacaaaatcagaagtaagttcagggacaacatataatcttcagatcaaacaggactttcctcaactaagaaaattggagtgtaatattaaacgctaaatgattttgatgttttaaatattatttcttaaaaactaacatttcttattccgattaaygtaaaaagaagtttaaactatcaaagcacaagtacccagatgtctatttaatgcacataaagactttttgtacataaaaagaacgcatgggatgatttatactggcttttaaactttatatataataataattgagaaaaactgtttatttggcatcatgatgtcagagacagtgaaaacaaacaaacaaaaaaaatcagatctctgaacaatttaacttgtggaaatttcttcttccttaaatatagttataacg

SEQ ID NO: 630680 - DNA, 580 bp, Homo sapiens
caacatataatcttcagatcaaacaggactttcctcaactaagaaaattggagtgtaatattaaacgctaaatgattttgatgttttaaatattatttcttaaaaactaacatttcttattccgattaatgtaaaaagaagtttaaactatcaaagcacaagtacccagatgtctatttaatgcacataaagactttttgtacataaaaagaacgcatgggatgatttatactggcttttaaactttatatataataataattgagaaaaactgtttatttggcatcatgatgtcagagacagtgaaaacaaacaracaaaaaaaatcagatctctgaacaatttaacttgtggaaatttcttcttccttaaatatagttataacgagtcttttcagagtcattcagtaatgatcattcaatatgatcattattactgtattttaatgttgtgttagttttcgtcatgatcaaacagactgatggtcagttaatacccaggatgatagtaacgttgagaaccttcttatttcaccgtgaactcacccaaaatgcaaataaaatgggtcacagagaaatac

SEQ ID NO: 630681 - DNA, 615 bp, Homo sapiens
ttaacaagtcacaaaagagccattaatatgcaatattatagtatcccctgacaggtttaaacccccaaacagacctcaactgtaaataattttatatacattattttggttttcttcccctcatcttcacatttcatcttttttactgacacttttatcttagatttggagtccagccttccacacctgatcttatacaccagcctcgctttacatcatgctgcaaaatcctcaggtaattaacatcattttttcaatgatttgaccctctctgatatttctcagacatacttccaatgatcctgaaataatgtctcctctctgaccagttatacamgattaaaatactaaaattattttctgtggaaatctcagaagcctatttcattttttaaataaactgcctatttctttaagaaaacatgtttagaaaacttctatctgagacgttaagacagcctgctttaggtgtatcaggttttgaaagttagaaaatttgatgtgtcctctgtgtaaaaaaacaaaaaggcaaaattgcaattgtcacattaagtccaaacattactatataaatcacaatgaatagccaattttataaaattacaaattttgaac

SEQ ID NO: 630682 - DNA, 597 bp, Homo sapiens
atactgactaagatccaagacagccctaaagtttatttcagaaagcagtgaacctaaaagtctgcctcagaaaaaaattgaacataaccccatttggtaaaacaatatttgagactgaaaattcattaactctcacatttcacctatgacatattttaagacaattaaatgagttaaaataggygaaaacaaacacgagcaacaaaagttaaaacatagaaacaacattaaattatgttttccctttgcaccgatttcccttataacttaatttgatctccatggagtcagataatattcctctcttaatcttcctttagcaattacaacaactgagcttgccaatatcaccaaatgaagtgaaccaacaaattggattgcctccacaatagtttactcctaaagtaatatctattacattactatttggaaactgttatcagaaatagcataagctgcaaaactttcacagtttggataaggaagtgaatttaaaaactagatatccttagcttttttcatttttttcctgtgtgcctgacatttattatgcagaaaattgctttatcaaatgtcaccttgaaaaagttgcttaag

SEQ ID NO: 630683 - DNA, 532 bp, Homo sapiens
ggaaagacagtgaacttttacaccttttacagaagtttgtgcccatgacaacaccctaatcatttgtagggacctgattaaatgaagaatactggyttaaatttctttcacttcccaatatatctaccactgtaaaagtacatgggacattaaattagacagagccaagcagaaatcccagctctgtcatttataaaacattttcttggcatatgcttgttctttcttcacccctcattctttatatcaaccgagcagccagatctgaaaattaggcctcccaaaggtttttctattcttctcttccatattcacagatatcatatggtacagaacgtcatgatctttcacatagaataacgttgacaccacctaatgagctgccacacttctgttgctctcatataatcctcacacaatagccacaatcatctttcaaaaatttaaacaaagtctatcatttacctgcatacaactttaagaatatccccatttcacttcgaaataaatctgcctctttcctgtagtctac

SEQ ID NO: 630684 - DNA, 532 bp, Homo sapiens
ggaaagacagtgaacttttacaccttttacagaagtttgtgcccatgacaacaccctaatcatttgtagggacctgattaaatgaagaatactggtttaaatttctttcacttcccaatatatctaccactgtraaagtacatgggacattaaattagacagagccaagcagaaatcccagctctgtcatttataaaacattttcttggcatatgcttgttctttcttcacccctcattctttatatcaaccgagcagccagatctgaaaattaggcctcccaaaggtttttctattcttctcttccatattcacagatatcatatggtacagaacgtcatgatctttcacatagaataacgttgacaccacctaatgagctgccacacttctgttgctctcatataatcctcacacaatagccacaatcatctttcaaaaatttaaacaaagtctatcatttacctgcatacaactttaagaatatccccatttcacttcgaaataaatctgcctctttcctgtagtctac

SEQ ID NO: 630685 - DNA, 532 bp, Homo sapiens
ggaaagacagtgaacttttacaccttttacagaagtttgtgcccatgacaacaccctaatcatttgtagggacctgattaaatgaagaatactggtttaaatttctttcacttcccaatatatctaccactgtaaaagtacatgggacattaaattagacagagccaagcagaaatcccagctctgtcatttataaaacattttcttggcatatgcttgttctttcttcacccctcattctttatatcaaccgagcagccagatctgaaaattaggcctcccaaaggtttttctattcttctcttccatattcacagatatcatatggtacagaacgtcatgatctttcacatagaataacgttgacaccacctaatgagctgccacacttctgttgctctcatatartcctcacacaatagccacaatcatctttcaaaaatttaaacaaagtctatcatttacctgcatacaactttaagaatatccccatttcacttcgaaataaatctgcctctttcctgtagtctac

SEQ ID NO: 630686 - DNA, 532 bp, Homo sapiens
ggaaagacagtgaacttttacaccttttacagaagtttgtgcccatgacaacaccctaatcatttgtagggacctgattaaatgaagaatactggtttaaatttctttcacttcccaatatatctaccactgtaaaagtacatgggacattaaattagacagagccaagcagaaatcccagctctgtcatttataaaacattttcttggcatatgcttgttctttcttcacccctcattctttatatcaaccgagcagccagatctgaaaattaggcctcccaaaggtttttctattcttctcttccatattcacagatatcatatggtacagaacgtcatgatctttcacatagaataacgttgacaccacctaatgagctgccacacttctgttgctctcatataatcctcacacaatagccacaatcatctttcaaaaatttaaacaaagtctatcatttacctgcatacaactttaagaatatcccyatttcacttcgaaataaatctgcctctttcctgtagtctac

SEQ ID NO: 630687 - DNA, 593 bp, Homo sapiens
gcatgttaaactttatcttatcagggctttttcacaggctaattcctctcttaaaactgagcattgtctgtattttcaatcactctcaatataatacagagaaccatgtaaacttactctggttactagtgaggttaaataacttttcatgtgtgtattgatcatcttgaattctttttcatatgcatttttcactcaaatttyttgcttagtgttgctattgtgcaaaatcacttttaaaggcttttgtataaggttatagaaacgtttttacatatattgcagacatgtaaaaagtttttattatgttttattcattgtttaaaatggagttttgtgcatatttcatttttaaaaatttaaatattaattccatctttctgtatagttggtagtatattatttttaactgtcatttcatttctgaactaaaaaggaagatatgccttagtctactcaggaatttctcaaatttcagtactgaattttttgacatatcaattattaacaacaatctatcaacttaatacccagcatttcatacttgtgaatttttagagtagtctaaaacatccctgtgtcttctcatatta

SEQ ID NO: 630688 - DNA, 593 bp, Homo sapiens
gcatgttaaactttatcttatcagggctttttcacaggctaattcctctcttaaaactgagcattgtctgtattttcaatcactctcaatataatacagagaaccatgtaaacttactctggttactagtgaggttaaataacttttcatgtgtgtattgatcatcttgaattctttttcatatgcatttttcactcaaattttttgcttagtgttgctattgtgcaaaatcacttttaaaggcttttgtataaggttatagaaacgtttttacatatattgcagacatgtaaaaagtttttattatgttttattcattgtttaaaatggagttttgtgcwtatttcatttttaaaaatttaaatattaattccatctttctgtatagttggtagtatattatttttaactgtcatttcatttctgaactaaaaaggaagatatgccttagtctactcaggaatttctcaaatttcagtactgaattttttgacatatcaattattaacaacaatctatcaacttaatacccagcatttcatacttgtgaatttttagagtagtctaaaacatccctgtgtcttctcatatta

SEQ ID NO: 630689 - DNA, 625 bp, Homo sapiens
cttatgttctcttgcagttgtcctatttttttcagaaatataataagaaaaatcattaactgagagttagaatggagagatattattggtgttttctaagaaaagaataagataagaaatactagactaggaaatgaagcaatagaaatataataattttgctggactacactagacaacaattcagcacttacatatttattcaacaaatgtttattgtgcctcttctggattctaaatgctcctgtaggcacttgtgatataacagtaaacaaaagagattcttgatgttatagagcctaggttagtggttataaattttaartgagaccaactgtaattttcttcagataggttctgtttgggaggtttattcaagtagaaaggatatagaattaaccagaattgagattgtgccagacagtgacatggaatgagggtaaacggaaaagagtgattttaatcatgtcatggagttgtagctgttagaaagtgaagattttaatgtgtgagatacaacaacctcagcagtattatggcagattctgataaaagtcaaaagatttctcagtctgaagcattagaggaactaggctagaataaagtggtactttttaaataattg

SEQ ID NO: 630690 - DNA, 539 bp, Homo sapiens
taaattttaaatgagaccaactgtaattttcttcagataggttctgtwtgggaggtttattcaagtagaaaggatatagaattaaccagaattgagattgtgccagacagtgacatggaatgagggtaaacggaaaagagtgattttaatcatgtcatggagttgtagctgttagaaagtgaagattttaatgtgtgagatacaacaacctcagcagtattatggcagattctgataaaagtcaaaagatttctcagtctgaagcattagaggaactaggctagaataaagtggtactttttaaataattggattcttgagtttgagattacaataataacaataattgataatgtgaatcacagagattcttgattttttgtgaattataacaaattaaagcaggtcacaaaaccccagtatgggtcctgaggtttcatatttttagctgctccacagatgactcaaatttacaatcagagtagaaaacctatggtaggattatgatcatgagaatgaatggctaaagtaggatagaa

SEQ ID NO: 630691 - DNA, 539 bp, Homo sapiens
taaattttaaatgagaccaactgtaattttcttcagataggttctgtttgggaggtttattcaagtagaaaggatatagaattaaccagaattgagattgtgccagacagtgacatggaatgagggtaaacggaaaagagtgattttaatcatgtcatggagttgtagctgttagaaagtgaagattttaatgtgtgagatacaacaacctcagcagtattatggcagattctgataaaagtcaaaagatttctcartctgaagcattagaggaactaggctagaataaagtggtactttttaaataattggattcttgagtttgagattacaataataacaataattgataatgtgaatcacagagattcttgattttttgtgaattataacaaattaaagcaggtcacaaaaccccagtatgggtcctgaggtttcatatttttagctgctccacagatgactcaaatttacaatcagagtagaaaacctatggtaggattatgatcatgagaatgaatggctaaagtaggatagaa

SEQ ID NO: 630692 - DNA, 539 bp, Homo sapiens
taaattttaaatgagaccaactgtaattttcttcagataggttctgtttgggaggtttattcaagtagaaaggatatagaattaaccagaattgagattgtgccagacagtgacatggaatgagggtaaacggaaaagagtgattttaatcatgtcatggagttgtagctgttagaaagtgaagattttaatgtgtgagatacaacaacctcagcagtattatggcagattctgataaaagtcaaaagatttctcagtytgaagcattagaggaactaggctagaataaagtggtactttttaaataattggattcttgagtttgagattacaataataacaataattgataatgtgaatcacagagattcttgattttttgtgaattataacaaattaaagcaggtcacaaaaccccagtatgggtcctgaggtttcatatttttagctgctccacagatgactcaaatttacaatcagagtagaaaacctatggtaggattatgatcatgagaatgaatggctaaagtaggatagaa

SEQ ID NO: 630693 - DNA, 559 bp, Homo sapiens
agcatatgaaaaaaagcttaatatcacttatcactggataaatgcatatcaaaatcaccatgagatcccatctcacacagtcaaaatggctatttttaaacttttattttaagttcaggggtaactgtgaaggtttgttacataggtaaacttgcattatggtgtgtttttgttatacagataatttcatcaccyaggtattaagcctagtactcattagttatttttcctgattctctccctcctcccactctccaccccctaataggctccagtatatttgttcccctctatgtgtacatgtgttctcatcatttagctcccacttataagtgagaacatgtggttttctgttcctgcatcagtttgctaaggatgatggcatccagctctattcatgtttacacacacacacacacacaaattatgtcattctttgtatggctgtgtagtattcatggtgtatatgtgacactattgctttatccagactatcattgatgggcaggtaggttgattccatgtcattgctattgtgaatagtgctgcaatgaacata

SEQ ID NO: 630694 - DNA, 553 bp, Homo sapiens
gagttacaaagcagcttagctgctatggtagactatggatatttgcttcagcagtagctgttttacagaaatctatctgggagaacaaaataaaaacaaaattaaactattttcattcatgttcagcctaacttatctcttcatatgtttaataaaattatttttaaataaataggataagtttcaacagctatattgtcttacattttcctttctaagcagcattcaaattaattcttttttttggaatatgaaaatctgattcctgcatacatttatttttagaaccagttctaaaggaataaacaaaactaaacaaaaactggtctcttctgataaatttcacagcttcactgaaagagaaatatctctcatacataatccaaatttcaattgtaataagtgtgtgagtatagtataatgactaagarcctgttgctctgacatgggacaatcctaagttgaaagtatgacactatcactaatttaaagtctcttagctttcatttcttcagctttaaaatgataatgatataattaactcataaagttg

SEQ ID NO: 630695 - DNA, 599 bp, Homo sapiens
atgtttaataaaattatttttaaataaataggataagtttcaacagctatattgtcttacattttcctttctaagcagcattcaaattaattcttttttttggaatatgaaaatctgattcctgcatacatttatttttagaaccagttctaaaggaataaacaaaactaaacaaaaactggtctcttctgataaatttcacagcttcactgaaagagaaatatctctcatacataatccaaatttcaattgtaataagtgtgtgagtatagtataatgactaagagcctgttgctctgacatggracaatcctaagttgaaagtatgacactatcactaatttaaagtctcttagctttcatttcttcagctttaaaatgataatgatataattaactcataaagttgttgtgatgattaaatgggataatgttttaatatagcaattaacatatgatgatcactcaatattattagccatgagttgtagtaggggtaataaggtggttgaaaaatgttttcattaacaatagtctttctggtttatggctttagactgggaaagaataagtgtccccgcaaaactgcagcacaaaag

SEQ ID NO: 630696 - DNA, 530 bp, Homo sapiens
tagagcttgataagaaattagacatgtaagcaatctatttgcattatctcttcttcttaatctaatgtgtaatttaactctcctgcagtctctctcttaaaatcctattgactttcttaaagggctggcgatggaaagagaaaagtccgtgtaaccaacaattaaatcaaatggtggagatctgtattcatctagtgcctctgaaccctttcagcccataaaagtcactttagcaagggcytgagttacttttctttacaaagattctcaagtattgatttcaaatgtaataagacagaatccaggtgaattcagtcacagccttagtatatccagatacttcatttcacagatgataatacttaggaatgtaactacagatttttgaagagaacagatacaaatcatcagatcttttaattttaattttttttaaacattggagtgtatgactgagttttagcataaatcggtgttatcttacttcacttattacttacattaagtggataaaattaaatcttgggaat

SEQ ID NO: 630697 - DNA, 530 bp, Homo sapiens
tagagcttgataagaaattagacatgtaagcaatctatttgcattatctcttcttcttaatctaatgtgtaatttaactctcctgcagtctctctcttaaaatcctattgactttcttaaagggctggcgatggaaagagaaaagtccgtgtaaccaacaattaaatcaaatggtggagatctgtattcatctagtgcctctgaaccctttcagcccataaaagtcactttagcaagggcctgagttacttttctttacaaagattctcaagtattgatttcaaatgtaataagacagaatccaggtgaattcagtcacagcyttagtatatccagatacttcatttcacagatgataatacttaggaatgtaactacagatttttgaagagaacagatacaaatcatcagatcttttaattttaattttttttaaacattggagtgtatgactgagttttagcataaatcggtgttatcttacttcacttattacttacattaagtggataaaattaaatcttgggaat

SEQ ID NO: 630698 - DNA, 450 bp, Homo sapiens
ttatttgtcctgtgtattctaatgcacattaaagaaaatgaaaacaaaactaatattttgaaacataaaggatggagactttcatatatactatatagttaagtgcttaacagggcttgttattcaaatggaattttaaaaacttgaatgtgtgcaagtgtacattaaatcccacaaattatttgctattagaatggctaggattcttagatgatagtagttttgacttatttgactttgtcaataatgtaataastatatcaatttataaattctcaatgacttttaaaaatgtgtttatttttaaaactttctgattacttattttgccatctgctgataggtgaataaagatcaacagtatggaggtctgtgttcataatcaactgaacagaacaaaaaggctgatcccccatccagtaagagagaattctcttacttaggttagag

SEQ ID NO: 630699 - DNA, 564 bp, Homo sapiens
gaatccagcagcatatcaaaaagataattcaccacaaacaagtaagctttattcctgygatgcaaggttggttcaccatacacaaataaataaatgagtcccaccatataaacagaatcaagaacaaaaacgatgtgatcatcgcaataaatgcagaaaaagcttttgataaaatctaacatcacctcatgataaaaaccctcagcagattaggcactgaaggaacatacctcaaaataataagagccatctatgacaaaacaacagcctgcattatactgaacaggcaaactctagaaggattctccttgagcgctagaacaagacaaggatgcccaccctcaccatgcctattcaatgtactactgaaagttatagccaaagcaatgaagcaaaaggaagaaataaaaggaatctatctaggaaaagagaaagtcatactatctttctttgctgatgatatgattctatatctaaaaaaccctacagactctgccaaaaggcttatagctaataaaaagttcagtaaagtttcaggatacaaaatcgatatgaaaaatcagt

SEQ ID NO: 630700 - DNA, 564 bp, Homo sapiens
gaatccagcagcatatcaaaaagataattcaccacaaacaagtaagctttattcctgtgatgcaaggttggttcaccatacacaaataaataaatgagtcccaccatataaacagaatcaagaacaaaaacgatgtgatcatcgcaataaatgcagaaaaagcttttgataaaatctaacatcacctcatgataaaaaccctcagcagattaggcactgaaggaacatacctcaaaataataagagccatctatgacaaaacaacagcctgcattatactgaacaggcaaactctagaagsattctccttgagcgctagaacaagacaaggatgcccaccctcaccatgcctattcaatgtactactgaaagttatagccaaagcaatgaagcaaaaggaagaaataaaaggaatctatctaggaaaagagaaagtcatactatctttctttgctgatgatatgattctatatctaaaaaaccctacagactctgccaaaaggcttatagctaataaaaagttcagtaaagtttcaggatacaaaatcgatatgaaaaatcagt

SEQ ID NO: 630701 - DNA, 546 bp, Homo sapiens
attggccttgacaaggaatttatggctaagtcctcaaaaacaattgccacaaaaacaaaaattgaaatgtgggacctaattaaactaaagagcttctgtgcacagcaagaaaaactattgagaaagtaaacagacaacccacagaatgggagaaaatattcacaaacaatgcatctttraaaggcctcatattcagaagatataaataatttaagcaatccaacaagcaaaaaccaaatgacctcattaaaagagggccaaagacgtgaacaaacagaagatataccagcagccaacaaacatctgaaaaaaaaaattcatcttccctaatcatcagaaagatgaaaatagaaaacacaaggagatgccatctcaaacctgtcagaatggattttgttaaaaagccaaaaaaatagcaaaactcctaaaacccaaggatgaggttgcaaagaacaggactgatgtaaattagctcaggcactgtggagagaagtttggagattcctcaaagagctgacatgaattaccattctacccaacaacgcc

SEQ ID NO: 630702 - DNA, 615 bp, Homo sapiens
gaacacataagtaaagtgaagactaatgttaataaccaagacagtggggaaaatgcctcggagacctttgcagtagcccctcccatcacaggcctggaggcctaggagggaaacatgatttcatgggccagacccaggagggtcctgctgctctttgcagcctcgggatatagtgcsctgggtcccagccactccaacttcagccgtgaccaaaaggaggcaatgtacagctctggctgttgctttagagggtgcaaaccccaagccttgtcagcttccacgtggtgttgggcctgcaggagcacagggatggaaagttgaggtatgggaacttccacctagatttcagaggatatatgaaaatgcctggatgtccaggcagaagtctgctgctagggcagagtcctcatggagaacctctacaagggcaatgtagaggggaaatttggggttggagtccccacgtggaatccccactgcctagtggagctgtgagaagagggcaattatcttgcagacactagagtgctagatccaccagtagcttgcactgttcacctggaaaagatgcaggcactcaatgccagcctgagaaatcagctgcagggggtgtac

SEQ ID NO: 630703 - DNA, 607 bp, Homo sapiens
ttatattatcaagaaacaaggagacataacaggcagggttgtcatagaagtatgacattgcaagtaacttgaaagatagtcccttcaactttccccttcatttcagatccccttcagcagcatctttaccaagcgttaccactgattcccatggaatgactacgacctgtgactacccttcccattcttaaaccactcttacagcagacttgttttctcctcacagggtcctgaaatctctctcttgctgtaatattaactcattgatctcagatsaagcccttggatcatactttaaactatcatcctttccagacctatatactaatttcttacctgtttgattgattggtacatagtatgtttaatacccacactgctttttattttcctttattctctgccaagagttaattttttggtttgaaaaactgctttaaaaacaacttttgtatatacagtctgatagtagttagcatttgaatcatgcaggtaagaaatcaacaacccaaatgtggatatttaaatactttaattgccattattgaagtctctatcagagatcttctgttcttttttttacttaatagaaatgttataagaaagt

SEQ ID NO: 630704 - DNA, 551 bp, Homo sapiens
atctgatggtttaaatgtgtgtggcaatttcccctttactttctctctctcctgccaccatggtaagttttgcctggttgcctttcaccttccactatgattgtaagtttcctgggaccccccsagtcatgtttcctgttaggcctacataactgtgaataaattgagcctctttatcaaatatatagtttgcaaatatatatgtatatatgcctagactcttgtaaatacaatactcttgtaaacacaaccaatatatttctggtatggttcttgtttacaggtaccaagacagacctgatcataaaaccaataacaaagaatgtcagaagtcttttacatggattaagaaaaaaatgcgagcaagaaggcctaagaaaggagaggtttcaatagatggtacactcggttgttcccttagaccacctttgttagtcttcgcctcaaagaaaaacatttccactgaaaaccacataatctggtttaacagattaaatatataaactatgatgtgctgggagaacttcagctttttttcctagcactcacct

SEQ ID NO: 630705 - DNA, 532 bp, Homo sapiens
ggcaatttcccctttactttctctctctcctgccaccatggtaagttttgcctggttgcctttcaccttccactatgattgtaagtttcctgggaccccccgagtcatgtttcctgttaggcctacataactgtgaataaattgagcctctttatcaaatatatagtttgcaaatatatatgtatatatgcctagactcttgtaaatacaatactcttgtaaacacaaccaatatatttctggtatggttcttgtttacaggtaccaagacagacctgatcataaaaccaataacaaagaatgtcagaagtcttttacatggawtaagaaaaaaatgcgagcaagaaggcctaagaaaggagaggtttcaatagatggtacactcggttgttcccttagaccacctttgttagtcttcgcctcaaagaaaaacatttccactgaaaaccacataatctggtttaacagattaaatatataaactatgatgtgctgggagaacttcagctttttttcctagcactcacctgat

SEQ ID NO: 630706 - DNA, 532 bp, Homo sapiens
ggcaatttcccctttactttctctctctcctgccaccatggtaagttttgcctggttgcctttcaccttccactatgattgtaagtttcctgggaccccccgagtcatgtttcctgttaggcctacataactgtgaataaattgagcctctttatcaaatatatagtttgcaaatatatatgtatatatgcctagactcttgtaaatacaatactcttgtaaacacaaccaatatatttctggtatggttcttgtttacaggtaccaagacagacctgatcataaaaccaataacaaagaatgtcagaagtcttttacatggatkaagaaaaaaatgcgagcaagaaggcctaagaaaggagaggtttcaatagatggtacactcggttgttcccttagaccacctttgttagtcttcgcctcaaagaaaaacatttccactgaaaaccacataatctggtttaacagattaaatatataaactatgatgtgctgggagaacttcagctttttttcctagcactcacctgat

SEQ ID NO: 630707 - DNA, 551 bp, Homo sapiens
atctgatggtttaaatgtgtgtggcaatttcccctttactttctctctctcctgccaccatggtaagttttgcctggttgcctttcaccttccactatgattgtaagtttcctgggaccccccgagtcatgtttcctgttaggcctacataactgtgaataaattgagcctctttatcaaatatatagtttgcaaatatatatgtatatatgcctagactcttgtaaatacaatactcttgtaaacacaaccaatatatttctggtatggttcttgtttacaggtaccaagacagacctgatcataaaaccaataacaaagaatgtcagaagtcttttacatggattaagaaaaaaatgcgagcaagaaggcctaagaaaggagaggtttcaatagayggtacactcggttgttcccttagaccacctttgttagtcttcgcctcaaagaaaaacatttccactgaaaaccacataatctggtttaacagattaaatatataaactatgatgtgctgggagaacttcagctttttttcctagcactcacct

SEQ ID NO: 630708 - DNA, 567 bp, Homo sapiens
aacaaaacactgtgtaatcaagtctgacaactaacaacaaacattactattttcctaagcataaaaataaccaaatgatagttaatagcttgaaagctgtttctttgctaatttcatttggcctcactctaatcctctttccttctagatacacattattgttattcccaatctaaatttactctcgcttccgaacaacacataaactataggcaagctatgcttcctctatcactcccaaatcacctaccacaagtttaaatcttatacatcctttctaagattccctaaatgagaagcctcattattccttgtggagtgtttcttacggtcttkggctggagagtattggcagaggcaacttaaaaacctgtatggatttcaatcacagtacaaattccacttgtgctttaagtatgctgacacacacacacacacacacacacacatatccatatttgaatgatacaaaaccaaattgacttgatgtaaaataataaattaacaagataataaaaactgtctttataatgtattatacttaaagcatgctagcctcttacctgc

SEQ ID NO: 630709 - DNA, 564 bp, Homo sapiens
atgatgccaaataaacagtttttctcaattattattatatataaagtttaaaagccagtataaatcatcccatgcgttctttttatgtacaaaaagtctttatgtgcattaaatagacatctgggtacttgtgctttgatagtttaaacttctttttacgttaatcggaaaaagaaatgttagtttttaagaaataatatttaaaacatcaaaatcatttagcgtttagtattacactccaattttcttagttgaggaaagtcctgtttgatctgaagattatatgttgtccctgaacttayttctgattttgtgatgagcattgcatttttttgagcatttcagaaaatcttataatgcacaaataagatcacttgagcccaggagtttgagaccagcctgggcaacatcataggactccatttctacaaaacaaaacaaaaagcctagaacgggaagagctgcctctcggggctgagaacatccaactgcaccaatttagatcctgaaattaccctgccccacaagcaaaaaacatggtcacaaagtggcccaaaggaggca

SEQ ID NO: 630710 - DNA, 564 bp, Homo sapiens
atgatgccaaataaacagtttttctcaattattattatatataaagtttaaaagccagtataaatcatcccatgcgttctttttatgtacaaaaagtctttatgtgcattaaatagacatctgggtacttgtgctttgatagtttaaacttctttttacgttaatcggaaaaagaaatgttagtttttaagaaataatatttaaaacatcaaaatcatttagcgtttagtattacactccaattttcttagttgaggaaagtcctgtttgatctgaagattatatgttgtccctgaacttacttctgattttgtgatgagcaytgcatttttttgagcatttcagaaaatcttataatgcacaaataagatcacttgagcccaggagtttgagaccagcctgggcaacatcataggactccatttctacaaaacaaaacaaaaagcctagaacgggaagagctgcctctcggggctgagaacatccaactgcaccaatttagatcctgaaattaccctgccccacaagcaaaaaacatggtcacaaagtggcccaaaggaggca

SEQ ID NO: 630711 - DNA, 564 bp, Homo sapiens
atgatgccaaataaacagtttttctcaattattattatatataaagtttaaaagccagtataaatcatcccatgcgttctttttatgtacaaaaagtctttatgtgcattaaatagacatctgggtacttgtgctttgatagtttaaacttctttttacgttaatcggaaaaagaaatgttagtttttaagaaataatatttaaaacatcaaaatcatttagcgtttagtattacactccaattttcttagttgaggaaagtcctgtttgatctgaagattatatgttgtccctgaacttacttctgattttgtgatgagcattgcatttttttgagcatttyagaaaatcttataatgcacaaataagatcacttgagcccaggagtttgagaccagcctgggcaacatcataggactccatttctacaaaacaaaacaaaaagcctagaacgggaagagctgcctctcggggctgagaacatccaactgcaccaatttagatcctgaaattaccctgccccacaagcaaaaaacatggtcacaaagtggcccaaaggaggca

SEQ ID NO: 630712 - DNA, 624 bp, Homo sapiens
actgttatttgatctataactcctacccatatttgtcttgtgaatatgcagacagatgtatctatagcccacagaatggtgaacacttgaaacacaagatcagtaatgcaacaagacaagagttacgtctatagcctagctctgtttcttgtttttccacatttatatattttgaatctctaaatattaaactctaacttagtagaataaaatgtttctgtactttcatagcataaagtgctttcaattgtaagctcctagtcattgagaagctaagcaggaayaaatgatcccctagaattctcttgtgataggcactgttagatgacagtagtcaatctctggagatacttcaggttgcagctcttctctaggagacagctgtgcctttgagtgggttgggaagaatcagcatggaaagagagtgaatggcatagaattctgagaaagatgtctcttttattcttgtcattgtagcgataaatatattcgtgaacccatggtatacataagcaataatttttagaaggatgtgatctccattgatgtgtttttgcaatcaaaacaaagcagtattgtaaattatatggcaaaagtcattttatagatactgataatcagaga

SEQ ID NO: 630713 - DNA, 624 bp, Homo sapiens
actgttatttgatctataactcctacccatatttgtcttgtgaatatgcagacagatgtatctatagcccacagaatggtgaacacttgaaacacaagatcagtaatgcaacaagacaagagttacgtctatagcctagctctgtttcttgtttttccacatttatatattttgaatctctaaatattaaactctaacttagtagaataaaatgtttctgtactttcatagcataaagtgctttcaattgtaagctcctagtcattgagaagctaagcaggaacaaatgatcccctagaattctcttgtgataggcactgttagatgacagtagtcaatctctggagatacttcaggttgcagctcttctctaggagacagctgtgcctttgagtgggttgggaagaatcagcatggaaagagartgaatggcatagaattctgagaaagatgtctcttttattcttgtcattgtagcgataaatatattcgtgaacccatggtatacataagcaataatttttagaaggatgtgatctccattgatgtgtttttgcaatcaaaacaaagcagtattgtaaattatatggcaaaagtcattttatagatactgataatcagaga

SEQ ID NO: 630714 - DNA, 618 bp, Homo sapiens
ctttgctattgcacttgattgcactagttgaagataaaaatggcagaagaaggttttatttgatagacttaaaaggctggaagaaaattatcatagctgaacagtgtaagaaaattctaacagctataatctgttttgattctcttctccttaaccatcagttttgagggttgataatcaatgacatatgacctagatatttgctaagacatattgtgttcaatctgagggtagtcatattttaagttattaatttgaaattttaaaatctcattaaaatcctaaaaaatcctattttttagtttttcttaaagaaatagaaggttgacactcaaacctcaatgcgccaagagattaataaaggaagctgtatccttcagaygtggaatttgttcccttggttgtcgtaattcccatatatttctattggttcccgtcagtaagattgcatgtcatttggcacacatcatctttctcatactatttgttcctctttttttgtaacagaagaatataagtttctgtatttgtttcttagggctgctgtaacaaagcactacaaattgtatttcttaaaatagaaatgcattatcacacagctctgggggttagatgtct

SEQ ID NO: 630715 - DNA, 561 bp, Homo sapiens
acgcccgcctgcctcgccttccattctctgatctgtcagccaccgtcagctgtggattccttcctgggaactgccatcactcgaaatgaagtcggaagcacagggccccaccagcctttctcctgtcacttgactctaacctggagtccaagtcaccagggccccaggacccaaaggtacacaaagcccacctggaccctcagccggtacttgccccaggccaccctcaggatccacggtccacagcaccactgctgttggctcaggctctgcctcccctgggcccacggcgggtccgtgggagccccccacgagctctgctgtcctcatttgagagtcctgtcctggctgccatggagggagggcccctggagcccctcctgctagtgctaaggagctcagaagccctgcccagcaggktccagatgggaagcagaggctcagagaggactgtaacctgctcagggacacacatgtcaggccagggtgagagctgggtgccttctactcatcctgatgaatctgagcagaatcagccccccatttctccacaacttctct

SEQ ID NO: 630716 - DNA, 605 bp, Homo sapiens
ttgtagggttctctttttcaggcttatactcatgatcttgtctgaagcttttgagggcagactgccagtcctggagaaatagtagatggccagtttgtgggttttttttttttacacgaatttgaggaaaaccmaatgaatttgatagcccaattgagacaatttcagcaaatctgtaagcagtttgtatgtttagttggggtaatgaagtatttcagttttgtgaatagatgacctgtttttacttcctcaccctgaattcgttttgtaaatgtagagtttggatgtgtaactgaggcgggggggagttttcagtatttttttttgtgggggtgggggcaaatatgttttcagttctttttcccttaggtctgtctagaatcctaaaggcaaatgactcaaggtgtaacagaaaacaagaaaatccaatatcaggataatcagaccaccacaggtttacagtttatagaaactagagcagttctcacgttgaggtctgtggaagagatgtccattggagaaatggctggtagttactcttttttccccccacccccttaatcagactttaaaagtgcttaaccccttaaacttgttatttttta

SEQ ID NO: 630717 - DNA, 605 bp, Homo sapiens
ttgtagggttctctttttcaggcttatactcatgatcttgtctgaagcttttgagggcagactgccagtcctggagaaatagtagatggccagtttgtgggttttttttttttacacgaatttgaggaaaacccaatgaatttgatagccmaattgagacaatttcagcaaatctgtaagcagtttgtatgtttagttggggtaatgaagtatttcagttttgtgaatagatgacctgtttttacttcctcaccctgaattcgttttgtaaatgtagagtttggatgtgtaactgaggcgggggggagttttcagtatttttttttgtgggggtgggggcaaatatgttttcagttctttttcccttaggtctgtctagaatcctaaaggcaaatgactcaaggtgtaacagaaaacaagaaaatccaatatcaggataatcagaccaccacaggtttacagtttatagaaactagagcagttctcacgttgaggtctgtggaagagatgtccattggagaaatggctggtagttactcttttttccccccacccccttaatcagactttaaaagtgcttaaccccttaaacttgttatttttta

SEQ ID NO: 630718 - DNA, 568 bp, Homo sapiens
ccacctcctccatgaagtctcctggccctcatctgcctccatcctctctagccctgtgctctttcttaggccccagggctttggcccacatcttcctggaaggtcaagtcctggaggggtttactccagtcctgaagcaggtgcttgggaaatgtgtgccgattggtgggtgggggcagaggttgtgtgggggcgtggagggtgagggcggatcttgggcagtgggcagtcaggatggaatccaggctggctgcagggcggggatggtgcggggcctgctgctgccttcctgactcgtcctcccccagcccatctcatctgggkctcccaccccttctctctgaccttgtttctcgttggctcagccctgtcctgttaatgagctgagccagcttggcgaccgcctctctgatgtgctgactcagtcctgtggctcccgcttcctctgcccttgtttgaaaatgccaagttaattgctctccagctttaggctacactggcagggggcacaccccctttttcctctccccttcctcataccctgggaggggtaggcagcgccctgcag

SEQ ID NO: 630719 - DNA, 586 bp, Homo sapiens
agggtgtgaggggctcttctaaggttctggttggagggaggccaggaggtgctgttgccggtgcctcttctgtgggtgaggcctttcagcccatatrggccctggcttcttggcctgggtctgggctggatggaatgtatggattcgggacagcaaactaggtggtgatgtgtccccaaacctaatgggtcctcatatacacagtccccctcactgaccttggacctggatcaacaagaactggattggaaatctggaaacttggagtttaagctttgtccctcgttgcttgtaaccttagggacatggtttaactcttccagttgcccagtcttcacaatgaagggtttgaacagggttaatttattcatttaactacaagtgtcaaaccaatgaacaatggatagaaactttctgttagatgaatggataaagaaaacatagtaaatacatacagtggaatattatttagccttgaaaaagagggaaatcctgtcatttgcaacaacacaatggaggacattatgctaagtgaaatatgctaagtgaaataatatgctaagtgaaataagccagtcacatgtat

SEQ ID NO: 630720 - DNA, 585 bp, Homo sapiens
tctgcctgtaagtgcctaagtgacagctggcttgtgccatggtgctgcatgctaagtggcctgaggatggggtacaggggagggtgtgaggggctcttctaaggttctggttggagggaggccaggaggtgctgttgccggtgcctcttctgtgggtgaggcctttcagcccatatgggccctggcttcttggcctgggtctgggctggatggaatgtatggattcgggacagcaaactaggtggtgatgtgtccccaaacctaatgggtcctcatatacacagtccccctcactgaccttggmcctggatcaacaagaactggattggaaatctggaaacttggagtttaagctttgtccctcgttgcttgtaaccttagggacatggtttaactcttccagttgcccagtcttcacaatgaagggtttgaacagggttaatttattcatttaactacaagtgtcaaaccaatgaacaatggatagaaactttctgttagatgaatggataaagaaaacatagtaaatacatacagtggaatattatttagccttgaaaaagagggaaatcctgtcatttgcaa

SEQ ID NO: 630721 - DNA, 596 bp, Homo sapiens
gaaatatgctaagtgaaataatatgctaagtgaaataagccagtcacatgtatatgaygtatcagaaattgattccatgtatatgacatatcagaaattgtcaaactaatagcagcagagaaaagagttggctgcaccaacagcacccagggcttggagcaaattgtcaggggctaggggaagaggcaaatggggaattgttattccatgcatatagagtttcggttctgcggggtgaataagttctagagatctgctgtacaacatagtgcttgtaattaagaatctggtattgtgtacttcagaattccttaagatctcatgttaagtgtttttaccacacacacacacacacacacacacactcaaaggaatatgagaaactttgggaagtgttggatatgcatattaccttgattgtggcgatggtatcatgggtgtttgcatatgtccaacttcaccaaactgtacacattaaatatgtacagttatttgtatatcaactatacctcaacaaagctgttaaaggaaacttgctcttagacatattttgtttggcctatacagtgctttaaatttaagcacccacatttaat

SEQ ID NO: 630722 - DNA, 611 bp, Homo sapiens
ctgttcctacctcagcccaccagaagcaccacaagtgcctacagggagagaaaaccctgagggtacctagagacaaacaggggaggcaggactagaaaccccagcccacaaaactctgctttttatctcagccaaaggagatgccaaatcagagtagctgtttaacagcatgctatagaaggcatgctccacgggcctactgggcatacactccttgccagccttcccatttagccagaatatcccccattcaggacaagcagtgctctgaacatttggatgggcagtgctctgaacatttggatggacagtgctctgaactttcgtgagagctgaggcaaacctgagcttaaagcactacstagtgccaagaaagagaggcaacaatataggattaaggagacttgcagacagctacaaagaacctttaagcaaatataccctagaaagaccagaacatgtgagacagtgatgactagaataagtaactaatctttcaatgaaaatccataaatgtacatacacaagaaacaacagcaaacagggaatcatgacctccccagatggacaaagcaaagagccagtgatcaaccctaacaagatggtgatgt

SEQ ID NO: 630723 - DNA, 307 bp, Homo sapiens
ggattgtgctgggaaatatataggtaaaccaaaaaaatgtaagcatcaaaaacaaaagtgaatccacaacaatctagaactaagattttaaacaaatctaacatggtgggacaaggtgagagtcatcatgaaggtgacaggtccctgcctcattcagggggagaaagttacttcagaacttaacaagaaaaataaatataattagaggtcttcatagggcagccaccagaaaaattaaaaacagaatgaattacttttgaccagtcagctttygtgaagtcatgctacagtaacaagctgcctcatc

SEQ ID NO: 630724 - DNA, 460 bp, Homo sapiens
gtgggaattgaactataagaacacatggacacagggatggggaacatcacacaccagggcctgtggggctgggggactaggggaggsataacattatgcagcaaaccaccatggcacgtgtatacctatgtaacaaaactgcacattctgcacatgtatcccagaacgtaaagaataataataataaaatgttttgtcagatattcccaacatctcattcatctcagggttggtattgtggattgctttttgtcatttgagttatgatttttcttgatatgaagggtaatttttaaataattgtaacctggaattgtaggagacgcaggttcttatttaaactttttcattttagcaggtggtcactctgtttaggtttctcacaccggtcttggcctctatatgtgggtgatcactccaatgacaggtagattttcagcactttccttgtgttgttttg

SEQ ID NO: 630725 - DNA, 553 bp, Homo sapiens
ataacttggaggtaattataagaagcatcaattacccagcaatgtggatttcatgaattcaattaatttgcatggcaatcgatacgggcgggtttcrctggggtccccaggggaagttaggacattgttctgcacgctattgattttacaatgtaaaacaaaacctctctcctcgaattcatagatgcccattcagccatattaactttcagatcatttatttttgtatgtctttcaactctgtttgttgctatcacacagatgcagagtattacattgtagggaataattgaatcaatacagtcatgctacaccagacttccccaactcaaggaagaagagcagtttgccgaccagctcttctgcactctgccttccccagccagctgtccaccctcgtgcccaccccaaactctccctctcccaagcaggccactcccctaaccctaagtttctcactctgtccaatgtgtcttcattcaggacagacttaaagtgcagctggggaaatatggttagacaataggaagaatttttctgtcggtgaatggaa

SEQ ID NO: 630726 - DNA, 408 bp, Homo sapiens
cccgagtagctaggactacatgtgcacgccaccacgcctggctaatttttggatttttttagtacagattgggtttcaccatattggccaggctactctcgaactcctgacctcatgatctgcccacctcggcctcccaaagtgctgatattataggcgtgagccactgtgcccagcctctaatttttgtatttttagtggagacaaggtttcaccatgttgcccaggctggtgtctccacttcttactggctatttggctttgagaaaaactagttggcctccctgaccctcaattccttcatctgtaaaatgggaatatacctccatgcaccttcataactggccygagaacacccaggaggcccagagacactcttacattgtctggattcacttcactgagcac

SEQ ID NO: 630727 - DNA, 575 bp, Homo sapiens
ctcctgcagggaagacacagcaggaagctagaggcagggggcaagaggaaggagaagcagctccaggagttagctgaggtggataatagagagggaatggactttgtttggactaaacattgtcataggcttaaagagctgaagscttctctagctcctgcttgggcaggacttctgataataagaactcctagcaagaaagtgcttgtaaaacccctctcctacactgtctcattagtttagtccccaaacagccatagaagacaggcattatcattatattatcattattattgttattattacttaatgtctttcttccttggtcaatctaagatcacaaggggcagggatcatgtcaaccttgtcacgctgtgtatcctcagtgccacataccgtgcccagcatagaggtgacattcaataaatagttgctgggtgggtgggtggatggatggaaggatggatagatggaataatggatggacagaaaggcaggtggatgaaggataaattatcccattttacaaattaagaaactaaggaccagagagaaaaagtgacttacccaagact

SEQ ID NO: 630728 - DNA, 558 bp, Homo sapiens
tgaacacatagttggtgctcaggatttattgaatgaatgtctttggggcaagtgcaaattcaatgtcatggaaattcttgaatgtgatgcttcgtgaagaccttaaaagctgtcctggtgggagtcagaggtccaccatcactcttagaggtagatggcaygggttttggaaacagttaatggtctgagtctggtatataccggttgtgtaaccttgagcctctctcatcctagtttctttgtctctaaaattggtgcaatcttctttatttatttatttatttggagacggagtttcactcttgttgcccaggctggagtacaatggtgccatctcagctcactgcaacctctgcctcccagatacaagcgattctcctgtctcagcctcccaagtagcttggattacaggcatgcgccaccatacctggctaatttttttttgtgtgtttagtaaagacagggtttcgccatgttagtcaggctggttgcaaactcctgacctcaggtgatccacccgcctcggcctcccaaagtgctgggatgacaggcgtgcac

SEQ ID NO: 630729 - DNA, 558 bp, Homo sapiens
tgaacacatagttggtgctcaggatttattgaatgaatgtctttggggcaagtgcaaattcaatgtcatggaaattcttgaatgtgatgcttcgtgaagaccttaaaagctgtcctggtgggagtcagaggtccaccatcactcttagaggtagatggcatgggttttggaaacagttaatggtctgagtctggtatataccggttgtgtaaccttgagcctctctcatcctagtttctttgtctctaaaattggtgcaatcttctttatttatttatttatttggagacggagtttcactcttgttgcccaggctggagtacaatggtgccatctcagctcactgcaacctctgcctcccagatacaagcgattctcctgtctcagcctcccaagtagcttggattacaggcatgcgccaccatacctggctaatttttttktgtgtgtttagtaaagacagggtttcgccatgttagtcaggctggttgcaaactcctgacctcaggtgatccacccgcctcggcctcccaaagtgctgggatgacaggcgtgcac

SEQ ID NO: 630730 - DNA, 558 bp, Homo sapiens
tgaacacatagttggtgctcaggatttattgaatgaatgtctttggggcaagtgcaaattcaatgtcatggaaattcttgaatgtgatgcttcgtgaagaccttaaaagctgtcctggtgggagtcagaggtccaccatcactcttagaggtagatggcatgggttttggaaacagttaatggtctgagtctggtatataccggttgtgtaaccttgagcctctctcatcctagtttctttgtctctaaaattggtgcaatcttctttatttatttatttatttggagacggagtttcactcttgttgcccaggctggagtacaatggtgccatctcagctcactgcaacctctgcctcccagatacaagcgattctcctgtctcagcctcccaagtagcttggattacaggcatgcgccaccatacctggctaatttttttttgtgtgtttagtaaagacagggtttygccatgttagtcaggctggttgcaaactcctgacctcaggtgatccacccgcctcggcctcccaaagtgctgggatgacaggcgtgcac

SEQ ID NO: 630731 - DNA, 558 bp, Homo sapiens
tgaacacatagttggtgctcaggatttattgaatgaatgtctttggggcaagtgcaaattcaatgtcatggaaattcttgaatgtgatgcttcgtgaagaccttaaaagctgtcctggtgggagtcagaggtccaccatcactcttagaggtagatggcatgggttttggaaacagttaatggtctgagtctggtatataccggttgtgtaaccttgagcctctctcatcctagtttctttgtctctaaaattggtgcaatcttctttatttatttatttatttggagacggagtttcactcttgttgcccaggctggagtacaatggtgccatctcagctcactgcaacctctgcctcccagatacaagcgattctcctgtctcagcctcccaagtagcttggattacaggcatgcgccaccatacctggctaatttttttttgtgtgtttagtaaagacagggtttcgccatgttagtcaggctggttgcaaactcctgacctcaggtgatccayccgcctcggcctcccaaagtgctgggatgacaggcgtgcac

SEQ ID NO: 630732 - DNA, 624 bp, Homo sapiens
attttggtaaaaggcggtgaaaacttctgttgatgcttctattacgtgaataataagtacagatgctcctcgacctatgatggggttacatcccagataaacccattgtaagttgaaaataccataagttgaaccactgtaagtcagggactgtctgtatttttttttttttccattttcatggtgttttgcaaatctctttatggtgcagttatcttgatttcatagttgctaacttttaaggtgggtattaatatcatgktaataacatgaatggtgaaactaagactcagagcgtagtatggtggtagtgaatgtggagtttttttaggggttcttaggatatgaaacataaggttttgcagtacaccacaaatcccttgtatattttaattttgattttccctttttagctgaatcacagtttaagatatttttttctttttctttttttttttctaaaaagtatttctgggttgtattttctgagacctggctatctgagaatgacttcctgctgccattaaatactttttgggagcattttccttcacagctttgatcacattttgttattgtcttgtagaatatggtattatagataaccttgaagctaacttgatt

SEQ ID NO: 630733 - DNA, 426 bp, Homo sapiens
gctctgtggtggtgttttttttctgtcaactcgttcaactgtgtgggtayggtctggaatagtcagaaagttggctttaagcagctttccgtgttgacaagtaagtactatgaagtaagcaagggcaagggaacgactgtaataacaggcatggagttttaaaagctgggaaaagcgagaagtgagaacatgaaataggtactctggagtgtagtaggaacagtggaggttttggtgaaattgaacaattcgaagtgttggttgggggtactagagaaaaagagctgatggtcagacagtagagtgtttgaaatttaaattagggagtgattgcagttaattggtaatgccagtccggaggatatgatcattgaggtgaatggctgaggtagaatggaagacaagatcattgcggaagaggaattc

SEQ ID NO: 630734 - DNA, 618 bp, Homo sapiens
tttccctcaaatagactgaatacaatggttaggaaatgtgacagaaaactattctgagccatttattgccttaatacccaccttygtccaacaggcagttttgacaacagcgataaattccaaatttatgtcaacagcgcatatgttgaacacctcatttctgagctaaagcggcatgctgccctataaatcaccgttctgtttgaaatgaaggtagattacaggcctgtgttattgagcagttagagctatagtcatataaatcagaacttttaactctaggcaatccgttgtgcaattaactaaagggtactttgtcatttcaaggcttgtgcacagacttggcagggcatagagctactggggaagggggtgggaaggagaaaaagtttttaggcaacaggaaggttgtcggctgcagcccccaccatactccacacaatgccttaatccttaaccaccgctgccacaagaacctgccaagcctgaatataggcaaagacaacctcataatgagcatctgccacaaagacaacatcacactgagcatttgtcaccaagtcacctccagaagcccaagtgccttttcagtcattcattaagcatttcctgagcaca

SEQ ID NO: 630735 - DNA, 581 bp, Homo sapiens
tatgtccattaggccccaatgaaggcactgggagatccgggatattcaggcaagatagtagcctcccaaaatatctggtctctgggcctttatcccgggctcatattagcaaaggcaactgaggaaggaagactccagcaaatccmaagtttcagagagttctgtctttacccggagttaccttgttactgaaaatgactgtggtctttcataattactccaacaaaaatgcagcgcccatgagctccctgtgctcaattagcttataatagtcagtaagagagctgctgaagtttaatccaactaccccagaagactttttatcccaactacctaatgaaaactttagaatttgcttttttttttttccccttgtcccaggcaagtgaaagaattccaatcaaaacgggactggtttgggggaaggaggagggagtgcgttaactactggggaaaagtctggaagacatgtctttgtcaggttgaatcctggagagagccaacaaaaggagcccctgactacagaggtatccgcccctctctcccactggcttccatctacgcggtgaacaagctcagtc

SEQ ID NO: 630736 - DNA, 623 bp, Homo sapiens
ccaacatgcagatgtgcacagagcagtcaggcagcacctttcccacctctgtcctattccctaggggaggaaggagactccatccaggtcccagaaagccccttaytccagtgtggacatttctccattgccttgctacactgttttctccagagaatccatcctattccctctgcccaaaaaaaagggcatggtcaaccttaatgaaataaactgtaatagagtaggcaggtaacttcatctcccttccagaagacacaatctaattcacactctaattgtctcgctggaagcctccgggcctctctccacaagcgggctggaaggatttggaagtgtcatggcctggaactcctcaagtctagtcatataaatacttaattgccactggaacatccacattgtgtcactttggtatacccaaccagtgtgtggccaagttccttctctggtgaggctgagacacgggaagtgccattggtggccttttcatctttctctttccacttccatttctttcccaagacacttccattttggagagctcttcctcctgagagctagggagagggcagcggtatgagtgggaagaccaacggcttctttaactgctgttggctgtg

SEQ ID NO: 630737 - DNA, 623 bp, Homo sapiens
ccaacatgcagatgtgcacagagcagtcaggcagcacctttcccacctctgtcctattccctaggggaggaaggagactccatccaggtcccagaaagccccttactccagtgtggacatttctccattgccttgctacactgttttctccagagaatccatcctattccctctgcccamaaaaaagggcatggtcaaccttaatgaaataaactgtaatagagtaggcaggtaacttcatctcccttccagaagacacaatctaattcacactctaattgtctcgctggaagcctccgggcctctctccacaagcgggctggaaggatttggaagtgtcatggcctggaactcctcaagtctagtcatataaatacttaattgccactggaacatccacattgtgtcactttggtatacccaaccagtgtgtggccaagttccttctctggtgaggctgagacacgggaagtgccattggtggccttttcatctttctctttccacttccatttctttcccaagacacttccattttggagagctcttcctcctgagagctagggagagggcagcggtatgagtgggaagaccaacggcttctttaactgctgttggctgtg

SEQ ID NO: 630738 - DNA, 604 bp, Homo sapiens
tgtgaggtcttggtcatcctggactggcagggaaggtaacccatctcaatcctccagaatgaagaacccgagcctgatcctcaatgagaagagggagcagagaagggaacaagtgaatccctgggccactcaagagaagcaagaaggccaacttctaaaacaagttattttacggcaggcagccagtgyaggtccagactgagttatgtgtcctttgtgttgaacaactactagttatcaggtaagtcataaaggaacattcgtaaaattagattcaccacttgtttttatagcactcattaagggacataaaagacaattcttttcagcgttttggtgctgaattataaattcaattaactggacacagttaacctcatagatccagaaatctttatattaaagaagcaacttccacctataagcaggaaaaaaaaaaaaaagataagctcctctctctggcttccaaatccctccaccccaattgagcagactttctgccatcatcactcacgtctgccttttctccttcacttgtgccttcttctctgctttaggaaaaaaaataatttcaaaatcaagaaaaaacaaacaaacaaacaaa

SEQ ID NO: 630739 - DNA, 593 bp, Homo sapiens
tacacttcctgattccccctctctcaaagagcccctaaaaataagaaagacaagccgtagtgtttattccatcaccttcaggcttctttcttaacttatattttgggggttgggggagctgtgactttcaggctagtccaagaggccactgagaattaaacagcatggatgatactttctgttcattcaggttaaagtaattgtgggcttggagtcttcgggcaaaagtcattgagaggagtgaatttgaagaactttctaaatgtccccatttgaacccagatggmagttctgtgaagttttcagcgcctcaaggatcagcatgaaagaccctgtgattcaaaagatgcttccaccaagcacgattccacaccacccctcacccaagactcacttgtttcattagtgtattctctgcaggcgacagcagagccaagctggatggtcactgcatgatcatggacactctgtaacatgggtctcctcttgccacgtacccatcctttattcctcctttgttcttccagactccaaaagctcttgggccatacatttcactcatcctattcccctttcctttctcttcctgagtc

SEQ ID NO: 630740 - DNA, 405 bp, Homo sapiens
gaattccagagctggtagcgttgatttcagagtattctcaatctaaaaaccctgtaatcatgacctattcccaaaggtgagttcatggcagcttattcaacagatatttattgagtacctgacaagtgttttgctttgagtgaggcactgtagggcaagtaggagtaagtaaagatctttgcccttctgaagctgttctccagtttgggatttagaaaatttgttcaggaagagggcttaaaaaatagagacattctgtaaatgacctttctttgaaatcccttattctactttgactactgctgtctattcctcttcctaaatgaagctrgtggaggctttttcaaaatcaattctatggaggttattggggcagatataagttagtcatctaatcatccagtt

SEQ ID NO: 630741 - DNA, 541 bp, Homo sapiens
gttgatttgcatagagtcctacagatcattctatgctatatgtttttyttttttttttttttttgaggcagggtctcgctctgtcacccaggctagagtgcagtggtacaatcttggctcactgcaacctctgcctgccaggctcaagcgatcctcctatgtcagcctcccgagtagctgggactgcaaggtgtgcactaccatgcccagctaatttttgtatattttttgtagagacagggtttcgccatgttgcccaggctggtctcgaactcctgagttcaagtgatcctcccgcctcggcctcccaaagtgctgggattacaggtgtgagccactgtgcctggcccaggtcgttccatgctgatgggctacaggggcacagaaataaagatctcagggcactcattattttctttcttcctttcttcttttgttaagagggaggtaggagagggttgtgtaaggatggaatattgctgcaaacctgtatacttctttaatttctctaccctcgcctgagacactggagccttttact

SEQ ID NO: 630742 - DNA, 541 bp, Homo sapiens
gttgatttgcatagagtcctacagatcattctatgctatatgtttttcytttttttttttttttgaggcagggtctcgctctgtcacccaggctagagtgcagtggtacaatcttggctcactgcaacctctgcctgccaggctcaagcgatcctcctatgtcagcctcccgagtagctgggactgcaaggtgtgcactaccatgcccagctaatttttgtatattttttgtagagacagggtttcgccatgttgcccaggctggtctcgaactcctgagttcaagtgatcctcccgcctcggcctcccaaagtgctgggattacaggtgtgagccactgtgcctggcccaggtcgttccatgctgatgggctacaggggcacagaaataaagatctcagggcactcattattttctttcttcctttcttcttttgttaagagggaggtaggagagggttgtgtaaggatggaatattgctgcaaacctgtatacttctttaatttctctaccctcgcctgagacactggagccttttact

SEQ ID NO: 630743 - DNA, 552 bp, Homo sapiens
actccctatgctacttttatcctttctgccttcaaagtagcaatgaccataagactgaagagaagaacatggtyaggtcccagttttctacacacgttcaccctgggataaaacagaaaatctaaaactctgcataatccaaatgcaccattgtagaaaagatccttgtgttgtcagacaggtgcctaatttggtttctactcccttccctattcacctttggtaaatgagctcaaactgggcaccctggccaaaatgctggtctgcgaggaaggagggaggatgagaagagagaagaaactgatgtggataacccacacattcattcagcccacacgtgaaaaagaatagtttgttagatttctctttgattccccaggctccaaacccacacgctagggtcagggagggttgttcagtgcaccactgatgccaccacaagcccccacacctctgtttgaaatagaaggcccaacattgtttgctccagccaagcctccctctgctctgtggctgagttcatgaaaggaatccaggatgggttaaacgtta

SEQ ID NO: 630744 - DNA, 578 bp, Homo sapiens
aggccagtacagcactcagggagacagcctagaaatggaagggcttttggaggagggaagctcttgaacagagcagacagggtaggggtgtgggagcgttgatgaaggaaggccaagataaggctgtggtttccatttgttaccacctctcccgcttatcttgagtgagaacaggccctacagctctgagcgaacctttccatggggctgttgagctgtgaagaggacatatacgagctctcctatcctctcttcccagtgcaccctttcccttgcacacacaggcacctgtaaaggctgcagctttggtctattggatgggtggggacaaatgcagaagtgtccctgttctgggtgctgattacttcctagcagagctggggggtggactggcacatttgtccttcatgatctgagtcttacctctgctggccttgtgctcagactggctggtgggccatcttctgccttgtcccacccttactagrttgataaattgctgttccagtcaacagggctctgacccagcccttatctttggtcagaaggaggctgggtgacaaggacagggggagggg

SEQ ID NO: 630745 - DNA, 578 bp, Homo sapiens
aggccagtacagcactcagggagacagcctagaaatggaagggcttttggaggagggaagctcttgaacagagcagacagggtaggggtgtgggagcgttgatgaaggaaggccaagataaggctgtggtttccatttgttaccacctctcccgcttatcttgagtgagaacaggccctacagctctgagcgaacctttccatggggctgttgagctgtgaagaggacatatacgagctctcctatcctctcttcccagtgcaccctttcccttgcacacacaggcacctgtaaaggctgcagctttggtctattggatgggtggggacaaatgcagaagtgtccctgttctgggtgctgattacttcctagcagagctggggggtggactggcacatttgtccttcatgatctgagtcttacctctgctggccttgtgctcagactggctggtgggccatcttctgccttgtcccacccttactagaytgataaattgctgttccagtcaacagggctctgacccagcccttatctttggtcagaaggaggctgggtgacaaggacagggggagggg

SEQ ID NO: 630746 - DNA, 623 bp, Homo sapiens
atgcttggttctgtcgcattgtctggagggaatacaagcaccctgattccttccaaagaagaggagctcagggccctgggtcctgccccaytggggctttacatttcctgaaacccctcttccactttccctgtcccacactgatcctagaatgagcactccatttgggatgggtggccgctctccctctacaccctcctccagtggcttggcacttcgggaccagctgctggagtgattgacataaagccaatctataaataaagtctttttcttttctcataaagactttgtggttgagtttgccttcaaggtcaagatcagacctttctaaataaacacatatcaaaggatcattagcaaagcagcactgttaaattgagatattaacttctgtcaactgcttgtttcttttttgttctgtaactcatgactgcagtaggtttttattattttgtcctcaggcagtagcatctggcttctgtagagactgtaaaaattaaaaagcaacacaaatcattgcgagagaaaagcagtaaattcaatgataagaatttaaaattaaaatgtttcggtgcttttatattctgcaaaacatgaaatgagtgagtttgttgcctgtt

SEQ ID NO: 630747 - DNA, 623 bp, Homo sapiens
atgcttggttctgtcgcattgtctggagggaatacaagcaccctgattccttccaaagaagaggagctcagggccctgggtcctgccccactggggctttacatttcctgaaacccctcttccactttccctgtcccacactgatcctagaatgagcactccatttgggatgggtggccgctctccctctacaccctcctccagtggcttggcacttcgggaccagctgctggagtgattgacataaagccaatctataaataaagtctttttcttttctcataaagactttgtggttgagtttgccttcaaggtcaagatcagacctttctaaataaacacatatcaaaggatcattagcaaagcagcactgttaaattgagatattaacttctgtcaactgcttgtttcttttttgttcwgtaactcatgactgcagtaggtttttattattttgtcctcaggcagtagcatctggcttctgtagagactgtaaaaattaaaaagcaacacaaatcattgcgagagaaaagcagtaaattcaatgataagaatttaaaattaaaatgtttcggtgcttttatattctgcaaaacatgaaatgagtgagtttgttgcctgtt

SEQ ID NO: 630748 - DNA, 609 bp, Homo sapiens
aacaactgcaactgaatgactcaggaagagraaggaaaggggaataggatgagtgaaatgtatggcccaagagcttttggagtctggaagaacaaaggaggaataaaggatgggtacgtggcaagaggagacccatgttacagagtgtccatgatcatgcagtgaccatccagcttggctctgctgtcgcctgcagagaatacactaatgaaacaagtgagtcttgggtgaggggtggtgtggaatcgtgcttggtggaagcatcttttgaatcacagggtctttcatgctgatccttgaggcgctgaaaacttcacagaactgccatctgggttcaaatggggacatttagaaagttcttcaaattcactcctctcaatgacttttgcccgaagactccaagcccacaattactttaacctgaatgaacagaaagtatcatccatgctgtttaattctcagtggcctcttggactagcctgaaagtcacagctcccccaacccccaaaatataagttaagaaagaagcctgaaggtgatggaataaacactacggcttgtctttcttatttttaggggctctttgagagagggggaatcaggaagtgt

SEQ ID NO: 630749 - DNA, 502 bp, Homo sapiens
tttcattagacaattttgtcttaaatagggcacagcgagccaaaagagccctgcccatgacaaggcagtgagctaaatgatcctgasccttttagcccacggacaacactcagtcaatgtgcaggcagctggggagtcgtggaaagagcacgtgagttggggtcaagttccagctctccacttccctagtgggtagcttctaggctacatcctagagcacacttacataagcctagatggtacggccttctacacacctaggctatatgggacagccaattgttcctagacttcaaacctttacagcatgctactgtactaaacactgcaggcaattataacacagtggtaagtatttacatatctaaacacatctaaatgtagaaaaggcacagtaaaaatacggtattataatcttatgagaccactgtcatatatgcaatccattgttgaccaaaatgttattattatatggtgtaatatagtttggatatttgtcctg

SEQ ID NO: 630750 - DNA, 502 bp, Homo sapiens
tttcattagacaattttgtcttaaatagggcacagcgagccaaaagagccctgcccatgacaaggcagtgagctaaatgatcctgagccttttagcccacggacaacactcagtcaatgtgcaggcagctggggagtcgtggaaagagcacgtgagttggggtcaagttccagctctccacttccctagtgggtagcttctaggctacatcctagagcacacttacataagcctagatggtacggccttctacacacctaggctatatgggacagcyaattgttcctagacttcaaacctttacagcatgctactgtactaaacactgcaggcaattataacacagtggtaagtatttacatatctaaacacatctaaatgtagaaaaggcacagtaaaaatacggtattataatcttatgagaccactgtcatatatgcaatccattgttgaccaaaatgttattattatatggtgtaatatagtttggatatttgtcctg

SEQ ID NO: 630751 - DNA, 528 bp, Homo sapiens
gactgctgctgcacaatggtctcgcctggggtgaccataagaagcagcggtaagggaaatgttctcccagtggatagagctttgggtagtatacttgacaatccactttgtagagagaaacagcccaagagaaggctatacacaaactcacaggcagtagccaatggtttggttggtttatcagagctctggaatgagcagtataggaagattggagacaagaaattctcgggaagataaatgcagagtgacttatwggagtggatacaaagtataataatctttgtatcatatgtccagaagatatctcctgtggaagaccacaaaacaacaaacagacaagatgatatagagaagatatcaatcagaccctgttcttggccctccttgtattagcaccataggttcctgaagaaagtagataaagttctagagaagaaagccctacatgggcctaacagcatgggcttcttctcactaaagctgatttaactactgtggctgctgagaatctgacctgccagccac

SEQ ID NO: 630752 - DNA, 476 bp, Homo sapiens
ctacatgggcctaacagcatgggcttcttctcactaaagctgatttaactactgtggctgctgagaatctgacctgccagccacagagaccaatgctggattgcttgatacaatataaaaccctgaggatatccactagtcatttggaggcaactttgattaatttaacccattctaccttagggagaaaaaccatttcattctgactgggattgacacacatttcaggcatggatttaccttcctgcctgcagtgcctcagcttagtgccactggctgaggtctcacaaaatgtcagattttcttgtattggaggccatatcacattgtccaggaccaagagataatttcacagcaaagggttatggcagtagacacayggccagaaaatctgttggtccttccacttaccacactatccaaaactctccagtgtgccaagtggaaggcacagctgagacatcttcttagggtga

SEQ ID NO: 630753 - DNA, 557 bp, Homo sapiens
ttctacaaaaatttattaacggtccacagtgaataggtgttgtgctaggtgatgaggatggagcgatgaaggatgaacagactcagtctctgccattgtggaactttagtgcttctagaatgccttcaatcaatgcattatgcgctcacttctctagaaactcaacaatgctttcttccatggaatcattgcctgacttctaaagaaaaggttaggctttcctgggactgagtacctctacttgtaccatctatcatagtgtcttgtaatgatcaattcatttctcttccctttrggtataagctaaaaaaaaaagaagaggaaaaaatgttttaaatttttccccaatactccaacagggccagtgaaaggaggcatggaataagtattttttaagaaaatgagcaaattatcaactggcattaagcctggcactcaccgcagtaaaatgcacatatttcaccatcaataaccaaagcctatggtgtagtgtcctgttactttaaagataatttccaaaaaagatatgttttaccacaaagagaaatgctattaga

SEQ ID NO: 630754 - DNA, 557 bp, Homo sapiens
ttctacaaaaatttattaacggtccacagtgaataggtgttgtgctaggtgatgaggatggagcgatgaaggatgaacagactcagtctctgccattgtggaactttagtgcttctagaatgccttcaatcaatgcattatgcgctcacttctctagaaactcaacaatgctttcttccatggaatcattgcctgacttctaaagaaaaggttaggctttcctgggactgagtacctctacttgtaccatctatcatagtgtcttgtaatgatcaattcatttctcttccctttargtataagctaaaaaaaaaagaagaggaaaaaatgttttaaatttttccccaatactccaacagggccagtgaaaggaggcatggaataagtattttttaagaaaatgagcaaattatcaactggcattaagcctggcactcaccgcagtaaaatgcacatatttcaccatcaataaccaaagcctatggtgtagtgtcctgttactttaaagataatttccaaaaaagatatgttttaccacaaagagaaatgctattaga

SEQ ID NO: 630755 - DNA, 623 bp, Homo sapiens
caagtcaaacttcttagaaaggaagttgcaatctctataaaagtaagtcaaagccatctaaagaggaagaaaaaaaaaaagcaagagaagacagaattcagtgtaaacagagaagggctccttttaaattctatttacttctagctaacagcaaaagattttaaatgcacaaaacagatggatgaatgcttkgcccattgacagatgcaagtcctagctcttgagaatgcccccagatgtagaattccttaaaaacaacaacaaaaacaacaacaaaaacaggtttgctgcattttattgattgtcaaatgccttgggcccaattcaattccaaaaacattgaataaggacacactaagtgccagaagttagatgctaggcatccaaaaataaataaacagagaaaaatgagtttatgacttgaaagggaaataacagattaatataccactaaatataatgcaagtggagatgccacaaaatcaatgtgaaatacaatggaagtatgaaataataatttactgcttggcgcatgagggactcttcactgaaaaagcaacatttgctttggcctggagcactgattaggggtaggcaaggcaaaggagagagggatatccaca

SEQ ID NO: 630756 - DNA, 545 bp, Homo sapiens
ccactgaacaactcccccatttcccttccactggcccatggcaaccactattctagtctytgcttctatgaatttgactattttagatacttcttacaagtggaaacatgcaatatttgttcttctatgactggcttatttcactaagtagaatattttccaggttcattcatgttgtcacatataacaggattttcttcttttttaacggctgaataatatctactgtatgtacataccacactttattcatccatcaatggacatttaggttgcttatatatcttgactattgtgaatcatgcttcaatgaacatgagagtatagatatgtttttcacatcctgttttcaattttttggatatttactcagaagtgggattgctcgatcctatgatagttctgtttttaattttttgatgaaactccacagtttttcaaagtgactctaccattttacgtttcctccaacagtgtacaagagatccaatttatccacacatttgccaacacttgttatattttgtatttttgatagctgccat

SEQ ID NO: 630757 - DNA, 494 bp, Homo sapiens
ttctgtaattgcctttttccactgatttgtaacatcacctctaccttatagaaaattcttctacaaattgtacctgtttctggcctctactatgttctattggtctatgtatttgcagcttcaccagtaacttgctggtttagttattatgattttgtaatatttcttagtatttggtaggccaagtctacccttcttgatcttcttgctttatcaaaacatttctttagtatacagggactttatttctccatataaactttagaataagtttatcatactccctcaaaaaaggcttcttcattttcaccataatattttttaaattcccatgagttttgtggataatttrttactaggtatttttatagattttcctcaattttaattggtatctattttatattacatttttagttggttattgttaattggtatagaaaatgctactgttaatcttgccaggaactttgctaaaatcttttattagtcta

SEQ ID NO: 630758 - DNA, 553 bp, Homo sapiens
taaaaggaatgaggtttgttatgctataatatttaggtaacttaaagataaaagtatatgagtttgcaagaaaaaaaatttttaaggaagcaaatggatgtggtccttgatttcttggcatatccagcttttgaagtttaatttctaaaaatgcatatggaaatattacataaactttccttaatagatgtgtaacttttttaatcagatgtgtttttaatgtgtaaaaactattaatgtttctaaaaatctaaatgcattaaaagtttaagtgaagtatatgggagaagcccatcttttttaaaacagcagaaaattatggtgtgaattatattaataattattaccatgtttgtttattaatttttttggatctagaatttattaatacaaaacacatkgacattacctgaataacagagggaatgaccgttcattcaatgaagctcttcatgtcctctcaaagattttatcttatgcctcatttttcttggaggattatcgagggatgatgaagttacagggaacaaaataaaggtgagctgtaatgggc

SEQ ID NO: 630759 - DNA, 553 bp, Homo sapiens
taaaaggaatgaggtttgttatgctataatatttaggtaacttaaagataaaagtatatgagtttgcaagaaaaaaaatttttaaggaagcaaatggatgtggtccttgatttcttggcatatccagcttttgaagtttaatttctaaaaatgcatatggaaatattacataaactttccttaatagatgtgtaacttttttaatcagatgtgtttttaatgtgtaaaaactattaatgtttctaaaaatctaaatgcattaaaagtttaagtgaagtatatgggagaagcccatcttttttaaaacagcagaaaattatggtgtgaattatattaataattattaccatgtttgtttattaatttttttggatctagaatttattaatacaaaacacatggacattacctgaataacagagggaatgaccgttcattcaatgaagctcttcatgtcctctcaaagattttatcttatgcctcatttttcttggaggattatcgagggatgatgaagttacagggaacmaaataaaggtgagctgtaatgggc

SEQ ID NO: 630760 - DNA, 609 bp, Homo sapiens
gtatcaataacaaacccaccttccttcaacacactttaccttaatgtctagccttctcatcccaggccagaggatctttattttctttttcttcattcacttaaatttagtttcgtcactgatatgccacagaaactgcttttgctaagctcacagctcacaagctgcctccatatctctaaatccagtggatagagtctttctcttgctgggcatctcccttcttcagaaatccttgttaacacggttacattgatcyctatctattgggtttccttttatttctctgttctctccttcttacaagatctttttaggctcatctgccttcatctggctattcaaaatttctcaagactcaaatctgggtttttaaaatcattcactagacttatgctcacagctttaatttccatgtatatgctgatatctctcaaatggacatcatctgccccagagtttctcaaccttgacacttggagctagatgattctttgttttggggggctatcccatgcattgtaggatgtttagcaacatccctggcctctacctactagacacaagtaacaactgctccctcctccagttgagattaccaaaatgtct

SEQ ID NO: 630761 - DNA, 526 bp, Homo sapiens
cttgtttttattaatgtcatcactattctttccttccaagctcgaaattcttggaaatcattagaaattaaaaaactcttggctctttcctttctatgttcccctctaactgctctgtgcaagttttattatttttctccttaaaaaaaaatcttccaaattttcactttcttggtactgacccttgccacttcaaacttgaatatcaatagccttctcactactttccctggctccagtctctcccctccccttctaatacagctataaaccccaagatatcttgctgaaattctctccattattttaaagttccatgttcttattcattcctctactcaataaccaaagsatggatcctgaatttttctttgtttagattcttcagcttgattttttatagttgttcctaatttgatacctccctatcagaacctattactaacccccacccaaatatgtcctctgctactgacatactgatttgttcaccaatatcttgtctggatatttgcacttgttgttc

SEQ ID NO: 630762 - DNA, 415 bp, Homo sapiens
ttttatgaacagaaaaacctatgtccttctttcaccttcttgcagtgatgggttgtttttttctaatctcattgcagtgaagatttaaatgcctttatttaaaaaatttactttcttgttgcaaagtttgggactgttctcttgaacttgcttctggaatccattttttttctttataaaygagaaataaggaaccaaagtatcattggaagccaattactcttggggtcaatgtcttccgaacaaatatgatctcaggagaatgagcctatctcagaatagaaggcgaagattctgattaggctcccagattcattttctatggggtgagttttaatatttgaaggtgagaaaggtgaactcaagctgagcacagtgtatgaaaaaagactacttttgctaagcaaattacctt

SEQ ID NO: 630763 - DNA, 380 bp, Homo sapiens
ctttagtttaaacactctcccgtagagatgaattctgcaatacttttcctaggatcatggttaatattcgttctccaacatttgtaaaggaactcaaataattttgcaaatatcatcccatttactgcattttttttttttkgcaaaagaaatacttttgcggggctcttttactgattttggatgtaagtgcacaactttcatcttcagacttaaataacttttatcccggacttaacatgtgccagacactgtgctggttttgcagttgcagctttcattccgtttctcagcaactttgtgaagtagatattagaattcccattttacagataagataattaaggctcagaaaagttatgcagcttttcaaagacatc

SEQ ID NO: 630764 - DNA, 531 bp, Homo sapiens
tcgttctccaacatttgtaaaggaactcaaataattttgcaaatatcatcccatttactgcattttttttttttggcaaaagaaatacttttgckgggctcttttactgattttggatgtaagtgcacaactttcatcttcagacttaaataacttttatcccggacttaacatgtgccagacactgtgctggttttgcagttgcagctttcattccgtttctcagcaactttgtgaagtagatattagaattcccattttacagataagataattaaggctcagaaaagttatgcagcttttcaaagacatctcttaagaatcaggttctgttttttgtttttttttttttaaggaatttactgtatttcaaatgcaatacaacaaaacattccattatgggaaagatcacagctctgatggtctttacacttattttataatttagtattttaaaaaaatcttgagttgcatgtggagagacaccataatatttcagtgcattttagaaacagttggttattttagttt

SEQ ID NO: 630765 - DNA, 570 bp, Homo sapiens
atgtttcaccagttctcaacctaactatagtgcgtttactcagggtgtgaaaacctttgtgaaactacgaaaaacaataccttgaggatgtgtaactcctgagagaggtgacagctgtcatctgggggacaaactatctatgtatcaatttatcttagaattagagcttaaaagtgaggtggttgtcagaggaataaaagtattctagtttatttaaattgaaaaatggacccagactgcttttggagacagtaagcctgatttgtctatttagattgacagttagaactggatttgcctgatagattgtatgaagacmtcctatacaaattgaatgagttaaatctgttgatccaaagttttgacaaaatatattttaaaaacatataggatacagaatatgccagaccgggaaactcatttattaaacaaatatccagagtgttcctactgtgtgccacaaattgtgtcaagtgcttgctacaccagggatcaaggaaaagtctctgcaattgggaacttacattctagttacacacatgatcacattctgattatctggccagacga

SEQ ID NO: 630766 - DNA, 552 bp, Homo sapiens
agaaaacaaatgaagaaatgtgaatatggctttaaaataacctgggagttattaaccacaaagtatgactgactaggaagaaacacatgggacagcttagatttcttccagctcaatatgttgccttttttctacatcaattgctatcaactatgctttttattactgtaacaggacatacagagagtaaagccagagtgtttctgaggaagacaaaaacaacaataaagtaggattactggcatgttgaacaggcacatctgacgtaatcaagtgaaactttttttgattcactgtcccttcagatactgtacataattttttttcagctkctaggttaaaaaaatgataggtttgatgactttttgaatcacttttagttaaaagacaatcctacaaccttttaaatcataaacacaatatcaatctggtagagcatttagtctaagacactcataaaaattcaaaatttattctcttttcccaaagcttggggttattttagacagaaagcctggagcatgaaaaggagtaatatctagcttcttgtct

SEQ ID NO: 630767 - DNA, 552 bp, Homo sapiens
agaaaacaaatgaagaaatgtgaatatggctttaaaataacctgggagttattaaccacaaagtatgactgactaggaagaaacacatgggacagcttagatttcttccagctcaatatgttgccttttttctacatcaattgctatcaactatgctttttattactgtaacaggacatacagagagtaaagccagagtgtttctgaggaagacaaaaacaacaataaagtaggattactggcatgttgaacaggcacatctgacgtaatcaagtgaaactttttttgattcactgtcccttcagatactgtacataattttttttcagctgctaggttaaaaaaatgataggtttgatgactttttgaatcacttttagttaaaagacaatcctacaaccttttaaatcataaacacaatatcaatctggtagagcatttagtctaagacactcataaaaattcaaaatttattctcttttcccaaagcttggggttattttagacagaaagcctggascatgaaaaggagtaatatctagcttcttgtct

SEQ ID NO: 630768 - DNA, 501 bp, Homo sapiens
gttgaacaatgagaacacatggacacagggagaggaacatcacacactggggcctgtttgggggtttggggatagaggagggatagcattaggaaaaacacctaatgtagatgatgggttgatgggtgcagcaaaccaccatggcaagtscatacctacgtaacaaacctgcatgttctgtacatgtatcccaaaacttaaagtataataataattaaaagactgtcaatatgaagtattggtggggacgtagagcaatagaaactcttacatactgctactggaggcataaattgttataacctctttggaaactgaagcaacagcttgggattatctgctaaggcttatgtgtacacacatgacccagcaattatgctcttagatgtgcattcagaggaaacacgtgtgcacgtgtttagcagtcaagttaatggctgcctttcagggacagtgatggagaggaggcaccagagggatttgaggtgttgataatgttgt

SEQ ID NO: 630769 - DNA, 541 bp, Homo sapiens
tgggggttatttattaccacactaccaccttgcctatcttattttgtaaatttaaaaactcaaaaaaggagaaacataggcaaaaattattattctaagaaccaaaaaagatcaattccacctttaattatattacattttgttaaccatttttgttgcacctttaattatctttttccacaatgataagcaataaagactgttgcactaaaaatgacctatggccatgtcttcaaaagagaagaaaaggagggagttgaggagtctgcctcacatarcaggcatacttccaaaaagagagacctcaagaggcaaagtgaaaggtggtagaaagtggatcatagacctggtgtccggcactttagagaaaaaaatacatatatggtaattttttcccagaaaaagagaaagaaggggtaagtcacagttttacggatataataaatgaggaagagctttccaggcagagaaaatagacatgaagtggagcaacaatatgggttcactgggagactctactaaacatttaaggcagagatta

SEQ ID NO: 630770 - DNA, 572 bp, Homo sapiens
attatttactagcctacaaacttaaacaaaacactatgttcattgttgcatttattcacagaaaaccaggtagctaaagttgatgaattaagaataaactgttagtgagccagagaacrtgaaaagggatcatagtgaacagtgattaggcttatgtggtatgtatcttgcatgcctctttctgtctctatttacttataccccaccaagttagatcacataatcaaagatttatagaagggagaattcacaaggagggaggcatcagagaatgaacccttaacaatatgtgaacaagtgataaagagagtctccaaactttgagggggaagttctcattttctttagtttgtgagattatctgtagatatataatgggttaaataaacaggcctttgtgagtagaatatgacaatattgacaatattgacttttacctaagccctgtgcttctggaaatcagtgatagccaataaatcccaccccaccccctcaacacttttgtgtctcagaaaatagtttattgcagagaatttctctttcctgatgacttagataagactcacagatgc

SEQ ID NO: 630771 - DNA, 491 bp, Homo sapiens
attcaattggttattagctcttcaattccttggagtgccaktccaggagacaggattgctcaattattactcctgccatatattaagggtggaaatagtgaaataaaaagaataggagggcttgtaagcactgatccaacaggaaaggctgcatattgggcaagtcaggtctcagagaacagacctgtgtgtaaggccattattcaaggaaaacagtttgaagggttggtagacactggagcagatgtctctatcattgctttaaatcagtggccaaaaaattggcctaaacaaaaggctgttacaggacttgtcggcgtaggcacagcctcagaagtgtatcaaagtactgagattttacattgcttagggccagataatcaagaaagtactgttcagccaatgattacttcaattcctcttaatctgtggggtcgagatttattacaacaatggggtgcggaaatcaccatgcccgctccattatatag

SEQ ID NO: 630772 - DNA, 491 bp, Homo sapiens
attcaattggttattagctcttcaattccttggagtgccattccaggagacaggattgctcaattattactcctgccatatattaagggtggaaatagtgaaataaaaagaataggagggcttgtaagcactgatccaacaggaaaggctgcatattgggcaagtcaggtctcagagaacagacctgtgtgtaaggccattattcaaggaaaacagtttgaagggttggtagacactggagcagatgtctctatcattgctttaaatcagtggccaaaaaattggcctaaacaaaaggctgttacaggacttgtcggcrtaggcacagcctcagaagtgtatcaaagtactgagattttacattgcttagggccagataatcaagaaagtactgttcagccaatgattacttcaattcctcttaatctgtggggtcgagatttattacaacaatggggtgcggaaatcaccatgcccgctccattatatag

SEQ ID NO: 630773 - DNA, 445 bp, Homo sapiens
aatattgtgtgtatgttaaattttgctaatttgatgggtgataagtggtatcttatatattcaatttataagtgtagataactgataaaaatattaactatataattatttatatatatagagacatctgtccatatctgttttatctcacgtgaaacatctgttcacatctgaatccacttgtattttgaggtaccaagttcaagatggagaggctcagcaacattcatggagaatctgttttactcactaattttaccacccttttcatacatktaagttctctatatacttaggtgtaattcttagttacatatgtagcctagtaatatctgattaaattacattatacttaaatgtattttaacatttgataatgcaatttgcctattattactctttctatcagaaagttcattagcttacttgatcatttaccacctta

SEQ ID NO: 630774 - DNA, 581 bp, Homo sapiens
caggggatgatgaaatggtgagatgctcagatgagatggggaggaggcagatggcagatgcacagatgtaataattgcctttttttttttttaagacaggatcttactctatcgctcaggctggagtgcagtggcatgatcctagctcactgtaacctcaaactcctgggttcaagtggtcccttcaacctcagccttccgagtagctgggattacaggtgtgccccaccatgcccagctatattttaattttttgtagaaatggggtctcactatgttgcccaggctggtcttgaactcctggcctcaaacartcctcacaccttggcctaccaaaatgctcagattatagtgcagtaattgttgatgttccagttcttctctgaaacagcagattcatagtattcatgatgttaataaataagcacatgaatacctaaagaaatgaagtttcttttctgaaagatacgaagatgtgtaagatactatgaaagttatactcttgtaaagaatataagcaatatgcatagtggaattcttaagttgaagcacaaaaataatttacagaatttagagtttac

SEQ ID NO: 630775 - DNA, 581 bp, Homo sapiens
caggggatgatgaaatggtgagatgctcagatgagatggggaggaggcagatggcagatgcacagatgtaataattgcctttttttttttttaagacaggatcttactctatcgctcaggctggagtgcagtggcatgatcctagctcactgtaacctcaaactcctgggttcaagtggtcccttcaacctcagccttccgagtagctgggattacaggtgtgccccaccatgcccagctatattttaattttttgtagaaatggggtctcactatgttgcccaggctggtcttgaactcctggcctcaaacaatcctcacaccttggcctaccaaartgctcagattatagtgcagtaattgttgatgttccagttcttctctgaaacagcagattcatagtattcatgatgttaataaataagcacatgaatacctaaagaaatgaagtttcttttctgaaagatacgaagatgtgtaagatactatgaaagttatactcttgtaaagaatataagcaatatgcatagtggaattcttaagttgaagcacaaaaataatttacagaatttagagtttac

SEQ ID NO: 630776 - DNA, 533 bp, Homo sapiens
tttaacttgatagtttctcaaaatcttaacaatgattttaaatactaaatatataaatttatattttttcaagtttataagagtgattttctgcctttcttctctggaaaaaaatttagatagagctaaatttatacgccattttttccctatgttctccaaaaaagggccgttttctactgttgtaagcttagtggttactttataaatgtttattcacaaataagagattgttatgaaaagtacaaatgacttttgagccaattttctagccaaatgttcttatttacaaatmaggaaattaaagtggagaggttaagagacttgtgcagaagtccatagctagttagcaactgagtattataatttagatcacaagacccccatcctgtgttctttctactctgccgcaatgcagatcaaatctaaaactctaacaataccacagcatgatcacggtcctattactctttcagtattggtagacgattaaatgaaaagtttgattaggggactcagagaaaaaactactc

SEQ ID NO: 630777 - DNA, 378 bp, Homo sapiens
tcactggagcgctgagtaatatagtactcggtattcacaatggctccatgaaagaaactctcaaagtgggagtggattgctcatataattaaggagcagggaaaatcttcctgattgggagaaataaggcacaagtaagacatgttatgtggtgataccaagcttacttcagtggtccttggtgttggcatgggttggwgggcaagtcattggctgtcagttgtctgtagaatttagtcactaagtcaacaaatatgactacaatgattgtggagttagttatccggtgccctagttttattagtgtcagtgtatacatcaccatttgtggtttctctactccctaatgatgtcttagaaaattatttatttattgga

SEQ ID NO: 630778 - DNA, 575 bp, Homo sapiens
ctctctgtccaaagtaataatgtctatgcttaagtctcataataattctcatcactttttgatattgatttgatctttgcatcttaataagacccttattagcttttcaaatatatatgaaaggtgtatatcatgtcatactatttcaatttttaatatttaatttttcactgttygaatgaaaacttaatagtatcaaatggcaaacaaaatatttttaaatagtttcctttaaaaagccatcatcttctctgtttaggatggaacattcaaactcttcttcattgttattgcatagtttcggagataactcttaattgtattaatagcactgaacagcactcagtgatttgtggagctttctaccaagatacttggtgaccaaatgtggccaaagaacaatatgatgaatttctaaagaacttagtgctactttaaaaaagttgactatacatgcacattgctaaatgttgatgacattccaaggttttctaatgtaaaggcattagaaaaagatttttttctctgaagcaattatagtggtttcaagcatctaatttttgatgactcttttg

SEQ ID NO: 630779 - DNA, 556 bp, Homo sapiens
taaggttactaaaaacaccagataaaatgaataatagggttgtaaatttcacttactgtgttttctgatctagaagtgctagttagctctctgtctaaaaagtgagccgttagctcacttttgggactgggtgcattggctgatgcccataatcccaacatttgtgaggccaaggtgggaagattgcttgagcccaggagttcgagaccaggctgggcaacttagtcagaccctgagtgtctatasaaaatttaaaaaattagttgggcatggtggtgcgtgcctgtagtccgacttacttgggaggctgaagtgaggattgcttgaatgcaggagctcaaggtttcagtgaactatgatcatgccactgcactccagcatgggtgacagagtgagactctgtctcaaaaagaattgtcacattactttttgtagtttttagtttctttcagatattttaaagattttaaaaatttcttttatcataattatttcatattatgtgtgataatttcaatataagaagtctttatgactccatttcagttgtgtctga

SEQ ID NO: 630780 - DNA, 577 bp, Homo sapiens
cagctatatcttcatatagacaaatgccctctgtaccaaagcagttttgcaagttgttctcactttattgggctcccccattttcctagattttggtctggtaattttcagccaaattataatttatatatatatatayacacacacacacacacacacacacatatgtatatctcatacaatacgcatataatatagagttttagctgtcctcattaggagaattggtctgtcttatctggtccagcatatgagaagtagaggtccttcccagcactgaaagcagagcagtggttgctagagcctgaggttggaatgaggattaacttcagatggctatgagaaaatgttttaaggtgatacatatgttctaaaactacatcctgatcatggttgcacaataatataaatttactaaaatgcaatcatctgtatccttaatatgaggaagttttacggcatatgaattataccacactaaagctgtagaagaaatgcagaggagatgatgaaaagagtgagagaaatctcggctagactgagagggagtatgaaagtacagagagcttatactctc

SEQ ID NO: 630781 - DNA, 577 bp, Homo sapiens
cagctatatcttcatatagacaaatgccctctgtaccaaagcagttttgcaagttgttctcactttattgggctcccccattttcctagattttggtctggtaattttcagccaaattataatttatatatatatatacacacacacacacacacacacacacatatgtatatctcatacaatacgcatataatatagagttttagctgtcctcattaggagaattggtctgtcttatctggtccagcatatgagaagtagaggtccttcccagcactgaaagcagagcagtggttgctagagcctgaggttggaatgaggattaacttcagatggctatgagaaaatgttttaaggtgatacawatgttctaaaactacatcctgatcatggttgcacaataatataaatttactaaaatgcaatcatctgtatccttaatatgaggaagttttacggcatatgaattataccacactaaagctgtagaagaaatgcagaggagatgatgaaaagagtgagagaaatctcggctagactgagagggagtatgaaagtacagagagcttatactctc

SEQ ID NO: 630782 - DNA, 576 bp, Homo sapiens
aagcctccaccgatcctgggccctgtcatctcttgcctggatggtggcagtacctcttgacaactctccctgactctccccttaccagcctgaagtctatcctccatacagagtccagggagactgtactgaactgaagagtcatgggacctcggataaagttaaaaacatttgtagcttcttatttccctttctgtaaaatcccaagtcattgtaaggactgcttccatcaccaactccctgacttcgtcttctacctctctactcttcagtcactcaactctggtcacactggtctcctgctttctgaggactgcagcagggatttatcattctcaggaccttcatttttctttttcacgtgtatgacttgctccctcatattttatgggtctctgctcaaaatgtcaccttatcagagaggtcttcccttactacccaatgtaaataccataactcacgcaatctyccaaaactctctatctcccttacttggctttatttttcttttattcacttattctctgaggtattatatttccaactattcacttgttttctgtcttcttccgctgg

SEQ ID NO: 630783 - DNA, 528 bp, Homo sapiens
cgctataacccccaaagtttcagcacattttttaactgaatacatttcaatagtctacattttgattatgttaggatggccatattcattctatcaycctataccttatattgtttatgttgcaccataccctctttgtggtgagtatattgttatttactgtgtggcgatcataggatttctattttgagcccagtcagacactgctgctataatcattggaatccattactcatacagttgccaaatttagcagatacaatacatgatgcccacttcatttgaatttcagaagaacaactaatattttagtataaatatatcccaaatattgtgtgggtcatacttatactaaaaaatcattgttcatctggaattaaaatttaaacagttatattttatctggcaactataattactagctgaatttcctgcctgtttatcttatagttctcaatgttttctaccttttcaaaatccacatcaagcaactttagcttggccaccttggtctgtgatctgttgtac

SEQ ID NO: 630784 - DNA, 393 bp, Homo sapiens
taaattccagtctaacagttcctttacaaagttgcgtaaagcccccttatatgctagttgtaggaaatatagttattaaaccagactcccagactataacctgtgaaaattgtagattgcttacttgcattgattcaacttttaattggcaacaccgtattctgctggtgagagcaagagagggcgtgtggatccctgtgtccatggaccgaccgtgggaggcctcaccatccatccatattttgactgaagtattaaaaggtgttttaaatagatccaaaagattcatttttactttaattgcagtgattatgggattaattgcagtcacagctacggstgctgtagcaggagttgcattgcactcttctgttcagtcagtaaactttgtta

SEQ ID NO: 630785 - DNA, 645 bp, Homo sapiens
agaccatcttcacttcttgatatatttagaaacttgccttgagtcagacccagttatctcacatgaagtaattttttgcttccattatacatattcaaaactctggccttgtccctgggattccagaaattaaaggaatcaaatgggaactagaagctgagtgggggatctatctggcagcagaagctcttgggtgtcccgtccataggcatttttccctcctgtgccagagggcctggtgaggcactgaggaggactgggaaaccctctcactagggaaaatctgatcctagttgtcacacatgtctcaactggaaaacgatgctttttctgcaaattcctacaactgatactgcctctagggcctggtgaggatccatactgctagctggtgctgctttgtctttttcctcagatactgaatgttccaggccttggcaccatttstttctgctctgatcatggaggctggctcagctgaacttgcagcagttggacttttacctctctgtacatcgatggctagcaccatttcctgttgatgagtgtcttctttgcttttatttttgcttagccaacttccatctttccaaatacctcctttagattttgcttttcagggtgaaagaagaataaagaagttca

SEQ ID NO: 630786 - DNA, 645 bp, Homo sapiens
agaccatcttcacttcttgatatatttagaaacttgccttgagtcagacccagttatctcacatgaagtaattttttgcttccattatacatattcaaaactctggccttgtccctgggattccagaaattaaaggaatcaaatgggaactagaagctgagtgggggatctatctggcagcagaagctcttgggtgtcccgtccataggcatttttccctcctgtgccagagggcctggtgaggcactgaggaggactgggaaaccctctcactagggaaaatctgatcctagttgtcacacatgtctcaactggaaaacgatgctttttctgcaaattcctacaactgatactgcctctagggcctggtgaggatccatactgctagctggtgctgctttgtctttttcctcagatactgaatgttccaggccttggcaccatttctttctgctctgatcatggaggctggctcagctgaacttgcagcagttggacttttacctctctgtacatcgakggctagcaccatttcctgttgatgagtgtcttctttgcttttatttttgcttagccaacttccatctttccaaatacctcctttagattttgcttttcagggtgaaagaagaataaagaagttca

SEQ ID NO: 630787 - DNA, 558 bp, Homo sapiens
ctgcctttgctccttgtagatttcaagggagttgtaacaggagatcctaaactgaaataaattcatccaagcagagcagacgaaggggtcaaagtggctgagacttgccactatgacttctaaggcaggggggttagraaaccagggcccagctgttatggaggcaggaacatttgcaggaatgaaacctgggactattatcaaagcaacctggctagtttaataagctgaagttgagccctgtaaccaatacacagaacagctggtcaagttctatcaagctgaggtcatttacaagaaaagtagaaaggggttgcctggcaagaaccaagttaattaaattatctcctaagaatttcttctggacagtgattattttttaatttaagggacaattttgaaacctaattatccccacaatcaccttcaattcattggcttagtgatttaaatttaacgtgttaaaagtttttatgttaaatatttaaaacacattaaattagtaattttaataaatctaatatctatgtgaagattctaagtacacaagctatttaa

SEQ ID NO: 630788 - DNA, 558 bp, Homo sapiens
ctgcctttgctccttgtagatttcaagggagttgtaacaggagatcctaaactgaaataaattcatccaagcagagcagacgaaggggtcaaagtggctgagacttgccactatgacttctaaggcaggggggttagaaaaccagggcccagctgttatggaggcaggaacatttgcaggaatgaaacctgggactattatcaaagcaacctggctagtttaataagctgaagttgagccctgtaaccaatacacagaacagctggtcaagttctatcaagctgaggtcatttacaagaaaagtagaaaggggttgcctggcaagaaccaagttaattaaattatctcctaagaatttcttctggacagtgrttattttttaatttaagggacaattttgaaacctaattatccccacaatcaccttcaattcattggcttagtgatttaaatttaacgtgttaaaagtttttatgttaaatatttaaaacacattaaattagtaattttaataaatctaatatctatgtgaagattctaagtacacaagctatttaa

SEQ ID NO: 630789 - DNA, 442 bp, Homo sapiens
tgaaagaaattgaagaagacataaataaacagaaagatatcccattttcatggttratattatgtgctaacttgacagggataagagatacccagatagctacaaaacattattttggagtgtatctgtgagcatgttttcactaagagcccaaacaaaacaaaaatgtaggagaaagggttatattatttgttttttatttgtcactctgtttctcccctccatctccctttatttaggattaacagaatatttgtattccttttgactatttgggcataacccttttttaaaaattgctgccttagggttgcactatgcacctttaacctgtcacaatatgaactagttacattaatatagtaccacttctgtaaaatgtagaatgtgcaatattatcattccatttactcccttcttttgtgttatggtttttatatat

SEQ ID NO: 630790 - DNA, 585 bp, Homo sapiens
caatattatcattccatttactcccttcttttgtgttatggtttttatatattatagatcttcatacattataaactttgtttcatttgatttcatgtgttttaggcaaattaaaagaaaactaagtttctaaatttccagtgctcttcatttccaactatagatgtgattttctctgtttctctgctaaagaaatcccttcagtatttcttatagtggcagacctgctagtgaagaattttctcagtttttactcatctgaaaattgtttattttacctttatttttattttgaagtatattttcttgggatatagaactcttagttgacctttcttwctttttcttttctttcagtactttaaagatgcagttcctgatattctggttctccattagttctgagaaggcagcaaccattcatattactgttaccctttatacaacaaatcatttttgtctgctttcaagattttctatcgttagctttcagcagtttaactatgacgtgcctaagaataatattttttttttctttctgagacagagtctggctcctgttacccaggtgggagtgcagaggca

SEQ ID NO: 630791 - DNA, 585 bp, Homo sapiens
caatattatcattccatttactcccttcttttgtgttatggtttttatatattatagatcttcatacattataaactttgtttcatttgatttcatgtgttttaggcaaattaaaagaaaactaagtttctaaatttccagtgctcttcatttccaactatagatgtgattttctctgtttctctgctaaagaaatcccttcagtatttcttatagtggcagacctgctagtgaagaattttctcagtttttactcatctgaaaattgtttattttacctttatttttattttgaagtatattttcttgggatatagaactcttagttgacctttctttctttttcttttctttcagtactttaaagatrcagttcctgatattctggttctccattagttctgagaaggcagcaaccattcatattactgttaccctttatacaacaaatcatttttgtctgctttcaagattttctatcgttagctttcagcagtttaactatgacgtgcctaagaataatattttttttttctttctgagacagagtctggctcctgttacccaggtgggagtgcagaggca

SEQ ID NO: 630792 - DNA, 572 bp, Homo sapiens
ggagaaacattccatgctcatggatcggaagaatcagtattaaaaatggccatactgcccaaagcaatctacagattcaatgctatttctatcaaattacccatgtcacttttcacagaactagaaaaaatatctaaaatttataagaaccaaaaaaacaagccaaatagacaccaaagcaatcctaagtgaaaagaacaaagccagaggcaccacactacctgacttcaaacaataccatagggccacactaaccaaaacagcatggtactggtacaaaaacagacatatagaccaatagaacagaatagagaacccagaaataaagacacayacatttgaccacctgatcttcatcaaagccaacaaaaacaagtagtagagaaaggactccctattcaataaatggtgctaggataactgtatagccatatgcaagaaaatgaaactggatccctaccttttaccacttacaaaaatccaactcaagatgggttaaagatttaggtgaaagacctcaaagtataagaatcatggaagaaaacctaagaaacatcattctggacaagtgc

SEQ ID NO: 630793 - DNA, 546 bp, Homo sapiens
agatttaggtgaaagacctcaaagtataagaatcatggaagaaaacctaagaaacatcattctggacaagtgccttgggcaataatttattactaagtcttcaagagcacttgtataaaaaaaaaaagacaaattgacaagtgggacctaattaaactaaagatctgcacagcacaaaaacaaacaaacaaaaaactatcaacagagtaaatggacaacctacagaatgggagaaaatattcacaaactrcacatctgataaaggtctaatatccagaatctataaggaactgaaacacatcaacaagcaaaaaacaaataacctcattaaaaaatgggcaaaggccatatattagttcattttcatactgctgtaaagaactgcctgagactgggtaatttataaaggaaaaggatttaactgactcacagttcagcatggctgggaaggcctcaggaaacttacagtcatggcagaaggcaaaggggaagcaaggcaaatttttcaagaggtggcaggaaggagaatgaatgcaggaggaacta

SEQ ID NO: 630794 - DNA, 504 bp, Homo sapiens
acctggctatttcttcaaagccagctaggaagacagtctctagaatctgctaagaagacatagtcttacacacataaagcaaacacgggagtgacacctctttgcctttgccattgccattttctgtagtgagaagcaagtgacgggccctgcccatgctgaggggaaggcaattgcccaagggcatgaacagtaggaggtggaatcatggaggactgccctagagtctgtccacctgactcctccaytgtaccaactgagatgaagggaatctgcatataatggagatgccaggttaatggtgactaaagcaaaatagacctttatttctctctcgtgtgtaaaaaaaaaaaaaaaaaaaaaaaaaagataaatccagccagctgcagtggctcatacctgaaatcccagcactttgggaggctgaataaggaggatcgcttgagcccaagagttcaagagcagcctgggaaacatagggaaactctgtctttataaaaaatt

SEQ ID NO: 630795 - DNA, 626 bp, Homo sapiens
catgactggtacatcaggttcatttgttcatctgggaccaatacccttcctatctttgtgatgtgcaatttttagttaatggcttatagtcatggcatctggtctcactcaaggttacctcatggtctaatatgactgttagcatttatagtcatcaccgacagaagggggaacagtagacataaagaaatttataccagctgaagcagctcccttaatcttcctggataccccacagaacactccatctctttggccagttcttagttacatatagctgaaggttacatacaacttagttacacatagctgagagggaagcaaagagaaacatgatttttaactaaaggtattcttgccgaaaataaaaccatgrttcttttactaggaaagcaaaaaataaatattagatgataacttgctgtttctgccatgctggcattcagagccccttacaatcttgccctgactaaatgctgactcttattgtccaatattgaccttcttatggaaactattcacctggacccacctctaccctaaacagaaaaacaatatgttgatccctgcctgtgctagtctagtgtctttacctgggaaagtctcacacattgagttttccatcc

SEQ ID NO: 630796 - DNA, 556 bp, Homo sapiens
tttagatgtaaatgggatcatgaatctaaaatgcttgtgaacagatgctgctacgtagcaaatgtttcaaaaagttagattttgctattacttgtactcaaatttttagtacacataatgtgtgtctcagggtgaagaaaattctcacatcatagtgggagtagatactggtatgttctatctggaaggatgcatgtttatgtccatgaaaagctttaaaaatgtctatgcccttgatgcaacaatctttctttgtaaacttatagaaataaggcaaaacaatacatgtataaggatactcattgtaatatcaatcaagaacaaaataaatgaataaactgagcacccattagtagaagatcgataaaataaagttcaagtttaaaagcaygtacatccatacaatacactgcaaccaaaatgaataatatagatgtggatttaggtaaagaagtgaatgctgctactttgtgcaagtttatacatcaaaatgtttataataatgataaacattttttatagtatgtagtcaggttaatagtgaactaaaaaattt

SEQ ID NO: 630797 - DNA, 556 bp, Homo sapiens
tttagatgtaaatgggatcatgaatctaaaatgcttgtgaacagatgctgctacgtagcaaatgtttcaaaaagttagattttgctattacttgtactcaaatttttagtacacataatgtgtgtctcagggtgaagaaaattctcacatcatagtgggagtagatactggtatgttctatctggaaggatgcatgtttatgtccatgaaaagctttaaaaatgtctatgcccttgatgcaacaatctttctttgtaaacttatagaaataaggcaaaacaatacatgtataaggatactcattgtaatatcaatcaagaacaaaataaatgaataaactgagcacccattagtagaagatcgataaaataaagttcaagtttaaaagcatgtacatccatacaatacactgcaaccaaaatgaataatatagatgtgsatttaggtaaagaagtgaatgctgctactttgtgcaagtttatacatcaaaatgtttataataatgataaacattttttatagtatgtagtcaggttaatagtgaactaaaaaattt

SEQ ID NO: 630798 - DNA, 626 bp, Homo sapiens
tttttttttgcagtgtataatattttctcttatattaagaaaagaaaatcacagaagcwcttaataaaatagagagaaaggaatacagacaggctatccctaagcatttcccctctgcagtcagagattagtgactcttcatcattacaccgaggagctgctctccttattgttcttcacatttttttttcttttacacaagatgaagtactacccaagactagatttatttgagatccagctgaacaaggatgaagccatgtgcagctggtagttgcaaagaaatgaaacttcagacaggttaatgaaaaaagaaagaaacagggcactgaagatgtctgcttgttactgagctataaatcctttctccaattacttctcttccgccagctgtgctatgtgacctgacgctttgcctaggagaccatccatgttcaatagagtgtgttagagcaatagtttacccatacagaaacatgaatatgtttccaaagagaagcatggtgaaagttcaggaacaatataaattctatactgtgctgatctctttttcatatacaaacacattttataagcatgcttcattaactaaataaattatttattatgaagacatacagctgatt

SEQ ID NO: 630799 - DNA, 557 bp, Homo sapiens
aatacttgtaatctgatttttatcttttgttttgtgtgttttcatgccattaaatactgttcaaggaaaatartcacaactaataaatgtggataaaatattttaaaatatatctttgagggcaaaagaaaactaacaaagtaaccaacactgagtgaacaagattcaaaagagcaacacagcaaggaaagatgaaccaaacattctgtgttgattctctcctctaggcattttgtcagtccacaaatggcaatctagagactaacagacctttcagagctttcaataatctcactgtactggggaaataaacattgatgttcagggcttgttaaggtgaagacctgttggtgaacatctttggctttcagtaagaacacataaaggactatctaccccaggaataggaatgcactggaaataatctgcactaacactaaattccagactcaaatcagcttaattcccaattgaattaaagtgatctgccaataatgtctaaaagcatgcttaaagaagtaaattctttctgggtgtgtatactattaccagaacct

SEQ ID NO: 630800 - DNA, 557 bp, Homo sapiens
aatacttgtaatctgatttttatcttttgttttgtgtgttttcatgccattaaatactgttcaaggaaaatagtcacaactaataaatgtggataaaatattttaaaatatatctttgagggcaaaagaaaactaacaaagtaaccaacactgagtgaacaagattcaaaagagcaacacagcaaggaaagatgaaccaaacattctgtgttgattctctcctctaggmattttgtcagtccacaaatggcaatctagagactaacagacctttcagagctttcaataatctcactgtactggggaaataaacattgatgttcagggcttgttaaggtgaagacctgttggtgaacatctttggctttcagtaagaacacataaaggactatctaccccaggaataggaatgcactggaaataatctgcactaacactaaattccagactcaaatcagcttaattcccaattgaattaaagtgatctgccaataatgtctaaaagcatgcttaaagaagtaaattctttctgggtgtgtatactattaccagaacct

SEQ ID NO: 630801 - DNA, 574 bp, Homo sapiens
tgtgctcacatatacataaatatacatgatttcaaaagactaatacttgtaatctgatttttatcttttgttttgtgtgttttcatgccattaaatactgttcaaggaaaatagtcacaactaataaatgtggataaaatattttaaaatatatctttgagggcaaaagaaaactaacaaagtaaccaacactgagtgaacaagattcaaaagagcaacacagcaaggaaagatgaaccaaacattctgtgttgattctctcctctaggcattttgtcagtccacaaatggcaatctagagactaacagacctttcagagctttcaataatctcactgtactggggaaataaacattgatgttcagggcttgttaaggtgaagacctgttggtgaacatctttggctttcagtaagaacacataaaggactatctaccccagkaataggaatgcactggaaataatctgcactaacactaaattccagactcaaatcagcttaattcccaattgaattaaagtgatctgccaataatgtctaaaagcatgcttaaagaagtaaattctttctgg
